United States Patent Application Publication US 2008/0008996 A1 - sequence listing, part 4

SEQ ID NO: 20390 - DNA, 514 bp, Zea mays
  unsure (1)..(514): unsure at all n locations
atcctctgagtcacctgangctgcagctacaataattgttccttattaaagatgaatatgacaatgaatgtaaaacttgtttcaagggtaggatatttctcaatagatgtgttttgactctcgcacagtactgttgactgtgcgagcttcggactcctccctgaaatctcgctgctgatgagtctgttggctcccttctggctgctggcctcgtgaatatgcangttgtantggtggtggaggtggaagttgtggccaagatgcctgtggctggctagccgaagcaacagaagctgcaggatggttgcctacatactctggtatgtanggtgagtgatacgaagcggtgtgcatgacctgcttcggctggttctgctgaactgcaacttctgctatttccttttgtttctgaatggtgacatggcacatctgagagcacctagagggggggtgaatanggtgatcctgtaaacttatacttatagccacaanaacttgtcaagtgtagcacaat

SEQ ID NO: 20391 - DNA, 466 bp, Zea mays
  unsure (1)..(466): unsure at all n locations
gctactgctgtataanaacttactactcgactttttaatgaaccacacaatacatgaactgcacaaagataagatggttgtgcaaaatggcttgtgaaaacaattcaaacaaattgatatatcatcccaattcccaagtacatacaggaggtactcaaagactaagtaattccattgcaacaaatctagagagggaacaaacctgtctggaaaagcggctgtattgaaagggcacatatgattaacctctttcaaattgacattgctgtagagaagcttcttattgctgctatagatgacagttggcctatctgacgaagcgaacacgtgggtggtaccctttgatgagaangtacgaaggctgatgggttgggtcccgagggtaaccttctttctatcaagtcagtcacctgtacttgcattcagtagaaaacttgacaaattaccattcccaagagcacaaagc

SEQ ID NO: 20392 - DNA, 317 bp, Zea mays
agcttttacctgtataacttgaccgggagcaacttgtctttgtggaattataagctaacatacaaggctgtgtgtgtacttctttaaaatctgaagcgctgcggcgcttttgtaatctaatagtctactcttaattatgaacaaaaacatctaatgtccgcgtccacgttgctgaaaatggtcagagagaggcactctactggtgagctcacatctcttatgttactaccagctactatgtcgccatcagctacatatatgctagtaacagactaataggggttctccctcggctctgtgttattttgtacacagaa

SEQ ID NO: 20393 - DNA, 343 bp, Zea mays
caccaaaaactactgagccagtaaagagcccattattgttctttttttatcgcaaaaaatatcaagtggaaagactgttgcgtttatgcctcagaacttcgccttttcaacttccacataattgttcttttcacactttaagattatgagaaccaaactactaaagatggaaatggctgaactcataatttgatcgatatgtataatttcatcagtctagcgtacaacttattctactgacccagggcctgagaaaacaataaacctcaactgacaggtttgcatggtttgggacttcgactgagcgtgtggttgttacctccaattaaactttttcggaact

SEQ ID NO: 20394 - DNA, 418 bp, Zea mays
  unsure (1)..(418): unsure at all n locations
agcttcatctatatcgtctcagactgttgaaaaccagctgtatgtcttcgatgaagttttccgaattctccgttntgattaccacatcatctacgtaggcctccacactcttgccccagtgatcagctaagcacgtttgaatggctctctgataagtcgctccagtgtttttgaggccgaacggcatggaggtataacaaaaagcaccaaacggagtgatgaacgctgttttctcctcgtcttccttcgccaaactaatctgatggtatccggaatagcaatccaagaaagacagcacagaacatccagcggtggagtccaccacctgatctatccttgggagcccgaagggatccttcggacaagtgttgttgagatcagtatagtcgacgcacatgccgccatccactntattctt

SEQ ID NO: 20395 - DNA, 466 bp, Zea mays
  unsure (1)..(466): unsure at all n locations
agcttgtggaggttcttcatccncacatgtgctattcggttatgccacagccagcccatgcaagtcttagccattaagcatgcatctagaccggcctcttcttttgcaaaatcaactaagtaaagcttgccgtctagaatacccttaaaagctagtgaaccatcacatcttctaaagacagacacatctacatttgtaaatagacaattatatcccatattgcataattgactaacagataacaaattatatccaagagactcaactaanaacacattagagatagagtgctcattagaaattgcaattnntacctaaccctttaccttgccttgattcccatcaccgaatataattgaatcttgggaatccttattcttgacgtaggagggtgaacatcttcttctccccgtcatatggtttgtgcatccgctgtcgataatccagcttgaacccccggatgcat

SEQ ID NO: 20396 - DNA, 255 bp, Zea mays
  unsure (1)..(255): unsure at all n locations
ngacacntttcgcttcatttagcttgtggatctcctcgcctatcactctgcgcttctcctcgtcgaatcggcgcagaggctgcctgactggtcgggctccagcccgaatattcaacgagtgctctgcgacgtccctcggtatgcccggcatgtccgatggactccacgcaaagacgtctgcgtttgcgcggagaaagtcgacgagcactgctttctatattggttcgagcccngaaccgatccggatctgcttgg

SEQ ID NO: 20397 - DNA, 409 bp, Zea mays
  unsure (1)..(409): unsure at all n locations
gcttatgaagactcttcattccaacatgtgtctttctgcgatgccagagccagcccatgttggtcttagcaattaaacgagtgtcgagtntaactctatcaaaatctactaagtatagctgaccctctaacactcccttaaatgctattggatcatcacttcttcttaagacagtgacacctacatctgtgaaaagacaggtgtagcccattttgcataattgagaaacagaaagcaaattgtaatcttaagaatctaccagaaacacattgtaaatagaatggtcacgtgatatagcaattttacccaaccctttgaccaaaccttgatttccatccccgaatgtgatagcctcgtggggatcttagtttttctcataggtggagaacatcttcttctcccctgtcat

SEQ ID NO: 20398 - DNA, 473 bp, Zea mays
  unsure (1)..(473): unsure at all n locations
agcttctctctaccgaagcaaccatcatatgtatagtttataattctctctctaatatcaaaataaaatttgttttgcttctttagtggatttatcatcatcaatataaacataaaaattaagagctaaatcaaatactattntgaaacggatggagcattcaataagtaattgagacattattctaacaatataaatgagactagtcgataactcgatagtgcatcgctttttgcgtatttgtgtctagaatagataggtttcacacaaaaatgctaacgtccagtggctatggggcccggtgcgggcgcaccctctcagggtcngccctgctcttaacataaattntctatggataaactcaacataagagatggcattagtagcacacacactagtttattatctagcaatcctctatatgtaaaacgcaagagagttgctaaaatagagaaacctcataatatggacta

SEQ ID NO: 20399 - DNA, 413 bp, Zea mays
ggtgaagggtcttcatccctacatgtgctaagcggcgattcctcactcagcccatgctagtcttagcaattaagcatgcgtctagactggcctcttcttttgcaaaatcaactaagtaaaggttgtcgtctagtacacccttaaaagctagtgaaccatcacttcttctaaagacagacacatctatgtttgtgaataaacaattgtatcccatattacataattgactaacagatagtaaattatattccagagactcaactcataacacattacaaatagagtgctcatttgagatagcaatttaccttatccttttaccgtgccgtggttcccatcaccaaatattattgaatcttgggaattcttgtgcttgacgtaagaagagaacatactcttcttcccccgcatat

SEQ ID NO: 20400 - DNA, 322 bp, Zea mays
  unsure (1)..(322): unsure at all n locations
tctttctcgagtgttgtggtcttgccactcggcaaagaagcaagctntgccgattgcctcctagtgcactangcanaggaaaactgacaaaggggcccggtgatgatcctttgccgagtgccacctaatactctctggcaaggagctggcatatgggcncatggngagcttcttcgatgagcgtaagtacagtagacactcggcaaagagtgaggctntgccaagtgtcaccgtggcactatgacacagtctctgtcgccgtcacccggcgcagtgacaatgactnttctttgtcgagtcccgaatgacactcgataaagtc

SEQ ID NO: 20401 - DNA, 473 bp, Zea mays
  unsure (1)..(473): unsure at all n locations
gagcaggagtggcaaccttttcaagcgaaacttgctctgtggccttttcttttgntaccctttcttcaatttccgaaggtcttttctcagcgagctctgaaggcccaggttcgatactagcttggattactgcagctttaattttggtcggctttgtttcagcttaggtttgcacttttgaagcctcggcgattntcccttgaagagtagagcttaaagtctttactgtttctagcacatctagtacattagccatccttcttctcttangagttgccgcanaacgtttttgtgcctccggcactactacttccgttgaagggcttaaaanttctagncgttttgtttcttcaatatttggttnttcagctntatcttcctcagtctttgactcagctagttcaaccgaagcttccttcggcattntagctggctcttcagccttctatgtangaggaatgggctcttttggt

SEQ ID NO: 20402 - DNA, 416 bp, Zea mays
  unsure (1)..(416): unsure at all n locations
tcagctntagctttgctcctagctctcgctgatttcaagcttnnttgttctttctgttaaagacatggtngcaccatgtctggggaaaagatgactgaggaaaagaagatgactgatgagacgaagctaactgaggagacgaagctggttgaagaatagaaagttgcggatccttttatcgccggattttttgagtctatgtcaaaacgaacacagagaagaatacttaagaggtatttgaggggttgtctgaagatactgatgatactgagccatgtcgtcttcgaaaaatcaactattaaacagagtcatattgacaacatgagaggaacgtactntcgtgacatgtctatcgtgagagatggtggagacaacattgtccctgctcctgaggaggatgaaagttgtatttatcg

SEQ ID NO: 20403 - DNA, 449 bp, Zea mays
  unsure (1)..(449): unsure at all n locations
gcttttgtgcacttactaccttgngcaagaggagggaataccctatacctctcttgaaccctatcttccaaaaccatggttgagaggggggagagaataagcaattgtgcaaaccatgagttaatctttaaccaaactttaagtaactttataaccagcaattgtgggaaggaaatgttgcaaaaagacccctggagaaaccccaaatccattccttaagtggagagagagctagagctctctaattctctctaagtccaaaaactacacctacactaaagatcaaccgttcaccttgaagatggcaccaaaaccacctatgttctataccaaanatgtggcataccacctagggaacccactgngaaaaagtgagcccgagaccttgacgtttgacatgccttggcatggtttttgtcatgaagtgggcagagtgacataccttgatt

SEQ ID NO: 20404 - DNA, 406 bp, Zea mays
  unsure (1)..(406): unsure at all n locations
tcttggggctcagctccaccgncaccaccactgcaacctacttatttctgttaccagcagccagaagggcgccaacactcccaacaacaacatgacttcagggaggagtccaaagctcgtacagtcaatagtactgtaccagaatcaaagcacatatactgagcaatatcctgcttctgaaatacttttatgttttaggctattttgctttttgaataaggaataagcaatgaaaacttagttntaatttcttataatgattttgcttctatcagaatgaaatatatcttcttcacagatttacgaagctcaaaagtcattcctaagggaatgcatggccaacataaacgaagctacaaaaagtcggtcctaagggagcgcagccgtaagtttgtgctcaaaagtc

SEQ ID NO: 20405 - DNA, 483 bp, Zea mays
  unsure (1)..(483): unsure at all n locations
gcttatgaagattcttcattccaacatgtgctatttggtgatttcagagccaccccatgttagtcttagcaattaagcaagtgtcgagtntagctctatcaaaatctactaagtatagctgaccctctaacacacccttaaatgctattgaatcatcacttcttctaaagacagtgacacctacatcagtaaagagacaattgtagcccattttgcataattgagatacagaaagcaagttgtaatctagagagtctacaagaaaaacattggaaatggaatgggcaggagatatagcaactttacccaaacctttgaccaaaccttgatttccatccctgaatgtgatagctcggcgaggatctcggttgttctcataggaggagaacactttcttctcccctgtcatgtggtttgtgcacccgctggcgatgatccaacttgagcccccggatgcataaacctacataacaaggttaggtc

SEQ ID NO: 20406 - DNA, 344 bp, Zea mays
tataaatactaagctagctcaagtctgctcctttttctccacagcgcgaaccttgctggatcactaccccacttacaaagaatgacggtataactctagaatcatgggaatctgaactccttgaaacaccacataataacggtgtactggtccttctgctgctgctgctgcttgagctggctgccgagggatcactggcacacggttgattctgggagaaccttcttcttgtcgtctcttcactatcctgattcctcttctcactgttcacattttactgactctatctttctctttgctctttccactggaggagtctgtctatgagtattaccatcatacag

SEQ ID NO: 20407 - DNA, 111 bp, Zea mays
tctacttcatcatcactagactcatcatcacttgaagaagcatacgtaatagtacttcgagtatttaccttcttctccttttccatgaggcacgtgtgatgctcgttgggg

SEQ ID NO: 20408 - DNA, 375 bp, Zea mays
  unsure (1)..(375): unsure at all n locations
cacacaatgctactgtcatttggcgattgcgtttaacacattggtacatgcgggatgtgtgggtgctgatcgtggnacaactcaaacatcatcaaagcccaagatgtcatctgcatgctcatgagtcaaaagaatgtgttatcaacaaagaggagatgtgagtgtaccatgggtatgtagaacactgaatttatttttacagccatagtgaacactcttttaggtggccttttgatttgaataaaccactataaacattgatttttttctttacagtcattgtgaacacagatacttaagccaattatacagttgtccatcacattcctcgtatgctttcattgctcttcgccctgctgtacctcggtcgtcgtc

SEQ ID NO: 20409 - DNA, 496 bp, Zea mays
  unsure (1)..(496): unsure at all n locations
agctntagcataatgcccaatctgactgcacttgattcatgtagggcctgtcttttgtcctgtaggcctcgccggggtgccagtgggggcagcctgacgagtgtggggtgtctgcagagtcccctatggagcgtactaagttggacgtggtcctccacctggatgagctggtgtaccctgtggcggcacatagcaaggacgaatattgctgctacccttgccctgngcaatggccttcctcttcaaatctcccaattgaacacgcttgtgttcaatagttagagctttatcaaggagcctctgaaatgatggaaatgtatgagcaaccagtgcatactgtagtggcccattgagtccttctttgaagtgctcttgcttcctttcatcatcagccacctcatcaggagcatatctgaatgaatttgtcacgatactcgctgacagacatgttgccttgcttcaatgacaganattccttctttataatcttcatcag

SEQ ID NO: 20410 - DNA, 477 bp, Zea mays
tgtgattgtgtatactcttggaagcactccaagcaagtaagctatctataagtgaccagcttcatgctgtacgggatatcaatttcagaacttaagtccattcaaaggaaagcactgagtaatgaaaaacgagaaaaacgaagatttgcatttcggggtctgtttgggaaatggacgtttaaagcatgttctggttttggtggcatcctcactaaactactctgtttcctttttcagttcatctaacttagataccaaagcattattaacaatgataataaactacctggataactctgttgtgatacttctggctaagatagtgaccaattgtatcaagaaccaagtttctcaccccaccaccaaaatatacctatagagatgtgattgggtaagctccatacgtagaggcttatcagaaggtcaatgtttatattaccatgcatggagtgaaataaatggatttatgtctaacta

SEQ ID NO: 20411 - DNA, 487 bp, Zea mays
  unsure (1)..(487): unsure at all n locations
agcttctttcagctgatgctacagtaacaggcatggtaaataaaatccgataagcaatagaaatattaggataacaatccacttctctgacatgctcaaaaatctccatagcagacattggtttatctgataaagtcaaccgcagaacactaagctctgaaattagatcatttaaatcaacatcacatgagccatcgaaagataaagtactngcaaagttggacaatggtctcttaattcaatagtctccagcgacttcaaagttgttgaggtcatcaaaaacccaaagatacctttgaatgattggagttcttcaaatctactttntaatgaactagttgcaatatcaaccatcaccaanaagtaattaacttcaaaagccttttgaacttctagattntcttcctcattgctagtttcatcatagtgtttcttcctagtagcacgacgctntactggaaatgatggttgtaaaccaagttcggat

SEQ ID NO: 20412 - DNA, 465 bp, Zea mays
agcttaacttgagaaacatgtgcaaccacaatggtttaatgggacgcacttgactaactaattatgaaagctagtggaagactactgtcggagagggaattctccggccgggtggcggagtgcacccgccctaaatcctaaggtgaggagggggcttaagcgttttgcctgttggtagatgcacgatgaactcaggaacacgcgaggatttagagtggttcaggccaccggagcgtaataccctactccactgtgtgttggattgctatggaagcttgagagctgagagtataagtctgtctctatgtgagtgttggagtgtgtgaacttcctttgtaacgttgcatgcctccccttttataacaaaggggggcacgtacaagggtactgagccccgacatgtgggcccaggaacataacagatgtagtacttggagctactaatgggtcgtgctggagcaatct

SEQ ID NO: 20413 - DNA, 447 bp, Zea mays
  unsure (1)..(447): unsure at all n locations
agcttatgacagttggaggtcgtcttgtattgttttatttgtactgactagngtagtaatgtttatgttatctttttttagtcccaacgggtgtcctanaaaaaatagattactattgttctagattcttctggcaaggggatgaacataagaaaaaatatagactcgttagatgggatatcctaaaccaacctaaagagcaagggggttaggaattcagaatatagatgtatagaataagtgttttcttagtaaatggttgtttaaattatttaacgaggatggcctttgccaaagattacttctacaaaaatatttaagaaaagatactctgtccaaagttgcaaggaaaccaaggaattcacattttttgtcggngcgctaatgaaagtcaaagaatcctctctaagtctacgttcttttatccctaaggatggtaatcaaatc

SEQ ID NO: 20414 - DNA, 459 bp, Zea mays
  unsure (1)..(459): unsure at all n locations
actaagctgaataggccttcccgagcagcncattacggtctagttctttgcacccaataaaagaaacataactttgcgcctaaagaacaaaaggacttgagagataaatcaaagcagcaaaccttgaaagaaggttcgtagatatactctagtatttaaaacaacaccacttgaagagcaaaaatgcatgatatgagcagataacaacatctacttaaaagactcatatgtttgcagcactcaaaatgttgaaatgtttcagtctattntctattgcattgtaagttctttttaccgacaaagcaccaaggtntcttttaccgacaaagcaccaaagttctttttaccgacaaagcaccaaggggggcactgaaactaanacaagaccaattcaatcttaaaccaaaacactgtttganaacaatcgttgcggtggggcaactgtattgagatgcttga

SEQ ID NO: 20415 - DNA, 430 bp, Zea mays
  unsure (1)..(430): unsure at all n locations
agcttcagccggtcctcgctgtcatgttcttcaccatctttgtgataagtacgtacggtcggtaatcctcgctcacagttgtacaagctggttgtgttatttatcaaccaatcaaagtagtctccacgtacattaattatatatatataacaaatattacatgaccatcgtcaggagcgaatggcgagcgatgcaacacgtcgagcatcgcggtggacaccgtcaactccggcgcgacggtaccctgnggagacaccatcttctcggtggaggtgaagaaccggtgcccatgcgccgtcaggaacgtgcgcctcgacggcgggggcttcgcgaccacggtggacgtggaccangccgccttccgtgccgacggcggcggcggcggcagcggcgtctacctggtgaacggcggcgagccgatcgcgagtat

SEQ ID NO: 20416 - DNA, 341 bp, Zea mays
ggcatgaataagtgtcttttctgttgtactctactacacttttgctagggattggcacaactgcattcgaacactttatgagaagaaactatggcggtctcctcgaagagatgaactttatatcaaaacgcatgcaagacatgatggagttgcctggggtccagcagaaccaagtattgtcagtgtgtacgtcagacaacttcaatctaacactacctctggtcatagacattccattcccttacgtggacgcacttaaagcattaggtgagcgcgtcctgattgaatgaatgatctatgtcacaaagtgatgcccttgctggcgtttgcggagaaaaaga

SEQ ID NO: 20417 - DNA, 467 bp, Zea mays
  unsure (1)..(467): unsure at all n locations
agcttgccaacgaccaattcaaggtctatagcaacgcttggaacatccaacagctacgtcgcttctacccttaagatgttttaagtcgttcttgtacctcgtttacatacataaatagagtctaaccgtcaaggaagggtcagccttgcctcggcaaagcccgaccctccctcgggggctagaaggggggaaccccctctgcgtcaaaattntcctcggaaaagttttccaccaaaacgacttttgtgtttcccgactatatcggtaacagaaccccgcanaacgaataagagcgcatgtaagcggcaaggccgaccgagccgagggactcctacgcctccgggatacggatacctcactcgtcaccttccgcgaanaataactcttactcggataagcaattctgctactgacgaacgagtccggatactcgaaacaagaagaaaagaaacgcagctntataacac

SEQ ID NO: 20418 - DNA, 341 bp, Zea mays
  unsure (1)..(341): unsure at all n locations
cgccagtacctgtcaaaacagcagcatctaccagcacattatcttgttactattcccataacttggtcgntcgcgagctggggattggatatgattggacctttcaaaaaagctcaaggaggatacacttatgtactggtggctatcgaccaattcactaaatggatagagttcaaacctattggttctctaacttcaactaaggcagtggaattcatacaagatataatatttaggttcgagataccgaataccatcataaccgaactatgatccaacttcaccagttcggaattcttcaatttctgtgagcaaaagagcattcagatcaaatatgcctc

SEQ ID NO: 20419 - DNA, 482 bp, Zea mays
  unsure (1)..(482): unsure at all n locations
gatcccttatcttattctccaagccttcaattaaaatttcgcttntcttatctctgttatcctgctgcattgtcaatgctttgctcaacagcatgctctgtaaaaacaaacaaaggttaaaccactcaatctatcacaaaggtatgaaaatttagacaaaaaatctcacctctgaaatggaataaattaagctaccaacaatatatngtcatcggtagcagctgatatcagtctctagcttcagaaagccgacactcttttgataagtgctgactatctttgccccgacgcggtcgcggatacattcaaagatctgctcataaacgccacctanaagcaaagacccaggttggtatccacacgacacagtaaattcttttaattctaatttctcttcttcagaaagctcctgattatccaggtgccgaaggtcgaaatcttctccgcccgaaggatcggtgtcaattttcctttctttactt

SEQ ID NO: 20420 - DNA, 406 bp, Zea mays
  unsure (1)..(406): unsure at all n locations
tcgtgaagatattntncgaagctacacttccgaagatcaatagtgtatcttcttgtgacttagcatgnatttcccctttttcaaaacattcttctgaagatcgatattgtgtctccttcttgtgccatatgcagcatgatgtatgatgcttatgccatgcgaaatgatgtgatgatgttatgctatgtaagatggtatttattccgaagatacacgcacatccctgtaataaacacataatcttttaaataacgttgacttttcgctgaagcctcccttatgagcttcttcgcctttacttcagcggaatcagcgtttatttttcgctgtaagcctcccttatgagacttcttcgcttttactttcagcggtattcacgttgacttttcgcgctctcgcttttact

SEQ ID NO: 20421 - DNA, 180 bp, Zea mays
tgcaagcttcccccagctgccaccacgtcagcatcgactgtcttattcttctctccaccaacgccgcaccggcgaacgcgggccgctccaaagcgcaccggcaggtcctcgctcccgttcttgccacgaaagcgaggaggtggacggaatgttgcatcctaactgggcagcaacagttcg

SEQ ID NO: 20422 - DNA, 402 bp, Zea mays
ctatatataaagctagtttatcctatttatatgttcttcctattggacatcttcagaatcgtcaacagagattagacgaaataggagatggttttgacaccgtgagcttgcctatgatagatagaccagcaatcaaatttgctttcattggttaagcaagatcaccccattagagttggcaaacaacgtccaaaataagttagcaaagtacctaacaaattatacttaaaaatgagagaaatacctttgcgcaaattttcgtgcattgccacgaaagttaaaaattagtggtaaatatagataaaggatgacaaacatcactatgataaatatgtaacttagaaacggtaaaagttggtgctttattctgaacacaatttgaagaaacaaattataaaaaaa

SEQ ID NO: 20423 - DNA, 413 bp, Zea mays
  unsure (1)..(413): unsure at all n locations
agcttatgccgagattttaatatgggcagntaaatttttattatgcttatctaggcgtgcagttaaataataataattntggcttgtgtagtgaggtggtgacatgccgaagtagtcattgcttcctctatgtttttaagtcgagtcaaaatgcggggtactagtagtacgctaagcaggcggtgttccaaatagataaatcgggtgatgtggtagtcgtcaagcatgatagaggttgagtcacttangttattaattgatgctcgacatgtgaggtctcctaaaatatggtgttttaagtgacttgtgccgtgtccagtttaagttgagaaaatggttaagaaaaactaattaacctcttccacctatgnttttgaagtgcgaagtctaaaatactttgctaagtgtatact

SEQ ID NO: 20424 - DNA, 425 bp, Zea mays
  unsure (1)..(425): unsure at all n locations
agagcacattntaggactaacaaatgttcattttgagaaagactggtattgtagcgcatgccaagcaggaaagcaagttggcactcatcatncacacaagaacatcatgactagtgacaggccattggagctcctacacatggatctattcggtccgattgcttacataagcatcggcgggaagaagtactgtctagatattggggatgattattctcgcttcacttgggtattctttctacaggaaaaatctcanacccaagaaaccttaaagggattcttgagacgagctcaaaatgagttcggcttaatgatcaagaaaataagaagcgacaacgggacggagttcaagaactctcaaattgaaggctttcttgatgaggaaggcatcaagcatgagttctcttcttcctacaccccacaac

SEQ ID NO: 20425 - DNA, 339 bp, Zea mays
  unsure (1)..(339): unsure at all n locations
gtagcatatgctaataatatactttttgactcaagcctagctacaggtgcgtaggtttcaccaaaatccacaccttctactatggagtatcccttggccacaagtcgagctttgttccttgtcaccacaccatgctcgtcttgctttgtgcggaagacccatttggttcctacaacattntgattangacgtggaactaaatgccatacctcattcctagtgaagttgttgagcttctcttgcatcgccaccacccaatccgaatcttgaagagctctctctaccctgtgtggctcaatagaggaaacaaacgagttatgctcacagaaatgtgcaaca

SEQ ID NO: 20426 - DNA, 374 bp, Zea mays
  unsure (1)..(374): unsure at all n locations
gaatatccgagncaacgcaactctgttntccaagtttatgagcctcatgtgaaaattatcgaccagcaaaggcgtggcaatcgactcctctatagagatagagatggggtccaaaacgaaggatttgctcttgagttcttgctccaaaatgtcgatacacaagtaagccttacttttctcctcgtacttgtccaacttcctattgcagtctctctctcttgtcagtctcttgcagatagtaaaagcatcgcgcccatccagggtcctttccagcacacaggctcccctctccaccagcgaaagaatgatgtccggctctcttctcatgcaagctatgtgcagcggcgtatacccaacgctgttcttcaagttca

SEQ ID NO: 20427 - DNA, 475 bp, Zea mays
  unsure (1)..(475): unsure at all n locations
tggaatatctcctttctttcgttgcacaacatctatccgtagatttctactgcatagttccctgaagaaggccccagctctgcaattgcttcatatacatccttcctcaccagtcctctaaggccagcgggtatgattctctgtaagagtatgtggcaagaatgtgttttcagttntccaaccacctttgaaccatcttcacttatgtatcttgctanggtatccgcanatccatgaggaaacttgatacctttgaggaacttgcgaaactcgactttctgaatccttcccaacacatatggagaatgtggagccctgcangccgagtngccatcttgtngcaagtgcagttcgggtcttatgcccatatcatacaaatctagacttgcattatgtgtgtccttggacttgcctggtatactaagtagtgtgcacagaatattntcacatacattcttctctatgtgcatcacat

SEQ ID NO: 20428 - DNA, 500 bp, Zea mays
  unsure (1)..(500): unsure at all n locations
ggatccttaagtcacctgcggcatgcaagctcgtgaaggttcttcatccccacatgtgcttatctgtgatgccacagccagcccatgctagtcttagcaattaagcatgcatctagaccggcctcctcttttgcaaaatcaactaagtaaagtttgtcgtctaatacacccttaaaggctaatgaaccatcacttcttctaaagacagacacatctatattagtgaataaacagttatatcccatatggcataattgactaacagataacaaattatatccaagagactcaactaanaacacattagatatagagtgctatgatgaaatagcaattttacctaaccctttaccttgccttgattcccatcaccgaatattatngaatctttggaatcctttgttttgacgtaggaggtgaacatcttctttctccccgtcatatggttcgtgcatccgctgtcgataatccagcttgaacncncggatgcataaacctgc

SEQ ID NO: 20429 - DNA, 472 bp, Zea mays
  unsure (1)..(472): unsure at all n locations
ggatctataagcacctgagcatgcaacttgaaagtatctatatacagtccgaatgattgttgctttcttcgaagggttctctgtcaaaaatattcctcgtggagaaaatgaatacgctgatctattggctaagtcagcagcccaggggctgcctgtaccttctgaagtattttttgaaataataaaagcaccttcggtcgagcttcttgaaagagcaatccttaacatatcccctgtttatagtgaagattggagaactgagatcatctctttccttcagggtaattntctttcagatgacgaagcttataacaggagaatagaagcaagagctcgaccatatgtaataatagaaggggagttatacaagcgcggngtctgttccccattgctcaagtgcttatccagatccgaaggtatnagaataatgaaggacatacatgcangtctgtgtggatctcacattggatct

SEQ ID NO: 20430 - DNA, 356 bp, Zea mays
  unsure (1)..(356): unsure at all n locations
accgtcttgaatctcttgataatgagggccatctcttcatcattaagaccggccgcctcaatttgcgccaccttgctaggtagcgcctccttgttccttgtggctctgagagcaaaagggtgcggctcgttgatcggtccattcaaggcgtcgtccacatacctngcctncttgatcatcattcgcccgctgacgaatattcctaagacttcttcgggcgacattntggtgtacctgggattctcacgaatattattcaccaaatgacgatcaagaacggtaaaggacctgagcattagtctgacgacgtcgtggtccgtccatcgcgtgcttccgtagctccttatntttgtgat

SEQ ID NO: 20431 - DNA, 498 bp, Zea mays
  unsure (1)..(498): unsure at all n locations
acctgcagctgaagcttacatcgctggactaactcggctgcatcactctttgttgtcggccagnagaaaacagacctgaagaactagacctgaagaccttcccaaccagagttctagatgctacgtgtattccgcactgtccggcgtgaatcttatctagcagttgtctcccaataaccgaggaaatgcacttcatgaggactcctgttgcaccccttctgtacagcgcgtcccctatgagggtgtagtgggctcactgtcttgcgaggcgttctgctgcggctttatcatccagttcttcttcattctttatatacctgataataggccccctctagtcattagaatctgactctagctggctcaaagcattgcactcttttgcctgatctgaagaaatgcttgggcgtggacctcgtggacgaaaactccangtggacctgagctcgacaggatcctagttcgacacacgtttctgctgattgcatctctttcaca

SEQ ID NO: 20432 - DNA, 342 bp, Zea mays
catcttatccaacattaaatgttctcctatttcttaacttattggactttctgtgaggctttgcatttatgacaccttaaaaatggaatgattatgaagctctctatagacttgactcaacagcatgttggttaggtcttgttcatgttaagcgacatattgatcaggatagtgtaactgaatttaaacattcttgatttatgtggtgcatcagcggcgaaaactaagatgtatcacagtttattattgtatcatgaattattattatcttcgcattatgggtcatctcaatgtaccattgactctaggattaggatcatgggttaaaaatgctaccatttt

SEQ ID NO: 20433 - DNA, 490 bp, Zea mays
  unsure (1)..(490): unsure at all n locations
gctttacgctggcgggagatttactccgatgtgtggatgtaaggcggtcgtgagatggctgatgaagcgattaanaaaatgaaaaagaatctcacgatgctcaagaaaaagccaagcgagttgaagaagctgctgagcgcgcaaggcttatatgtacttttactgaggtttagcttcggagttcgtttttagcttcagattaaaccaacatttttttattgtagctgaactttcacctccaccggagccatataaccccaaagctgacccaaccatgaaggaagcgttagatatgataagaatcgataatgaagctgttgacgaagccttcgtcagactgctaaatgaagttgcttgaaaagtgctgaaggaagacctaatttttgtatacttgaaagtgaaatgcttgtgtatggccttcgtcttttgtaagaaacaaacatcannattttgtatgatattaatgtaatatatntctttgtgatgcatg

SEQ ID NO: 20434 - DNA, 398 bp, Zea mays
  unsure (1)..(398): unsure at all n locations
ntactctgncattcacttgttgctcttagttctggctcaagcagattggtcatgcagattggataccggcaacgtactaagcaaatgtcccgtttggctgaggtggactatctttatgtggggttaagctcaagcagtttcttttagttggtcaggtatttattattagtagaagccaagttttatcatataaccaatcctgtgaaccatttcctcatcgaggaaacatcattatcatcatcgaaccataaaccatatatagaaccattgtgtctcacaccatctgtatctctaatcatagaggatcccaaggccgctcttaaccatgagcatggctaatatatcagtttctaatcctctgcagaggtcgcacactttacccacgagtcgtgattccg

SEQ ID NO: 20435 - DNA, 472 bp, Zea mays
  unsure (1)..(472): unsure at all n locations
gcttgacaatgaggaaatggcgctcgtcatcaagagcttccgccaaatcctcaagcaaaggagagggaaagactacaaatcccgctccaagaaagtttgctacaagtgtggtaagcccggtcatttcattgctaaatgtccattatcaagtgatagtgacaggggcgacgacaagaaagggagaagaaaggagaagaagaaatactacaagaagaagggcggcgatgcccatgtttgtcgggagtgggactccgacgaaagctcaagcgactcctccgacgacgaggacgctgccaacatcgccgtcaccaagggacttctcttccccaacgtcggccacaagtgcctcatggcaaaggacggcaaaagaaagaaggaaaatcaagatcctcactaaatatgaaactctagtgatganatgctagtgataggaggatacttacgtactctntttgcccatctaacatggaac

SEQ ID NO: 20436 - DNA, 374 bp, Zea mays
  unsure (1)..(374): unsure at all n locations
atctcggctctactgtctttgtccacgtgaccagcaataacttgagaatcgggtttcaaaatagcccttcttattcccattgcccttagttntcgaagccccaacagaagtgcttcgtacttagcaatattatttgtacaactgaaatccaacttgactgcataacatgttttaattttagacggtgccactagaaccgcagctgctcctgcgccgaaggttctccaagaaccatcgcagaacactgtccaagcttcggtatccttgcttggcccttcttcatgagcccctggcgtccagtcagcgatgaagtntgctagcacctgggattgaattgaagatctgtgtacataatcgatgataaattcgttgag

SEQ ID NO: 20437 - DNA, 396 bp, Zea mays
  unsure (1)..(396): unsure at all n locations
atcaaatggatgtgaaaagtgcctttctctatggaccaatcaaggaagaggtctatgttgagcaacctcccggctntgaagacagtgagtaccctaaccatgtttataaactctctaaggcgctttatgggctcaagcaagccccaagagcatggtatgaatgccttagggattttctcatcgctaatggcttcaaagtcggaaaggccgatcctactctatttactaaaactcttgaaaatgacttgtttgtatgccaaatttatgttgatgatattatctttgggtctactaacgagtctacttgtgaagaatttagtaggatcatgacacanaagttcgagatgtctatgatggnggagttgaagtatttcttaagatttcaagtgaagcaac

SEQ ID NO: 20438 - DNA, 452 bp, Zea mays
ttaggacctataaaactcagcttcttagggacaacacgtgatagggttaactaacgtgcaattcgaaaaagatagaccttgtgcagcttgtcaagcaggtaaacaagtgggaggagcacatcacagcaagaatgtgatgaccacatcaagacccctggagctgctacatatggacctcttctgacccgtcgcctatctaagcatatgaggaagtaagtatggtctagttattgttgatgacttttcccgcttcacttgggtgttctttttgcaggataagtctgaaacccaagggaccctcaaacgcttcctcaggagagctcaaaatgagtttgagctcaaggtgaagaagataaagagcgacaacggatccgagttcaagaaccttcaagtggaggagttccttgaggaggaagggatcaagcacgagttctccgctccctacacaccac

SEQ ID NO: 20439 - DNA, 462 bp, Zea mays
  unsure (1)..(462): unsure at all n locations
gcttctacatgagtagagcgagtgttattggtgttgcctctgtgtgagttanagagagtgttgttgttggtgcttctgcatgagtctattagtaagagtgagcgtggctgtgagttaaagtgagtgtgagtctatgatgagattgattcaaaactatgtttgtaataactttgaacatttggatttgaaaatgagttagtcatactatttttttctttctagggtttctcatgaggtgtgagttnttacctagaaatgtttaatgaggtagcattgcacaaaaacactcaaaatttgatcattcttggactttatgaggtttcttttagttntagtaacttgtgatcagtgaacgaagctgagtaattgtgaatntgtgatctgtaatttntagtgacttatgatatntaacagttagtgaactcatcgtcttttgatatgagagctntggatcgcaacact

SEQ ID NO: 20440 - DNA, 309 bp, Zea mays
  unsure (1)..(309): unsure at all n locations
actacactcggcacggtaccagcagtccctgcgacgctaccacgcccgaggggtccggccccgagacctccaggtgggcgacctggtgcttctgctgcggcaagacgcccgagggaggcacaagctcacgcccncctgngaggggccattcgtcatcgccaaagttctgaagcccggaacgtacaagctggccaatagtcaatgcgaggtctacgacaacgcttggaacatccaacagctacgtcgcttttacccttaagatgttntaagttggtcatatacctcgcacccacgcaaagtttagtcatc

SEQ ID NO: 20441 - DNA, 493 bp, Zea mays
  unsure (1)..(493): unsure at all n locations
agcttatctttttccggcagcgggtcaagtcaacttgtatgctatcatatctcggcatctataggctgtacagtgccgtgctcgacaggacttttgaaaaggatgaagttaacgcccgacgggtcatgttnttatcagcgcgccatctctcagacatgtagatcctcgcgtagaacgatacctaattagggcccgtttggttattggactaatatttaggtcctcattttaatcccgtttagtacctatttttcaaaccagaggactaaattatggactaattgactttatggngtgtttatttgagaatataatctgcccccttagtctctagtcccgctaaaaagactaaagtacaacatttactccaattgcttttgcctagaanactggcatgaaagaagaaaatgtgtatttggtctttatatgtngcnnattaattaattataatcntgttagtccctacaaccaaacagggtaggatggactaaac

SEQ ID NO: 20442 - DNA, 407 bp, Zea mays
  unsure (1)..(407): unsure at all n locations
tggatgtgaaaagtgccttccttaatggaccgatcaatgtatatgtctacgttgagcaacctcccggctctgaagatagtgagtaccctaaccatgtctataaactctctaaggcgctttatgggctcaagcaagccccaagagcatggtatgaatgccttagagatttccttattgctaatggcttcaaagtcggaaaggccgatcctacgctctttaccaaaacacttgagaatgatttgtttgtatgccaaacttatgttgatgatattatatttgggtctactaacgaatctacatgtgaagagtttagtaggatcatgacacanaagttcgagatgtctatgatgggggaagtgaagtacttcttcngatttcaagtgtgataagtccctataagggggggg

SEQ ID NO: 20443 - DNA, 393 bp, Zea mays
  unsure (1)..(393): unsure at all n locations
tgcagcttcttaaagctggacttcgggtcccctaattgttttgttgtggaagctctgaggacataccaggtttaccttcatcaaattacgcccgaagcaatcataagaatggcgatcttcgtatgggctgtaaggagtcaaggcttggagccaaatgcaaaaagtttctgcagtatgcacgaactgttatatgagacaaaaccctgnggtaaggagcagaatcataacaattttggctgctatagcttcgttgctcgctctaagtcaagctgccccgtgccaacctttcggaaaagatgggctggagattggatgaaagaatggatctatgtgaacaatgatttgaaggcacgagatgatatcaagggatagttgacgccctatctggcaacg

SEQ ID NO: 20444 - DNA, 410 bp, Zea mays
  unsure (1)..(410): unsure at all n locations
cttcatccgcacatgtgctaagcggcgatgccacagttctttccatgctagtcttagcaattaagcatgcatctagaccggcctcctcttttgcaaaatcaactaaataaagcttgccgtctaatacacccttaaaagctaatgaaccatcacttcttctaaagacagacacatctacacttgtgaataaacagttatatcccatattacaaagttgactaacagacaacaagttatatgcaagcgactcaactaaaaacacattagaaatagagtgctcggaagaaatagcaattattcctaaccctttcaccttgccttggttcccatcaccgaatatgattgaatcttggggatccttgttcttgacgtangaagagaacatcctcttttccctcgtcatgtgggtt

SEQ ID NO: 20445 - DNA, 400 bp, Zea mays
gtattaccgccgttttatttatggattcttcagcatagcaaagcccttgaccgaacttctcaaaaaggacaataagtttgtgtggactcccaagcgtgaagaaagtttccaaatcatttaagagaaacttacaacggcaccagtcctgactctgccagacatacaccaagatttcgtcatcttttgtgatgcttccaagcaagggcttggggtgtgtcttaatgcacaatgagaaagtcattgcttatgcatctcgcttactcaagccgcacgaacagaactatcctacccacgatctggaattggcagccatagtgcacgccctataaatttggaggcattatctgattgggaacaaatgccacatcttcactgatcacaagagtctaaagtacatttt

SEQ ID NO: 20446 - DNA, 364 bp, Zea mays
  unsure (1)..(364): unsure at all n locations
ggaccttaaatactaagcttgcattgtgaaggggacctcagaaaggatgtgaggaaggaaccttgtggtgaccaatgaagtgtttgatgtgggcgcaaaggtggtgtgtgatacccaattttcaaaaggaagagaaattgaagattattttgtttccttggtttctcttccgggtcctgtgctacaagggtttggaacttttatgaagcattcaccagtgaaacagaagaattcttgttggactattgccctgngatcgggaacggacgtgagagcgagtttgggccgtggatctcaatccggcggtggngagcccattaattgtgccaccttaaccctagctggccctcccctataaaacttt

SEQ ID NO: 20447 - DNA, 315 bp, Zea mays
gagcttcatgcctccaatgagggcttgcccactcatccacagtgatgtagatgtctgcctccctgaatgggggtgccttttggaagatagctcggacgaaagccgagtcgttggatcactggtagaaatcttcgatcacgggtgcctcgacaagctctagaatgcagttcctcatcatttgaaatcttctgaagaacaagaagagagtttcatcgcattggcacttgagtgatttgagatcccatggttgcgcttgtttgtccgagagggattggaagttcctgacaaaccggtggctgaaatcttcccaatcgt

SEQ ID NO: 20448 - DNA, 410 bp, Zea mays
  unsure (1)..(410): unsure at all n locations
gctgctggctccctcgatcatcactntgtgtatagttacgaattgacctaacatgccacgggtgaaatcttccttcgaagcccctagtcatctcagagaacctgaatgcttcctcccttctttggcggaagtcattgtcagctcgaatatactcgtccatcttctggagcagcttctccaaagtttgtggtggcttcctggcaaagtattgcgctgaaggtcccggccgaagccccttaatcatggcctcaatgacaatntcattgggcactggtggcgcctgtgccctcagacgcagaaaccttcggacatatacctgaaggtattcttcatggtcctgggtacactggaagagagcctgagcggtggatggctntgtctganatccttggaaagctggtatcaacata

SEQ ID NO: 20449 - DNA, 472 bp, Zea mays
  unsure (1)..(472): unsure at all n locations
agcttgtgaaggttcttcatccncacatgtgctattctgttatgccacagccagcccatgctagtcttagctattaagcatgcatctagaccggcctcttcttttgcaaaatcaactaaataaagtttgccgtctaatacacccttaaaagctagtgaaccatcacttcttctaaagacagacacatctacatttgtaaatagacagttataccccatgttgcataattgactaacagatagcaaattataaccaagagactctactaaaaacacattagatatagagtgctcattagaaattgcaattntacctagcccttntaccttgccttgattcccatcaccgaatataattgaatcttgggaatccttattcttgtcgtaggaggtgaacatcttcttctcccccgtcatatggttggtgcatccgctgtctataatccagcttgaacccncggatgcataaacct

SEQ ID NO: 20450 - DNA, 394 bp, Zea mays
tccataagcaatctggaccctctccatcgcgctacagtcagtttattcttagctcccatcaggcaccctccgttgcaagcaaccagccgccagcaaacgcctgttggcactgcggtgaccccagtcacttcaagaacaactgccctcagttgaaggcaccaggaccaacctactccaactcggtgaatggccccaagattccatcggcacctacctccaaggcgctttcttccaacagccaacagagcagaactcagtaccagtgcagggcccgggtcaaccacgtcgacgctcatgaagcccagcaagccccgggagtagtgctcggtgagttcctcgctgaatatactcccgcttctgtgctgtttgattctggagcatgccattcatttat

SEQ ID NO: 20451 - DNA, 478 bp, Zea mays
  unsure (1)..(478): unsure at all n locations
agcttggacagtacatcagtcgccgggttccgatctctttctatatgatgaaactccagaccttcgaacttatcttctagctttcggacggcggcgcagtatcttcccattgaatcacttgaacaatcccattccttgtttatttgactgatgactaccagagaatctccgtacaccatcagtctcttgacgcccagtgatatggcgatgtttaatccgtgtatcanagcttcatactcggcagcattgttagaggccgggaatagcaactggagagcatacttgaggtgctcgcctccaggtgcagtgaaaagaattcctgctcctgctccctgcagcttcagcgagccatcgaaatacattcgccatacttctgcggtttctggatatccggcactttgtgttctgtccactctgatacgaaatcgaccagtgctttgagtttgatggcagtgcgaggtcggaactcgatatcatg

SEQ ID NO: 20452 - DNA, 398 bp, Zea mays
  unsure (1)..(398): unsure at all n locations
taaacaaatgggaaaatttgattctaggaaataatacanaaacctcattttcgcacctttaagctattatacgccaagctgtcggctagttcgtcttttgatagcaccgagagcccgttttctagtgttgggaatccgaagctcttgctcatctcccgacagacagaaatctccttgttgtcagggagacaatacaaaaagtcttcttctccactgtcgttgaatattaacgcccnctttggatatttcggtttttgggcgtaaaactgggcctcttgcttttctttttcagtcaattntttccccgaagcatgacgtaaaatgtaatcgaaggtttcggaagatgcttcggnggcggcagtgccagttttttcagccgaaatttgttctacttattt

SEQ ID NO: 20453 - DNA, 440 bp, Zea mays
  unsure (1)..(440): unsure at all n locations
agctntacacttcgcatgagctcccactttnggcgagttcatgaacattattccccacaacttgttgagcgatgaacgtatgtgagctcactcttgctgtctcacacccccacaggtcaagaacaggtaccgctggatgaggcgcatggaggatgttgtgacgagttcgtgagaggtctangtcgtcgtctcccagtcaactttgggttgttggaccgttgtctccttaaaatgtaattatttatttattntgtacagaactcctattatatagtaaagttgtgacattcgatcctgtgccatgattcatcgtatgtgtgagccttggtcccagcacacctggtgattatgttcgcgcccgggtcttggtgccccgaaacccgggtgtgacagcgcgctgtacagatgtggatgtagatctagcggcaacaggagggtca

SEQ ID NO: 20454 - DNA, 405 bp, Zea mays
gcaccttgcgtcaacttggcatgaccggcgactggagcgccttctctgcgcgcgctgcattaactcgatgcgcccacgctgtcagcctaccatcggtcacatcaactgtcacgcctgttcccgtggctgactgacccatggtcttcgcactcaatggctttactgggccatgcgcggggtgccttggtaccgctgcatttggtagagaaaatttcatcttctctgtcttttgtggtgccgaggaggcatggcattggtcgtgagcagcagtttgacttttccgcacccaggaaccggcgcccaaggaggatgactcgtgggcctgggcccccgcgtcagagactgggctatttggttctttggaggcaaagaagcgcactactgcatgcagcggtatgcacccta

SEQ ID NO: 20455 - DNA, 297 bp, Zea mays
cataataatgaatattgacatacatatcaactatatttatagattaattaatgaataaacggttagtaaaaagcgaattatatttttgggagggggaatttgagtcttatagactttctaaaagtatttattttattgcctttatgtttactgtataaaagaccatttattaaactctctcaacttatcaacatcaggagttcacgactacactaggttctgcaggaacttgagccgtgagagggctgttattgccgttgcttattacagacaccgtattcttgttctttgctaaat

SEQ ID NO: 20456 - DNA, 436 bp, Zea mays
  unsure (1)..(436): unsure at all n locations
ctgaggagcttatgaactatntaacctttaacatcgactcatcctcaatggttaaattaaattgtgattgcatatcttcaaacatcttgtccgccctattgatgtttgggctattactatcttcttcttatgctacaaatattatgctatattggtcactttgaggttatccaattaagggacaattctaaactagaaaatctcatgtgtgtgacacacagaagtgtcgatccaaaatgggtgacacttatgtgttattactctactaacataatattaaaatagtaatctactgatgtaatattaaaacaattaaatgtgttttaccgggccgagttgtaccctgtttgtgatgacgaatgacgcaacactgattacnggcagacacatagcaacacgggtatgttgcgtcgtggccacgccgacaccaatcaca

SEQ ID NO: 20457 - DNA, 363 bp, Zea mays
  unsure (1)..(363): unsure at all n locations
agcttctcacacttgccccagtgatcggtttttttgtcttattggctctntgcgaagtcgctccagcgtttttgaggccaaacgacatggaggtataccacaaagctccaaacggcgtgatgaaccgcagcttttcctcatcttcttttgctaggctgatctgatgatacccggagtagcaatccaagaatgacaacatataacacccagcggttgagtctaccacctggtctatcctaagaagtcaaagggatccttcggatagtgtttgttgagatctgtatagncgacgcacatgcgccaatccactttattcttttgagtacaagaacaggatctgctaaccactttggatgcagtact

SEQ ID NO: 20458 - DNA, 410 bp, Zea mays
  unsure (1)..(410): unsure at all n locations
tagcgaccttaaatactcagctggataatactcacagtagacatatataatgctacattanctagtacgtcatatttggtcatattagacaatgcaggtttgcacaagttgatgcacacataanacataaaatattctcctcacatatctctactagaaatatgagaccacttctagaacatcgaagtactattcaacaaaatgtaaacaatcaaaacatagntttataaaatgtggcttgtctgtgtagaataaccaaacaccaagtaacatttctaggcaccccatttattactttgtgagtgaattgaacaaaagccaatgacataagattaacgaagaaaacaaagcacatgtaatgggtgttgctttngatatactcatataaagttacaacaaactatgcacac

SEQ ID NO: 20459 - DNA, 297 bp, Zea mays
  unsure (1)..(297): unsure at all n locations
gcttatctttatctgcacatatatatgttgacacccttgcctcccctccctcagtccctcccctataataaacgggcgccacgcacgccacaancgcgggctgcgagcgaggcatacacatccacgggccacgcccaccggcatctcacggcggaagcagccaagcagccggccgggcgcctcccgtgccggcgctgagcatggccgctgctcccgtgggcgctcagaatcgctgcgtcttcggtacgccttcgccaccctcggttacgttccctgaccggcgtgatccggaagctc

SEQ ID NO: 20460 - DNA, 426 bp, Zea mays
  unsure (1)..(426): unsure at all n locations
tagagtcatcggacacataaccatntgcatcagcttctctctcttcttctcatcggccttgaaataaaaccattcactcttccagccggttggccacttggtacgatagctgaggaccagagccttcatatctttgcgatacgcaaaattatagcaaccaaaattttcgtgtagcccgtcttctctggccttcgtttggtaatgcagctcatgaactcggcaaaaagctttagcatttgggtccatcccttggcttcgaagggcccagatgaagatgttgagcctaacgatggcgttaggggtcagctgatgaagaanaatctcaaaattatccaaaacttccccaatcatctcgttcaagggaaaccacaatcctgctctaaaaagcttttgagaaccactacttcgtcatctttcggctttgga

SEQ ID NO: 20461 - DNA, 377 bp, Zea mays
  unsure (1)..(377): unsure at all n locations
agcttctaaagggagagcacactttgggactaacaaatgttcattntgagaaagacagggtttgtggcgcatgccaagcaggaaagcaagttggtattcatcatccacacaagaacatcatgacgactgacaggccgcttgagctactccacatggatctattcggcccgatagcttacataagcatcggcgggagtaagtattgtcttgtaattgtggatgattattcttgcttcacttgggtattctttttgcaggaaaatctcacacccaagtaactctgaaaggattcttgagacgggctcaaaatgagttcggcttgaggatcaagaagataagaagcgacaacgggacgtagttcaagaactcacaaatcg

SEQ ID NO: 20462 - DNA, 462 bp, Zea mays
  unsure (1)..(462): unsure at all n locations
ntaccanatggacgtgaagagtgcctttctcaatggaccaatcaatgaagaggtatatgttgagcaacctcccggctttgaatatagtgagtaccctaatcatgtttacaaacgctctaaggcgctntatgggctcaagcaagccccaagagcatggtatgaatgcctaagagattttcttatcactaatggcttcaaagtaggcaaagccgatcctacactgtttactaaaaccattgcaaatgatttgtttgtatgccaaacttacgttgatgatatcatanttgggtctactaacaaatctacttgtgaagagtttagtaggataatgattcataattcgagatgtctatgatgggggagttgaagtatttcctacgatttcaagtgaagcaactccaagagggcaccttcatcagccaaaccaagtacattcaagatatacttaccaaagttggaatg

SEQ ID NO: 20463 - DNA, 442 bp, Zea mays
  unsure (1)..(442): unsure at all n locations
atgcaagcttctaaagggagaacacattntaggattaacaaatgttcattttgagaaaaacagggattgtagcgcatgtcaagcanggaagcaagttggagtccatcatccacacaagaacatcatgacgaccgacaggccgcttgagctactccacatggatctattcggcccgattgcttacataagcatcggcgggagtaagtattggctttgaatagtggatgattattctcgcttcacttgggtattctntttacaggaaaaatctcanacccaagagaccttaaagggattcttgagacgggctcaaaatgagttcagcttaaggatcaagaaaataagaagcgacaatgggacggagttcaagaactcacaaatcgaaggcttcttgaggagganggcatcaagcatgagttctcttctcccttacactcacaac

SEQ ID NO: 20464 - DNA, 463 bp, Zea mays
  unsure (1)..(463): unsure at all n locations
gggggcaacananacctagctaaactaccgntaattntattccctcatgcatgcatgcatgcacacgcagtcgatccaggtctcgatggaggaaattaaaggcgtcgtcaggtcaccgaaagccgaaaggtggctgtcgacgctagctaactatatgttgttacataagaattgggatagacgaagatcaccggtatctctagttcattttcggccggcccatgaaagaggacgacagatcgactacctgcgtcgacagggacaagccacctacactagtactgagtagctgtagtatgctgcatcgagctacaagcctaacggcactacagaaacaaagttcatttttaatggccaatcgtcatcgaaaataagacatacgccacaaaaaataagttattnttggcgactcttatccgcccaacaaattaaccaaaaattagctgacttataaaactataac

SEQ ID NO: 20465 - DNA, 440 bp, Zea mays
  unsure (1)..(440): unsure at all n locations
cctatgcacaaaagagggtaatgctgtgcatatgccattanggcatctcgatcaataaagtgggttggaagaatgttgaagttaaatttgcagaagtgacagggaagaaacttgaacatttgccaatgaagaacaaatgggacagccttaaaagaagttacanctattttatggagttaaaaaattcttgcactgggcttggatggaatgaaatgaggcaaactgttgaaatgaggcaccatgtttctatggattgntggaggccctcaatctttctcacaagctgaanatcggtttcaaagatctctatggacagttcacatgaagtttaaagaagtgttgaaatgtttgcgacaattagcataagcgaatatcanaccaagagatccaaattttactgtngagcatncaaaggttacagaagatcgtctttggctcat

SEQ ID NO: 20466 - DNA, 402 bp, Zea mays
  unsure (1)..(402): unsure at all n locations
ggtgaagattcttcattccaacatgtgctagtcggcgatgccagagccagtccatgttagtcttagcaattaagcaagtgtcgagttcagctctatcaaaatctactacgtatagctgaccctccaagactcccttaaatactagtgaatcatcacttcttctaaagacagtaacacctatatccgtaaaaagacaattgtaacccattntacataattgtgaaactgaaagcaagttataatctaaagaatctacaagaaaaacatttgaaatagagtggtcaggtgactatagtaatttacctaatcctttgaccaaaccttgatttccatccccgaatgtgatagctcgttggggatctttggtttctcgaggaggagaacatttttttccctgcatat

SEQ ID NO: 20467 - DNA, 384 bp, Zea mays
atgacccagctcttcgagttctactaagctgaagaccctgagcatctgtttggtgaaggcaagtgtcatctgacccattatgtcccatttactttataattcactgtcccgcatactatgaacaacctaaggattgactagctttctatttacctggtccttgattaccttttgagctactatggttagattcatgctatcgctttactttaatcaatgaacatgatgtgaacacttatgatacaatgttatcactatgattatgatgttggactggtgatactttagggggctcgagcggtttctcgagtgcctctccgtaatgacctgttcgttggatgaccgcccgagaaaacagtgcaaccatgagggtggaatgggatg

SEQ ID NO: 20468 - DNA, 463 bp, Zea mays
  unsure (1)..(463): unsure at all n locations
tatcagagggcatatntatattggagaaccaattgatgaattcaattttcccatgcggagtgcaaggcgcgtagatatttgtaataatctaggattcattcgacgaattaaaggaaaattcaaccgaaagagcataattattctgataaataacattgcccaccaatttcaagctattccaaacagtaatggaaccacccgaatttcccaccgaggggacaaaagcaaaatagtcaaaggaattggggcaaaaatttctgaagcaaccctatcgaagtattccttcttggtttcctgcaagcagataacatcacacctagactcccgaatcgcacaacgaatatcattccctttaacagcangaatgatcccacggacattaatagctattacagaccactcagagaanataaccgcattgtgactattcatcanggacataattatggtcgtttgcgatagt

SEQ ID NO: 20469 - DNA, 373 bp, Zea mays
agcttgcagcataagaaaagagtatagaattctccaacttctctgaacagatgagcatcttcactgattgttcaacacagaccacacagcttctcagataaagaggaaaggagaataatgggttttccaactatataactaactttattaacatagtatgtgaaccaaaatgcaggggatacccacactctggtgacaatcattacaaagatcccaaccagacatagtccatcatgacaaacataaatgcacaggatatagcaaactaccctgtctaactaatactaactaagaccgagactaacgcttagactgaagcttccatgtatatatttatttcgtattaaatacaagaaccaactctaacgatcta

SEQ ID NO: 20470 - DNA, 417 bp, Zea mays
tactaagcttacgaagaggaaccttcggcatcttatacaacagcttcagccgaagaccgcttcttcctataagaccttccgcgacgaagcatatgcccaacagtagcccctttcgcggtgctagatcgtttttcgtaacgagcttgatccgtgaaaaaagtcactttaagcttcggggagccgaaggtccaaaaaacaccttccctgagctcgttgtcgagaaacgattcaatttcccaacacgtagtggtcccaccttgcagagttactgtttggtctcttgcggccaccgcacagcgagagcaagcgggtgtccgcctggtgtaaaaattctggcgcttcgccttattacctgcagtactatataaacagacgagtaggtgtgaagttaccatagcattcattgctatttgcact

SEQ ID NO: 20471 - DNA, 490 bp, Zea mays
  unsure (1)..(490): unsure at all n locations
cttcgtcttgaccatactctctatatactcgaattctattcctaagatacctgttcacacattgtacttggaaaacattggccaatcatgtttttgaggaccttctgaagccgaaggcccccaacagactcgcctgaagtgggtttgctcgactgcctcactttcctgaagccgcgaggcaaccggaccgcgctgccgtgctgcngccacaacaaacttgaacgagggagaaaggtggcgacngctaaacgcagtgagggagaggaacgaagacgacgagctangcgagcatcgcgaacgggatggagagtgaagagagggaaaagaanactacacgccggccgtatgaaaagggggtgacgccaagatctataacacctacctacggtgctatagattntgacgtctatccctgctatctcacagtcacgtgtatatcatgtcaacttcgatgacagaattgatgaactagacgtgtatgttggtgtaa

SEQ ID NO: 20472 - DNA, 347 bp, Zea mays
  unsure (1)..(347): unsure at all n locations
tactcagctttagtgttagcgagagagattgccgtgttctttngagctcttgcgcttggattgcttcttttctttctcacttggtcttgtgatcaaaactcatttgttaccgaggcaagagacaccaagtgtgtggtggtccttgcggggaagttttgttcccggttgtgatttgagaagagaagctcactcggtccgagggaccgtttgagagagggaaagggttgaaaaagacccggccttttgggcctcctcaacggtgagtatggtttgcgagaacccgaacctcagtaaaacaaatcatcgtgtctcactccgcatttgctcatgatttggtttgcgccctc

SEQ ID NO: 20473 - DNA, 329 bp, Zea mays
  unsure (1)..(329): unsure at all n locations
gaatttagcatcagatttttctatttctcgcataccgggttggacagagcgattgaccagaccgaacatatggctactcatgtatcacaagacaacattcggagaactgcgccagaatgactctcaaagatgacagaccacaccctactntagataaatatggtccccttgtagagctttcatctcgaactttagacggtggcgaccgaataggcatgggacaggagagcttggagcatacatgccggagttctccccttcctttcattctcacacttgcacccttggtgacatgttcgctatagcaatactataatcagcactacact

SEQ ID NO: 20474 - DNA, 225 bp, Zea mays
ggaaacaagatggatgctctcatcacaccaaatatgtgatgacgacatcaagatcctcggagatgctgcatatggacctcttcagacccgtcgcctatctgagcatatgagggagtaagtatgtgctatgtattgtagatgattttgccgcttcactttggtgttccttttgcatgataagtctgaaacccaagggacccctcagcgcttcctcatgagggctca

SEQ ID NO: 20475 - DNA, 462 bp, Zea mays
  unsure (1)..(462): unsure at all n locations
agctngcacacatagctcatttgaatacccttgatcatatctcttctatatgctatgactaatgtgttntcaagtctatttcaaaccaagtcataggtatattgaaagggaattagagtcttcggcgaagacaaaggcttccactccgtaactcatgcttcgccatcactccgagcaactctctattccttgggagaaatgagcatcaaaaaaacggactctattcttggnggagagagtaaaagctcaaaagcaaaaggaccggacctcgtctttggtataatcttaactcatttacttatgaccaaaggggaggaacttacttcaagggctctaatgattcccgttttggcgattcatgccaaanagggggagaaatgagcccaaagcaaaaggaccgcaccaccaccaccaaattcaaaaacttagtgctttccanaagtctttatcatttggtatcct

SEQ ID NO: 20476 - DNA, 389 bp, Zea mays
  unsure (1)..(389): unsure at all n locations
ctaagctgccatagtctcgagatgtatgcctttaatagccagtcttcttagctttacttttgtgaaccgcgtgaaaagtacacaagctgtgatgacaactttgcatgctctgttcgaggctcttaccgaattgggaggaacaccgcatcatcacatggcagcatgagagttgtagcaaatagagacaagtccttatcctgactagtctgctgtattggatgaaaacctgggcacttgacccacgcaacatttgcaatctttgtctctcctcactgacaagtgactagctggggaggtaagctcctttgcactatcctgatgaagtccggctgattgngactacacatcatcgcggataaagccgctttgcttactcgatcccacaaggt

SEQ ID NO: 20477 - DNA, 410 bp, Zea mays
gcagctataagatcttattccatatgggctattctgttgtgccagagccaacccaagttagtcttagcaaccaagcacgtgtcgagttcaactctatcaaaatctaccaagtatagctgaccctctaacactcccttgaatgctattgaatcatcacttcttctaaagacagtaacacctacatcagtgaataaacagttgtagcccatttgacataattgggatacggaaagcaaattgtcatctaatgaatctacaagaaaaacattggaaataatatggtcaggtgatatagcaattttacccaatcctttgaccaaaccttgatttccatccccgaatgtgatagcccgttggggatcttggtttttctcatatgaagagaacatctttttctcccctgtcatatg

SEQ ID NO: 20478 - DNA, 485 bp, Zea mays
  unsure (1)..(485): unsure at all n locations
ggtgaagattcttcattccaacatgggctagtcggcggtgcctgagccaacccaagttagtcttagcaaccaagcaagtgtcgagttcagctctatcaaaatctaccaagtatagctgaccctctaacactcccttaaatgctattgaatcatcacttcttctaaagacagtaacacctacatcagtaaatagacagttgtagcccatttgacataattgggatacggaaagcaaattgtaatctaatgaatcaacaagaaaaacatttgaaatggaatggtcaggagatatagcaattntacccaatcctttgaccaaaccttgatttccatccccgaatgtgatagctcgttggggatcttggtttntctcatatgaggagaacatcttcttctcccctgtcatgtggttggtgcacccgctgtcgagtatccaacttgagcccncggatgcataaacctacaanacaattntagttcttgac

SEQ ID NO: 20479 - DNA, 246 bp, Zea mays
  unsure (1)..(246): unsure at all n locations
acatgggctattctgttgtgtcagagccaacccatgttagtcttagggagtaagcaagtgtctagttcaactctatcaaaattcactaagtatagctgaccctcttacactcccctaaatgctattgaatcatcacttcttctaaagacagtgaccctacattagtgaataaacagttgtagcccattttgcataattgagaaaccgagagcatattgtaatctgatgaatctacangaaaaacat

SEQ ID NO: 20480 - DNA, 404 bp, Zea mays
  unsure (1)..(404): unsure at all n locations
ntttgaacgtactaagcacatgccgggaaaaatggtaaccggttaacctagtacctgagtgaagccgggcgcggactttattcctcatgcgacctgagactgggtcttccatgcttgctatggtgggtacaagtgcggtcactgcacggcggcagccggggccagtggacattgtatgccaaggcggtgaggcctggacgcgaacggtgaatcgatggggacggttgtcatgtgtggggtcagagtaccctgacatgtcgtgtgtttatgtttactttgcaaggataaaactcgatttgaatcgtctgcttgtcgcagctaatgagactgcctgatcccttgtactgcatcgagtaagaagtgaaantangttacatgagataatatgttgattgactaaatgc

SEQ ID NO: 20481 - DNA, 471 bp, Zea mays
  unsure (1)..(471): unsure at all n locations
agcttgaagctgaagttggaaagagnttgaacttgctaaagtcattgaaggaacttcaagataaatgtctgaacttcgacaactgttgcgtgcaacgactgaagcaggtcttcaactctgttggagccagttctgaaaagtttaaaccttcagctgaagacctgccaggcatcttcgatcatattaaaggcgaagttgatgctcttgatgaagtcatagctgggcatggtgatttctgtgctctgctagcttctcgtggcacagctggtgcttttatgaaggctggttgcatgcacgggaatattgtaaacaggccgaacttcagcttatcaccagcggacttgaatgacatccttagcctggcccgaagcattgggaacagattcataactcannattgggcaaagggtggacgaagattggctagtgacgaagctcgaagtcacctcanaccggtaataaactcataca

SEQ ID NO: 20482 - DNA, 487 bp, Zea mays
  unsure (1)..(487): unsure at all n locations
tctcctggacaagtgctgcacttaccgctgagtgcgaagctgccacatataataacaaaggagcccctggcgtaagtggagttagtgttgttagatctatcaaatactgtttcagctcttcaaaggccttctgctggattggtccccattgaaagacttcggctgacttcagcacttcgaaaaatggtaagtttctctcttctgatctggatatgaatctattgagagatgccagccttcctgtcaatctttgagcccncttttttgtacttggtggctccattcgaagtatagcttcgattttacttgggttggcctcaattccctttgttgaaactaggcaaccaagaaatttccccttctttactccgaagacacattnttctggattcagctntagaccagcctgtctaanattagcgaaggtctcctgtanatcagcaatgtggttatcctgcttcgtgcttttacaatgatatcatcgaca

SEQ ID NO: 20483 - DNA, 395 bp, Zea mays
  unsure (1)..(395): unsure at all n locations
gcttcgtctttaaccgggctcttgtatacccgctatctaacttcaaaggtacctgtttacatatttctcttggaaaacattgtcaaatcatgtttntgaggaccttctgaagccgaaggcccccaacacctatcaaattctttggccaactcataaggcatctgatgggcgaccatcangttgacctgactctttctgctcaaagcatcagccactatgtttgctttgcttggatggtaatgaatctccaattcatagtctttgataaactctaaccatcttcgttgcctcttattcaactctgactgagtgaatatgtacttcagactcttgtggtctgtgtaaacatcacatttctacccatacagatagtgccttcatgtcttcagtgcatg

SEQ ID NO: 20484 - DNA, 481 bp, Zea mays
  unsure (1)..(481): unsure at all n locations
gagcttacataagaataagaattgaagcacacattttgaattctaagtttatagaatgctccccctggatatgtgcttacttcaagaacctaattntggtctcagacgccaatttgcacatacttaggcagttcgaaacatttctacaccttagcaccttttaggaagcattgagacaagattcaaaccatgatgctataacacacaaacgcacataatcagagttaaacaccattcaaaatagtggatatatcacaggaatatcaacctaccactattcatcattaagataccaattcaaactaataccaatttaaactaagacactaatttaagacaatcttaaagcaccattaaccacatgactatctattacactatagaagccaaataattcatcgcagcggaaacactagtccatatgagcaacantgcangaaacatgaatatcacacttggcanagctcaaactaacacatca

SEQ ID NO: 20485 - DNA, 428 bp, Zea mays
  unsure (1)..(428): unsure at all n locations
ntaagtgggacatggactcccataggtaagacatccgtagcgaagaatcgaccacttgagcccttgaccctttacgaacaacaggcaagacctgtctgaaatccccaccgaaggcaatggttttaccaccgaatggcagtccgggtcgacccattatatcgcgcatgctattgtccagtgtctccacggcttgtctcttagtcatagaagcctcgtcccagataatgagagatgctntccgtagcaactctgcggttccactctgcttcgtgaagctacatacaacgccatcgtcaatagtgagaggtatcttgaagcgtgaatgggcggntcttcctccaggcattatggaagccgcaacgccagatgtaactggtgccactgcaatcttgccctggctgcgtagcgtcgcgagcaacactctatat

SEQ ID NO: 20486 - DNA, 498 bp, Zea mays
  unsure (1)..(498): unsure at all n locations
tgcagctacccttaagcacctgtaaggcaactgatgaatccttccttctaaggattttcacatccacatccgaaaataagcaattataacccattccacaaagttgtgaaacggacaacaaattatagctcaaggaatctactaataaaacatttgaaagtgattgttggtcagagataggaattntaccaataccaatcaccttgctcttgccactatctccaaacacaatttcttgtgcttcttgagttagttgcaatgtatgaaacatgtctttctccccggtcatgtgatttgtacatccactgtcaagcacccaacttgacccaccagaggagtagacctgcaaaacaagtttagggctatactttaggtacccaaattgaattgggtcctacagtgttagttatagccttgggtacccacacacttcttttcatgacnnttttgttagtgtaggcacccacatattngacaactaatttccctgaatccaag

SEQ ID NO: 20487 - DNA, 454 bp, Zea mays
  unsure (1)..(454): unsure at all n locations
cgagaactttgcacttgcataatctagtgaagaaattagtgaatggtcaaaaactatgctaaagaaaaatgttgaggagcttcgcgaatccaaggaaaggtgcttcaaaaaatccttggattgcacgaaaaaaattgaaaagcagctttgcaaaagtatgtgcttattcttctgaagagaactttattcgaggtgaccccgaaggcgtcattgattggataagcggngaagccgaagcctttgaagaaatcctaaacaatcgcggggatatttgtgccttttctggtgctcgaggttttgcggcaattcgggagaaggctggttgcgaccacgttaaactgcagcccaggctgaggccgccttctccacagatgacacanaagacccttcggctgaagctactntagtgggcanaannatttattctgatgtctgggtgaacgatggacgggaa

SEQ ID NO: 20488 - DNA, 436 bp, Zea mays
  unsure (1)..(436): unsure at all n locations
actaagcttatgatcggaatgaatacacactctnttggccataagtagtgctgccatgtttcaagcgctcagaccaaagcatacaattctttgtcatacacagaataatttaattgagcacctnccaatttttcactaaaatatgttataggttttccttgttgcattaaaactcctcctatcccaatcccactagcatgacattctacttcaaaagttntagtgaaatcaggaagaataagtacatgtgcctcattcaaacgtttcttcaattcttgaagagcatcttcttgtgagtttccccatttaaattcaacacctttctttgtcaattcatttaaaggataagcaatggtactgaaatctcgcaccaatcttctatattaaccagcaagaccatgaaaacttcttacttgacttacattcgttggagctg

SEQ ID NO: 20489 - DNA, 415 bp, Zea mays
  unsure (1)..(415): unsure at all n locations
tggagctactattttatttctaatattctaaagggcttggtttgaacaccgttaaaggctacataattctatgtttggaataaaaatcttggaactatttttattaaatactagatgattntaggagtctagaaaaattggtctcataattntatcatttttgtattattttctactcattttctaatctaacattaaaaagaaaaagggaaatgatgaatagtattgggccgaatctggcccaagtcagcctatgaacggngaaaagcgcccacgcgcgcccgctctggcgactttgcacagaggcccttagctttntgaataactagtaaagaacccctgacactattcatctgtctcactgatnngttgcgcaggacccttgaacttctattccttcaccggacaagcccct

SEQ ID NO: 20490 - DNA, 433 bp, Zea mays
  unsure (1)..(433): unsure at all n locations
ctcagcttcgtgctgccatctccatggaaacagcagcccctccgcgtcacgcgctcgactcgctgcgctcgcccacgtggtgtcgcagtaagacagcagtagcgtcgcgttcgccatcaacatcgccttcgtgtacaccccctcgcagcagcgccaacatagcagccgcgacactccccttcaccccggactcgccacgctcaagaaaaatgccttccctcgcgtagctacacacttggtgtcgctgcacattgctcgtcgatgcgcagcccctttgcgccgtgcctgtgatatcgtcgntcttgcgggtttgtcgtgccaatcgacagccgcagcagcccctccgtggcgtgtgtccacctggacacgccctcggagcctgtcgtgctccttcgacttcgctttggtctcccgcgatcgacgacgcgttcat

SEQ ID NO: 20491 - DNA, 431 bp, Zea mays
  unsure (1)..(431): unsure at all n locations
agcttgttcgcaacatgagggcacagagcgacccatggtttgcttaatatttgttgcgcgtcggtggtggcactgaggaagagaacaacgatggtgatgctcaccttccagatgaggtatgtgtgccatatactggtaatgaccacgaccttgatagattgatagatgacatttaccccaaactaaatgagaacatgtctaacacaagctacatcacttcaagagcaatattgactacttggaatgactgggtggatatgataaatatgaggatgatcaaccgtttccaaggggagcagatgatgtaccatagttntgacaccgcgatggatgatcccaataactattacccatcggaatttctaaacacccttactcctaatggactacccncgcatgttctgaagctcaaagttggatgcccaatcatg

SEQ ID NO: 20492 - DNA, 346 bp, Zea mays
  unsure (1)..(346): unsure at all n locations
gctgacgccgtacccccatatgtttccttgccatagatcacattcttggatttctggtggagaccatttcttgctcagaaatgcatacgtgttatccttcggtattattgaaaatggtcgttcatggctattttcgacaaaaatgggggttgtgtggccattgatcatcgaccaaaggctcgtacacctcaccccacatatttntcctggcatagatcacaatcttggatttcttgggcagaccatttcttggtgaaaaatccgaatgtggtaatctttgcgattattgaaaatgggccgtcatggctattttctacaaaaatggngggtgtgtggcccttgatct

SEQ ID NO: 20493 - DNA, 192 bp, Zea mays
  unsure (1)..(192): unsure at all n locations
attctatatagacttaatttggttgnnnnctatctctatgccatgctcatgaataataaatcctaagaacttgctaggcgacaccccataannnnttttacatgggttcattttttaaccacaccgatgtatcttatcaaaggctttctctgnntnnttatattagaatcaaattccgccgatttaactact

SEQ ID NO: 20494 - DNA, 495 bp, Zea mays
  unsure (1)..(495): unsure at all n locations
agctntacctagtttgatttgcaaaagaagatgcttgtctatatgcatgcttaatggctaagactagcatgggctggctgtggcatcgccgcttagcacatgtggggataaagaacctccacaagcttctaaagggagaacatgtgataggtctaaccaatgttcatttcgaanaagatagaccttgtgcagcttgtcaaacagggaaacaagtgggagactctcatcacaccaaanatgtgatgacaacatcaagacccctggagctgctacatatggacctcttcggacccgtcgcctatctgagcataggaggaagtaagtatggtctagttattgttgatgactnttcccgcttcacttgggtgttctttttgcaggataagtctgaaacccaagggaccctcaagcgcttcctcangagagctcanaatgagtntgaactcanggtgaagaagataaggagcgacaacgggtccgagttcaagaactttc

SEQ ID NO: 20495 - DNA, 372 bp, Zea mays
ggggtactgcatcctcaacccgaagctattcatttgctcaagctctgtaacaagaaaaagcttcggcaaagttaagaaaaattcaacttcatcaaaaaacaagaaattcaaccatcagatggctagggtacgctcaacagctagggttactcgcgacagacaggaagccgaaggtgtcgaaactgctccaatctctgaagtgatgcaacggtcaaggctggtaatgtcggaggatgcacctgccgctgaagctgagcaggttgatgctgaggaaactgaatctgaggatgattacagcgtcgtgccatccaaacctagccacctggaagttgggaaatccaccgttaccgaaggtgatatgtctaagctgat

SEQ ID NO: 20496 - DNA, 409 bp, Zea mays
  unsure (1)..(409): unsure at all n locations
agcttatggcagcagggttcatcaaagaggtattctatcctcaatggctngccaaccctgtgcttgtgaggaagaaaggggggaaatggcggatgtgtgtagactacactggtctcaacaaagcatgtccgaaggttccctaccctctgcctcgcatcgatcaaatcgtggattccaccgctgggtgcgaaaccctgtccttcctcgatgcctactcagggtatcaccagatccggatgaaagagtccgaccagctcgcgacttctttcatcacgccattcggcatgtactgctatgtcaccatgccgttcggtttgagaaatgcgggcgcgacgtaccagcggtgcatgaaccatgtgttcggcgaacacatcggtcgcacagtcgaggcctacgtcgatgacatcgt

SEQ ID NO: 20497 - DNA, 456 bp, Zea mays
  unsure (1)..(456): unsure at all n locations
tatcggtcgaatcaaaacagttgaacaggaaaagctagagcttaattctaaacttgaagccgaagtccaagccaactcaaatttgaagaaatcattaacaagccttcaggataaatgtttgaattttagcaacaattgtatccaacaactaaagaagatcttttactcagttggagccagcagcgggaaatttaccccttcggatgaagatttaccaaaagccttcgatcatatcgaagctgaaattgaagaacttgacgaagttatagctgggcacggtgacttctgtgcctgngtagcttctcggggtactgctgcagcattcctgaaagctggctgcgagcatggaaagatcgtcaacaggcccaacttcaccctgtctncatcaatcctggacgatatacctgacctcgcccgaagtatctcanatagaattataaanatgatatggacaaa

SEQ ID NO: 20498 - DNA, 471 bp, Zea mays
  unsure (1)..(471): unsure at all n locations
tagcgacactataaaactaagcgtgcgtgcagttcgcgggctactcaggtgggctaagtaactccctatatgggtctagtccgcaccctgccgctggctctccggtgtgcggaggcggtaccacggcattgtcctcctgaggcatgccgagatggttcccttagtcatgctcctcgtgccccacgtgaaagcactcccgagttggggcataaccctcttcttcgaagctatagtcgttggagccgtcagagaggaggtcatcgcatgcgaacaggaactgcaacatggccttaggatcacaaagcctatggaagtcctggctagggcctagattgtcttcctccttgtagtctaggcaccccgaggggaaggggagattagcatacatgctggtgaaagcacttgtgtcgaagctcgcttgaaaggggatagggttgaacacagatggttcttccctatcanatgatggag

SEQ ID NO: 20499 - DNA, 467 bp, Zea mays
  unsure (1)..(467): unsure at all n locations
agcttcatgtactaagtgagttgtggaggaaagactctattacagtctcttatgaagacctgaagtgttgtgtcaagttggacaacctatccaagatcaaggaaaagaataacatctgtgctaagaactgatctggagtctcagaacaaaacatgacatgttctattggactttttttattcatatagcaccagacaacattaacatttttatggatnttttggcaataatgtagccacctgggatattaaaatggttccatttgcttggtttcgtacgggtttaggcagctacgacactgacattcttttggttcttccatcttgagaagatgcagcttcccaattacttagcanattatcaagtttcaaggttctacaacattatttgatgtcccagcataggattcacgaattatatatttttcagttcatcttgtgcaaaacgatataattattatcacacat

SEQ ID NO: 20500 - DNA, 434 bp, Zea mays
  unsure (1)..(434): unsure at all n locations
cttcgctgaagtggcccgatttcaccatcttgtgaagatcagccttggagatagtcgactttccaaaggccagatggctatgcttgctcggtactgagatattgtaatcatcgtcagagtcagcctcctcaatatctccttgttctgctttggcagcgacttgttctgcttcggcagcgggcacttcttccgatgtcaccaatccagatcgttgcattgcttccgagataggaacagtctccacaccttcggcttcatcttcctcacgctcaactctagcggtagagcgcactctggccatttaattttgaatctcttggaaaatttcttggaaaataatagtcttctcttctgaagctattcttctgacgaagcanattctaaattggagcttcgtttgaatgcgaaagataagcttcgtctatggtcgaaaa

SEQ ID NO: 20501 - DNA, 453 bp, Zea mays
  unsure (1)..(453): unsure at all n locations
agcttcaatttatatttntaaagcaatcgaagtactttctcgacattntcttggcattttctctacatgaaccctcaataacttttgttgtagagttgatatagagtgttntgggaaggttggcataacttgtttgaatttgtaaatttgcttttacttaatcgagcagtctcaggtaagcgtaggatttataatttcacacgaatatttggttcaaactttaagaaatctttagaatacgcttgatagatagagatggatgatgacataaagataacaagctganttgcataagaactaattagagaatgacacaaagagatcctgcgggagaatgcgaattcggattaagtatttggacgtagatcgactaccgagacagcgaattcggacatcgatcggataatatcataactatcaagagtccgaataaatgagtctggacagggagta

SEQ ID NO: 20502 - DNA, 436 bp, Zea mays
  unsure (1)..(436): unsure at all n locations
cgctnttaanataaaggtaagttatgtaattcgcttccgcatttctttatctccgatgttctgtaatgtctgcaagacggtgagacgttcctggtaaggtaaggaaagataccgagcttgtcaagtagtttaagggcacctacagggttgtctgaggtccgttggacaaggataactgtaggtgggcctaattacttgggaggttccgtcacagctggtatcggagcgtagcccttctttgcagatattatgaggcatcttcaaaaggattttcaaaagtcttacctaaaaattcttttctcttcttacctgagtattctgaagagtctatcttaaagaccagataggaagagtgcaacgtatagaaggttgaatcgactaaggttgattctgtaattatacatgcatcatgctaagcactatactaataacattt

SEQ ID NO: 20503 - DNA, 485 bp, Zea mays
  unsure (1)..(485): unsure at all n locations
agctggattgccagtatttttctggaaagtccatgtctttgatcaactccagattatctattgcagcagactcagagggacccaaagaaactccaaatctattagctatatctagcaagtctacattattagaatcaagcagtgaaaaagagttagtgtacatacctttgttgaggaaagcatctttggcttcagctctggaaatagctttatcggccaccttcacatcttcattcctctccagcctagagctttttctgatgccatctgagatgttggtgggcatttccagaggttttttacttttcacttcctgtaaatcctcatcattgggggatcgagatcatagcaccattnttggactgaaagtccatctggtcctcctncatgtctttagcanattcttcaagatcttgagagctcagcagatcatcttcatttgggtcaaaatcaactntctcatcactganggttatcaagttctg

SEQ ID NO: 20504 - DNA, 405 bp, Zea mays
  unsure (1)..(405): unsure at all n locations
taaacttgtnttgcaggatcactccttcaatggatcaagttgggtgctctataatgaatgtataaatcatatttggagatagtggcaagggtggtaacaactgaatctcaagtgcatattattttcaaatcttatctcttttgtgacttgtgtagccactaaggaaaaagaagcacttgaggatatacatcagttgttgattatgaaataaaggcccaattggaagatgaatgaatattatcatatggtcaacaatccaaaattatgtgatgtattctctctctagtcaatttggatttgattcttctatattagacactcaccataatatggattaagtcagccctttagacttcattgaataacaatgcatattatccatgtcattcaaaatatagtgtgcat

SEQ ID NO: 20505 - DNA, 353 bp, Zea mays
  unsure (1)..(353): unsure at all n locations
gcttctaaagggagaacacattctgggactaacctatgttcatttgagaaaacacggttggtggcgcatgntaagcacggaagcaagttggtgcccaccatccacacaagaacattatgacgaccgacagaccggttgagctactccacatggatttattccgcctgatcgcttacataagcatcggcgggagtaagtattgtcttcgaattggggatgattattctcgcttcacttgggtggtctttttgcaggatanatctggattcttgagacgggctcanaatgagttcggcttaaggatcaaaaagattagaagcgacaatgggacggagttcaagaacactccaatt

SEQ ID NO: 20506 - DNA, 489 bp, Zea mays
  unsure (1)..(489): unsure at all n locations
tcttcaccatgtnttcacagatatcttgaggaagttgagcatggcgtcttctccttaattgtctttgtttcttgttcccaagcaatttcctttttgaccctacaacttgttgctcattcaaacatttgcttccttttgagcaataggggttagcacatggtgatatattatctaaatgtgcacatgtgcaagaatggggtttacataagtttaaactagtaattactacctcatgagtaatatcgagcataatatggtcatcaactaatttattatgagaatatgacaacatatcatacttttcacctagagcaagcttttctaaatttagcaattctacttgcctctcaagaatggcattntccattctaagttgagcaacaagataaatcattatcattatttctttgctcaattaaaactgaatcataccgctggaccaaatcatcatgagagcactntagctcctcattttctttggcatcttct

SEQ ID NO: 20507 - DNA, 402 bp, Zea mays
cacctgcagctgaagcttctaagggagaacacgtgataggtttaacttacatgccattcaaaaaggatagaccttgtgcaacatgtcaagcaagtaaacaggtgggaggagcacatcacagcaagaatgtcatgaccacatcaagacccctggaactgctcatatggacctcttcggacccgtcgcctatctaagcataagaagaaagtagtatggtctagttattggtgatgacttttcccgcttcacttgggtgttctttttgcaggataagtctgaaacccaaaggaccctcaagcgctttctaaagagagctcaaaatgagtttgagctcaaagtgaagaagataaagaacgacaacgggttcgagttcaagaaccttcaagtggaggagtttcttga

SEQ ID NO: 20508 - DNA, 468 bp, Zea mays
  unsure (1)..(468): unsure at all n locations
agcttcgcaattgacctactatttaaggatttatcttttgcttgtcacatatagatggagattgccgcacaagcggcgttaaattatctatgcaccagttaggaagtagcagtaacaagcttattgactccagtctaaaatgtatggaanaagaaacgattagcgactggttgagggtcaacaacacatcattgtatcatcataaataaaaaaaatgtggagctcacctggagcttcttgatagctgagccatccttgttaaactataactcattagctgcttttactcttaagttcaccttcctttgaaggcgcacattcttccctattggagaagccataatgccgaccgtagaagtggtgtgtgcggttagacacataaattagtcgataaaaaacatatattaccatcgatttcaatatctcataattgtggcatcgacttgactgccaaacaatatataaaca

SEQ ID NO: 20509 - DNA, 449 bp, Zea mays
  unsure (1)..(449): unsure at all n locations
gaatgcttcttataaatgaaaatgtgctaaagcacgaagtaagcttcgggaaatacagcttcatcagccttgtcacaaaagaagggatccctctttgcgaagcatggatatttttacgaagcatggatctttttctttacgaagcatgaaaagaagggaaggtgttttttcgtcgaaagctaaaaaaccgtatgtatgtaaagtttcatgcatcacaaagaactgaattacaataatttacatattcgattcaaagctacacacatcaaatattacagtcttattacaataaaagtacaatgtccattctagtgtctcatacattgaccatttcaaaatgtttttacaataagagctattcctctttaaagactttntctgcaacttcgttcactaatttggtaacaacttcatcaacaatagattcaacccatataatgatctccatc

SEQ ID NO: 20510 - DNA, 445 bp, Zea mays
agagtgatccaagactttttggaaagcttggcaaaagtactacacaacttttataatcaccaagaattgattctatgttgaactgaatcaaacaattcagttttcgaaatctgttctgtcagtggacagaacacagtcaccaagttgtaaaattcataactcttaaaccgtcaggcctttagttatgaaattttaacacaagcaagatcagaaaagcatctacaactttcttataatctacaaggactgattctaacattaacttaagcaaacaatacagtttctgaaatctgtacaagaattggacagattcagttactgaatttgcaaaatatgtaactcctaaactgtcagacctatggctgtcaaattttaacaccagcaagataataaagttatctacaactttcttgtggccaccaataattatttcaacattaactta

SEQ ID NO: 20511 - DNA, 176 bp, Zea mays
ttgatgtcaagtctgttcatgccaccgaaaattaaactacaccagggaaatgcagagatttgaatgacgaaatacagaactctgcctcttatgacttcactaaaacatccatgctaaaccgaaacgaatagagcattcttctagacctgccttaaacgtatatctagcacaaactt

SEQ ID NO: 20512 - DNA, 253 bp, Zea mays
ttcatctgctagtctgcttcatatacctcagtattctcctcccctgtatctagctcggattatttctttgtgatgcgttataattctgtgaaatcctaatgcttttgtagctctgtattaggtccgcatgctaaagtggctctataagcttataacttcacttggactggagtctggatgacacgtatattcgatgtgcactgtagccgtgtgaaacccgattcttgggcgtgagttagttctctgactgtaa

SEQ ID NO: 20513 - DNA, 389 bp, Zea mays
ccaatgatgtcacatgatcgcagcctctactctccaaaatagtggcaatccccctagcacctgagaaagcacatatgtctctgcggccattcaaaacttcctaaaaagcttcggcttcgcggctgagccattcaattgggccctcggaggcgccctttacaaaattttcctcgcttgaatacgcgccaacgttggcgaagctaatttttattttcttaacacactctatagacttttcataacacctttccttggatgcacgaagttcttcaacgtttttctctaaatgattcgcccattgctcactgatatctcgattagcttctgcaactgcgcatctttctttagcttcggctagctgtttccgaagatcctcaatttcgcgcttc

SEQ ID NO: 20514 - DNA, 143 bp, Zea mays
atatggctaatgacaattattggcctatagccttggccttgtccaaaaccttcgacatccctgaagtattctcatggtctgcgtcactggaacaagctgactatgactggcttctctgaagccttgacactatcaccaacatg

SEQ ID NO: 20515 - DNA, 464 bp, Zea mays
  unsure (1)..(464): unsure at all n locations
agcttgtcgtaaagcacttgaatgcccctgttggagcccatatgaagtcgcagcggccaccacaagttggtagtatcctgcagtttaaatctagtccacgcaagtcttcatcccttttgatcctttccatgattcctaagcaagataagagcacatgtgtctccatcatctaaatgtaatggacaagagcttaataatgaacttacttgatggttgagttgacgagcacgagcgtgagtcatattaccaaggggcgttggtgctggtgtgagtgcatgggccgatgcacaaggtgtcccaggggtcgatgcatgaggtgcccggaggcctangcaagatgtgccctatgggctagcgcatgagaagcctcggnggccacggtaagaggtgccccgagagacaaggtgcgagatgcgcgagaccgacgttgatgcatgagagcaccctagagctgatgccgatgc

SEQ ID NO: 20516 - DNA, 207 bp, Zea mays
  unsure (1)..(207): unsure at all n locations
catatacantccttctcaccagtcctctaaggccagcggctatgattctctgtatgagtatgtggcaagaatgtgtttcagttttcaaccacctttgaaccatcttcacttatgtatcttgctatggtatccgcaaatccatcaagaaacttgatacctttgagggaacttgcaaactcgactttctgatccttccccaacacatat

SEQ ID NO: 20517 - DNA, 415 bp, Zea mays
agcttgccttcgcttcagtctatcatccgcagtccaacggtggtcgggagcgtgccaatgggaaaatcttcacagctgtcaagaagatgctcctcgatgaaaaaaaaggcagatggaccgatttattaccggaggcagtctgggcgctaaacacaactgagtgcagggcgaccgggttcactcctttccgccttctatacggatcggaggcaatgaccccgcaagaaataaagcatgggtccccgcgtacagttccgtcagccgtccccgacgtggacgagccaacttcaaaagatctcattgacggagaccgggtcttcgccctacaggccctaaacaaataccaagcccagaccatagcatggcgcgaccacgcagtcatcccgaaggagttcagcgagggggacctcgtact

SEQ ID NO: 20518 - DNA, 296 bp, Zea mays
  unsure (1)..(296): unsure at all n locations
tctcagcttctctggacagtgctgcactaccgctgagtgcgaagctgcacatagaataacagatgagccccctggcgtggtggagttaatgggtgtagatctatcanatattgcttcagctcttcgaaggatntctgctggattggtccccattgaaagacttcggctgacttcagcacttcanagaatggtaagtttctctctgctgatctggatatgaatctcgtgagagatgccagccttcctgtcaatcttttgagcccctttttgtacttggtggttccattcgaagtata

SEQ ID NO: 20519 - DNA, 432 bp, Zea mays
  unsure (1)..(432): unsure at all n locations
agcttctgtctacaccgggcgcacgcgcaacaccgtgcctgtggncccgggccacctcggcaacgagcaccatcgacgcgaccgtcgggcccacctcgacgaaagggtgcgccgaggctaccaccccaggcgtggggggcgctacgacagcggggaggatcggagtccctcgcccgaaccacccggtccgcatgccttcagtcgggccatccgacgggcgccattcccgacccggttccgacccccgactactatcacgaagtactcgggggaaacgagaccggaactgtggctcgcggactaccgccttgcctgccaactgggtgggacggacgacgacaacctcatcattcgtaacctccccctgttcctctccgacactgctcgcgcctggttggagcacctgccttccgagcagatctccaactggga

SEQ ID NO: 20520 - DNA, 367 bp, Zea mays
  unsure (1)..(367): unsure at all n locations
tatattcctgtgcccacatgtcatggctcaggacccttgtacccgctccgctagagctataaaaggggaggcatgacactgggacacttatacacacttagatctagctcatgctcaccagntcttacaagctttcatactaatacatcacacagtgtagtatggattacgctcttgtggcccgaccactctaacctttgtgtgtcttgtgtcactcatcgctaacaagaaagcaaacattaaccctctctatttagattatggcgtgcactcgcaccagcgggattcctctcacaacttatgggtgaatgtgacatacatatacgattggattaaggcatgctgatataggggaatatcactattg

SEQ ID NO: 20521 - DNA, 286 bp, Zea mays
agcttaatgccccaaagatgtctaattttgtgaaaggcaaaagctccatggttcaggataatgagggttacattttatatcctgctaattatcctgacacaaaatatgaagattcatgctagaaaacctcatatggtttctcatcatgcttttatgtataaaaataaggcatctagctctaggcataccacacatgttaaaatgcctataaagaaaattcctactgcatcaaatgaacataatatttctgttaaaacttttgatgcatcatatgttttaactaaca

SEQ ID NO: 20522 - DNA, 354 bp, Zea mays
atgatggagaagaatttacatttttgaccaataaaagtgcccctaagaataagcttggtagggtaaatatcaaaaattcagaactgtggactgatgttctctcatagcatgaaaaagatgtgctctaatcaaccgacgccgttaacaataaccaacttttggtgaattatatgtcagatgttaagcatattcttgagataagagaccttataactggaaactttattcattagttgcctttggagatcggttctgtttcagagatcttgtgcagacgagaagacaaggaagtatttattggcttcacaagctttctttcttcaggcattattttcaggtgtaacttatcatcta

SEQ ID NO: 20523 - DNA, 281 bp, Zea mays
tagctatgtgtgttacagcatggacagctttatatggttttaaagcacaacatgaaagtattctacactacctattgacatttagacatagtctctattattgctactgacactgcccctgaatgctaagatggttgattggacactgccaactgaagctaataacataactcttggcattgaatattaatatctcaacttatacatacgaatcatgtcttttacagacacatgttgtatattgctgctaaagttacatcattatcctatgcttattttta

SEQ ID NO: 20524 - DNA, 353 bp, Zea mays
agaacacattttatgactaacatatgtgcactttgagaaagacaggatctgtagcgcatgccaagcagggaagcaagttggcgctcatcattcacataagaacatcttgacgactgacaggccactcgagctccttcacatggacctattctgcccgatcgcttacataagcatcggcgggagtaagtactgtcttgttattgtggatgactattctcgcttcacttgggtattgtttttacaagaaaaatctcaaacccaagagactttaaagggattcttgagatgggctcaaaatgagtttggcttgaagatcaagaaaataagaagcaataataggacggagttcaaga

SEQ ID NO: 20525 - DNA, 460 bp, Zea mays
  unsure (1)..(460): unsure at all n locations
agcttgaaagtcaagtcaaaaagcaagccccaatatactttgtatcagaagttcttagtctatcaaagaanaattatacagaattggagaaggtactgtgtgctgttttgatggcctccaggaagcttcggcattattttcaagcttacaatataattgttccttcttcacaaccgttgaaggatattatgagaaatcgagaagctactggagctcaatgaattntgtattgattatgtgcatagatcttcggttcagtcccaagcgttggcagacttcattgctgactggacgccaggggctcaggatgaagaaatgaataaagatgccgaagtatggacagtgttttgcgatgggtcttgtggaaccttcggagcgggagcagctgctgtgttggtttcaccttccaaagttaaaacttagtatgcgacaagacttgatttcagttgcacaaacaata

SEQ ID NO: 20526 - DNA, 462 bp, Zea mays
agcttcggctccatctatattatggattgctcttgaatctgttcagtttccttcagcctttctggcagcttcctgactttcatgaatagcaatgggcccttgatccgaaggtatcttcatgcaaagatatgttggatgaagaattgcttcaaagcattgagtgtcccatgaccaatgattgcattgtagggatactccatgtcgacaatatcaaacacaacttgctcagtccttgtattgttgacatatccgaaggtcactggcatcgtgatcttaccgagcgctacaatctgccttcctccgaagccataaagagggtgtgtagcatcatgaatcttatcctctggctcttgcatctgtctgaaggccttagcaaatataatatccgctgcactgcctgtatcaaccagaacattgtggaccatataccctttgataacacaagaaataaccatagcatca

SEQ ID NO: 20527 - DNA, 436 bp, Zea mays
agcttgtgaagattcttcatcccaacatgtgctattctgttatgccagagccagcccatgttagtcttagcaattaagcaagtgtcgagttcagctctatcaaaatctaccaagtatagctgaccctctaacacccccttaaatgctattggatcatcacttcttctaaagacagtgacacctacatcagtaaaaagacagttgtagcccattttgcataattgagacacagaaagcaaattgtaatctaatgaatctacaagaaaaagattggaaatagaatggtcaggagatatagctattttaccaagacctttgaccaaaccttgatttccatccccgaatgtgatcgctcgttggggatcttggtttttctcgtaagaagagaacatctttttcttccatgtcatatgggttgtgcacccgctgtcgagta

SEQ ID NO: 20528 - DNA, 190 bp, Zea mays
atgggttttagaagtaacagactacctttagaataagatactaggaaaatagacaacgtcagtaactatgaagtctggagagataccagttcgtctcacaaaatgggaatgaacgctatatgaacttgaataaccacttggacgaagtgactaagtctaccttaaagtaatacgacacagtattgtgaag

SEQ ID NO: 20529 - DNA, 410 bp, Zea mays
agcttatgaagattcttcatcccaacgtgggctaatctgcgatgccagagccaacccatgttggtcttagcaattaagcatgtgtcgagttcagctctatcaaaatctaccaagtataggtgaccctctaacacacccttaaatgctattgaatcatcacttcttctaaagacagtgacacctacatcagtaaagagacatttgtagcccatttgacataattgagatacagaaagcaaattgtaatctaaagaatctacaagaaaaacattggaaatagtatggtcaggtgatatagcaattttacccaatcctttgaccaaaccttgatttccatccccgaatgtgatagctcgttggggatccttggttttctcatatcaagagaacatcttcttctcccctgtcat

SEQ ID NO: 20530 - DNA, 344 bp, Zea mays
  unsure (1)..(344): unsure at all n locations
tacagcaacgcttggaacatccgacagctacgtcgcttttacccttaagatagtntcaagtcgntcatatacctcgntttctatacatacacaaataaagtctaaccgtcaaggaagggtcagccttgcctcggcaagcccgaccctcctcggggctagaaagggggaacccctctgcgtcaaaatttctcagaaaagttttctgcagaacatttccgctttcactgttcatacgggtttganacacngatcacgagcgcatgcgatgaccaaggatctaccctcggatacgtcctactatacttcgcatagtactacgctaatagcatctgtgcgacagtcta

SEQ ID NO: 20531 - DNA, 405 bp, Zea mays
gctttataaaagagcatgtgaaggttgttctatgatcggttaaaccatctacaataccatcaaatctcgtgaagagaagtgacgaacaataggatcaaaaagaagaagaataaagataaaagataaaaggaatagtagatgccttttttactaattgaatgttggataatcttaatcggtcttcatcctcttatgtgtgtggggggggtcacatgtatgatatattagtaggaacacttttaaaacatgtctggtaaagttgtttgaatttcaaaaactgaattagaaatgaatctcttcgagagaaaaatcagcaatagtcgactaggacgggctttacggagggagccgaccactatagttggcctggacgactttgcactagcaagctatctatcttgattg

SEQ ID NO: 20532 - DNA, 257 bp, Zea mays
  unsure (1)..(257): unsure at all n locations
atgtacaagcacttcagttgaaattctcttcttgttctgttgcacaggtagtaaattttttttacatatgcttttgttaaataggataactattaaggtccttttgacattaacaagttatcatctgtagtatcagcattntaatacgcatactatcagtgtctttcagattatacctctacttctagataagggatgatatacttgtgtacttatgagctgtgagcttgagagatgattttttgtcttttgcatct

SEQ ID NO: 20533 - DNA, 386 bp, Zea mays
  unsure (1)..(386): unsure at all n locations
agcttaccgcatntgaagcaagatcgctttcccttggtcttagtcttgctcggctgtccattgcgaccctttatcaccgtcttgaatctcttgatgatgagggccatttcttcatcattaagaccggctgcctcaatttgcgccaccttgctgggtagtgcctccttgctccttgtggctttgagagcaaaagggtgcgggtcgttgatcggtccatttaaagcgtccgccacataccttgcctccttgatcattattcgcccgctgacgaattttcctaagacttcttcgggcgacattttggtgtacctgggattctcacgaatattattcaccaaatgaggatcaagaacggtaaaggacctgagcattattcggacgacgtc

SEQ ID NO: 20534 - DNA, 258 bp, Zea mays
  unsure (1)..(258): unsure at all n locations
cgagccatatgccttcttttcacacgatttctcattatattaatattntgcgtttgctatagtgcgagatttgactgcagaagagtagcacgaggattgaacagntntattctctnntatttggctcttagttntcaagtttttgatctcttgaagtcttgattacattctttttgttcaaactacttgtagagggaagtggttgaaatgatgtgcagtggtttttgtgcttcatggactggagttatcaagtatcat

SEQ ID NO: 20535 - DNA, 280 bp, Zea mays
ggaccactatcggtaccctgagcctaggagaccccttgctactatataaagacgcacgacccacgcggatatcttgagacacgtgtgaatagagatgtatgtgggaccaggccatgactcgccccagccttgggcgactacaatgagccagcaacagcgcctgaccccagcacatgggagggtccggagccgccacgtgaccatagaaaatgatatactccaaggcatcaacagtgagcccaaacccccatgggaaaccgctggaccactgtatatacag

SEQ ID NO: 20536 - DNA, 438 bp, Zea mays
  unsure (1)..(438): unsure at all n locations
agctttacacaaagcaggagatatccaacagaatggtatggcgtatcctagcaagagtgttgcatgagttgaacatgaagagccgaaggctgcattatggaatcatgaggactggtgcaatgtctgctgagatatctggaataacaaaagaaggttagaattggagagttcctgttgacattgagaaaagaacttgtggttgtggacaatggcagatttctggaaaaccatgcactcatgcaatagctctattttgtcagcttaaaaaacttaacattgagaactttgtagatgactactattctgtagagaggttcanattaacttaccagtatacagctgctccattgggtgataagactcattggccaaaatttgaccccgggtttaaaatgattcctccaaagctagaaagacctgctggtagaccaagaaaga

SEQ ID NO: 20537 - DNA, 194 bp, Zea mays
tctaagtctagctcctcacataataccttttgcgaacattgtgccaaatatcatgcttctttgtgtctaactaaccatgcaaggaagaaaagcccacacgtgaaggtcaaagagatattgaaaagatgctctagcaatgatgggttaaataaagttgaacccaagtacaagtccttaaagtccaacaatggaaa

SEQ ID NO: 20538 - DNA, 255 bp, Zea mays
  unsure (1)..(255): unsure at all n locations
agcacgtgtaagactaaaaatgtctattttgagaaagacagaccctgtgcagcttgcttatcaagtgaacatgttggaggaagacatccttccaatagcctaatgactacatcaagaccgctagagcttcttcacatggatctctttggccccggtgcttatcttaacattgggggaagaaaatatgggcctgttataantgatgaatatacatgcttcacttgggtattctttttgtaggataaaagtgaaacc

SEQ ID NO: 20539 - DNA, 335 bp, Zea mays
  unsure (1)..(335): unsure at all n locations
agctcgcatttgactactcgctgatcgtctttcgcgtggccaatagaatcctgatctgaataccttnccgactagtgttctggatgctgcatgtactccacactgccctgcatggactttctccagaagttgcttcccggtggacgggagaacgcacttcatgatgacgcctgacgcgccccttctgtataatacctccccaatgagtgtatagtgagctgattgtctggcaatccgctctgccgagatcttgtcatctggntcttcttcattctcttatatacctaataatcgggtgtctccagtcatcagagtccgactcgggttgatctatg

SEQ ID NO: 20540 - DNA, 432 bp, Zea mays
  unsure (1)..(432): unsure at all n locations
cagcttatcagcagtacaagcacaagagagaaagctgcttcagcggatcaaccgaagcctatgctcctgtgtgaagacatagcagaccaaaaagtactgttgggatctcagttatctggtgaacaaaaaaagactttgttaaggtttttgttcaacaacaaagatgtcttcgcttggacagctaacgatctctgcggtgttaatagagatgtcattgagcattcactcaatgtggatccatcttttaagccaagaaagcagagacttangaaaatgcctgaggataaagccgaaggtgctctaaatgaagtaaagagacttctcagtgctggtgtcattagagaagtaacatattcagagtggctaactaacactgttatggtgaagaaagcttatgggaaatggagaatgtgtatttgatttacagacctc

SEQ ID NO: 20541 - DNA, 468 bp, Zea mays
  unsure (1)..(468): unsure at all n locations
agctttatgagantagtaatagagagataagtnaaaaggtaaaaataaagagtccgttgaaaatgctctcagatactgttgtagtttgggtggtcaaaaatattttctcctaagattctttcggttgtagctagaacatgtcactttttcttattctgttggagcgctgcttctagttggaaaaaaacgctccacagacttcgaatcaatttcatttcatctaataaaaagaccgtccttttaaaaaaacaggaccatttaatttccgtacaagtataactaacacacttgagaacaactagcacggtcctttatctcaaaaacagaccattgatcaaaaacgtctccaccgcgtagtcggactcttatgcatgcgtggcggtgccgatcaacctaaggatngactattattctggttttttgccctggttaccctttgggaatngattattatgantagttctatgc

SEQ ID NO: 20542 - DNA, 255 bp, Zea mays
ggcataatctatcactcttgcacgttttacttgcactagggggatcgaggcttgaatgggcgtccgtgactatgaactctatccgcgggattcgcatatagaaaattgtctcaacatggattttagggactcctaaagcctatgaaaactgtagcaacaggaatcccaagaataatcacgcatggtctaccaatggcagctcatgtctaaagccattcatcaccaaaggttataggtcatgatgccttgtatgta

SEQ ID NO: 20543 - DNA, 460 bp, Zea mays
agcttatgaagattcttcatcccaacatgggccagtctgcggtgccagagccaacccatgttagtcttagcaattaagcaagtgtcgagttcagctctatcaaaatctactaagtatagctgaccctctaacactcccttaaatgctactgaatcatcacttcttctaaagacagtgacacctacatcagtaaatagacagttgtagcccatttgacataattgagaaacagaaagcaaattgtaatctagggaatctacaagaaaaacattggaaattgaatggtcaggagatatagcaattgtacccaatccttttaccaaacctttgtttccatccccgaatgtgatagctcgttgggaatcttcgtttttctcataggaagagaacatcttcttctcccctgtcatgtggttggtgcacccgctgtcgatgatccaacttgagcccccggatgcat

SEQ ID NO: 20544 - DNA, 213 bp, Zea mays
  unsure (1)..(213): unsure at all n locations
atctccttatatgctatgactaatgtgttntctagtctatntcaaaccaagtcatatgtatattgaaagggaattggagtcttcggcgaagacaaaggcttccactccgtaactcatgcttcgccatcacttcgagcaactctctattccttcgggagaaatgagcatcaaggaaaaggacttcgtctttggtataatcttaactcatttact

SEQ ID NO: 20545 - DNA, 437 bp, Zea mays
  unsure (1)..(437): unsure at all n locations
agctagccagtacttgtcgaagcaacaacatctaccagcacagcaactacagaccataccagtgacttggcccttcgcatgctggggactcgatatgattggacctttcaagaaatctcaaggaggagcaattgacaaattcaccaaatggatagagttcaaacccattgcttctttaaccttagctaaggccgtggaattcatacaatacataatattcagatttgggataccaaacagcatcataactgacctaagatccaacttcacaagttcagagtttttcgatttctgcgagcaaaaaagcattcagatcaagtatgcttctgtagcacacccaagagccaacgggcaggttgagcgagccaacaggatgatactggaggcactcaaganaaaggtctttgataagaatgaaaagttcacaggagagtgga

SEQ ID NO: 20546 - DNA, 425 bp, Zea mays
acaaatttggagactcccaagctacctttattaaatgattacacaagaagtctcaagaacaacaatatcacataataggtgtttgcaacaagctcaagagatgagagtgagaggggagaggaaaaccaaatccgggagcacaagcacaaacctcacaccaaaggggctccttcaatcgatttgaatcgagagctagtttgggtgtgagaggaagaataagtgtgtgtttgtctcaagttaggtgtgcaatgaatgtgtgggtgaccagcggttatgaaaggagagagatgtgggaagctatttatagactcttctcaaaaagagttgttgtgcttgatttttccagggaggaccatttgaaccgcccctggctgactgtcaacctatctggcagtctgactggcagacttgtggacagtctggtc

SEQ ID NO: 20547 - DNA, 473 bp, Zea mays
tcgacccggatcttaagtcaccgcagctgcagctgtcaaattgggacccacactttcttctcatatagaaatacaattggtaactaaattataggattggttcacattaaaataagatatgccaatctctacttatctcgatgaagaaggcagtctagaagatcacgagggaaaggtataaacactaaagaaactttacttgcaaattctgttggaacatatttaaataactatctaaataactatcttatttaaacaaggtctatgtatgtccgtagcaacgtataggtaactaactatattactatgaagaaagtaaggggtaggctaaccctctctgattctgcctttcctatctccacaaatgaactcgacacttttggcacaaccatccatgcatggcctcctccagctcttccgcgcctctcgctccaaccacgccgcgcttcgcataccacggccttcagccacct

SEQ ID NO: 20548 - DNA, 132 bp, Zea mays
atcataagaatgggaatcttcgtatgggttgtgaggagtcaaagtttggaaccaagtgcaatatgtttctgcagtatgcacgaaactttatatgagatgaaaccctgtggtaaggagcagtatcacaataac

SEQ ID NO: 20549 - DNA, 416 bp, Zea mays
ttaagtcacctgccgcatgcaagcttgagaatgataaatttgagagggtttgaatctctaatcgtgtgattggatgcctgcgctcaagcagctaagctcgccccgagcttggccctctagatacccccgttttgtgtgtatctgtggatgcagaaaatggctcccacaaaggctagatgcatcggtacgtacatgttcagccttttggatacaacaaaccaaacacacgtcagatgatggttaatgtatgtggtgagtctgactctcttaatgcgtgtaaccaaacacgatgttaaatgatttacaatttaagataaaaaaggtattatattagttagtaatgactgttgcaagttagctggaatctgatccattgcgataacaccagaatacgtggagggaacccacaacccagt

SEQ ID NO: 20550 - DNA, 218 bp, Zea mays
  unsure (1)..(218): unsure at all n locations
catcgacactgtgcttaatcgactcagacggagacactacaccgagactctcttctcgtgcaagtcacccgcccggtctcaacttgatcatttcaaaccccaaagttagtacctggcagaggtacatctttccgatgttgaacccatcatggccatgatggatccaccatcatagtntattntcgaanacatgccacccactttgcaacatcatcttt

SEQ ID NO: 20551 - DNA, 438 bp, Zea mays
  unsure (1)..(438): unsure at all n locations
gcttatcttgtgatttacaacaagttaagtgtctcctgagacttgtttagtggcaaaatccgacaagggttggctatggcatcgccggctagcccatgtcggtatgaggaatttggccaaacttcaaaaggataatcacatcattggactaacaaatgttgtatttgagaaagatagggtttgtggcgcatgccaagcaagaaagcaacatggagtcccacatcaatcaaagaatgtggtcacaacaaagaggccattggagcttcttcacatggacctcttcggacatgtggcctacattagcattggtggtagtaagtatgggttagttattgttgatgatttttctcgattcacttgggttntctttntgagtgacaaaggtgaaactcaagaaattntaaagaaattcatgaggagagctcanaatgaatttga

SEQ ID NO: 20552 - DNA, 246 bp, Zea mays
  unsure (1)..(246): unsure at all n locations
ttggacctcagagaaatactatagctattgataaatgtaaagggcatcaatgtatatttacacgggctgcgtgccgtgcctataaataagtgaacagtactcccgtactgttcacgctgacttggatacgctttgtccatcacgtgtgacctttactttacataatctgaaggacatntgaattcgttttatgaattaataatggaatatatcgatgatatgctggattatacttgccatatatat

SEQ ID NO: 20553 - DNA, 436 bp, Zea mays
ttaagtacgagctgcacttgctggctcgatacacccagctctctttttgtggaacgcgttaatggctaaaattttacagctgtcaagaagatgctcctcgacgaaaaaaggcaagtgggccgatttgttacctgaagcggtctgggcggtgaacaccactgagtgtaaggcgactgggttcacccctttccgccttctatatggatcggaagccatgaccccgcaagaaataaaacatgggtccccacggacagtctcgtcagctgtcccctacgtggacgaacccacttcaaaggatctcatcgatggagaccgcgtcttcgccctacaggctctaaataaataccaagcccaaacaaaagcatggcgtgaccacgcagtcatcccgagggaattcatcgaaggggacctcgtactcgtctgaacagctcggaca

SEQ ID NO: 20554 - DNA, 208 bp, Zea mays
  unsure (1)..(208): unsure at all n locations
tcgctgacatgtcgcatggtctgggaccttaggcagagcgctgtgtctatgcccttcaaagtaacatgtatgcagcaagcttgcttattgccaatatattgtgagtacaacacttctgttgggcttcggaagttaatggcaatatgaataagaaaggccatcctgaanactgattctcaagtcatttctggccatgttgacaaaagta

SEQ ID NO: 20555 - DNA, 404 bp, Zea mays
cttcatccccacatgtgctaagcggcgatgccacagccagcccatgctagtcttagcaattaagcatgcatctagaccggcctcctcttttgcaaaatcaactaaataaaggttgccgtctaatacacccttaaaagctagtgaaccatcacttcttctaaagacagacacatctacatttgtaaaaagacaattatatcccatattgcataattgactaacagataacaaattatatccaagagactcaactaaaaacacattagagatagagtgctcattagatattgcaattttacctaacccttttaccttgccttgattcccatcaccgaatattattgaatcttgggaatccttattcttgacgtaagaggtgaacatctttcttctccccgtcatat

SEQ ID NO: 20556 - DNA, 470 bp, Zea mays
  unsure (1)..(470): unsure at all n locations
tcgacccggatcttaagtcacctgcngcatgaagcttgacttacaccaaaccgcacccttattttatcacattcaatggctcaacaatagtggttagggcaaagtgaccaagctggtaccaattaattttgctattggttcatatcgcgatgttgttgactgtgatgttgtgcctatagatgcttgtaatattctgctaagtagaccatggcaatttgattcagattgtatgcattatggcagatcaaatcaatattctctcatataccatgataagaaaattatttngctttccatgtcccctgaggctattgtgcgtgatgatgttgctaaagctaccaaagctaaaactgagaacaacaagaatattaaagttgttggtaataacaaagatgggattaaattgaaggacattgttgcttgaacaaaactgatgtaatgaatattggcttcactctgttgctaccctt

SEQ ID NO: 20557 - DNA, 320 bp, Zea mays
  unsure (1)..(320): unsure at all n locations
agctgactacaccnaccgcaccgcatctatacattcatggctcacaatagtgtgtattcaaggtaaccaagctgtgtacgaataattttgctataggntcatatcgcgatgttggtgactgtgatagtgtgcctattgatgcttgtaatattctgctatggagaccatggcaattngattcagattgtatgcatcatggtagatcaaatcaatattctctcatacaccatgataagaaaanttatttgcttcccatgtccnctaaggctattgtgcgtgatgatgntgctaaagctaccaaagctaaaactgagaacaac

SEQ ID NO: 20558 - DNA, 413 bp, Zea mays
cccttgatcttctccggaccttaagcgacgcggctgcagctttatgatctgtataaatgtgacagatattacccagttgataatgacgctagatttttaaggcatgaaccactgcagctagatccagatcatgagttggataatgttcctcatgtcggcgcaattgtcttgaagcataagctatcactcggccttcttgcattaatacacagccgataccactgcctgatgtgtcacaatacacatcaaaaggattttcaatatctggttgagccaataccggagcagtggttaataatatcttcaattgttcaaaggcttcgttacactttgaggaccaattaaatttagtatcattcttcaataaactcgtgattggtttcacaagcttagaaaaatctggtataaatcga

SEQ ID NO: 20559 - DNA, 84 bp, Zea mays
actactgccggagcgtgtgcgtcctctgtgcgggcataatcctcgatcgttccgctcgtgtcctaccaagaagctgggggaatg

SEQ ID NO: 20560 - DNA, 372 bp, Zea mays
agctaggagtctcagactttgaccttcgaagcatggcagagtcagactgccacctcagtttgcagagagcgcatatcccgctcaatatagcatggctgttattcattcattcgtcatccattttgttttttctttcagtcatgaatcatgatgatgtttataacagagaaggctctctcaacagttctagttgtcactgacaaaattaatacaacctcaacaagacgatacactaaactaaaatacatgtgcctatctctaaaagcatctttgtaacaaggtgtccaagatcattacaatctctaatagtagccaagcacgagctgtcgaaggtgaagcggtgagctgctgacgctgctgacgcctgacggg

SEQ ID NO: 20561 - DNA, 355 bp, Zea mays
  unsure (1)..(355): unsure at all n locations
tcttacacctagtacatattacaacatgttctacacaagaattagaattatntgctactctctaattagcatttanatcattggtgacactctctaaagtagaaatgggttcatgacaagtagatagttcacaagaaagcatttcatttctcttaatctctaatgcaagtgaattttgtgcttctacanaattgtcatgttcttcatacaacaaatnctcttgcttttctaanagcctattcttatcattcaaggcatcaatcaattcattaactttatctatcttagatctatctaagcccttgaacaagcatgaataatctatgtcatcatcatcactagactcattatcact

SEQ ID NO: 20562 - DNA, 461 bp, Zea mays
  unsure (1)..(461): unsure at all n locations
agctntctcatagtgtacaacagttaccctcaaaaggtctcaagctgcagatgtatctaaagaagagaaaaacaatatcctgaaagatttagaaaaaaggagacaatacatgcactacgaaggcataaaatgggcgttgttgattttgaattactcaccattattttgttctttccattcaatgtgcacgtataatactagcatgtgctgatggacttgactgtgctataaagaggttaaagagtgtacatctgacaaaccaccttggcttatttattgatgtaagtttggttaactgtgcatgcgaaatttatttttctacaaaagccatcatgattgttttcctacaaaacccaccatgagcctaaaggttatgagatattttcaatgactacttgatgattcttttcctttcttgttagaggtntaatttttatttctgtatatattcacattgccat

SEQ ID NO: 20563 - DNA, 465 bp, Zea mays
agcttgagtcgattcttctgcaaagaattattgatgcccaaagaagttataagggtatgaaacatatacatgagaaaatagaagtcggcgaagcaaattgtttcagaaaggataatcaaggtatagtatggtttaataaccgcatagttgtgcctaaagatgatgaaatccgccagcaaatattggacgaagctcatcttagtcgatattccattcatcctggaagcactaagatgtatcaagatttaaagcaacattatttgtggacaaagatgaagattgaaatcacacgctatgtggcgagatgtgacacctgtagacgtgtcaaagccatacaaatgaagactgctggtccactacaatctttgtccatcccaacttggaaatgggaggacattagcatggactttattgtgggattacccagaacagcaaaagggtttgattctatatgggttataattg

SEQ ID NO: 20564 - DNA, 401 bp, Zea mays
agcttatagatattgccaaagctattgaagcattcttctacatgaagcaactaaatgatagccagataacttactggatgatggctgccatggactcataattattggggaaaatggaaagaaaggcaataatatccattaatcaaacttagaatgtcagtgcaagttaccatacacggattaaaacaagagcaaaatgatcttctggcaaacagtcatgtgaaacaatgaaaaatgtagtgagttcaatatatatttcgtttttgttctccaaaaaaaccatgctgagatagaaagattgtgccaactgcgacgtccgttgcgacgagcggttgggcaggcaattgctccggtcaccgtcccgcggcacgacgcgcgcgcaagactgcggctcgcacgtg

SEQ ID NO: 20565 - DNA, 265 bp, Zea mays
ctctgaggcgtctatccagttgagctgaatcactgcacataagcagctaacacctgaaatgacaaatgtattacctaaagtcagagtatgtttccttttactccaataattaactcagaagaagctgctcgcaaccactctcgggtaaagagaacccttgccaaatttggaaagttttacgaagtttacaacacttggttcactctaacagactcaacagaaaccgaacaagcacaccaggtcacctcggtcgactatctactcc

SEQ ID NO: 20566 - DNA, 424 bp, Zea mays
  unsure (1)..(424): unsure at all n locations
tcttgccttgctacttttgttccttggcctgaaataacttgagaatcagatttcagaatggcccttcttattcccattggcctttccgaagccccaacagaagtgcttcgtactcagcaatattatttgtgcaactgaaatcgagcttggctgcgtaacatgttttgacttttgaaagtgccactaagaccgtatccgctcctgcaccgaatgttccccaataaccatcgcagaacactatccaaagctttgcatctttaattacttcttcttcgtgagcccctggcatccaatcaccgatgaaatttgctaacgcttggggctgaattgaagatctatgcacatactccatggagaattcgntaaggtttgcgacccatttcccaatccttgcgagagcttctctattcctcataatatcctt

SEQ ID NO: 20567 - DNA, 453 bp, Zea mays
  unsure (1)..(453): unsure at all n locations
agcttctagctntcgcttggcagctagcttattgtaggagcatcgatgccaacacacaaacctttctcttgcgaacttccacatggattccttccttgattggtcttctagtgcttcatcaacaaaacttgggtgaccacttctcatccaaaaacatatatgcttggatgatctggtactccacaagcttgctacaggccttcttctttttctccatagcaagaaccttactggaacactaccccacttaaaaagaatgagggtagaactattgaatcttggggatttgaactccttgaagtacctcataacaagggtgttacggggccttcttctgttgttgctgcttgaccaggctgcagagagatgactgtcacagggttgattctgggagaaccttcttatcttctcttcactatcttcttttctcttctcactttagctttctttctc

SEQ ID NO: 20568 - DNA, 244 bp, Zea mays
  unsure (1)..(244): unsure at all n locations
cgtctatatgcgagctctcgaagcattacgtcgctcatgagcatgtaaaatatctatgtgacgtggataccganatatgagccgcttccattcggctttaataatatagaaatggccattggagatgattgagtaggatattagttggctatacnctgcaatctacatccaatctacatggagaccaaactatcgctaagaatttgaatgactataaatgaaccggtggaatacgatgcatata

SEQ ID NO: 20569 - DNA, 445 bp, Zea mays
  unsure (1)..(445): unsure at all n locations
agctnttagctntgaagcttcggctttgaaaatatgtttttagcgtctccgaagatgtctgaagataagaaggctgttgctgagatgaagctgagccttgacgaagagaaaaacttggggtttcttatagcgatgtccaagaccaatacagaaaagattactaaggagattctggaaggtttgtccgaagatactggtgatagtgacagctatgatgtggacagtggtggcgaggactccgaagatcgtccatggcgaccaagccatttagtttatggtaaatcaactatcaaaaagaatcatcttgtcaacatgagaggaaggtatttccgggatttgtccattgtgagggccgatgaaagcgaaaaaacttgcccacaccctgaagagaatgaagtcgtagtgtaccgaagctttctgaaagctggactgcgatttcctttga

SEQ ID NO: 20570 - DNA, 221 bp, Zea mays
  unsure (1)..(221): unsure at all n locations
ctcagctatctaacctggaggaagctatcctaagggcgaagngttagnntgagcattgtcagtgcgttattatgttattgataattctcatcatatgcttcttgaagtattatatgtgttgcatcatatggactattgcctccgctgctatgaattaattggcatctattatgttcattcacttatagatattcatgtgggtttaaattggtatcttaatg

SEQ ID NO: 20571 - DNA, 458 bp, Zea mays
  unsure (1)..(458): unsure at all n locations
agctttatgagaatgacctaacaatctcttatacttaaaaaacagatctaagaccattctcaatgaaagtttcatgagtttcatgacattaattaatatgtcacatatcatttttgatgacatggcactacatttattatgaaataggtgaaactatcatttaagtcacatgttatcctataaaattgtgatataaaactcttcattgagagggtatatttcgttcttcatttcatctatgtggcaacattgaaaataaagttatgaaacaaccactgaaaatgtctaaagactcangttgtacgtgcccttaagcaccatggtttcttaattattncattaattagaagcacaagtcttaagcgtaacgagtacttactgagagcacctagaggnggggtgaataggtgatcctgtaaaaacttataactcaacgccacaaacttttgataagtgta

SEQ ID NO: 20572 - DNA, 237 bp, Zea mays
cgcttttttctcgaccttggctcccttaagtagggattgactggtgctctaacttcagggtcggctttgttgtgtacgtggaaaatccggtattgcacttcattttcttttttctgctttttttttcctagtttaaattactcctgagacaattacctgcccttccgatacctgatagcagagaagattcatgcagatatgggcttttcaagatagacggggtttgacatcagggag

SEQ ID NO: 20573 - DNA, 373 bp, Zea mays
  unsure (1)..(373): unsure at all n locations
agctnttatttacttcctacattctttttatgtctttcttttcggagggtgatgcccaaaggggagaagtttaaggaccaaagccatgaaaactatatcaaacagaaaacaccacaaatttaaaattttatatctacaaatggtatttcaagtgggtttggttatttggtcctaaaataggaagtaagtgaattatggagttagggggaggcttaacgtcataatatcactaagtggggataaaacatgcatcctagcaagtagattgcatattttcattcaaatgtttgttatatttgcttgctttggttgagttgtcatcaatcaccaaacagggggagatcgtaaagaaaaatggactctgggcccattt

SEQ ID NO: 20574 - DNA, 378 bp, Zea mays
agcttcgcacctctgaactaactcggctgcatcgttcttcttctgtggtcaatagaatcctgacctgaagaccttcccgactagtgttctggaggctgcatgtattccacattgcccaacatggacctcctccagaagttgcttcccagtggacgggagaatgcacttcatgaggacgcctgatgcaccccttctgtataatgtctccccaatgagtgtatagtgagccgactgtctggcaatgcgctcttccgaattcttgtcgtctgggtcttcttcattctttatatacttaatgaccggccttctccagtcatcagagtctgactcgggttgatctatgatgttgcactcttctgtttgatccattgagatact

SEQ ID NO: 20575 - DNA, 437 bp, Zea mays
  unsure (1)..(437): unsure at all n locations
agctngaccaatatatttgaaccacataaagtccttttatttcaaccatataaagtccatacctactaaattaaagatattaaacaatgcaagcattatttgttcacataaagtctaaatattaaaataacataaagtccatagcttactgaattagagaaattaaacaatacgtgcttcattgggctggatcggccaagcccagcccatatgtgcgggccatgccagggaccgacaggtcggaatatgaggctcggtccaagctcgcctttgggtcatgctaacctatccatattatttcatgctggatcgtgctttgggctcctgattttgagtcgtgctcgtgttgtcccaaaaagactagcccatattcccagcactattttgcagtgaggagaatggatagaattgagcaagctaaaataaactttttattc

SEQ ID NO: 20576 - DNA, 460 bp, Zea mays
  unsure (1)..(460): unsure at all n locations
agcttatgcaacatcgtttgagatggtttggacatatccttctaagacctgaagaggcaccagtgcatatcagaataattaggcgtcccgagaatgtgaagagaggtagaggtcgaccaaccttgacgtggacagaggctgtgaagagggacctgaaggagtggaatattgataaagagctcgccgtggataggaaggggtggaagtgtgcaattcacgtgccagaaccctgatttgtagtttcgcttttcctccttaatcgtttgaccttttcttgtgcccctttagatcttgctggctcttgggggttntatctctttntatgtgtttccccgtttcgtncgttttcagatctcctttgcctttgtctcccttttcttttctttggggctgagctctgaggttttcatatggggtttcatctctagcctacccaacgtgctagggacaaaaatgcttt

SEQ ID NO: 20577 - DNA, 453 bp, Zea mays
agcttattcaaggtttagatagaactaaaattgattatatctatgaattaattgatgctttgaatgagaagaatagattgttagagaagcaagaggatcttttatatgaagaacatgataaatttgtaggtgcgcaaaattctcttgctttagaagctaaaagaaatgaaatgctttcatgtgaattatctacatgccatgaatctatttctagattaaagagtattaatgatgatttaaatactaagttagaaatagctaataaatcaagctcttgtgtagaacatgttgtgatatgcaataggtgtaaggattttaatgttgatgcttgtagtgaacacttaatttccatttctaaattaaatgatgaagtggctagtcttaatgcccaacttaagactagcaagaatgaccttgataaactaaaatttgcaagggatgcctacacttttg

SEQ ID NO: 20578 - DNA, 55 bp, Zea mays
cttacactacttctcggacggctaaactcatggttctctttttcaacaatcctca

SEQ ID NO: 20579 - DNA, 305 bp, Zea mays
attttcatcgcaactctcatatatatatatatgcgcagcacaactgcacgatggcccccatgatacacaagggttcgctattctaatgaagggaaggtgtttttttggaccttctgttaaaggcctgtgttcattttgcaatctaaatttgttacaaaggaacaaactaatactacgaggggctactgttgtgggcctctctcttcgaaagcctcaaaaaaccgctaatatttgtttaatatattttaagattacaggagctttgtacttaaaagcttctcctcttgaagggctcatcctcttga

SEQ ID NO: 20580 - DNA, 460 bp, Zea mays
  unsure (1)..(460): unsure at all n locations
agcttggatgctcaacgaaaattnttatttctctattgcatatatcnctatttatcaagagtattcatgaaagtttcaccaagtttgggattatttgatctcaagaatagccaaatttggagcctgttaaaaactttatttcttgaaacgaatgcaaacccaaaaatcaatcttgactcgcaaatcccatccaaactcatttattcgaacactcgacaattgtagatcgatcagtgtctgaatttgattgctcgacttttgatccatgtctaaaaattaatccaaatccgtactatcaaatggaatacacagtatatcatcctctaattaattctgtccgacttagctcaatatctttgtgtccaactcacattcaaaagaatcaacatcggcgatgattttctaaaggtcgcgatttgtctccttctatataaatccgaaagtcggtcatatcctgaga

SEQ ID NO: 20581 - DNA, 209 bp, Zea mays
  unsure (1)..(209): unsure at all n locations
ttactactgtatgaagacgcagnacccacgccggctattttagtcgcatggtaaaggagctgtacatgggaccagaccatgacttgtcccagtctcgggcgattactctggaccagcaacagcgcctgaccncaccatgtgggcggctccggtgcccgcacgtggccagagaaagtgatatactccaaggcatcaacagtgagtccgga

SEQ ID NO: 20582 - DNA, 437 bp, Zea mays
gctttcttgtgcaagccacttttgtgggtgctttttatttttctccattgccttttcgtcctgtgggaagggtagtccacctattattttcaggtcccagtgaatgcacacgctgtgggttttgttggggacttgttctcaagtgctatgagttaagaacaacgccacacaaaaaatattaatccataaggtccttcgtcctttgaagcattatttcccttatgatataatgattttcggacgaaggttatgaaagacgtacctttgttaacatagcctacgatgacgaagaacgaatcataaagaatatataggattacatatattattatatatcattatccacttatcattattgcagagaaacagaaataatatcgaattataaatataccttcagcttggaagggaatgaaagtacagatgtgacgcacgag

SEQ ID NO: 20583 - DNA, 153 bp, Zea mays
  unsure (1)..(153): unsure at all n locations
tagttcaactcacccatcattgacatctcaaatntctgcatcatcaccctgcttaactcttcacaagagctttgattagtagaacccaatattatgtcatcgacatagatttggcatacaaagagatcaccattacaagtcttatgtaagaga

SEQ ID NO: 20584 - DNA, 448 bp, Zea mays
gcttgaatgtaccatgtggacccacttcttctttctataatcggcagagtcagagctcccttcatgcaccctgcggtgcaagcaaccaaccgccagcaaatgcctgttggcactgtggagaccccagtcactacaagaataactgtccccagctgaaggcacccggacccacctactccaacgtggagaatgaccccaagattcccttggcacctacctccaaggcacctccttcaaacagtcgaccaagcacgactcagtaccacggcatagcacgggtcaaccacgtcgacgcttaagaagcccagccagctccgggagtagtgctcagagacttccttattgaatttactcccgctactgagctttttgattcatgagcatcccattcatttatagacactaagtctgtggagaagcatggcatcccctctacgcccctagctat

SEQ ID NO: 20585 - DNA, 419 bp, Zea mays
  unsure (1)..(419): unsure at all n locations
agcttgaccggccatgtccacgtcacgttgtagtttaattttcatttgcctatataccgacgccatgtcaccggtgggggtccatgtcgacctgacctttggagctaccgtctaatccttctttccagttcttctgatcatgtcaaagatttgtgaacggcaccggcacgtgttgttaaaaagagggcagaaggcgttagattttgttttgtgttttagcacaaccacttgagatggagacgacggtttgttctaagatatttttttaggttttggtttaactttgagggcaacggatgttttatttgaagcttttataatctatcccggagaaactattcagaagacgacaaanacatgtttataggtagttagagcaactctagatagaaaataaagttagatgagaagtatttaat

SEQ ID NO: 20586 - DNA, 112 bp, Zea mays
tttttcgagggggggcagtaaactaacctgattactcattagtgtttgccaccacctgcagatgtgatgtcactaacgaactcacctctgccataacataataattctttgg

SEQ ID NO: 20587 - DNA, 425 bp, Zea mays
  unsure (1)..(425): unsure at all n locations
tgactagtgagagagatttgcttgtgttcttttgagctcttgcgcttggattgctttcttctttcttgaatctttcttgcaatcaaactcacttgtaattgaggcaagagacaccaatcttgtggtggtccttgtaggaactttgtgttccaagtgactgagaagagaaagctcactcggtcccagggaccgtttgagagaaggaaggggttgaaaaagacccggcctttgtggcctcctcaacggggagtatgtttgagagaaccgaacctcggtaaaacaaatccgcgtgtctcacttctctattcgcttgtgaatagttntccaccctctctcgcagactctattatatttctaacgctaacccggcttgtagttgtgtttatattttgtaatttcagttcgccctattcnacccccccccc

SEQ ID NO: 20588 - DNA, 380 bp, Zea mays
ttgacttgcaatcacgggctgacccctttttcggctgctggcttgtaaaacaccttatttaactcggttaggatttctgaccctaaggacatggccccttacaaacggttgacaacttcccttgctggaacacggcaacaggactggactagtcaagcttgacctcacaatacgagttctgtgactgctacaagacattgcccacaattctctgacgctaagactggcccgaatctcaacgttcagacttcgcacttcaaagactttcgctagagatgcgcagtgctaacagcttctgtgcatcagcgcgctctcgacagagccttggaagaggacaaaccacacagctaaacagacgcacattcataaagacccgacat

SEQ ID NO: 20589 - DNA, 450 bp, Zea mays
  unsure (1)..(450): unsure at all n locations
catgcaagccgcagtaagaaaaagaatgctgattacttttttgaacaagngcaacacgaacctaaaaacacatatacacaagaaaaggagaccaaaagtgaatgtgacacattattaagacatggaaccataaacacttcagtaattagataatagattaatccacctcatccattaaaagcaagcccaacggtatctcttccattaccaacatccggtgcattcatgcctctctgttctcacatgatactggaagatcatcatcggttcctgtaaccatagccaaatttcttagtacatcatttcaaatgttgttacctgattggttcaaactggcgggcaggtaaaattctgaaagttgctctgcttgtacaaaaatgtgacgttcctgatgttctaataaaaaaagttcatgaattaaccaacagaagaaaacatatcatgaattac

SEQ ID NO: 20590 - DNA, 316 bp, Zea mays
  unsure (1)..(316): unsure at all n locations
tacttagacgggatagtttgaaatgcctagtatgatacagagtattagatacatgcattagaagtggttgaagtggtctcgtagatagaaaaaagcagttatanagaggatattggatccacgttcattatgctcgacgtagttgcctcgtatgacttgtggatntggcatgtgaaagtcgcctagaggcggtgaatagggcgaatctganattataaacttaagcacaactacanagccggttagcgttagaaatatgaacgagtccgagagagaagggtgaaaacatattgcaagcanataaagagtgagacac

SEQ ID NO: 20591 - DNA, 451 bp, Zea mays
agcttcgcacctctgaactaactcggctgcatcgttcttcgttgtttgtttatagaatcctgacctgaagacctttccgactagtgttctggaggctgcatgtattccacattgcccaacatggacctcctccagaagttgcttcccagaggacgggagaatgcacttcatgaggactcctgatgcaccccttctgtataatgtctccccaatgagtgtatagtgagccgactgtctggcaatgcgctcttccgaattctagacggcaggttcttcttcattctctatatacttaatgaccggccttctgcagtcatcataatctgactcggggtgatctatgatgttgcactcttctcgttgatccattgagatactcggctgtagaatttcttgcacaaagacttcgggtgggacctgagttcgactggatcctatcttggacaggaca

SEQ ID NO: 20592 - DNA, 384 bp, Zea mays
actagcttgccgctagtcgactagtgtagttcgcgacgagtaccttctcgaagcggctaaacatatgtttttgccacaaagaatattttgtgcacgtctcttgatgttcattgtggaaaccggccctcgccttcgatccatttggtaaagtattcgacagcgacgaaagcgaacttaaggttcccccgagccgtgggcaagggcccgacgatgtccacgccccagcgctggagaggccatgtgtgggcgatcaactttgtaaattgtgaagggctgcctgatcgaggagaaaacttctggcatgcttcgcaagacctcgtgacccgatttgcggcgcagatcattgcgggccagtagaaacctttgcggatcaccttaacagct

SEQ ID NO: 20593 - DNA, 411 bp, Zea mays
tctatattatggatttcctttgtatctgtccagttcccctcagcctttctggcaacttcctgactcccataaatagcaatatgtccttggtccgaatgtatcttcatgcaaagatatgctggatgaagaattgcttcgaaagcattgagtgttccgcggccaatgattgcattgtaagggtacttcatgtcgataatgtcaaacacaacttgctcagtccttgtattgttgacaaatccgaaggtcactggcatggtaatcttgccaagcgctataatgtgtctctctccgaagccacaaagagggtgcgtaacatcatgaatcttgtctttaggctctttcatctgtccgaaagctttatcaaatataatgtcagttgcactgtctatatcaaccaaaacattgtggact

SEQ ID NO: 20594 - DNA, 252 bp, Zea mays
ttcacaagtatactgcacgtacttgtcttgtactttcagccactgtgtttctgaagtgctgcactgaatattaacaacaacttactgacacaactgatactccgctgccgacatgacaatatataatttcaagcgcaactgtgtacactgagactaccgataacttctgctgcttctaactatactatagtgttgtagaacacagactaccactacatacactacatatatacaactgttaaacttaattgt

SEQ ID NO: 20595 - DNA, 414 bp, Zea mays
  unsure (1)..(414): unsure at all n locations
agcttagaatgctgacccatccctcaatactttgagactggtattcttaacaatcttggacatcttgttctcacaagcagagctagtttcaaagaactgcctctggtcatcatttaaatcagtcatctgcaatagagaggtggtaaacccggatgccactaagaggattctttatcttcttgcaaatataagccaattctttcattcttgcatacacttcttttctgtgtctctgatctaaatgcctgctgttttcagcgcttgaatctgcaagaacaaagggctcatagattaccatcatttgctcttgtgttgccgtcataaagctgcacatactntcattctgtcgaaaatgaaaaaggaactctcaaatcatgtcttctatacatgtaatgacacatgaacttgcatgca

SEQ ID NO: 20596 - DNA, 430 bp, Zea mays
  unsure (1)..(430): unsure at all n locations
agcttgtcnacaatataaacataaaagagttaatgttgcttctgcagatcagccgaagcctatgctcttatgtgaagatatagcagatcaaagggtactgctgggatctcacctatctgatgagcaagacaagactctgctaagatttttgttcaacaacaaagatgtcttcgcttggacagtcaatgatctttgtggtgtcaatagagatgtcattgaacattcacttaatgtagatccatctttcaggcccagaaagctaaggcttcgaaagatgtctgaggataaagctgaaggtgctctgaacaaagtaaagagacttctcagtgctggtgttatcagagaagtaacatatccagaatggctagccaagaccgttatggtgaagaaggctaatggcgaatggagaatgtgtattgatgttacagat

SEQ ID NO: 20597 - DNA, 387 bp, Zea mays
  unsure (1)..(387): unsure at all n locations
cttgatctagctgtctcgtgtgtactcctacactcacccaaggccacacctatccatattgcgagagtngcgtcgcactatacaaacagctagccatctccaccgaacaagcgagcgatgtgcacaccaccagctcagaaaacacaggggacccgctcccagacccaanatatcaaccctgccaagctaaagtttgactagacctaacatagaacctgcctncgccccaaggcttcgttagtgcggcaggctaccagcatcctccatttggaatgcctcctacagatgacgatgaagacctccaggatggcttggacctgagtatcaacgtcgaggaacatctcttactcaagagcctctacatgagcaactccaatctccagaagt

SEQ ID NO: 20598 - DNA, 422 bp, Zea mays
ttattcccaggtttagcttctccatctcttgacacaaagagttctcggaagtctttgccataagacattggcaggaagtcttatgactcagtgcatctgccaccacattggctttgcctgggtgataatggatctccagttcatagtctttaataagctcaagccatcgtctttgcctcatatttaattctgactgggtgaagatgtacttcaaacttttatgatctgtatatatgtgacagatatttcccagcagatagtgacgccaaatcttcaaggcatgaaccacagcagctagctccagatcatgagttgggtaatgctcctcatgtcggcgcaactgccttgaagcatacgcaattactcggccctcttgcatcagtacacagccgagcccactgccagatgcatcacaatataca

SEQ ID NO: 20599 - DNA, 434 bp, Zea mays
  unsure (1)..(434): unsure at all n locations
ggatcttaagtcacctgagcatgcactgcttgaatttaattttggtttgcttctaggcttgtctaacctagtttagataaccgccaaccaagcgagtgaaaaagcttaactcgggctcaaacttgacaagttctagcttttaagcttttggtacttaaaattcatttactatgcaattggtggtttttgagatatacatgtggtactgcacttagggggagtattcataactcatttcatacatgaaacctctagtgcaatacccaaatgcaaaatctcaccatttgcctatttcctctaaaaactatctagcctatggcacaatattttgaaaaattatgggagaatatgtgagggtaccaatatctatcccaacatgtgttcttctgtgcgcttataagctgggatttnggtgtggtcaaatttcctagaaa

SEQ ID NO: 20600 - DNA, 217 bp, Zea mays
  unsure (1)..(217): unsure at all n locations
ctaacctgcctagattgacacgttctcanatgaccacgcagttgatatgtaccagctctactgtcttcgactagtgccttcttataccaattacactcagctntcaatttgccagccactgtaactctgttaaattctaaccatacatctgacttgagctctcttttgaccnccacttgaagagtatcatcatcatctatgaatacattntcattac

SEQ ID NO: 20601 - DNA, 356 bp, Zea mays
  unsure (1)..(356): unsure at all n locations
ctcagctatatctgaagattacctgaggtagagatatctcngtcttcttcttctctaaaatcatgagatatgtaaggactgctctctcaagaagttccaccgaaagtgcttntattgtntcnaaaaacacatccgaaggtaagggcagcccctgtgctgctgacttagctagcaaatcagcatggtctatttgtcctctatggatatttntgacagaaaacccttcgaaggaagcttcgactcttcgaaccattatccagatattntcaagcttcggatccttagccttacaacttgtgtcaatatgacccgaaacaacctgggaatcagtttaagtatggcccttctgattccca

SEQ ID NO: 20602 - DNA, 334 bp, Zea mays
  unsure (1)..(334): unsure at all n locations
agcttctnctgaacaagcgccgcacttactgtagagtgtgaagctaccacatacagcagccgaggagcccctggcgctggtggagttagaagtgttaaatctatcaaatactgtttcagttcttctaaggctttttgatgagctgatccccattgaaaaacttctgctgacttcagtactttcaagaatgataaatttctctctgccgatctagatataaatcgattctaagatgctagtcttccttgtcaccgttgagcccctttctttgtgcttagcggctccatccgaaagatagcttccaatgtatttggattagcttcgatgccttttg

SEQ ID NO: 20603 - DNA, 100 bp, Zea mays
gcttatccacacagagatgccatcggtatcttttgtgtcatcaaaggcttcatagtacacaatattctggtcaacatagacaatgcggcagatattatat

SEQ ID NO: 20604 - DNA, 405 bp, Zea mays
  unsure (1)..(405): unsure at all n locations
cgctgtaaggggcaccgctgatgccgtggagtgccccctatangccgcatgcaaaggtaaggggctgcgttgcggttagtctgagggttcatcgtttaaaagtgcangtgtaaagtgttgtgttcctgtatcagccattcagccaagcagcaaaaaaaaaggaggtatcctctctccatgggctaagaagaggtcaactccagcaaagcactcgaacttgtgagcccagctggtcgctccagcccagtctctaaaaatgctgctgcaaggcgccccacggacccattccggcctttccctcgctacattatcccaccggcagtgcccacacacaccgncacaccaaccagtttcggatttctccgatgtacctgtcgtggcggtcaaaatctgancgccgtcatt

SEQ ID NO: 20605 - DNA, 284 bp, Zea mays
  unsure (1)..(284): unsure at all n locations
tatacctatgactagggttgaaatagactcgaanacacattagtcatagcatataatagagatatgatcaaaagtatataaatgagctatgtgtgcaatctagcacaagaagttgcgagaatcaagaatattgagctcatngcctaagttggtaaaagtntgttcatcaagaggcttggtaaagatatcggctaattgatctttagtggtaatgtaagaaatctncgatatccccttnntgtggtgatccctaagaaaatgataccgaatggctattgtgttag

SEQ ID NO: 20606 - DNA, 441 bp, Zea mays
  unsure (1)..(441): unsure at all n locations
ctgcagcttctaagggagaacacattntaggactaacctttgtttattntgagaaagacaggatttgtagcgcatgccaagccgggaagcaagttggcactcatcatccacacaagaacatcatgacgaccgacaggccactggaactcctacacatagatctattcggcccgattgcttacataagcatcggcgggagtaagtactgtctagttattggggatgattattctcgcttcacttgggtattctttttacaggaaaaatctcaaacccaagagaccttaaagggattcttaagacgggctcaaaatgagttcggcttaaggatcaagaaaataagaagcgacaatgggacggagttcaagaacttctcaaatgaaagctttcttgaggaagagggcatcaagcatgagttctcttcttcctatacccctcaac

SEQ ID NO: 20607 - DNA, 319 bp, Zea mays
  unsure (1)..(319): unsure at all n locations
gcaatgcacactatatcaaacaccatacaccacccatgtaatagtttatatctacaaatgactnttcaagtggttttggtatttggtccanacatagggagtaagtgaattatggagttaggtggaggcttaagtccataatatcacattgtgaggacaatcatgcatcttagcaagtagattgcagtatttcactcacatacttgtattattcgcttgctgtggttgtgttgcatcaatcactcaaaagggggagaatcgtaggaatatggacctcgggcccattggctaactgatgtttggtgtttgatgaacaaca

SEQ ID NO: 20608 - DNA, 413 bp, Zea mays
  unsure (1)..(413): unsure at all n locations
agcttcngccttcggaggccgaaagttgaaatgaatgaagctgtcgaagaatgccagagagccttcggtgttatctgttcttttattggaactagagatttagtacaagagcatattgccttcagggtatggccgctcgcggagaagtgggaaatgccgcaggaaaccataaaggaggccgacgaaagtggacttatcaggctaaagtacactnttaagttcggagataaattcgttgagccagatgatgactggttaaaaattattgaaaatttaagtgatgaacttcttggggcttattcgaaggccgaagatactgcaatgtcagcagccttcggaggccgaaaaaagaagaagctgaatcgggtatttgatgcaatcgggtttgtctaccctaactattgctatcccat

SEQ ID NO: 20609 - DNA, 314 bp, Zea mays
  unsure (1)..(314): unsure at all n locations
cctctcattgtaggttaactatagattcttaaatgatacaatatatagtgtagatcgtgggttaaggtactacttggaaagtgcatctttttgggttcttatgtgacagggtacttataatggattgcactacaagttacttctctaaataaaaaataagaatggaanatattatatngctaactaanactntccaaccaatctagttgntgacactagtngatttttcactattatcgntagtgcaaatcatgtatctacacttntaaaaatcttctatggataaccanattttacatgatataatagactta

SEQ ID NO: 20610 - DNA, 395 bp, Zea mays
  unsure (1)..(395): unsure at all n locations
caagctttgtggaattgggagaagatntgatcacttgtgtgtgtctagaattgaatgctanagctcttgtaagtagttggaaggtggaaaacttggatgatttgaatgtggggtggttgggggtatttatagccccaaccaccaaactatccgtttggtggaggctgtctgtcgtatggtgcaccggacagtccggtgtacacctgacagttgtcagtgtcccagtcactttaccaaaccggttgtgttccaccgttggatctcttactgctggggccccctggatgttcgttggtgcacctgacatgaacagtagaatgtttcggtgcgcaacttcgcgcgtgtcttaattctgtgcgcttcttgcgcgcatttaatgctttttgcagtgacct

SEQ ID NO: 20611 - DNA, 218 bp, Zea mays
tgctgctaactccatctaaagtggatatcatcctcaagtgtcatggaccgcttatgtatgcttgtatgcggacgagacacagaaggaaaaagaaaaaagtctcagagaggcgcatccatgtgcggatggatcacaagctagcatctcacacagaccgcaatgcgtacaggatctttccacgcgccatgctatgcaagacgaacgaagtatcactctcc

SEQ ID NO: 20612 - DNA, 254 bp, Zea mays
agcttatcctaaaaatatatccaaagatctatcttattgtattacatataaactatgaatattaatattttctaatactccctccatcccaaaatagtagttgttttagctctagatttttatgtctacgttcatatggatgattattaatatagacatatatatagaacatacattgattattgtatgaatccgataaaaaaggaaaacgacatttaatttgggacggagggagtatatgggggtgctctcct

SEQ ID NO: 20613 - DNA, 461 bp, Zea mays
  unsure (1)..(461): unsure at all n locations
atccgcgaagctcacatgcaagcatgcaagcttctaaagggagaacaccagacacgtctcacttgtgtactgttaacaaagatanaccttgtgcagctggtcaagcaggttaacaggtgggaagctctcatcataccaaaaatgtgatgaccacatcaagacctttggagctgattcatatggacctcttcagacccgtcgcctatctaagcatatgaggaagtaagtatggtcttgttatagctgatgacttttcccgcttcacttgggtattctttttgcaagataaatctgaaacccaaaggaccctcaagcgcttcctaagaagagctcataatgagtttgagctcaaggtgaagaatataaggagcgacaacgggtccgagttcaagaaccttcaagtggaggagtaccttgaggaggaaaggatcaagcacgaattcttcgcttcctacacacca

SEQ ID NO: 20614 - DNA, 393 bp, Zea mays
agcttctccttttgactgtctttggctgctaacctcttcatagaagaagctcctcagctttgctcctatctcatacactagtgtggatgaaagttggctttgtcactcttcgatagagcctgaaacatgatttagaacataatgtagcactttgaggaccttcggcaatagagacccccagcacatatcatacaaagttgtatcaattctggtgggtatccgaattagggctacctagattacgcccctaaaacacgattaaccccaagaccaccgtcacacacattccctgaggtcaaaagagtgcgaaccacaacccgcccaaagccactctcggcagtcactcataagtccgcctcgcccgagcctactctcaagaccaggtacgttctc

SEQ ID NO: 20615 - DNA, 224 bp, Zea mays
tctgacttccatgaatagcaatggacccttgatccgaaagtatcccaccaataaatgcattgtatgggtattccatgtcaacaatatcacacacaacctgttcatgtcttgtattgaggacaaatgcgaaagtcactggcattgtgatctctccaagtgctacgatctgccttgctccgaaaccacagagagggtgtgtagcatcatggatcttattctctggc

SEQ ID NO: 20616 - DNA, 237 bp, Zea mays
  unsure (1)..(237): unsure at all n locations
atgctagtcttagcaattaagcatgcatctagaccggcctcctcttttgcanaatcaactaagtaaagtttgccgtctaatacacccttataagctagtgaaccatcacttctaaagacagacacatctacatttgtgaatagacaattatatcccatatngcataatngactaacagataacanattatatccaagagactcaactaanaacacattagatatagagtgctcggat

SEQ ID NO: 20617 - DNA, 444 bp, Zea mays
  unsure (1)..(444): unsure at all n locations
agcttnctgcattattgtatactacacgtatatgcgtatgtacgtaccgtttttttttttgtatgcatggcgcgctggagtgactctatcgagcagttcggaacgcgtacggtattgacctgcggtgctgatctaaacagctttttatccggaacagagcaatgatggaggaggtccggcgctgcaagcaacagcgggtaggccaccaacacttccgagacgtgcatgtcgctgatgcgtacgtgtacgtcgatcaatcgaccgcggcccgcattgatgtcaaagcggctcatacggaatagaataggacagcgcgaccgtaacccgggcgcgtacggctcatacgtatgcctatcgtaattgtctgggcgacgctgacacttgcggtcgttcttcctccgatctaatcaacggacacaggtccctcacagctttgccatgctt

SEQ ID NO: 20618 - DNA, 367 bp, Zea mays
  unsure (1)..(367): unsure at all n locations
attaatttgagtatagtcttgcttgatctntactagtctacttngcaactccctattagcttcatttaatttgaccatattttccttaacatcttttatgggagttgtgagctcatttacacgtgatgacatagntnntatttcttcttttatttcatcactagcccttataactatgtcatacttggcatttaaagattcattntcatttntcaacctatcacacttagctttggactntctaatgatttgagtatattctttnagtaagtcagctaactcatcatatgaaggtgaagcanattcttcatcactatcactatcatcatcaatatttaatatcattttgtaccttttcgtcacccct

SEQ ID NO: 20619 - DNA, 267 bp, Zea mays
  unsure (1)..(267): unsure at all n locations
ctctgagactatcattatgcttcatttcatgtcttctccgagtatttggtagactatatttcatatcttatacttcccatgctactataaatgcatatattgttgacgtcatatttgntacctatgcataagggaagttagtctattcaaatcatgtcttgcacctccatttctcacatgacttttcctaagtagaagatctntgtcaggnggagtctntcttcgtctctaatacgggagaaaattctttctaaaggagaacactca

SEQ ID NO: 20620 - DNA, 451 bp, Zea mays
  unsure (1)..(451): unsure at all n locations
agcttatgaagattcttcatccctacatgagcaagtcggcgaagccagaactagcccatgttagtcttatcaatttggcaagtgtctaatttagttttgttatcagtgaaatcaactaagtatagctgaccatctaacactcccttaaaagctagtgaatcatcatttcttctaaagatggtaacatcaacatcagtaaatagacagttgtagcccaatttgcgataatgagaaacataaagcaagttgtaacctatagattctacaagaaaaacattagaaatagaatggttaggagatatagcaattttacccaatcctttgaccagacctttatttccatccccgaatgtgattgctctttggggatctcattnttctcatatgaggagaacattcttttcttccctgtcatgtggttatgcacccgctatcgatatccaacttgttc

SEQ ID NO: 20621 - DNA, 248 bp, Zea mays
  unsure (1)..(248): unsure at all n locations
tgctatgaatcaagaacaacgcaacacacaatggttaatatcacagcccttcgtccttcgaatcattatttcccttcggatataacgaagttangacaaaggntatgaaagatatancctcataatcatgataaaagatggagaatattcanacacagtacagaaagtaacataatttctgtaaacattattaataatctatntcccattatattatntatgtaaccaatgataaatacanatgtacc

SEQ ID NO: 20622 - DNA, 416 bp, Zea mays
agcttatgaagaatcttcatcccaacatgggctagtcgacggggccagagccaacccatgttagtcttagcaatcaagcatgtgtcgagctcaactctatcaaaatctactaagtatagctgaccctctaacacacctttaaatgctattgaatcatcacttcttctaaagacagtgacaccaatatcagtaaaaagacagttgtagcccatttgacataattgagaaacagaaagcaagttgtaatctaaagaatcaacaagaaaaacattggaaatagtatggtcaggtgatatagcaattttacccaaacctttgaccaaaccttgatttccatccccgaatgtgatagctcgttgggaatcttgggttttctcatatgaagagaacatccttttcttcccggtcatgtgggt

SEQ ID NO: 20623 - DNA, 361 bp, Zea mays
  unsure (1)..(361): unsure at all n locations
tcagctctaagggacactttggactaaaatgtcatttgagagaacaggatttgtatcgcatgtcacgcacggaagcaagttggtgttcatcatccacacaagaacataatgacgactgacaggtcactcgagctcctacacatggacctattcggcccgatagcttacataagcatcggcaggagtaagtattgtctagttattgtggatgactattcgcgcttcacttgngtgttctttttgtatgagaaatctcatacccaagagatcttatagggattcttgagatgggctcataatgagttcggcttaaggatcaagaaaataagaagcgacaacggaacggagttcaagaactctc

SEQ ID NO: 20624 - DNA, 442 bp, Zea mays
agcttgtcaacaatataagcacaaaagagagaaggctacttcatcagatcagccgaagcctatgctcttatgtgaagatatagcagatcaaagggtactgctgggatctcaactatctgatgagcaagaaaagactttgctaaaatttttgttcaacaacaaagatgtcttcgcttggacaaccaatgatctttgtggtgtcaacagagatgtcattgaacattcacttaatgtggatccatctttcaggccaaggaagcaaagacttcggaagatgtctgaggataaagctaaaggtgctcggaacgaagtaaatggacttctcattgctagtgttatcagagaaataacatatctagaatggctagccaacactgttatggtgaagaaggctaatggcaaatggagaatgtgtattgatttcacaaatctcaataaagca

SEQ ID NO: 20625 - DNA, 254 bp, Zea mays
  unsure (1)..(254): unsure at all n locations
ctttgtgattcgatgggtgagatggatgcttgctcttttactangacgtncttgggagttgatctgatgctatcaccatggagatctaataatatactttatacataagagacagaaattgtgtgcttctatgactccactgaatggccacttaacatgaanaagataatgctagcnagatgtgtttgactctganatcagaacctataangtaaaactcctacttgtagcactaaattgacttgtgagtacat

SEQ ID NO: 20626 - DNA, 467 bp, Zea mays
  unsure (1)..(467): unsure at all n locations
gcttgtgaagattcttcatcccaacatgggcaagtctgactatgccagagctagcccatattagtcttagcaattaagcaagtgtctagtttagctttggtattattaaaatcaactaaatatagctgaccatctaacactcccttaaatgctattgaatcatcatttcttctaaagacagtaacacatatatcagttaaaagacaattgtagcccattttgcataattgagaaatagaaagaaaattggtatctaaagaatctacaagaaaaacattggaaatggaatggtcaggggatatagcaattttacccaaacctttgacccaaccttgatttccatccccgaatgtgataccttgttggggatcttcatttttctcatatgaagagaacatncttttcttccctatcatgtgggttgtgcacccgctatcgattatccaacttgacccaccggatgcata

SEQ ID NO: 20627 - DNA, 380 bp, Zea mays
aaatcttcataatctcgatatatctgcagtccaaaactcgaattaatactgagtgggcactctcactcattactcttacttagcagatcactgtattctcttaaaatgattgtcagaaaggacttgtatccaaatcgacttgtaactggcgcagtgatattcggactctatagccacctaatgtctcatgacacttactctagataatagaaatcgcatgaaccccacagctgtcaatctcataacactatcataatctaaatagctggcatgtatcaacactacaggactaatatctatggtgaaagtgctggattcatgctactattgagatcgacgaacattcagatccgtcttattacacaactatcggacgtctg

SEQ ID NO: 20628 - DNA, 418 bp, Zea mays
agcttgtggaggttcttcatccccacatgtgctaagcggtgatgccacagccagcccatgcaagtgttagccattaagcatgcatctagaccggcctcttcttttgcaaaatcaactaaataaagtttgtcgtctaatacacccttaaaagctagtgaaccatcacttcttctaaagacagacacatctacatttgtaaacagacagttatatcccatattgcacaattgactaacagataacaaattatatccaagactctctactaaaaatacattagagatagaatgctcattagaaattgcaattttacctaacccttttaccttgccttgattcccatcaccgaatataattgaatcttgggaatctttattcttgacgtaagaggtgaacatcttcttctcccccgtcatat

SEQ ID NO: 20629 - DNA, 332 bp, Zea mays
ttatctactgcagctgttgaccattcgaggctttgtagtacaaatttgactatgtcttgctacgtgaatatgctttaccaatgattggtgcttttattaacaagacacttatggaggtccatggcatcttgttgtgtcttttccgctggacaagctttcagttgaaatttttgactccaaccaccggtgaactaccccaatcccctcttttattttctacctccagcccatttctcctaaaattaacccaaacttttacagtttaaatttaaaaaaacagccagtaaaaagatataagaagaacctctctgtgcatcacatcgctgcctttc

SEQ ID NO: 20630 - DNA, 387 bp, Zea mays
  unsure (1)..(387): unsure at all n locations
agctntatcaaatggacgtgaaaagtgccttcctctatggttcgatcaaagaagaggtctatgttgagcaacctcccggctttgaagatagtgagtatcctaaccatgtttataggctctctaaagcgctttatgggctcaagcaagccccaagagcatggtatgaatgcctaagagatttccttattgataatggcttcaaagtcggcaaggccgatcctacactctntactaaaactcttgaaaatgacttgtttgtatgccaaatttatgttgatgatattatatttgggtctactaacgagtctacatgtgaagagtttagtaggatcatgacacagaaattcgagatgtctatgatgggggagttgaaatatttcttaggat

SEQ ID NO: 20631 - DNA, 143 bp, Zea mays
gctactgatgactacacgttgcacgaatgaagaccataatgctaaggcactgtcgtacggtgcagcggctcttcgataagcagctgcgttaggctttctagtcgccgtgctatgacccccagcacgacacggctcgcgatgga

SEQ ID NO: 20632 - DNA, 303 bp, Zea mays
atcattatgaaaactgaagtaagatttgctaagaaaatgttaatatctgtcgcaactggtgaaaaaaaggcagcagctgttcttggccttcgcatggtctgcctcgttagttaagtgaagagctcatgtggcagcgtgtcaccattcaccgttggtagaactaataacacgttcgggaatgcaggacaatctaaccgctaggctgattctgcgacccaagatccaatgaataagaccaagatattatgaaacaatctcttcatttgttcttactagacaccattggattcaaatcatacatca

SEQ ID NO: 20633 - DNA, 456 bp, Zea mays
  unsure (1)..(456): unsure at all n locations
agctagcattgcatgaatagatttcttgtattgtatctatggcttgnctaacctagttgagataaccgccaacaaagcgagtgaaaaagcttaactcgggtcaaacttgacaagtcttagttttaagcttttagcacttaaattcttactttttatgcaattgctggttcttgaaatatgcacgaggtactgcacttagggggagtattcaaaacttaaatcactcatganaacccctaatgcaagccaaaatgcaaaatttcaccatttgcatattttctctaaagaattatctagcctatggcaaaatattttgaaaagtatatgagggtgccaatacatgtcccaacaagtggttatttgtgtgattataagttgggatttggtttggttggaaattagatagaaaaattcanaattttccaatctttcctctgtctgggctcaccggacagt

SEQ ID NO: 20634 - DNA, 181 bp, Zea mays
  unsure (1)..(181): unsure at all n locations
ctgactggacttctttttcttattntgcacgtcaatatcgttcttttggagaagcatattatctggtcagaaaaagtaatagaagaaggtagtcatagccgaagagaatacatgtaaacatgatgatatgatgcatgtggagaggtaccagatgtatcataaatatggcagctggctttat

SEQ ID NO: 20635 - DNA, 433 bp, Zea mays
  unsure (1)..(433): unsure at all n locations
tggtgggttgtctacaaagtttattcataagtccaccctgagcggtatgataactaccatgtaagccgtcccaatgatgatttttgtggtgtctatcaagaagatggtgatcagagaaaccatgattaagaaaattatattgatctaaagggatggtccttaatgaattaatttctcgattcatcgaaaccgtagagttaatggacgaagaaccaagtccttcaaatgcaaaacgtcgaaagtcaacaagacttcttgaaagactcattaatgcacgtgtcaaggacgaggacgaggattctgatgctgatgatttttattactataatttatgtatgtttattactataanttatatcatacacatngtttannattattttataatngagtcatttatgctaactattgtgtagaaactgtgccgatattc

SEQ ID NO: 20636 - DNA, 194 bp, Zea mays
  unsure (1)..(194): unsure at all n locations
tcacattcaaataggatatgtcaatctctacttatctcgatgaagaaggcagtctataagatcacgangganaggtataaacaccanacanactttactcgcanattctggtggaacatgtntatataactcttatntaaacaaggaatatgtatgtccataacaacgtatatgtacctaacttactactatga

SEQ ID NO: 20637 - DNA, 390 bp, Zea mays
  unsure (1)..(390): unsure at all n locations
acatattgagtaccgtagtgtccgtttactttaggagaaatgggaaaagtgccttcataaaacagtaacgatagcagctgaggacacgtaaaaagttagaactctagactctatgcagctcccagccgctggtggtggccacacgtggcctccacaggcaaatcaaaatatcagggtaagacaataaaagaaatttggagctgtccagctgctcgaagcctgatggggcagccaacatctatagaatagaagtagatgataatgatgacataagtgaagctggatcaaatatagatcttgcacatgacaacttgtgtgctatagtttangtataaagtgtggattatcttagtgctaaaaagcatataggttcttatatatncaatttaa

SEQ ID NO: 20638 - DNA, 398 bp, Zea mays
  unsure (1)..(398): unsure at all n locations
tcagcttgccataggcgatgatatacctgtatctctcggcttatttattttacataaacattctgcatcaccgctggcatctttcgaaagtggacgggcagctgaccaaccgaaaacaaactgtacaccaagtattggaactgttcttacccaagattgctcgatgataattcggcatatgcaaaacctttgatangcttagacttggttccacggccatacaaatattagcttatattgcctcgggaagtgggaaataacttcaaatttagcactcacacaactgtcaggcatcgacccgcttaaaattcgacatcactttttttcgggggcagttctccttatgctacacaaatctgaaactcttatgtacaatattttgtgtatactaacgatgt

SEQ ID NO: 20639 - DNA, 435 bp, Zea mays
  unsure (1)..(435): unsure at all n locations
gctagagacattattacttaatggtcatgtgttgtcctaaagacacacttcaagtcatcatattgatgcgccaaggaaccatataaagcctttcatgtccataccatttctgtaatggaccacactcgttcttttgaaacaattcaaagaacttaacccaatcaaatcagaatttaagataagagggacttaaaatctcattcccaatgatactcatcaagtatctatcttatggngaaaacatgaccaagagaattgtccataacttttcatttcatcccaacaatgggatgaccaattcaatcttacccaacatggtaagtatcatcactttgaaaagtataacatatgccacacttngtatgggaggatgtatgtagaatacattccataagaaatgtttgtgagaaacatatgccatatccataactttca

SEQ ID NO: 20640 - DNA, 261 bp, Zea mays
  unsure (1)..(261): unsure at all n locations
gcatatgcttcaccaagatccacaccttcgacttgtgaatatcctttggccacgagtcaggctctgctccttgtcaccacaccatgctcgtcttgcttggtgcggagaacccacttggntcctacaacattgtgattatgacgtggaactaaatgccataccttcgtcctagtgaaattggtgagctgctcttgcatcaccaccacccaatccgaatcttgtgatgcttctctaacttgtgtggctaatagaggaacaaaa

SEQ ID NO: 20641 - DNA, 370 bp, Zea mays
agcttctaaagggagaacacattttatgattaactaatgttcattttgagaaagacaggatttgtagtgcatgtcaagcggagaagcaagttggagtccatcatccacacaagaacattatgacgaccgacaggccgcttgagctactccacatggatctattcggcccgattgcttacataagcatcggcgggagtaagtattggcttgttattgtggatgattattctcgcttcacttgggtattctttttacaggaaaaatctcaaacccaagagaccttatagggattcttgagacgagctcaaaatgagttcggcttaaggatcaagaaaataagaagcgacaacgggacggagttcaagaactc

SEQ ID NO: 20642 - DNA, 430 bp, Zea mays
  unsure (1)..(430): unsure at all n locations
tggttgagagtggaagacattaacatctataatggggtattgtctcattgaagtggcttttatattgttggcggcaactgaatatgtagaacagatttttnttcatctatgagtgtatgtttggttgtatgcacaaggtgccatagtcatatattttctgccacactcgtttaaggttaggtgctcaaaatctttgccacatcttggtatgcctaagactaagagaatctcgtcacacttttacaagtcgttgaggagtgggaccagtatatcaatagaaaaatcttgccacaataatggctacaaatcaaacacatgcctaagccagtcaaacctgcctaatattangcgttgaaaccttgacaagttaacatataccnacatgccctaatatcatcaaaatgagtacaaaataaacggctgatgaatg

SEQ ID NO: 20643 - DNA, 286 bp, Zea mays
  unsure (1)..(286): unsure at all n locations
ctactatgtacgatggaacatggcattatgcatgtgctagacttcatgatggagctagaatactaagagaccgtggacaatcttaactagttattgctgcatttcgacttaataatctaactatttcatttatntagttatagaccaaacaacactccttttcatgtgcacggcatatagtntgaaaggagaatatggtcaaacattttcctaaatgatattggtggttgaaatgcccaacacacataattggactaactagtttgctctatattatatattctac

SEQ ID NO: 20644 - DNA, 362 bp, Zea mays
  unsure (1)..(362): unsure at all n locations
gcaaagcagcaagtgttgatcatttgtgccgccaatggattggtggatgacattgcagagcttagggagtgtaaacagaaacttattgagcagtgcatcagaaaacattggccaaaacctatctttaagtaaggttcttaactcgtgtcagtttgttggtatgaatcaattatgcactgagttctcagntgttgaccctcattgtgagtttcatgagttttggaagcgatagaccatggacttgaacttgcagaagtagttgttgatggagagatcaccctgaacgaaattttggaaggcagcgtcaaggtagagagcacattgctcgttgtttgcaaggaagttgtgtctccgggcaaact

SEQ ID NO: 20645 - DNA, 187 bp, Zea mays
  unsure (1)..(187): unsure at all n locations
cttatctggtcatctggtgcccgagctcatganataagatgtcagactntacattcactggtctttttaactgcagtgggcaatatggcacataattctgatcatatatcaatgacattatgccccttganaagggttatgaatccatntgcagtngcaattgcanatacaaattacttgactggga

SEQ ID NO: 20646 - DNA, 437 bp, Zea mays
tgtgtgctcgatcccattgtgcctagttacaacacgagcatcgatttacgtcttactctctcctaattctcttgcgttgcggtattttaaggacacatgcggtgttcacaatgatatgtatgtactccggtaatgcatatcggtgtataacatacattgaattacaagagtaggacacatgacatagaattatattggtaagatacggggtatcctaccgttagtgaagactagatcccttatcgagtatgctcgagtttataagggatggcgatgattagttggctatgcaatacaacctataagttattagaatagagatcgatggctcctcatatagtgcaagggtagggctacttagaacatgattggatggaaatatattttctagtagcttataagaatatctaagtacaataattatcatatgctctata

SEQ ID NO: 20647 - DNA, 289 bp, Zea mays
acttaaaattaatgatggtacaactcttgaatcttgggggattgaactctttgaagtacctcataacaaggagggtacggggccctcttctgcttgtgctgcttgaacaagctgcggagggatgactgacaccgtgtcgattctgggagaaccttcttcttatcttctcttcacttatctcttttcacttttcactgcctccttatttctctttgcgtcttcccactggacgattctatcacagagtattatcatcatacataggacgaaaccaaagactatgaaccat

SEQ ID NO: 20648 - DNA, 182 bp, Zea mays
agctcgtgaagattcttcattccaacatgggctagtttgttgtgcctaagcccacccagggtagtcgtagcaactaagcaagagtcgagttcagctctttcaaaatctatcaagctaactgaccctctcacactcccttagaaactatagaagagccacttcttctaaatagagcaacacca

SEQ ID NO: 20649 - DNA, 420 bp, Zea mays
  unsure (1)..(420): unsure at all n locations
tgcaagctttgtgttcagttctgatatttttgcttcagcttccgccagtaaaccttctgctgcctggagctcaaagttctttttctcaaaagcatctgaatgctcgcttattttgttttccaaatttccaattataacttcatgctttgtatcttcaagatcttgctgcatttgcaaggctttgctcaataacatactctacacaaacacaaccttcgtcagacatgtttttattagaagcaataaaggttaagagacaagtcattcactcttgaagttggagtaaaataaactaccaacgacatgttgtcgtcggtagcggctgatgtctgtttctagcttcnggaatccaatactctnggacagagtactgataactttggcccctgtttggtccgaatacactctaatttctcgtca

SEQ ID NO: 20650 - DNA, 360 bp, Zea mays
  unsure (1)..(360): unsure at all n locations
tatattatntaacagaggagatacttttattggtaaaccacctaagtcttccgaaaaccatatctttgcaaccataactctgaatttagtggttctcgaacctacgatctcatagcggcatgtagaatattnttacgctctttgntctcatgtttggggtattggtattttatgtacttcttggttatttgtatgtattgctacaagtagtaggaggttacgagtcactcgaagaccaatttggtgaagtacctgagatctcgagtctaatgcaagttgtgcccttaatcacttttctttacctaataatattcatgttaatcactgtgacatgcttangttatattaatgggatctaat

SEQ ID NO: 20651 - DNA, 362 bp, Zea mays
  unsure (1)..(362): unsure at all n locations
agcttgccaagccctctgacccggtcaaacttcgttgtaagccctagaccgacctcaccggactatggtcttccgccgccgcgcgtggaccgagttatccagtgagtccccgcccaaaaccttgcgctcatatcttctctggcatcccgtggacctccctgacccatttgattgaactatctcgtcgagagcaagccggactcctcgccgacgacgagcattcccgactgcgcgcgaggaccgaccgactccggccatctncgaccgagttcctgacaccgttgtgatacccgagatctgcccttcgaactcgaccacttcaccggagcaatgtcgccggcggtaagcccctccgtcctttc

SEQ ID NO: 20652 - DNA, 198 bp, Zea mays
  unsure (1)..(198): unsure at all n locations
gatccatcacanaacactgtccacgcttcgttggctttattcgtttacttctnctgagcccctggcgtccagtcagcaatgaagtctggcaacgcctgtgactgaatcgaagatctatgaacatattcaatacaaaattcgttgagctctgcagcccattttccaatccttccagtagcttctcgggttctcataata

SEQ ID NO: 20653 - DNA, 401 bp, Zea mays
  unsure (1)..(401): unsure at all n locations
agcttggtcattntattgctaactgtcccgtctatgatagtgatcaggaccaacggaacaagagggagaaaaagaagaactattagaaggccaagggcgaggctcatcttggcaaggagtgggattcggactgctcttcgtccgactccgacaatgaaagactcgtcgccactgccttcaacaaggcatccctcttccccaacgagcgacacacttgcctcatggcaagggagaagaaagtaagcactcataatactagtacttatgcttcttcaagtgaggatgagtctagtgatgatgatgagatagattactcatgcttattcaagggattagatagaaccaacgtagacaaaattaatgaattgattgatgccttgaatgataggaatatactttta

SEQ ID NO: 20654 - DNA, 481 bp, Zea mays
  unsure (1)..(481): unsure at all n locations
ttaccctgtagtctggactatacgatggctacgttacgtgtaccttatgcaggtgaccatttccagcattggcataatgaggactctaggggaaagcctcgtagtgagaccctagccattcacctcggaagtgaatacgggtctagctaacccgggctagaagggaatcgtgactcatgggtaaagatgcgccacctctgcagagtgtaaaactgatatatcagccgtgctcacggttatgagtagcctggactcctcacatgataattgaacttgaagatggaaataaatcgagatccgatgatctaccaatgggttgcttaagtggtttcatttaagtggtttttatatactcttaaacctttgtttaatgggaatacttgggaatcacacttattagtaagacaggtgggtgtaataaaatgttgccaactaanatgcttactgctcaaccttagcctcaccttggtaaacttacatt

SEQ ID NO: 20655 - DNA, 379 bp, Zea mays
  unsure (1)..(379): unsure at all n locations
agctttntgaaagctggactacgatttcccctgagcagctntgtcgtaaacgtgctgaaaatgtttgaagtctatcttcatcaacttacccccgaagcaattataaggctgaatatcttcgtgtgggccgtgagaagccaaagtctggagcctgatgcgaaaagtttctgcaacatacacgaattatcatacgagacaaaaccctgtggtaaggaacagtatcacaataattgtggctgctacagtttcgtttctcgatctgggtcaagctgtcccgtgccaacatttctgaagagatggcccggcgactggatgacacaatggttttatgtgaagaatgacctgaaagcacgggaagatattaaaggtataattatgc

SEQ ID NO: 20656 - DNA, 407 bp, Zea mays
  unsure (1)..(407): unsure at all n locations
tttggtcattcacatttcttggtaaaacctagtcttcaagggtcttatactcttctncttaaggttcttccacatgtgatcacagtcattagagcatagatgtgccctagccatggtaacacctgaggtgtacagctatcctccttattttcatacttacattcaaacaaatgctatcggctcgaattctaccactggctgagtcaattngaatggnggttgacatggtagtaattggaagattatgtgcgtctacccatgatgcagtaatgaaagaatgtgttgctccagtatcaagtaacacttctgcaatatgggagtncgatgggaacatacctactatcatgctgggggtctcctgaactgcttcagcttccaagtgggtcagtctcccatgattatagcgt

SEQ ID NO: 20657 - DNA, 364 bp, Zea mays
  unsure (1)..(364): unsure at all n locations
agctntgtggagctgctctaagcgaccaagtacagcatctaatttcctttaaggagtggcggagctgacaaaaactagtaattttcgtcaattaaaatgttttaagaggctaatagaaattggacaattttttatggatactctaaaggaccatataaatntatttggcccacgaaaatttacggattttctattgtatgggtcttagccagggttttagtaattttcctccgctaataaacataaaggctggtaaaaattagtctatttcagtgggctgtcctaagaaatcataaaaattattttggcctatatttttattttcttattatatagacctagctgcttataaaaataatttatt

SEQ ID NO: 20658 - DNA, 320 bp, Zea mays
  unsure (1)..(320): unsure at all n locations
tatgcttttatgtgaagacataacaaatcaaagggtattgctggggtctcagttatctgatgagcaggaaaaactttgataagatttttgttcaacaacaaagatgtctttgcttggacagccaatgatctctgtggtgtcaacagagatgtcatcgagcattcagttaatgtggatccatccttcangccaaggaagcaaagacttcaaaagatgtctgatgataaagctgaaggtgctcggaacgatgtaaagagagttctcagtgctggtgttatcagagaagtaacatatccagaatggctagccaacatttgtat

SEQ ID NO: 20659 - DNA, 319 bp, Zea mays
gcttgtaacccctactacgagcaccccggtgcaagataatataagcctcatcctccctcttgtgtttcatcttgcatcaatccatctggacagggacacacagcgtcaaattcactaatcggttgagggtcctcgcgggtccaaaacgccgacagttggcgcgccaagtaggggtccagctacgtgttggcaacactttcccgttgagttctagatggacaatcttcagcagcctcttcagcccgggacggtgctccgctttgggagcctcgagttcatgtcccgcgacgacaactacgacatggtactcctccccccg

SEQ ID NO: 20660 - DNA, 368 bp, Zea mays
  unsure (1)..(368): unsure at all n locations
tctaaagggagagcacattntaggactaaccaatggtcattntgagaaagacacggtttgtagcgcatgccaagcaggaaagcaagttggtgcccatcattcacacaagaacatcatgacgaccgacaggccgcttgagctactccacatggacctattctgcccgattgcttacataagcatcggcggaagtaaatattggcttgtaattgtggatgaatattcttgcttcacttgggtgttctttntgcaggagaaatctcaaacccaagaaaccttaaagggattcttgagacgaagctcaaacgagttcgacttaaggatcaagaaaatcagaagcgacaacgggacggagttcaagaactctc

SEQ ID NO: 20661 - DNA, 415 bp, Zea mays
  unsure (1)..(415): unsure at all n locations
agcttcggcatctttacttgcttcttcttcctgagcccctgtgcgccagttagcaatgaagtctgctaaagcctgngactgaatcgaagatctatgcacataatcaatgcagaactcattgagttccgcagcccactttccaatccttctagtagcttctctatttctcataatatccttcaaaggctatgaagaaggaacaattatatggtatgcttgaaaataatttcgaagtttcctggaagccatcaaaacagcatacaacaccttctccaattctgtatagnttttctttgataaactaaggacttcggagacgaagtatattgnggcttgctttttgagttgcccttcaagcttctcttggacaagtgccgcacttaccgctgagtgcgaagctgcgacatataacaac

SEQ ID NO: 20662 - DNA, 370 bp, Zea mays
  unsure (1)..(370): unsure at all n locations
gtctccattatagagcatgcttctagcacaatttaaattttcattntctatctcatgctcattaattntaacagntaattgagctatatgatcattttggttgttaattaaagccaggtgatcatgaatagcttctacattaacatctctacatctagtaccaatagtaacatgatcaacggtagatgtagagggtttataagattttaattcttctatcttagcatttaaaattgtattttcatctctaagacaggaaatagaatcattgcaaacatttaaatctttagcctttgaagttaaactagcattttcagttctaaggctagaaattgactcatttaatttatcaatcttagcatttaaacta

SEQ ID NO: 20663 - DNA, 255 bp, Zea mays
  unsure (1)..(255): unsure at all n locations
atttatattcattaatacaagtagagataattctatgacaatatttaaanggttatttcatattctatgatttatgtgaatgcttcattctttcgtggtatgcttacgaaggtatgtccttcgtaaccttcgtccgagatgctttatatcccgaagggatatatcgttatggaggacgaaggaccttaacacttaacattttttgtgttgccttgttcttaattcttagcatttgagaacaagtccccaacattg

SEQ ID NO: 20664 - DNA, 407 bp, Zea mays
  unsure (1)..(407): unsure at all n locations
tgccttcgcttctgttatcatccgcagtccaacggagtcgtggaacgcgccaatgggaaaatcttcacagctgtcaagaagatgctccttgatgaaaaagggcaaatggaccgatttggtacctgacgcagtctgggcactaaacacgactgagtgcagagcgactgggtttactcccttccgccttctataccgatcggaggccatgaccccgcaagaaataaagcatgggtccccgcgaacagttccgtcagccgtccccgacgtggacgagccaacttcaaaggacctcattgacggagaccgagtcttcgccctacaggccctaaacaaatactaagcccagaccanagcatggcgcgaccacacagtcatcccgagggagttcagcgaaggggacctcgtac

SEQ ID NO: 20665 - DNA, 446 bp, Zea mays
  unsure (1)..(446): unsure at all n locations
taacaacactggtatttctttggccaacttctccatcattcttatttatttctttggcatanatctggctggagaaataacttaactcaactattgctttgcacatggcgtccggcatattactaccaaacatgacatggataatcctctcctttaatatatggaagtcatggctctttaacccagttagttttccccgtttcaaattcacagctcttttcaagcccgcagcataaccatcgggaaatttaatttnttttcatccatctcattacctcgatcttgctttagaggaagacagaacaggcacgtggcgactaccgttgtcattgacacttgggttgtcgatcatanacattgtagatctcttcagcttcagattgtccttgttttcaaatgctgcggtgtgatgaggctcagcacatactttctgtgctgactaatgt

SEQ ID NO: 20666 - DNA, 468 bp, Zea mays
  unsure (1)..(468): unsure at all n locations
agctttctcgcacacagcttcagctctggttcatccttcattctccttaagnttcttcatacaacagatttgacatgtccgaaaggtccatgtccgaaggtacctgttcatgtattacactccagaaacattgtcaaatcaagtttttgaggaccttcggaagccgaaggcccccaacactatctttgctctcggacaggacggtttcctcaccggctcggttacccctgtgggctggacaaaatacttatggctcgttagctcactcggtccatagtcaactcggctcgttnntaatttgtcacgagctgagctagcttgatccgagctggagccagcttcttatctcgattgagctagcatttgtcagcaaaacaaagcatgcacttgtgtttcttcagccctagctctaacaagcaaataaacttttgagagtcatttagctatttgtacaatgaacaacatatg

SEQ ID NO: 20667 - DNA, 436 bp, Zea mays
  unsure (1)..(436): unsure at all n locations
gctgtccagaggctatggtgaggctggtggtcgntagaaaagattggtcacgacgaccgtgctcangcaatgatggtgggcggtggcgctcgctttccacgacgaactccggtgatctctggctcgggcggggctttgggtgcgcgagtgcatacggctaaggcctctggggacacttataggagagggcaaggtgtatacgcgtggagcatggcgaccacgcgcggggcgcgcgctgccgcggncagtccgcactcggtcggtcaggcaagcgatcgaactcgtggccttgctcggtctggacattntcaaacgcttattggctcgcgatcttctcgtaactcttccaaatccctgcacatgatttcttncttgtcgtttactcttttgttctcttacaacacttgagtgtatttgatctcggattcatgagata

SEQ ID NO: 20668 - DNA, 386 bp, Zea mays
gagcttgagtgaaacaaattgaataatggccctgtttgtttcatctactgcttgttgaaaaaacagcttatctgagaagctggtgaaaagcagcttctgcttgttggctgtttttagtgtattctgacaagcggctgaactgataagctgctgcagaagctgcctgtttggcagaacttctgcttaaatttgtgaagaagctgaaaataagctgtgccaaacagggccaatatcacgtctaagtctaatgcaactgacagttaagagccttctcctaatatagtaaagttaattagggtgacaacagatgttcttggaccctcgtgatggtcatgtctaccatgttatacacccatgagtaaatatcacccctctataaacatgag

SEQ ID NO: 20669 - DNA, 119 bp, Zea mays
aattcacacacagtggagtagggtattactctccggcggcccgaatcactctaaatcctcgcgtgttcatgtgctcggtaatcgcttaacaagacaggcacaacggccccttcctcatc

SEQ ID NO: 20670 - DNA, 322 bp, Zea mays
agcttaaactaacacatcaccccttaagaaagcttttctctcaagttgagataagctctaatacacaaattctccccctttgacatcaaacaccaaaaaccatactcaatcaagaacataggatgatgtccagggacaacagggaattaaggaggaaaaacaactatcaaaactcccccttacttattgaacatatgcagtaccaacatttaagtaagatacatttatgcaaaaagattaacactctcttttgtacctttaccatgttgtagagcacttcccatcttgaaagtatttaatctcttgagagcttctccacact

SEQ ID NO: 20671 - DNA, 322 bp, Zea mays
  unsure (1)..(322): unsure at all n locations
agcttctaaagggagaacacgtgataggtttgactaacgtgctattcgaaaaagatagaccttgtgcagcttgtcaagcaggtaaacaagtgggaggagcgcatcatagcaagaatgtgatgaccacttcaagacctctggaactgctacatatggaccttttcggacccgtcgcctatctaagcatatgaggaagtaagtacagtcttgttattgttgatgacttttcccgcttcacttgggtgttctttntgcaggataagtctgaaacccaaaggaccctcaagcgctctctaaagagagctcaaaatgagtttgagct

SEQ ID NO: 20672 - DNA, 131 bp, Zea mays
ctatttctaacagtttactcatcttctatttcgcctctactctataaacagtagtctgtctacagtgcaaaaataatcattggacatggcccctttgcctgcaactcaagaagctaaacgtggcgagatgc

SEQ ID NO: 20673 - DNA, 396 bp, Zea mays
agcttttgaaaataagcgaagtgtgagctctgcctcatttgatgagaaatcaacaagataaagattttcatgtctaaaacctttaaacttaagattgctaccatcaacactagagataataacatcttcaaccgtgaaattgcaacaaaatcctaaatcacataattgagctacggaaagtaaattaaaattccaagactcaaccaatagcacatttgatatagaatgatcatttgagatagcaattgtacccaaacctttaacctttcctttacgattatctccaaatgtgatactatcataatttgagcaatcttcctcactcatttgggtaaacatcttcatatccccagtcatgtgttgagtacatacactatccaacacccaatgattccc

SEQ ID NO: 20674 - DNA, 363 bp, Zea mays
  unsure (1)..(363): unsure at all n locations
ctcgacgagctggctcgggctcgcagcagctctgctcggctcggaccggctcgacgctcaaaacgagcccgagccgagcctgttnttgtggctcgtgaatagagcgagccagctcggctcggctcggtgcagctcacgagctggctcgtggctcgacccaacaaccatttgtacataaaatcttaattagcatatgatattagtacaaagtagacaatattntatataatttgagattactatacaaaaataatctattttctatattattntagggatatatctattntactaatttagaatatattatttaaaatacttttaagaatttatattataatttagagagcagatttacattta

SEQ ID NO: 20675 - DNA, 454 bp, Zea mays
agctttagtgactagtgagagagaattgcttgtgttctttctagctcttgcgcttggattgctttcttctttcttgattctttattgcgatcaaactcacatgtaattgaggcaagagacaccaatcttgtggtggtccttgtaagaactttgtgttccaagtgattgagaagagaaagctcactcggatcgagggaccgtttgagagagggaaagggttgaaagagacccggtctttgtgaccacctcaacggggagtaggtttgcaagaaccgaacctcggtaaaacaaatccgcgtgtcacacctcttatttgcttgtgatttgttttgcaccctctctcgcggacttaattacatttctaacgctaatccggcttgtagtgtgattattttgagaattcagttttgcctattacccccctctagcgatttaatgggaatcatctggcatg

SEQ ID NO: 20676 - DNA, 393 bp, Zea mays
  unsure (1)..(393): unsure at all n locations
ctatcanatggacgtgaagagtgcctttctcaatggaccaatcaaagaagaggtctatgttgagcaacatcccgactntgaagatagtgagtaccctaaccatgtttacaaactctctaaggcgctttatgggctcaagcaagccccaagagcatggtatgaatgcctaagagattntcttatcactaatgtcttcaaagtcggaaaggccgatcctactttatttactaaaactcttgacaatggattgtttgtatgccaatttatgttgatgatatcatatttgggtctactaacgaatctacatgtgaggaatttagtaggatcatgacacacaaattcgagatgtctatgatggnggagttgaagtacttcttgggatttcaagtaaag

SEQ ID NO: 20677 - DNA, 320 bp, Zea mays
  unsure (1)..(320): unsure at all n locations
cactcttcgacagagtactgataaccttcactccagntcgatctcggatgcatcctangctttcttcgttaataccgccgaagagtaatgctcctggctggtagccacaggatataacataatctcgtagctcctcttcctcagccttagataactcttgaccaattatgttttgaaaattgaagtcttttttctccgaaatatctttggcaatctccttttcttttccaggcaatgtggccagagtttctttggcagctgcagcagcttcttctgcgaccatatccaagagtattctatcaatattagataatgtgctc

SEQ ID NO: 20678 - DNA, 322 bp, Zea mays
  unsure (1)..(322): unsure at all n locations
tagcanaagaaatttctagaatcaagaatattgagctcatgcctaagtctggtaaaagattgttcatcaagtggcttggtaaagatatcggctaattgatctttagtattaatgtaagaaatctcgatatcccccttttgttggtgatccctaagaaaatgataccgaatggctatgtgcttagtgcggctatgctcgacgggattgtcggccattttgattgcactctcattatcacatagcaaaggaactttggttaatttgtaaccgtagtcccgcagggtttgcctcatccaaagcaattgcgcgcaacaatgtcctg

SEQ ID NO: 20679 - DNA, 387 bp, Zea mays
agcttgcgatctgagcgctgagcgagtgtcttgtattagttcagcatacgtgttcttgtgtggatcctctccttattgtttaattttcagacattagcatgtaatctgaataatgcatgtccatgtcgtgtccaagccaaaaagtgcgcaactgcagccatgatggtaggcaagtccctatatgttttgcatgtttctctttggaataaactaaatggtctgatctccatatatgatttcaagtgagtgccgctaagtttctacacaagagcctctttggtttcctgtattcaaccgagcatggcccatgggatgcaaaattcatctaacttctgttggttgttacctgaatacatgtttgggccaagctgggcgcgtgcaacacac

SEQ ID NO: 20680 - DNA, 322 bp, Zea mays
tgccttcgcctcagtatatcacccgcagtccaacggagttgtggaacgcgccaatggaaaaattttcacagctgtcaaaaagatgctcctcgaccaaaaaagggcaagtgggccgatttgctacctgaggcagtctgggcgctaaacacgactgagtgcaaggcgactgggttcaacccgttccgccttctatacggatcggaggccatgacttcacaagaaataaaacatgggtccccgcgaataagttcgtcagtcgtccccgatgtcgacgaacccacttttgaggatctcatcgatggagaccgggtcttcgctctac

SEQ ID NO: 20681 - DNA, 326 bp, Zea mays
agctagtgtgaacatctgtcgtcttacaattctcttttaagtgggcagctactgtgctgtgccgctccccaagatctgtttgcgctgttcgtgcaaagactgcctacaccattttagtcccgctggtttgtttcttttacgaatcgtgcatgcagatctgtatttacgtgatggttcatggcaaacgctgcgtcatcataatatagctacagtactttgtaagctgttcttcaactgttgtatattatgaatggaagatgcaaaatatgtgcacgcttcattggcttcgcgattttaaaatgttgttgtttccagtgtgagcggcg

SEQ ID NO: 20682 - DNA, 315 bp, Zea mays
  unsure (1)..(315): unsure at all n locations
tgccccttgcgtcctattttctatnggcttccactatagcgttattattgcttgcattntagctatttgtagcatattgtgatcatgtgtgggagagaaatttgacacantaattttacagcctttgtgacaggtgctatttagaatggtggacccatattgtccggttgtttcctcatagaggataaatatttgcattagactaacgtataaataggacgacatgggttttttcaatacaaaaaatatatgttgtattggtctttgcaaaccgtgtaatcatcaaactatattggtgcatttatngctcatttc

SEQ ID NO: 20683 - DNA, 418 bp, Zea mays
agcttctgcagaactagtctgagaagatcttcatgtgtttcttcattctgagagtatactagtatgttgtcgataaatacaaccacaaactggtcaagatactccatgaatactttattcatcaagttcataaaataagccagtgaattggttaatccgaatgacataaacaaaaactcatataatccatatcttgtagtgaattttgtcttaagtacgtctttagttcgaatcttcaactgatgatagcctgatcttaaatctatttttgagaatactttagatcctctcatctgatcaaacaaatcttcaatctgagggaacgggtatttgttcttaattattacttcattcaaacttctaagcaaggttgtccgcaagctgatcctttgtcatagtggacaaaccaagctcgagc

SEQ ID NO: 20684 - DNA, 277 bp, Zea mays
  unsure (1)..(277): unsure at all n locations
nggacggtgttctacgatggatccctgggaaccttcngtgcangagcggctactgtcctagtggcaccttcgaaagtcagaacatgttatgcagccaagcttgactttatttgcacaaataatattgctgagtatgaagcacttctattggggcttcgaaagtaagggcaatgggaataagaanggccatcctgaaaatngattctcaagtcatttctggtcatgtagtcaaaagtagcaaggcaagagatccgaagcttgaanaatatctcgatac

SEQ ID NO: 20685 - DNA, 416 bp, Zea mays
  unsure (1)..(416): unsure at all n locations
tagcttaacacttcagagacaacaaattctttgacttgcttattacttnggccatcgagcttctcttgtacaagtgccacactcactgcagagagcgaagctgtcacatacaatatcagaggagcccctgacacgggtggagttaacgttgctagatctatcaagtattgcttcatctctccgaaggctgtctgctgagctgatcctcattgaaagactttgaccgacttcatcacttcaaagaatggtgaatttctctctgctgatctagatatgaatctattcaaagatgccagtcttcctgtcagctcgtgagcccccttctatgtgcttggcggctccatccgaaagatagcttcgattttatcaggattagcttccatcccttttagtgaagctagacaaccaacgaattt

SEQ ID NO: 20686 - DNA, 426 bp, Zea mays
  unsure (1)..(426): unsure at all n locations
ttactcctgtgtcttcgaaagctaaaagcaatgggaatcagaatggcggttcttaacactgattcccacgttatttctggtcatattgaaaaaagttataaagcaagagatccgaagctcgaaaaatatttagacacggtctgaaggattgaggcttcctttgaagggttttccgttaaaaatattcctcgtggagaaaatgaatatgctgattaattagctaagtcagcagcacaggggctgccattaccttcggaagtatttttcgaaacaataaaagcaccttccgttgagcttcttgaaagagcagtcctcaacatatcccctggttatagtgaagactggagaactgagatcatctctttccttcanggtaactttctttcagatgacgaagcttataacaggaggatagaggcaagagct

SEQ ID NO: 20687 - DNA, 248 bp, Zea mays
gaagtcattctctgtcccacgcctgatgaatactggcttttcacgccacttcacggtcactgtggtccctggctcgatgctggagaggtccacctcaagtgaagcaagggccagcacattcttgcttgctgacatgctcaagacaaacttcagtacgagaagacgcaacagtgatgcatatatgaaccttccaccactcatgacaaagtatgccaatgcacgcttgctgggatctccacgaagatatc

SEQ ID NO: 20688 - DNA, 391 bp, Zea mays
  unsure (1)..(391): unsure at all n locations
gcttgatgtttanaatgacatcagcctctcccaaatctttcatctcgaaattgctcgatagaaggtttttaacttcctcaatcacattgagatttgatccaaagatcaaaatgtcatcaacataaaggcacaacataacagactcacccccaccataccgatagtatacacacgtgtcagattcatttacaacaaagccagttgctgttagagtattatcaaacttttcatgccattgcttatgtgcttgttttaggccatacaatgattttatcaacctgcacaccttgttctcttgaccatccgcaatgaacccttctggctgatccatatagatctcctcatccaactctccatttaagaaagctgtcttaacatccatatgatgaat

SEQ ID NO: 20689 - DNA, 345 bp, Zea mays
  unsure (1)..(345): unsure at all n locations
atttatagaaaggaaaggcaaccgctcacttccaaccgtagtcaccgaacagtcgcaaggcattcaataagcactaccacccacccgaagacacgtcagacggcggacaccgtttcatgcaacattacacccattgggactccagtcaacagcgcaaaggatatgattacactagccgtcccatcgcattactactcagaggcaaccggctaaaacactcagcgtaccaagccgtcccttgcccacacccattgnggggggacgcccaggaattatcagtatanttttcaaacggtcacatncgtgcagggcatgcagtgaatacctcaagacanaaatgagata

SEQ ID NO: 20690 - DNA, 410 bp, Zea mays
  unsure (1)..(410): unsure at all n locations
gagcttggcccatcactcctcgagctcctnctctactaaagtatggtcccaancgactgtccaccccggtggcaagatggacggtcaagtcacgccagcaaccatgtcttctagagaacctgtgaaaaattattccataagcaaagctgagtatactaatactcagctagacttacccggtgtgaagagtctacttctctacctctatacatgcagctgtttggctgaagggtttgagttgccaaaagcaccagctgagtctaaaatcagattttagcttttcaagttttagtgtacctatctaaccatacatggtatcaaacatttagcaatcaacatcttgggccaagtcaacacatttccacttaattactcaatgtagcagcatggatcaagccgtctcattagct

SEQ ID NO: 20691 - DNA, 363 bp, Zea mays
  unsure (1)..(363): unsure at all n locations
gctgaagttgtaaagagttcaaacttgcacaagtcattgaatgatctccatagataatgtctgaacttcagcacccgttgcgtgcaacgattaaagcanggtttcaacacggttggagccagttccgaaaagtttaaaccttcagctgaagaccttgcacgcatcttcgatcatattgaatgcaaagttgatgctcttgatgaagtcataactgggcatggngacttctacgctctgctagcttctcgtggcacgactattgcttttatgaaggctggttgcacaaacaggaatattgtaaccgaccaaacttcagctatcaccagcagattcaaatgacatnctcngnctagcccgagcatt

SEQ ID NO: 20692 - DNA, 354 bp, Zea mays
agcttgttggtcgcgaagacgggtcacatcattgttattagcgagacctggctttgtcgggcgggccgatgtcgtgacgacgacagggcggtggtggaggcgccacaaagggtcaaggtcgggcagcgttgcgtcaagaggaggcgacggtcgaaacgggcatcaaggcaaactggtttatgtggcgtctaaaagattatggacgaagtaataaatgtgaggactgggttggagaggatctgacgagaaagctcatgacaaggttgtttaagacagctaacaactatgttagagaggatctgacaaggaggctcatgacatgattgtttgaggcagctaattattaactcgttt

SEQ ID NO: 20693 - DNA, 364 bp, Zea mays
agcttataatcaccttagtggcggaagagaacggcgagcattgtgactcaccacttgttcatgtctgccatgttacaccgagctttggtttcatgcatgagtgtgcgtgttgtaagaagtatacaacaagtgtgtatccctgcaaagaaaaaggagcgcagccgcagccgctgcaaaagaaacaaaggctttttcaagaccactcactcacctccctttggctctgaatcttggaacaccaaaagcgaccaatgcagagcctgtcaagttgcaggagggtatgcaatgcaatgcaaaggtgccttcttcccagatatgcagcatgcacaacacaagatgaatggatatagtttatgggttaaaa

SEQ ID NO: 20694 - DNA, 408 bp, Zea mays
  unsure (1)..(408): unsure at all n locations
gctttggataccccatgtntcccatcatttcacggcaaacatcgatctccttactgtctggtagacagtagaggaagtcatcttcgttgtctcctccgtataccaaggacccctatgggtatttctactgttttctttggtcccggctcttctaccgggcccgcactagcttcgattggcatcacagaagctatttctgtggctagcgtgccaacctctgcactttcaatgagcttcggcacttcggctgttccaataggcttcggcctacgtgttaagaccttggctctcttcggcttcggcgcgatagaagaggttgaagtatgcagttttaattttcccccttgntttcagacgggaaagcagtaatccaggtaaacgaacccaataacatcgaacaccctgttc

SEQ ID NO: 20695 - DNA, 260 bp, Zea mays
agctttaagtggaggcattggagttgtccgccacatgatatcaactgaacgattcttctcgctgtataaaggagtggtgccttctcttatgagcatgggaccctctggcgctgtattctattgagtgtatgacatactgaagatggctcttctgtattctcctgaaagaaacaaaagggtatcgatgatgaagcaacacaaacaagagacatatgcatttgatcaacttgaactgggtactgtgaggactttactctatg

SEQ ID NO: 20696 - DNA, 336 bp, Zea mays
  unsure (1)..(336): unsure at all n locations
tttactcacacaacgcangtacatcaatgatttgatgctgcgcaccaacatggaaacttctaatggcgtcaacacacccatgctacccgcggataaactntctcttcatgatggtgagctactatnctctgaagacaccacaagaattcggagtgttgtaggtgctctacaatacttatccttcacaagaccggatatatcttattgctgtaatcgggtgtgtcaatttttatctgcgcctaccacctctcactgggttgctgtgaagaggaatttgccgtatttgaaactacactggatgtggtctatgtttactaaaacacttcttctctattg

SEQ ID NO: 20697 - DNA, 451 bp, Zea mays
  unsure (1)..(451): unsure at all n locations
agctttatgccgcttaacgaacgactaaatatgtatatctatgttatgagagtgaaacacggtgagcgagaaaaccgtgaggtggttgcagtaaagaagcttaatgtggacaatgttggaaaggatgacaagcaatttatgaatgaggttatacatgctatggatatatgccatcctaatatagtaagacttgaaggctattgttgccacactgaaaaggaagtaacgtttcacgatggatcttttngtttggccgaagagatatatagattgctttgtttcgagtatattccacatggaagcctcgacaagtatcttagcggtacggaaaatattcttgtagcagtatcttcatccatttatctcaatagggtggtaagctaataccttccataattctttgtttacagatgaatcttctggctagactgcatgtacgtataatataatc

SEQ ID NO: 20698 - DNA, 347 bp, Zea mays
  unsure (1)..(347): unsure at all n locations
tcgaccgtctncttcataacanactcctccgcatataccgacttgcataaccgccgtcgtatttttctctgactcggccggtgacgtgcggncttggatccgcctgctgggatatataaatacctgatcgctttcttgcttgatccgtaccactgcgctatgtgccgggccatggatctttgtcgccgagccatctggcatctggcaaaatacgcagtgccgagccaagtaaatagataagggagagagaagaggacaccatcgtgctacatacagggagagagaaaaagatatcatgagggataggatcgtattgcctgtgccctgctggaccttgctggtgggat

SEQ ID NO: 20699 - DNA, 472 bp, Zea mays
  unsure (1)..(472): unsure at all n locations
agcttcttcctgttctcctttgagggcggagatatctggatagcagcttgacgagcttttatctcgcttgcttcctttttccttatgatccgtgtccatttttccaaagaagaggtggacagcggagtcctccgggtagtcagatcctctactcccggttgccaggaggtagtcttcgctcggagcgctggaggttgcgctntttcctgctttgctctgactttcctggagattgttgaggaaggcttttgaaaactctcttgtgggttctggtgtttgtatgacaactcaattaaaggactaacaagtgtggtgcttaatgcaaagctaacagggttcaacacaagtgaacaagtgtgatggtccaaagaccaaattatctagataatggacatcacaagcaagatggacattgcttaagtgagactcgatgtgcgtaactcaaagacaaccgatcaagccaagaatggag

SEQ ID NO: 20700 - DNA, 340 bp, Zea mays
  unsure (1)..(340): unsure at all n locations
cttaccatatgttatcttgtacccatcatacacattctccacaatcctcatgattgtcctaaccttcatatttggntccgactgcagtattcccataagtcgcttcccaatgaggagtgatgtcaattggcgatgtttcatcgctaactcatgttcagcacatgtgtgtggccccactacttttgttatgttccactttgcggagatcttttgtatcctagcacaaacccttcatgaacagttatccttgtcgcatacaaccgtgtaacgacgtttctcgtaagaatgaagtactctatacggcctcttacgtaagactgcgttatgctgcaaccacctc

SEQ ID NO: 20701 - DNA, 335 bp, Zea mays
tagcttctgaagcgagaagcaagaattccgaatgaatttctgagaagacaaagggtgctgccgaaatgaagctgagcctttctgaagagatgcatctgggctttcttgagtcaatggcgaagacaaatactgagaagattacaagggagattttagaaggtttatctgaagatactggtgagagtgacagttacgatgcagacagcgggggtgaagatttcgaagatcgggcatggcgaccaagccattcagtcttcggaaaatcaactattgggcaaagtcaccttgaaaacatgaaggggagatactctctagatatgtccattgtgagagca

SEQ ID NO: 20702 - DNA, 456 bp, Zea mays
  unsure (1)..(456): unsure at all n locations
tatattgattaaagttcaaagacttgtgattacaaagaggaccttctaactatcgaanattcttcgaagcaacaacaagtcgntcttaggaacgcagagtaagtttgccgaagtcacaaaaaagtcgttccaaagggagcgcagtgtaagttttctgctccaaagtcgtttcaaagggaatgcagagcatacagcgaaaagtcaacgcttgataccgctaagtaaaaggcgaagcgcgaanagtcaacgcgaataccgctgaaagtaaaaggcgaagaagctcctaanggaggcttacagcgaanaataaacactgattccgctgaagtaaaaggcgaagaagctcctaanggaggcttataaaagattgtgtttattgaaagatcntatgtaccttngagtaacatcatctacatacataacatcatcgcatatttccatacataacatatacat

SEQ ID NO: 20703 - DNA, 421 bp, Zea mays
  unsure (1)..(421): unsure at all n locations
agcttcttcttcattctgatgaaaaccaagccctttgatcacttcatcaaaacgaatgttccaactccgagatgcttgcttcaacccataaatggatttctgaagtttgcatatctttccagcattgatcggatcgacaaaaccctcgggctgtatcatatacacgtcctcatctaagtttccattaaggaaagctgttttgacatccatctgccaaatctcataatcgaaatatgcggcaatagctagaatgatccgaatagatttaagcatcgccactggcgagaatgtctcgtcatattcaactccttgaacttgtcgaanaccctttgcaacaagtcgagccttatagatgtgaacatttccatccatgtctttcttcttcttatagatccattngcattctatangtctaacacca

SEQ ID NO: 20704 - DNA, 452 bp, Zea mays
  unsure (1)..(452): unsure at all n locations
tactaagcttcaaagggagaacacgtaataggtttgactaacgttcaattcgttatagatagacctngtgcagcgtgtcaagcaggtnaacaagtgggaggaacacatcacagcaagaatgtgatgaccacctcaagaccactggagctgctacatatggacctcttcggacccgtcgcctatctgagcatangaggaagtaagtaaggtctagttattgttgatgacttttcccgcttcactcgggtgttctttttgcaggataagtctgaaacacaagggaccctcaagcgcttcctcatgagagctcaaaatgagttngagctcaaagtaaagaagataatgagcgacaacgggtccgagttcaagaaccttcaagtggaggagtctcttgaagaagaaaggatcaagcatcaagtctccgctctctacacaccacagcaaaacggtgt

SEQ ID NO: 20705 - DNA, 377 bp, Zea mays
  unsure (1)..(377): unsure at all n locations
gcttgatgtatccaaagctttcgattccctaaattgggcttaccttctcgatgtgctaaaagcccggagattcccccaaaggtggcgtaattggatcgccgcaattcttggttcttctacctctagagtcaccatcaatggtcaacaatcagacaagatttaccacaagcgtggtgtgcggtaaggggaccccctttccccttttctcttcatattagcaatggatcctcttcacaagatgattgagagggcagctgaagctgggttactggngcgggtcctgccaagaggggcaaagcttcgatgttccctatacgcagacgatgcaggggtgtttattagagcggataaagcagatctcaaagttctaaaatcga

SEQ ID NO: 20706 - DNA, 475 bp, Zea mays
  unsure (1)..(475): unsure at all n locations
ntacccacataatatgcagaggctggtgtttgaacctgngaccttccagttacatgaagcttagtttaacatgtagctnggacaataaaccacaggtttctcttatatgagatctgattaactcaagctggcttcaatcttgcatcagagatgtttcagcaatgttatagccaaaacatggtaattgtgctaccttcttgacgcgttaaaaacatgatagctagccaaaaaatcaatggggtttgataaacccaagatgtccttaatattgcatcacagattcaccggcatgttntggcagngtttcaacagccaaaacatatgttacattattgacgcgttaagaaatgcaatacaattttatgattgagaatacatgtatatttctccatctgatatagataactcaaatggtttatctgccatagttgtccatgaaacaaacctatcagccctaaccaaatgacacgaagta

SEQ ID NO: 20707 - DNA, 361 bp, Zea mays
  unsure (1)..(361): unsure at all n locations
acatacaagctggccaacgatcaaggcgaggtctacaacaacgcttggaacatccaacagcttcgtcgcttttacccttataatatttcaagtcatatatgtaacctcgctttctttacataaataaagtctaaccatcaaggaaggatcaaggcttgcctcggcaagcccgaccctccctcggggctagaaagggagacccctctgcgtcaaatttcctcggaaaggcttttgccaaacgtcttcgctttatcactgctcgataccgaatctaagacagcgaagagacttgaccgcaggtgatcaccgaggactctaccctcggatcngtacctactcatacttccaaagtgatacctcg

SEQ ID NO: 20708 - DNA, 347 bp, Zea mays
gcttttgatgacgagcgccaattcctcattgtcgagcttggaagcgtcgattaggtgtctacttggagtagactcctccttctttttctccgtcgccttgaatgcgacgggttgagcctcggatgtggagggatcatcaagctcgttgatctttctcgagccttcgatcatgcactcaaaacttacaaaattcccgactacttcctcgggagtcattaatgtatatctaggggtgccacgaattaattgaacttgagtatggttaagaaaaataagtgatcttaaaataaccttaaccattttgtggtcatcccatttcttgctcccgacgttgcgcacttgattca

SEQ ID NO: 20709 - DNA, 455 bp, Zea mays
  unsure (1)..(455): unsure at all n locations
agcttagatgcatatttcactgataatggtgcatattggtaacaaacatcacaatacagttccgacaatatgtgcaacctatcaataaatgtgagttttgctcctcgctctatattagtaaataaggtactaaggccaatgtaatactaaggtgacttgcatatagtgctaacctgaagataaagaaacagttgtaaggtcaaaatcagtcatccaagaattaaaatgcggataatgctaacatgaattagagacaggatttggtacacaaagacttgcaacagtattgntcattttctgtcgccccaagaaaatgcaaatgtagttagtgtaaaagtttagtcctgacatttcattattntgcatatgccaatgaaagaanaatagtaagcaatgcatctgttggtccttgtctcagatgctatacaccgagaacaaagcacacaatggtaatg

SEQ ID NO: 20710 - DNA, 316 bp, Zea mays
  unsure (1)..(316): unsure at all n locations
atgatcctgttctttagcctctgcgatagacagttntgtgtttttgacaaaagagaataattctggaaattgttgtcttggaatgttctggttccactgatcatcccagaaagaaattgatctgccattgccaatgactgggtgcgccagacccttaaagttagaaaggagtttgatcatgcttttccaccagaaggaaccaatgtttcaatgacctatgagtccacgtgacaaataataattattccagatgagatttacctagagtaagtcatagctattaaagaacttatgccaaaattttatcagaagagca

SEQ ID NO: 20711 - DNA, 439 bp, Zea mays
  unsure (1)..(439): unsure at all n locations
agcttattgtctttctccggagactccattntccttctatgagactactacatataacaaacttgaaacatgtattagtctcgaagacttagattctatagtaacctctccctaaaagtgtgcatacaagttttgaatacttgtagaagacatgcactttgatttttaatgtcaagaggggcaaattatctaaatccgagctttggcacatataagttaaatgataccaattgaaacatgataccgcttgtaggatatgttatatgagaatatcaattcgagagtcatttacttaagaatgcttaataagctatgtgtcgtgcttaactaaacattttaaaccatgtatgtttgctcaagtatttgaatcgaaagtgatcattcctaccatatgattgacctagtatgcatgcaattataatcaaaagtaaatatcaca

SEQ ID NO: 20712 - DNA, 297 bp, Zea mays
  unsure (1)..(297): unsure at all n locations
acattgattcccataggtnagaacctcatagagaggtagcaactatctgagccctttgacccttacgtacaacagggagtacttgtctgaaatcttccccaaacacaatagtcttcccaccaaagggcagaccanggcgttccatgatatcacgcatgctgttgtccaacgcttcaattgattgtctcttagccattgatgcctcgtcccaaataatgagcgacgctttctgtagcaactttgatgtcccactttgtttcgtgaaggtacatatagcaccatcatcaatagtaagtg

SEQ ID NO: 20713 - DNA, 221 bp, Zea mays
atcaaaatctaccaagtatagctgaccctctaacactcccttaaatgctattgaatcatcacttcttctaaagacagggacacctacatcagtgaatagacaattgccgcccatttgacataaatgggataccgaaagcaaattgttatctaatgaatcaacaagaacaacattggaaatggaatggtcaggtgaaataacaattttacccaaacctttga

SEQ ID NO: 20714 - DNA, 272 bp, Zea mays
  unsure (1)..(272): unsure at all n locations
catttatcgcgccaggtagaggattccagagccttgccccttgattgatagaanatattaaccatacttatgtatttaaataaatttattatgaaaatatattcgacaatctatctaatgtactagtactattntttacatataatcaatcaaaggttaatatgttaaacttataacgaagcgagaaagagaattatatttaaacgtagtccaccgtagcagactttaaccaggccgtacttttttaagtagttgagatatatgtacatcgc

SEQ ID NO: 20715 - DNA, 380 bp, Zea mays
  unsure (1)..(380): unsure at all n locations
agctgcctggtgcacccgcctcgcgcgtgctcccgttactcccactagcgtgtggagccgcgcggttagaccccacctccttcaacagaatcgtccacatcctcgggtggccggcgcacgacgtgagatcttcggccatgaccgccctggcctcatcgagtctataaaacctgttcgcatcgcgttcctgtgaccaattcaatcgcatagacgaccggaactcaaaccgagagggtgaggggagtagcgacctttcctcgatttgaccaacgccgccactacgatttgccccggtgctcgtcgctttggccctgngagctagtcggggacctgcaccgagaagtagcgaagttgtccgaagcgctagctggtgggatcgt

SEQ ID NO: 20716 - DNA, 366 bp, Zea mays
  unsure (1)..(366): unsure at all n locations
ccttggcttctcgcagcccagaccaaaatccccattcttataatagcttcgggagtgagttgatgaaggtagatttggaatgttttcagtacctcaacaacaaaattgctcanggggaatcgaagcccagccttgaggaggcttcggaaaatcacaacttcatcttcttcangggtgggagaagtcttttccccggcatcagctctcacaatagatatgtctcggaagtatcgccccctcatattatcaatgtgactctgcttgatgnngtgtttcccaaaaactgagtgacttggtcgccacggtcgatcttcggcctcttccccatcactnttcacatcatagctgtcgctgtcatcagtatct

SEQ ID NO: 20717 - DNA, 376 bp, Zea mays
  unsure (1)..(376): unsure at all n locations
caacaatgccagaacaatggccctttcctgaattctgatgaatgttcgaccttacattataactatcactgaatcacctggtcgcatactaatatggacattttctgcacgggtcaaatgaaaaaaatactcactttagttggaatgttgtatacatcagtaacttggtgcttatatcctgtattaaggttcaatattgtctttaccacagggaagaaagttggtaagtctaaagagttgttgaagccagatgaaggtatagagcaagtggactctanngacagtgctgcatcacccgcttcttacaatgtaaaactggaagaagtcgaaatcttttttgctcagtgtggcaggtatgctacatgtctttagcact

SEQ ID NO: 20718 - DNA, 418 bp, Zea mays
gcagctgctgtcctaatagcaccatctaaagacaggacatgttttgcaacaaagctagacttcagctgtacaaataacattgccgagtacaaagctcttcttttggggcttctgaagctcaaggcaatgggaataagaagggcaatccttaaaactgattcacaagttatttccggccatgtggataaaagcacctaggcaagagatccgaagctcgaaaaatatctggatgcagtccgaaagttggaagctctctttgaaggctgttgtgtaaaaaatatcccaaagggagagaatgagcatgtagatttattatctaaatcagcagcacaggggcttccttcgtcctcggaagtatgttttaacaataaaagcaccctcaatcgagctcatcgaaggggcagtgctcacaatctca

SEQ ID NO: 20719 - DNA, 397 bp, Zea mays
  unsure (1)..(397): unsure at all n locations
tgtgaattaaagatagggatggcatgagttcatctctggtctaaattataggtcacaataaaataaattgatctatgattatgtacttgtaaatagcacttagtgaaataataatctattctcaaataaagttaatgtatgccatagtttatgttatactttgaattcattatcccttatttagtattatgtctttttaatatgtgttccaatgtttgtacatgtttggtatgatgttcatttgtactttccaaatgtattgaatgcatgctcgctttatttagacaatgagcagntcgaggttcctgagtgtgttgccgaagatccctctgagcaacaacctggtgaatgcaagtgtcctcaaacctatcatatcatactttactttataattcac

SEQ ID NO: 20720 - DNA, 387 bp, Zea mays
  unsure (1)..(387): unsure at all n locations
agcttcaactccatctatattatggattgccttgttatcattccagcttccttcggcccttctggcagcttcctgactcccatgaatagcaataggcccttggtccgaaggtatcttcatgcagagataagctgggtgaagaattgcttcaaaagcatttatggtaccacgaccaatgatggcgttgtaagggtattccatgtcaacaatatcaaacacaatttgctcagtccttgtgttattaacaaatccgaaggttaccggcatggtaatcttcccgagtgccgcaatctgtcgccctccgaagccacaaagagggtgcgtagcatcatgaatcttgtcttcaagctcttgcatctgtctgaaagctntggcaaatatgatgtc

SEQ ID NO: 20721 - DNA, 335 bp, Zea mays
  unsure (1)..(335): unsure at all n locations
atagcgtatccgaagatgaatgatcgaaccgacttaatgatagaatgaccttntaatccataaaggtctgaatcattgttgtaaacttttataaagggtatgattggaattccttacaagctgtgtcctgtgcctataaataatgagcaatattcctttactggtcacgcaatcctgttatttgcaatgcattgctctggaattattggtttctaccaaggcaaaggtataaatatgcctaaacattatgttttggtatttaaatacatataaataaatatgtgaataatgttatctatctatggcatatctctttctaatacttcatggtttat

SEQ ID NO: 20722 - DNA, 330 bp, Zea mays
agcttggagtgataagcaagttttaatgggaatctattgtaaccgcgaagtgccctcttcttactgtgcacgatggttttaatggatgtttttataactcctgttggaatgttatcaaatctgatatcatggctgcaattcaagctatctggaatataaattttgataagtttgacaagctgaactctgcttacgttaccttgatccctaaaagaaggggttgatcatgtgaaggattttataccaattatccttgtgcacagctttggcaagctgattaccaaaatccttgcccataagctggctaccatacttaacagaatgatctct

SEQ ID NO: 20723 - DNA, 440 bp, Zea mays
  unsure (1)..(440): unsure at all n locations
tactcaagcttgtctgccccattgctctgagacacatctagagcctcgattntctatgcaccgtacttgcgtactgatggtcagagatcttgggccagctcaaacagttcaggaataatggaagaagtacaagattgcaactcaagaagcctggttgcccttctgggctctttgcttctgcatctctttatgctggttggccagcaggatcagagttcatggcagaagtacatatatacttactttctggtggtcaggaatgactacttctcttgggagtcgaagaaacactcagatgtgttctgtgatatttcagaaatagatttctttccatatgctacatatttggatagtgaagaacttgaactgaaggagcatgtggaatatcttcctggagcacgcctatgctctatagatgggcttcggtatacagaatgaca

SEQ ID NO: 20724 - DNA, 373 bp, Zea mays
  unsure (1)..(373): unsure at all n locations
agcttcanggacatcaatgaagtgataccagatactttctatctgaagaggaggcagatggcggtagaaaacgagctaaaggagatgcacggcaagtattcagagctcagcgtgcacttcgccgaggtggagggcgagcgacctaagctcgaaatgaatctgaagaaccgaacaccatggagatcatatggaaccaccaatcaaagcgaagaaaactatctagagaagaaaaaaaagtgtcagccacctgcaggctttgtatacaatcttgtgcgacggcagtgggatacattttgtagtgtatatatatcagctgtatccattgtagagctgtagtgagcgagtgatatgcataaaatgtaacacaggacct

SEQ ID NO: 20725 - DNA, 381 bp, Zea mays
  unsure (1)..(381): unsure at all n locations
agcttcacacctctggactagctcggctgcatcactctttgctgttggccagtanaagccagacctgaagaccttcccaactagagtcctggatgttgcgtgtatcccgcattgcccggcgtggatctcatctagtagttgcttcccggtagccgaaagaatgcacttcatgaggactccagtcgcctcttttgtacagtgcttccccaatgagagtgtagtgggctgactgccttacgatgcgttctgccgtagatntgtcatctggctcttcttcattctttatatatctgatgattggctccctccagtcatctgaatctgattctggctggctcagaacattacactcttctgcctgatctaaagaaatacttggtc

SEQ ID NO: 20726 - DNA, 372 bp, Zea mays
  unsure (1)..(372): unsure at all n locations
tctaaagggagagcacattntaggactaacaaatgttcattttgagaaagaacaggattgtagtgcatgccaagccgggaagcaagttggcactcatcatccacacaaaaacatcatgacaagtgacaagccactggagctcctacacatggacctattcggcccgattgcttacataagcatcggcaggagtaagtactgtctagttattgtggatgattattctcgcttcacttgggtattctttttgcaggaaaaatctcatacccaagagaccttanagggattcttgagacgggctcaaaatgagttcggcttaaggatcaagaaaattagaagcgacaacgggacggagttcaagaactcacaaat

SEQ ID NO: 20727 - DNA, 443 bp, Zea mays
  unsure (1)..(443): unsure at all n locations
agcttgtattcttgaacgtatgcctcttctatcatgtacataatagagnttgcacaactagcatactccatacatgtaagttacgagtacatgaacatggtgctcttaattgtatgcttctacatgaatatggagctcttgtttgactttaagtcagttccaaactgtacacaaccatgcttctacatgaatgacggaccaaggatttagaaacaacctagacgagattacactacgattctccatgcttgtgcctttatcctatgcatgctaagntgtttatttgcttctatatatcatgtttgcttctctctgctgcaaccgacgaagaagcccaggccaccgcctgaggtgttgggtccgctgctgaactagacagtctttgaaattcggctaggccagcttactcatgcaaagtcagatagaccgccttttcgatctgt

SEQ ID NO: 20728 - DNA, 297 bp, Zea mays
  unsure (1)..(297): unsure at all n locations
acaagcttctcatgtggtgactcaataggcaattctgaattttagaattctgaatttcagaccttgagccaaagatcaagcatgttcaccttgatccctaactcanatcctaatggccccattaacaaaaacgtgcctaactaacccctctgtcgtatgccagaagatggcattgggacgcgagccctagacacgacaaaaccctggaattgccttggatttgagcagggagacaaaccggatttccgggctccatatctctgcaacctgtaggcaaaatcctatgacccccacaca

SEQ ID NO: 20729 - DNA, 412 bp, Zea mays
agcttatgaagattcttcatcccaacatgggctagtcggcggtgccagagccaacccatgttagttttagcaattaagcatgtgtcgagttcagctctatcaaaatctactaagtatagctgaccctctaacacacccttaaatgctattgaatcatcacttcttctaaagacagtgacacctacatcagtaaagagacagttgtagcccattttgcataattgagatacggaaagcaaattgtagtctaatgaatctacaagaaaaacatttgaaatagaatggtcaggagatatagcaattttaccaagacctttgaccaaaccttgatttccatccccgaatgtgatcgctctttgaggatcttggtttttctcgtaagaagagaacatcttcttctcccctgtcatat

SEQ ID NO: 20730 - DNA, 289 bp, Zea mays
  unsure (1)..(289): unsure at all n locations
cattagtgacactattatactcaatctctacgggagagcaaatttaggattaacaaatgttcattntgaataagacagaggttgtagcacatgccaagcanggtaagcaagtggtgcccatcatccacataagaacatcatgacgactgacaggccactggagnctctacacatggatctattcngcccgattcttacataagcatcngcgggagtaagtattgtctaagtattgtggatgattattctcgcttcacttgggtgttctttttgcaggaaaaatctcata

SEQ ID NO: 20731 - DNA, 374 bp, Zea mays
agcttggctgtcaagctggttccattctgaaattcatatattcagtgtaacagagccagctttgagtgtgaattcaaccttgatctaatgctcaaatgagttcaatccctataatcgaattattgctgggttatagctctacaattttgctgcagagcttgaattgagttgtcattaaaaattaagagaaagcccagctcataaacggtatgtcagactgactgaataccattttccatggtacaatgtctgcaccggatcagatcgccagcgccacaaaaatctcaccgccgatgagtctcgccgtgattcgtgtcaccggcgccaggattcgcactctgggtggatagatagcatcgcagtgtaaggggatc

SEQ ID NO: 20732 - DNA, 209 bp, Zea mays
  unsure (1)..(209): unsure at all n locations
gagctccataacccctagtgggacttactgctaccttctgatgccttaggggctcaagaacgctgcaggaagcttcagctgaatgactaccanagttctcagctctcatataggcgcgaacgtcctgacatatgtcgatgatatcttagtgcatagcacgaagcaagaacatctcattgtcgatctacaagaaacatttgccaatttta

SEQ ID NO: 20733 - DNA, 386 bp, Zea mays
agcttctccaccatgtcgatgctagccaagttgtttgtatctcctccatcactgatcaaacgacatgaacgctacttaatgacacactttagctgaaacaatgtatgtcggtgattctgctctgccttctccatttgtgcactaagcacacgctgtacaatgaggctctcataatgctctgcatcatctgtaccaatctgttctttgggtggttccttagtagcctgcatcatcacctcgcaacaaagcaagtgtagcttcatccaaatcactatcagaagaatacccaccatccgcttttaccaccaaaacacgctgattatgacaatcacgctgcacgtgtccatagcccttgcatcgataacacacaacatatcttgttctac

SEQ ID NO: 20734 - DNA, 383 bp, Zea mays
  unsure (1)..(383): unsure at all n locations
tgcacttacgaccaaaccgcacccgcattcatatcacattcaatggctcaacaatagtggtaaggtcaaggtaaccaagctggtacgacataattctgctattggttcatatcgngatgttgttgactgtgatgttgtgcctatggatgcttgtaatattctgctaggtagaccatggcaatttgattcagattgtatgcatcatggtagatcaaatcaatattctctcatataccatgataagaaaattatntttgcttccatgtcccctgaggctattgtgcgtgatgatgatgctaaagctaccaaagctaaaactgagaacaacaagaatattaaagttgttggtaataacacagatgggataaaattgataggacatt

SEQ ID NO: 20735 - DNA, 397 bp, Zea mays
  unsure (1)..(397): unsure at all n locations
agcttggtcattntatagctaactgtcccgacaatgatagtgatcaggatcaagggaacaagagggagaaaaagaagaactattagaaggcaaagggcgaggctcatcttggcaaggagtgggattcagactgctcctcgtccgactctgataatgagggactcgtcgccactgccttcaacaagtcatccctcttccccaacgagcgtcacacttgcctcatggcaagggagaagaaagtaagcactcctaatactagtacttatgcttcttcaagtgaggatgagtctagtgacgatgatgagatagattactcatgcttattcaagggattagatagaactaaggtagacaaaattaatgaattgattgatgccttgaatgataagaatatact

SEQ ID NO: 20736 - DNA, 308 bp, Zea mays
gagagcacatttaagataatatatgttattctgagaaagacaagatatgtagcgcatgcccagcaaggaagcatagttgtgcccatcatccacacaagaacatcatgacgactgacaggccactatagcttctacacatggacctattcggcccgattgcttacataaacatcggcgggagtaagtactgtctaattattgtggatgattattctcgcctcacttgggtgttctttttctaagaaaaatctcatacccaagagactctaaagggattcttgagacgggctcaaaatgagttcggctta

SEQ ID NO: 20737 - DNA, 447 bp, Zea mays
cagcatgcaagcttcttgtatctgttgacaaaaaagagaagtaaattgtgttcctcgatctgacactatcttgttcggcacaccatgaaagcggactattccggacatgtataactcaactaatgttgctccggtgtatgctgtcttcacaagaataaaaagggccacctttgtttagcggttcacaaccacccacatggaatcatatccggccctggtacgacgtaagccaactataaaatccatgccgatctcatcccacttgcactgaggaaactgcaatggctgtaacagtccagcaggtctctgatgctctgctttggttctttgacagctatcacagatagcgacatattctgcgagctctcttcttatgccctaccacccaaacctgctttttaaatctgagacatttctcactttcaggagtatggagtacgctgttca

SEQ ID NO: 20738 - DNA, 369 bp, Zea mays
  unsure (1)..(369): unsure at all n locations
ttaatgcccaaccttgaacactttgcttacaaaatntaggtacatttgagtctttctctctctagaaactagttgtgttgcagacccctcgtttcaacaacaataagcaaaccttctagttccaagcaagttaggccaagtcaagggtcatgtacatgtattgctatttttcatgcactcctattgaaggctaaatctttgggtatgctccattctttcaagtctccttttactgcttctcatgtcaatttcgggcttacccgatctctattcttattgatatcgcgccttaagattccactgcctctggaggtctgctttggatatgttcgaaccatatcaaacagtattggacaagcttatgtgtga

SEQ ID NO: 20739 - DNA, 428 bp, Zea mays
agcttggacagtattctgcgacggttctcggagaaccttctgggcaagagcagctgttgtgttagttgcaccttccaaaattagaacttgctacgcagtaaaacttgattttagctgtacaaataatattgctgagtacgaacctttgcttttggtgcttcggaagttaaaggcaatggggattagaagggcggttctcaaaaccgattcccaagttatttctggtcatgttgacaagagttgtaaagcaagagacccgaagcttgaaaaaatacttggacatggtccgaagcattgaagcttccttcgaaaggttttctatcaagaatattcctcgaggagaaaataaacatgcttgattgctaccaagtcagcagcacaggggcttcccatacattcggaaagtattttgaataataaaagcacct

SEQ ID NO: 20740 - DNA, 402 bp, Zea mays
  unsure (1)..(402): unsure at all n locations
tcggtattataacatattcgaagatggatggtcgaaccgacttatagatagaatgaccttntagtccataagggtctgagtcattggtgtaaacttttatgaggggcatgattgtaattcctcacaggctgtgtcctgtgcctataaatagtgaacaatattcctttactgttcacggattcctgtaattgcaaacgcatcactcgggaattattatttgtcaaggcaaaggtataaatgtacctaaatattatgttttaacattntagattcatataataagataagcgaatgatgncatttatttctgatataattatctttaatgtntcacaattttatatactntnngatatnttgtaagtttaatcatgaaggtgtaaccttcgtgatattctactc

SEQ ID NO: 20741 - DNA, 431 bp, Zea mays
agcttgctgcacctcgtacgtctcctgtgttcttcttcgctggactccacaagattcagtaaaccgaggggtgagcgctcattggttggactggcatgggaaatctaagtgacatgtgtagataaaagtggtgtgttcagactcacagaaatcggggttcagaaccaggacttcctttcctgcgatttccccttttcagaactagtttaggcaaccggcagcgaacacgctcccgttcctaaagatttgcaaatgtcagttccgatcgactctaaaccaaaaaaaaaaaaaaaagatacgctatagtcgactgtcaccaggacaacaaccctatgtcgacccaaacctagccttgctatttgctaacgattgcggcgtaaggatcgagagaaaaataccacataaaggtaaataaaagttaatcttttttt

SEQ ID NO: 20742 - DNA, 309 bp, Zea mays
  unsure (1)..(309): unsure at all n locations
ctttaacaagacatttgcttcagctgtaagctgaatagcaagctctcttgtanggcatatgacaagagcaaatattggagatactcgctgatttgtattgctcttcatagcattcaagactgattcacatgcaggaagcttgttatcaatccattttgaatagctatgtcacagcacagcgtcgacatgaaaatgatcaggacaaaaacagtagggtcatcaagtaactgactggaataatgctgacaatacgctatttaaatccaccaaatattcatttattcatccaaaaagtaatccatctaaatt

SEQ ID NO: 20743 - DNA, 466 bp, Zea mays
  unsure (1)..(466): unsure at all n locations
agcttgcaggaaaatggatcagagagctgccatacgtggtttggagcctaagaactcaacccagtcgagctttgcatggaaataccccgttcttcatggtttatgggtcagaggcagtgctgcccgctgacctaatattcggggcgccgagattgacttttgaaagcatagctgaagcagaagctaccaggctagaagatattgatgtgctggaggaagaacgattgaacacagtaattcagtcggctaggtaccagcagaccttgaggcgctatcatgataaagacgtgcgacactagtcctttgcagtgggagacttggtccttcgccaaattctaacggnggaaggacgacacaagttgtcgccactatgggaagggtcattcatagtatcagaggtcactcggccaggatcataccggcttactcaaatggatggcacgtaggtggggaactcatggaacat

SEQ ID NO: 20744 - DNA, 418 bp, Zea mays
  unsure (1)..(418): unsure at all n locations
gcttcagtcatcgcgcgcatcatctccttcaatttcatttgagagacacagtcatcgtcgntaagtttaggccccttgtccttgtccatttgattctttggtcctgtcattgttagcacaaaacagagacaaaaaggcaacaaacaatgtgaaccctacaactatctctcaaggtggtggtggaggtggtggaatacaaattatgaagcgtcttaccccgctcttacaacgttcttaccagcactgcaggtggcaaacggtgaccggtgtgactgtccaacgagcgtgggtgtgatngcaaaagagtacctgttctgctcgagagaanaatggagctatgggaaggctaactaaatatatatatgtggcacacaagtcagtaacagatagcaatgctgaataaagtgtccaagtactc

SEQ ID NO: 20745 - DNA, 345 bp, Zea mays
  unsure (1)..(345): unsure at all n locations
ntctcgactaagtcggggacagggcctcatggacgggtgaaagtacgcgtaagtggcaaggccgaccgagccgagggattcccacgcctctgggatacggatacctcactcgtcccttccgcgaaaagcaactcttgctcacacaaacgtcccagttaccgacagagtccagatgctcgaagcaggaggaaaaaagacgcagcttctcaagcgcggcgagggcgtgttcttctggcctcggcggccgcagaaagcgcacgctacaagatgatctgatcctgcaggctcgggtcttcacgccgaagggagccatagcaccctcggcatcgacgacgtctacagcaa

SEQ ID NO: 20746 - DNA, 324 bp, Zea mays
  unsure (1)..(324): unsure at all n locations
atcttaagtcacctgagctgcagcttgtaaggtagaacatgagttatacaatggttgttttctcagtggccagntgtggtgccagccagccaggtcaccttgagttttgcaaaanaagcattgacttttatgagcaaatgctttcatagatatatgtgatcatgttgtgggcttttggcattaaacaccttcctttactcttagtgtcaatgctatggggattgttctgccaaggtgtcatgggcatcataaggagcgagcactcatgtggggccgcacctatgcgcgccaaaagcgagagagccgaaggggcgctggcagcaa

SEQ ID NO: 20747 - DNA, 285 bp, Zea mays
tgtcgagttcagctctatcaaaatctactaagtatagctgaccctctaacactcccttaaatgctattgaatcatcacttcttctaaagacagtgacacttacatcagtaaatagacagttgtagcccatttgacataattgagaaacggaaagcacattgtaatctatggaatctacaagaaaaacattggaaattgaatggtcaggagatatagcaattttacccaatcctttgaccaaccttggtttcatccccgaatggatagctcgtggggatcttggtt

SEQ ID NO: 20748 - DNA, 281 bp, Zea mays
agctttgtatgcaccctcgacacaccgtttcagaatgggtgacttgcggcaacgaaatttcgcaaaaccaccccaaacatgattttggaccttaagaagtggattgtggattatcggtgcgaaaaacaaacaaaaggttcccgtggataaaactcacgctttgtatgttcccccgacacccgttttccgaatgggtgacgtgcggtaaccaaattgtgccaaaccaaccaaaacatgaattttggacctaaagtagtggaatgggcctgttcttgcgaaaa

SEQ ID NO: 20749 - DNA, 353 bp, Zea mays
  unsure (1)..(353): unsure at all n locations
acgacatgaacgcttcttaatgacacactttgntngaaacaacggatgtcgctgattctgctctgccttctccatntgtgcactaagcactcgctgtacaatgaggctctcataatgctctgcatcatctgcaccaatctgttcttcgggtggttccttagtgcctgcatcatcagccgcaagcaaagcaagtgtagcttcatccaaatcactagcagaggaatacccaccattcgtctttaccaccaaaacacgctgattaggacaatcacgctgcacgtgttcatagcccttgcatcgataacacagaacatctcttgttctacccgtggaggctactgaagaggcactac

SEQ ID NO: 20750 - DNA, 383 bp, Zea mays
  unsure (1)..(383): unsure at all n locations
agcttctaaagggagaacacgtgataggtttgacttacgtgcatttcgaaaaagatagaccttgtgcagcttgtcaagcaggtaaacaagtgggaggagcgcatcacagcaagaatgtgatgaccacttcaagacccctggagctgctgcatatggacctcttcggactcgtcgcctatctgagcataggagggagtaagtatggtttagttattgttgatgacttttcccgcttcacttgggtattctttttgcaggataagtccgaaacccaaaggaccctcaagcgcttcctcaggagagctcanaatgagtttgagctcaaagtgaagaagataaagagcgacaacgggtccgagttcaagaaccttcaagtggaggag

SEQ ID NO: 20751 - DNA, 269 bp, Zea mays
  unsure (1)..(269): unsure at all n locations
atctctggatgtttcttaacaattgagctcacactcttaagcaaaggtgttcttcttaatttggtctacaactttgatgtggtgacctatggaaaaaaccctataatttaaaagttgcaaggcttcaaagttgagccaaaactctgaaattcagacttaacatgaaatctccattanggtcctcttttgcaatgagtccaaaacttatggtttggcttggtaattcacatatgagtgacccaattgacttaagatacttatttaacttg

SEQ ID NO: 20752 - DNA, 188 bp, Zea mays
aagtcactgcagctgcgagcttggctggatggtgtgggagagacgaataatttctttttggttatagcacaacccgacggttgttgattcattgtagaagaacgccttgtgtgggattaaccaagtcttacccgagatacatttatctctgccctccgacagtttgttccagaaagaccgccgggatt

SEQ ID NO: 20753 - DNA, 378 bp, Zea mays
  unsure (1)..(378): unsure at all n locations
gagaacacattctaggactaacaaatgttcattctgataaagatgggattcgtatcgcatgtcaagcacgatagcacgttggagttcaccatccacacaaaaacataatgacgacggacaagccgctcgagctgctccacatggatctattcagactgatcgcatacataagcatcggccggagtaagtattggctagttattgtggatgactactctcgcttcagttggatgttctttntgcaggaaaagccacaaacccaagaagaccttaaaacgattcttaagacgggctcaaaatgagctcggattaaagatcaagaagataagatgcgacaatgtggcgaacgtcaaaaattcacaaattgataggtttctt

SEQ ID NO: 20754 - DNA, 432 bp, Zea mays
  unsure (1)..(432): unsure at all n locations
cagctntcaaaaaagtctaggatcatcctgtttgttgtttaaagactacatttaattgtttgaagtatgaacactgaatctgtccaattctgacagcgaacccttcatagtgtcttttacccttgataaatattaaatcaacatgagatgttcataaataatttgtagacagcttcattagctttctagaaaggataaaatcaattgatttggatgcctgaatttctagttataaatttttgaagtcataagtctaaatctgtccaaatctgaacagagctgtcatttatcactatgtaaccttactaagtatctaatcaccttgagataacaataccaaaggtgtagaagcgttctcaagaatttcaaaaagtatctgctcactatctgtggataaaatatattgtaagtataactgaaaccatcaactgt

SEQ ID NO: 20755 - DNA, 299 bp, Zea mays
tagaggggtttatatatctctttggaaatgcttcacccttccaattattgtagttaagttatgcacttcgagtactatcacgacttgtaataattacaattctttttatattggaaaacttgagctttggaaatgtaaaatatgttttgtaaagtcttccgctttatctccgaagtgtgtgtgtatcgagtgtgaatactggaatatgcatgaatgtggaagatccttgggatgatgggttcgagttgatgaactccatagccttggtaagttacccggtacacgtgcacagccatctg

SEQ ID NO: 20756 - DNA, 458 bp, Zea mays
gcttagcaagtgcgagttctggatcagtgaagtcatgttcttgggtcacattataaatcgagagggattggtggtagatccaaagaaggtaacaactatcttggactggaaagcaccaaaagatgtctgaggaatcaagagtttcatcggaatggccggctattatcggtgtttcattgaaggtttctccaagattgccagaccaatgatagctctgttggcaaagaaggttgagttcaagtggaccctatcatgccagaaatcctttgagacattgaaagagaagttgacaacggcactagtactgattctgccagatgttcacaagccattctcagtgtattgtgatgcttcgtataccggactatgatgtgtgttgatgctggagaggagagtaatggcatactcatcccgatagttgaagaatcatgagaagaattatcctactcatgatctgg

SEQ ID NO: 20757 - DNA, 371 bp, Zea mays
  unsure (1)..(371): unsure at all n locations
gtgaagattcttcatccaacatgggctagtcggcgatgccagagccatcccatattagtcttagcaattaagcaagtatcgagttcatctctattaaaatcaactaagtatagctgaccctctaatactcccttaaatgctaccgaatcatcacttcttctaaagacagtaacacctatatccgtaaaaagacagttgtaacccattttgcataattgagaaactggaaagcaaatgtaatctaaagaatctacaagaaaaatattggaaatggaatggttaggtgatatagaaattntaccaagtcttttgaccaaaccttgatttccatccccgaatgtgatagctctnntgggatcatcanttttctc

SEQ ID NO: 20758 - DNA, 431 bp, Zea mays
  unsure (1)..(431): unsure at all n locations
cagctttatgctacggagtctctttataagctagcgtttccgctgatcaagatatgggctctgttgatggtaccgagttggtccctgctggttcattgcaagctgcttcgggtggcgacctgacaccagatcgtcaattgatctctcacgatttgggagtgccttcgttcttcttcaatctccaggtattgtggtatattctagcctgactgttacaccatacgaactgcttgcaacacgctcatatgttcttcatatcaagcattggtggacggaatggctagtcagctgaagttgaaggtgcttctattccagaaggagcttcatctcttgcacgttggaatccggtgttgctccaacatcgtgtctctgaattggaggcgatgaatgctggttaatactcttttgntctctttgctaccttattgaac

SEQ ID NO: 20759 - DNA, 418 bp, Zea mays
  unsure (1)..(418): unsure at all n locations
ggggatatccatcanatctgaagctgacaagctngaagttggtctgttcacaatgtttccatgtgtgcagccagccttcaaaaaagcagcagctgtgccccgagatagctaccaggcgcagaagtcagcgtgcccaccaataacttcgtcaagggcatcaacttcgccttcaatatgttctaatgttcttggcagattttcagctgaaggtgtaaatntcgaagagctagctccgacagagtgaaacacgtccttcagccgttgcacacatcggatgccgaagcttaaacatttcttctgaagttctgtaaagcatttctgcaaaattgagtatntatccacttcagccttcaggcttgcttcaaatatttcttttcttgctcgaatttttctgattgacggagcagntcattcttta

SEQ ID NO: 20760 - DNA, 352 bp, Zea mays
agcttgtgacaatatatcctatgtgaagatgacttgctgtgattattgcttcagcccaataagaatgcgacacattatattcggctaacatagacctagccatatcaatgagagtcctactctttttttcaacaataccctcttgctccggagtatatttggaagagaatacatctttaatacccttgtgataacaatattcaacaatccttgcattttgtaagtctgacccattatcacttctaactgactagatatcaaaatcaaattggttttgagccaatatagcaaacgacttgaatgtttaaacacattagatttattccgaataaagaaacccaagcgaattaaa

SEQ ID NO: 20761 - DNA, 436 bp, Zea mays
  unsure (1)..(436): unsure at all n locations
tattagtgacactcttatactccgctttctgacatctagttgtagacgtacggagagagatanaaatgttcataacggttatgatatagagagcgacaaagtcctattatcgtaacgactcgaccgatcttgtgtccagattgattntggacgattttcactgaaacgattcttacaaaaaaacgggttgaatagctaagaattgacagtctgcatcaacttatcacggcggagataagctaagagaaatagtatcataattcgttaaactatgtttagttcaatataccttctcccatcggatcgatatacctgtcgtggttccataaatcggtgacaatagaatatatgttcgcgtgggatgcttacgtggactcatttcgaatggtcaatcgttgggactcgaagaggggatttgacacagaggttatactga

SEQ ID NO: 20762 - DNA, 431 bp, Zea mays
  unsure (1)..(431): unsure at all n locations
tgcggcatgcaagctttgaccacaccttgtccaaaatgacttattttgtgtccagcacgagtatctttctttcggaactatcatgtgctagtgagaactttagtatgtctaaacatcggacatacttcaattccacattttagagaaaagtttcttcgttcatctaacaaccacccaagcattatcgtctaattaccgcggcaccgattccgacatcaccttgcttggcaacatgtttggagctcacgatagatctatttgattattgtgtatcatattgtttcttagacctgcattatatgcctttctatttacgagactatgtatctatctttcactaggttggtgaatagtacactatgttgcagacttataaatctgttgcacattggtctgagctagaanactacattctataccctggttgtctt

SEQ ID NO: 20763 - DNA, 437 bp, Zea mays
aagctgagacattattacttaatggtcatgtgttgttcgaaagacacacttcaagtcatcatatagatgcaccaaataaccatatgaagccttcaatgtccataccatctatgtaaaggaccacactcgtttctttgaaacaattcaaagaacttaaccaattcagatcagattttaagataagagggacttaaaatctcattcccaatgatactcatcaagtatccatcttatgggaaaaacatgaccaacagaattgtccataacttttcatttcatcccaataatggaattaccaattcagtcttaccaagcctggtaagtatcatcacatgaaaagttataacatatgcaacactttgtatgggaggatgtatgtagaatacagtccataagaaaatgtttctgagaaacatatgcaatatccatcactatca

SEQ ID NO: 20764 - DNA, 448 bp, Zea mays
  unsure (1)..(448): unsure at all n locations
agcttaataatagtaagaaaaataattatgctatttgactaggggtaggaaaanttggggaagtttatatttacctactaacctgtttaaaaatgtttaacctctctgtccactccatttaagttagttttaccccttattctataatatgcttaaggataaggaaaatagaaaatgtaatttaattaatgaaccagagagtacctctatttttgttaggttacttattcaatatagttcactggaaaaatatatcataccctattttagtgtaacataagtaggatcccttttgttttgataaaacaagtgaaacttataaaaactctacaaaaataaccccaaagtaaaaacacccccacccttgggataactaatattgtgttaaagagaacttatganaaataggagatctgctgtttgacattnttcanataataatgtagta

SEQ ID NO: 20765 - DNA, 206 bp, Zea mays
ctaaaaataatgacatcaacacctgtatttttaactacacaccccgggagaagaaaagcaagggccttgtaccactaaatccaaaatttagcaaaaacatagtctaggatcaacaccccagcgcgggaacggtctggacaccacccaaaaccgttgggacgcaacccactttcaccaaacttaaattggggaaaaccagcaaaaca

SEQ ID NO: 20766 - DNA, 162 bp, Zea mays
  unsure (1)..(162): unsure at all n locations
gaacctgtccaacacttaacacacatatcaattctttaattgggttgtcattcaaaccaccaaaaaccactagagagcttttcagttagacatggcggcgccggagttgtgaacaaataagaaaggcgactgagaanggagatgggtggatggagagagaga

SEQ ID NO: 20767 - DNA, 448 bp, Zea mays
  unsure (1)..(448): unsure at all n locations
agcttaatgatgaactggctagtcttaaagctcaatttattactagcaagaatgatttcgataagctaaaatttgcaagggatgcctacacaattggtagacacccctcaattaaagatggacttggcttcaagagagaagctaagaacttaacaagccataaggctcccattcccgccaaggagaaagggaaggcccctatggctactagtgctaaaaggaaccatgcatttttgtatcatgatagaagacaaactagaaatgtaagtcatgatgcttatgattcatatgtttatgattctcatgccatgtttgctcctagntcctcttatgtgtatgatagaaatgttactacgagaaatgttattcctaaaagaaatgctattcatcatgtgcctagaaagaatgttattcatgcttctaagaaaatagcaaatgaaccttctac

SEQ ID NO: 20768 - DNA, 319 bp, Zea mays
  unsure (1)..(319): unsure at all n locations
tggaagatttattccacttgtgctagtcggcgatgccagattcagcccatgttagtcttagcaattaagcaagtgtcgagttcagctctatcaaagtctaccaagtatagctgaccctctaacactcccttaaatgctactgaatcatcactttttctaaagacagtaacacctatattcgtaaaagacagntgtacccattntacataatgtgaaactgaagcaagttgtatctaaagatctacaagaaaacattggaatggaatgtcangagatatacaatttacccaatccttgaccaaacctgggttccatccca

SEQ ID NO: 20769 - DNA, 440 bp, Zea mays
  unsure (1)..(440): unsure at all n locations
ccgacgataacatatcatcggtagtttatttaattccaacttcaaggtaaaattcttattataaaacaaaattntatctgtttgttttatttttacaatagaagttgctgacgaaggtctattttatataaagtatgctactgagcaaagcgctgtaaatgcaacaagacctcgaggataataagaacgaaattataaccgacggtctagagaacaaaattaaagagtacgaagcttctcttgaaaagaaagaatttctactccaagcagtggaaggctcccttgcagaagtgcaaagtgaaaatgctagactaagcanggagcttcttcaaaaatcagagggcttcgaacaggaaagaaaagacttgcaggcgaagtatgaagccgaagctgccaagaatacgaagcgacatctatctctgatagagctttcgtacatg

SEQ ID NO: 20770 - DNA, 288 bp, Zea mays
agcttctcaagcacctttttgaatgcaccttggctcatctttcttccaacaatacgtgcgccccggcgctttgtgttcattggcagtggatacgttgaaataaaagtcgtgcagcatgcagactgccacccacctgcaccccaccggtagcactgctggggagctcctgtgcacgaacacactggtgttggtatgttggcaagggccaactcaataccgctaatcatcatccccacattcttcttaggtcccctcctccgggtcgcgtgcccattaattgtcccaccc

SEQ ID NO: 20771 - DNA, 282 bp, Zea mays
  unsure (1)..(282): unsure at all n locations
tacgtatattatcttctcggcttttgaaataagagaccgagttggttagaaatggttccagtttcggtctatttaaatagcctaccccaagtagcgcatttaccgagttatgaaacggaaaaatccgaggtttacggttcggactacatttcgtttagataattttcgagactatnttgggcaacacgaaaccgtactaaatatcggatacattatttgagacaacactgggtgagtcaaaatcggataaaaatttatctgatatccaaaacacagttgatt

SEQ ID NO: 20772 - DNA, 398 bp, Zea mays
gagcttcgtgttcagctctgatatatttgcttcagcttccttcaataaaccctcggttacctgcagctcacagttctttttctcgaaagcatctgattgctcctttattctgctttccaaattatcaattatgacttcgcgcttcatatcttcaaaatcttgctgcatttgcaaagctttgctcaacagcatactctgcacgaacacaaccttcgttagacatgttgttattattataaacaataaaagttaaaggacaagtagttcacctttgaattggaataaaataaactaccaacgacatgttgtcgtcggtagcagctgatgtctgtctctagcttcaggaatacgatactcttggacagagtactgataactttggctcctgtttgatctcg

SEQ ID NO: 20773 - DNA, 362 bp, Zea mays
gacagcagcatgccaacctatagactaagcaaagaaaggcacttttataatcacctccattagaaacaaagagggcacataacaagcgaatagtgccaacagacacaaaagcgaacagagactgagacaaaaatcacaaaaccaaatatgaatcccacagggccggagtctaaacgacaataaaaaaactgcccaagacgaaaccccaacgaaatacgactctcactgaggttagacggcgttttaaccggagaacacatataaatcatgagcgaaacctcatgtgctcgaatctaaaatctgcagatttgcttctcatagggctcacacgaccaaatctggggatcaacatagagaaaaaa

SEQ ID NO: 20774 - DNA, 388 bp, Zea mays
gcttattcatttcttgtcaggaagggagtctttctcacaaaggtaacatatacatctttagttgatggttttagcaaggcaggcaatactgactttgctgccgtccttatagagaagatggtcaatgagggttgtaaggcaaatttgtacacatatagtgtattgttgcacgctttatgtaaacaaaaaaaactgaatgaagctttgtctatactggatcagatgaccgtaagtggagtcaagtgtaacattgttgcttatacaataattatcagtgaaatgatcaaagaagggaagcatgaccatgcttaaagcttgttcaatgaaatgatttcatcaggacataagcctaatgcaaccacatatactgtattcattatctcgtact

SEQ ID NO: 20775 - DNA, 396 bp, Zea mays
  unsure (1)..(396): unsure at all n locations
ctctagcgcgatcctactggcgtcgagtattttatacctgtagagatggagctanggctccgcttgaaagccaatgtaataacccaatgtaataactttttgcctttgtaaggtactttnttaatactatctatcaagcagtgttagcacttatctgtgtagccactcgtccctgctgtgcgtggtgctgttgactccttcctggtacctgccacctcgcctgggatgcangcttgatgtgtcgaggttggatactgacgtatctaanagaagtgttgtgacggaaacctccaagtcattaagcccacctacagttgtccttgttcaacagacatcagacaaccctgtagatgttcctgaatcccttgacaagttcggtatctttatccttacctt

SEQ ID NO: 20776 - DNA, 382 bp, Zea mays
  unsure (1)..(382): unsure at all n locations
agctttaccaaatggacgttaagagtgccttcctctattgactaatcaaagaagaggtctatgtcgagcaaactcccggctttgaagacagtgagtatcctaatcatgtctataagctctctaaagcgctttataagctcaagcaagccccaagagcatggtatgaatgccttacagatttccttattgcaaatggcttcaaagtctgcaaagccgatcctactttattcactataactcttgacaatgatttgtttgtatgccaaaattatgttgatgatatcatatttgggtctactaacgaatctacatgtgaagaatntagtacgatcatgacacanaaattctagatgtctatgatggtggaagtgaagtattttct

SEQ ID NO: 20777 - DNA, 361 bp, Zea mays
  unsure (1)..(361): unsure at all n locations
tcgctagtgcgtagctggctgatcaatgaacaccccgaaaccagtcatttcnggtaaagaccagagccacagcacagaggcatctggntcctgtcagctggtttctctggtgcacgagccaacttcagcacttgccgccggttggtggcttctcgcacctttccggccggccatccagctncgattcttcgcggcgcccattcgtactaccggtctgtttggttgggctgtggctgtggaaaaagtgctgtgggctgtgagctgtggaaaaagctgctgtangctgtgttgctgttaaaagctaaaaatcgtttggggaaaccactannagtcggaaaaagtcttcgatatatgtttcaca

SEQ ID NO: 20778 - DNA, 416 bp, Zea mays
agctataaatttttcagccaagtaccatgctatattatctataccagcgaaagaccctggagtacgtgacaaagaacagaaatagattcagcaatttatttactgtagggcaaaaattagcatattgttgcaaacactcagcagaaaaccctctcagccatactggagattgaaaagtataaacaacatgctcgcaaagggcatgcatgcttcaaaatgatatgctgaaaacaaatgctgctaatatttataattcatatagcccaagaaaacatgagtaaccactgccaagagaatccatatcatggaaactgtgtactgcttgaccagaattatctaaaggatatatttcccaagaatatataacaagtaacccatgctgagagaattcatgaatatcatgggaactgtgtact

SEQ ID NO: 20779 - DNA, 377 bp, Zea mays
  unsure (1)..(377): unsure at all n locations
taaccttggtacgagggatagctgcctttggtccataagtggatggtccttaagcctctttgaaatccttatgggtaaatgcttaaaatgatcccaacatgctttcataagtgcataaattgtcatgagcatcacacttatactatgacacaatgcacttcacattctgtatgatatagctatgttctcattaacctaattatgtgcaattggcatttaaggccaaaatatgtgttcctctccatgcacatatttatggggagcagtctatattgtatagaactatgatcatgcttnnaaattgatatatcctttgatcatgtctcttttatgtctatgactaatgtgttttcaagtgtattctcatgcttagtcat

SEQ ID NO: 20780 - DNA, 398 bp, Zea mays
  unsure (1)..(398): unsure at all n locations
gatgtagcaacctcatgtgatgatatgtattcatgaagagcaaactaatctacatgctgaattgactgaaaaagttgaagtcctgactttagacaaccaaaaattgaagaattacttgactgatgcaactactataggaaaagttgctattgagaacaatgatttcaacaatgagttggcagtggataatcaaaggcttcagaatgaggtcaagaaactaaaaagtgaaaatgaacatcttgcaacaagtgtgcaaaagttcaacaagggtcaatacctccaaaatgagctgcttatgaacactgttatgaaaaataacaagagtggtattggatacaatgcttttgtgcgaaagaaagctatcactcaatacaagccanagcatactcacaagccta

SEQ ID NO: 20781 - DNA, 408 bp, Zea mays
  unsure (1)..(408): unsure at all n locations
cctgtaccgcgcgaagggagttcttcaccagctcgaaaatcatgagatgtagatgtggtgtaacatatctgcgatcaagagatcaagaatagctcagattatcattcagagagacaccatggtttactttcttgtggaccaaagatcttttagagtttcaaagccaacaagacccctgtccatcatgcattgcaaccaggacatgcgggtgttcaaagtggttacaggctctaagttattacagttcagccaaaggttggtctacagagggtaaagtacaagtagaatggttaatatcacacaatagttaaacatgataatttaaatgtcagatacaaataagccaagcaggccagcaatatgttcacaananaatatggngaagaagaaaagtcaaatatgtcaatc

SEQ ID NO: 20782 - DNA, 411 bp, Zea mays
  unsure (1)..(411): unsure at all n locations
gatgtggataaggtcaagactctagaccaaaagaattcctagaaaatagtgaataaatctcaagaagagggcagtccaccagcgctctggtggcgcaccggactgtcagtgcagagaggtcctcaaccaaagactctccgacgctgtagtagtgggcagtctggccaacagtcgactatggatttacaatggtcgactgcttcagacctcaatgatccactgaagtggctaaggcaccggactgtcctgtgcacccgacgacagaagcaacaacagttctgtccaacggctataattgaggggaggggatttatacctctctaaccgaccatttgaaggtgtgggagcccaagcaacataccaacacatgctatagacantttcaagtgctcagacacccaagtgcttaat

SEQ ID NO: 20783 - DNA, 330 bp, Zea mays
  unsure (1)..(330): unsure at all n locations
acaaatgtggtaagccccggcattttattgctaaatgtcctatgtctagtgacagtgaccgatgcgacgacaagaangggagaaaaaaggagaagaanaggtactaccagaggaagggcggcgatgcccatgtttgtcgggaatgggattccgacgaaagctcaagcgactcctccgacgacgaggacgccgccaacatcgtcgtcaccaagggactcctcttccccaacgtcggccacaagtgcctcatggcaaagggacggcaanagaagaaggtaaatctaactcctcactanatatgaatcttctagtgatgaatatgctagtgat

SEQ ID NO: 20784 - DNA, 360 bp, Zea mays
gtagcataagcaagtaaaatgcgaattggttctagcctaactacgggtgcataggtttcaccgaaatccaaaccttcgacttgtgaatatctcttggccacaagtcgggctttgttccttgtcaccacaccatgctcgtcttgcttgttgcggaaaacccacttggttcctacaacattttggttaagacatggaactaaatgccatacctcattccttgtaaaattgttgagctcctcttgcatcgccaccacccaatccgaatcttgaagagcttcctctaccttgtgtggctcaatagaggaaacaaaagagtagtgttcacaaaaatgagcaacacgagatcgggtagtaccccct

SEQ ID NO: 20785 - DNA, 357 bp, Zea mays
  unsure (1)..(357): unsure at all n locations
atgctcctatgtgaagatatagcagatcaaagggtactgctgggatctcagctatctgatgagcaagaaaagctctgctaagattcttgntcaacaacaaagatgtcttcgcttggacagcccatgatctttgtggtgtcaacagagatgtcattgaacatacacttaatgtagatccatctttcaggccaaggaagcaaagacttcggaagatgtctgatgataaagcttgaggtgctcggaacgaagaaagatactctcaatgctggtgtatcagagaagtacatatccaaacggtagccacactgtatggtgaaaagtaatggcaatggaaatgtgtatggttacatatctaac

SEQ ID NO: 20786 - DNA, 303 bp, Zea mays
atgtcctccacaccaggtgcagaggtcccatgcagccacgcctaaatccgtggatgacatagttctccactccggtgcggaggtccaaagcagccaagttcggatccgtggatgacgtaacgagcaccacctgctttggttgtggtggcgacgccataagtatgaccttgggactaatagagaatgttgtctagtgacattcattatgacaatagaagggtattacttactgatggcgcaatctcatatgtaaagaattatcttaaacaatcatcctatgtaaattacaatgggtaatatatc

SEQ ID NO: 20787 - DNA, 320 bp, Zea mays
  unsure (1)..(320): unsure at all n locations
gcttctnagggagaacacgtgataggtctaaccaatgtacatttcgaaatagatagaccttgtgcagcttgtcaagcaggttaacaagtgggaggagcacatcacagcaagaatgtgatgaccacttcaagacctctggagctgctgcatatggacctcttcggacccgtcgcctatctgagcatangaggaagtaagtatggtctagttattggtgatgacttttcccgcttcacttgggtgttcttttggcacgataagtctgaaacccaagggaccctcaagcgcttcctcaggagagctcanaatgagttngagtt

SEQ ID NO: 20788 - DNA, 419 bp, Zea mays
ggatcttaagtcactgagctgcagcttcgccttcgaggccgaaagtgaaatgaatgaagctgtcgaagaatgccagaaggccttcggcgttatctgttcttttattggaacgagagatttagtacaagagcacattgccttccgggtatggccgctcgcggagaaatgggaaatgcctcaagaaaccatataagaggccgacgaatgtggacttgtcagactgaagtacaccttctagttcggagataaattcgttgagccagatgatgactggttaaaaagcattgagaatttaagtgatgagctgcttggagcttattctaaggccgaagatactgcgatgtcagcagccttcggaggccgaaaaaagaagaggctgaatcgggtattcgatgcaactgggtttgtctaccctgact

SEQ ID NO: 20789 - DNA, 420 bp, Zea mays
  unsure (1)..(420): unsure at all n locations
ttgaagcacgaagcganatgaagaccagccaagagccatctaccatacgtncaatctgtcgctcgatcaaataaattcaaacctaacaggacatgggtagatcgcgctgctgatttctaaagcaggaattgaagacaacagggttgatctctaaagcataagctgatgatataatgttgagttctaaggcatgagacgatgataagttaaaagatttctataaagcattagatgaagacctttgagtagattaatttcagtaatccactcaaagctcggnggctacacccaccttcagtgcacccaatgaatccttaaccctaaaggcagaatgctgatctctaaggcatggactgacgatgaaatgctgatctctatagcatgagacgaagataaccaacgacttctaaaaagcatgag

SEQ ID NO: 20790 - DNA, 369 bp, Zea mays
gcttctaaaggagagcacactgtgggactaacacatgttcattcagagaaagacaggatttgtagcgcatgccaagcacgaaagcaagttggcacttatcatccgcacaagaacattatgacaagtgacaggccactggagctcctacacatggatatattcggtccgagcgcttacataagcatcggcgtaagcaaggactatctagttattgtggatgattattctcgcttcacttgggtgttctttgtgcaagaaagatctcatacccacgagaccttaaagggattctcgagacgagctcacaatgagttctgcttaatgatcaagaaaattagaagcgataacgggacggagttcaacaactct

SEQ ID NO: 20791 - DNA, 340 bp, Zea mays
atccttcactctgcttgtgcagggcttaattaatacctagcaatgccctaatggctgcaaagaatgatgaatatgagaggtgcactacttcgtctcaataacccctcgatcagaaggtatcagcccgaaaaacgagagcaccgaaaaagaccagattctactttcattggcggattaagtaaaggaggatgaatctagcttcaaaaatcaatctgaggccccataatgagattgaataccctctggaaacacctggccgaagccaaaggacaatgtggtctctcagaagccaaccgacacattaatgagtattggaaaaactatttagaacaaacagttg

SEQ ID NO: 20792 - DNA, 369 bp, Zea mays
agcttgtgaaagttcttcatccccacatgtgctaagcggcgatgccacagccagcccatgctagtcttagcaattaagaatgcatctagaccggcctcttcttttgcaaaatcaactaaataaaggttgccgtctaatacacccttaaaagctaatgaaccatcacttcttctaaagacagacacatctacattagtgaataaacagttatatcccatattgcataattgactaatagataacaagttatatccaagagactcaactaaaaacacattagaaatagagtgctcatttgatattgcaattttgcctaagcctttcaccttgccttgattcccatcaccgaatatgattgaatcttgggca

SEQ ID NO: 20793 - DNA, 377 bp, Zea mays
  unsure (1)..(377): unsure at all n locations
cacacacacttgtgattggtttgacttacagtctgaaagcatctaagcccctgtgttggtttagtgattaatgacaacgtaatattatatgtgactaacgtgtgttttgcagagacaaatggtaagttatgtcgcatgacaggtagaagtactacaacggtgaaaacacatcccgagataagaactcgaagcgacggctaanacgacggaacaaaaggtgaaggtctaaagagtccgagtgtcaaggagatgtggacactcgcgattaattaggtcttttattctcttttagccgtactataaagaggggttgtcgatgagtagtttgaccaagagaagtctagtgtagtggtggtgcacaatcacactcatataca

SEQ ID NO: 20794 - DNA, 340 bp, Zea mays
tagctctgattgcaacacttgttttattgtactcttaagagccaggacactattacattgatttgcatgatgaagaaaattaaaagtctgcgaaagtgaacatagacagacactaatgtcctcttgatagctttgggtttactaacctaagcccttgcggagtttactatatatgttttatcttctagaccatattgtcgatagtatgaatgttggatccctcccttatgttcctttgctgcgaaacttgccttgggaacttgggttaaccacgacgcacttgatcataaggaggtggtcctagaacgaacgaagcagatgatgaccatgcactcattac

SEQ ID NO: 20795 - DNA, 309 bp, Zea mays
agcttgtaacccctactacgagcaccccggtgcattattatataagccacagcccccctctcgtggttcatcttgcatcaatccatctgggcagggacacgcaacggtcaattcactaatcgattgagggtcctcgcgggtccaaaacgccgacagttggcatgccaagtaagggcccagatgcgtgttggcaatactttcccgttgagttccagatggataatcttcatcaacctcttcggcccgggacggtgctctgctttgggagtctcgagttcatgttccccgacgacagctatgacatggtac

SEQ ID NO: 20796 - DNA, 365 bp, Zea mays
  unsure (1)..(365): unsure at all n locations
tgccttcgcttcggtctatcatccgcagtccaacggggtcgtggatcgtgccaatgggaaaatattcacagctgtcaaaaagatgctcctcgatgaanaaaaaggcagatgaaccgatttattaccggaggcagtctgggcgctaaacacaactgaatgcagggcgaccgggttcactcctttccgccttctatacggatcggaggcgatgaccccgcaagaaataaagcatgggtccccgcgtacagttccgtcagccgtccccgacgtggacgagccaacttcaaaagatctcattgacggagaccgggtcttcgccctacaggccctaagcaaataccaagcccagaccaaagcatggcgcg

SEQ ID NO: 20797 - DNA, 468 bp, Zea mays
  unsure (1)..(468): unsure at all n locations
gcttgtataatggcagaccatgatacacttactggctacgggtaatctgactccggtgagggacactttcgtgtggacagctcataagaatgagactttctcaaccagatccatgtattataatttaattagtatccccaattataatcgtggatgtttgctttggaagttgaaattaccccttaagattaagattttcctttggtatctaggtagggggctaatcctaaccaaagacaacttatccaaacgtagatggcgaggaagtccgaagtgcagtttttgtaatcagaacgagaacatacaacatcttttctttgattgctacatagctaaaactgtttggagaaatatttattttactntaaaaatagacccaccccgtaatattaatcatattatangggactgggaatcaacacaagtggatgcataaaaagtacttcttctaacgttgcactttgttta

SEQ ID NO: 20798 - DNA, 417 bp, Zea mays
  unsure (1)..(417): unsure at all n locations
acaggagcacctattcaccctctctctaagttgctctcaatggtatcggagtcgttctcttcacgtaagggactaattgcccgaagagatggatcctaanggaaaggggatggtggtcaacgataaggagaaggagtccatcttcaacgagccaagagatgacaagcccactgactctggctcgagtcaaaataagaaggacgggaagaagaggcgcatcaagaagatcgtctactacgacagcgatgaatcttcttcttcaccaagagacgatgacgacgagaaaaagaaaccggntaattcaaattattcatttgattattctcgtattcctttcaattccaatgctcattntctttcaattcctcttggtaaacctcacactttgatggagaggactactctttttggagtcac

SEQ ID NO: 20799 - DNA, 450 bp, Zea mays
  unsure (1)..(450): unsure at all n locations
cagcttgtaaaatatttagacacgatccgaaagattgatgcttcctttgaggggttctctgtcaaaaatattcctcgaggagaaaatgaacatgctgatttgttagccaagtcagcaacacaggggattcctttaccttcggaagtattctttgaaacaataaaagcaccttcggttgagcttcttgaaagagcagtcctcaacatatctcctatctatagtgaagactggagaactgagatcatctttttccttcacggtaactttctttcagatgacgaagcttataataagaggatagaggccagagctcgaacatatgttataatagaaggggagctatacaagcgtggggtctgttcttcattactcanatggttatccagagccgaacgtatataatcgatgaaagaaatacacgcacgcctgtgtggatctcatattggatct

SEQ ID NO: 20800 - DNA, 294 bp, Zea mays
tcctctcctccagtgctattaatgcaacaggttgagcttcagatgaatcacccagctcgttgatttttctcgagccttgtatcatgcactcccaacttacaaaatgcccgataacttcctcgggggtcattgtagtatatctaggactaccacgaattaatagaacttgagtgggattaagaaaaatgagagatcttacaataacatttaccacttcgtgatcgttccacttcttgctcccaaggttgcgcacttggttcaccacagtcttgaaccagttgtacatagtgttgg

SEQ ID NO: 20801 - DNA, 331 bp, Zea mays
  unsure (1)..(331): unsure at all n locations
agcttgagagggatttntcacggttcaagctctttactaaaaacgatctagcgccgcgaaaggggctactgttgggcccatgcttcgttgcgccgaaggtcttgcgtgaagaagcagcttctgctgaaatcgtccccaggaaatggccgaaggttcctttttatagagcttcggcgttgcaaaccgacataaagatagaatgacctttttatccatagaggcctaacataatgttgtaaacttttgtaaagggcataattgtaattcgtcacacgctgcgtnctgtgtctataaatagatgaacagtacccccgtactgttcacgctgact

SEQ ID NO: 20802 - DNA, 449 bp, Zea mays
  unsure (1)..(449): unsure at all n locations
gattaccgccctcttaatgcggtaactatcaanaacaagtatcctttgcctcgtattgatgttctttatgaccagttggtcggggccaaggtgttttccaagatcgaccttcgctctgactatcatcagatcaagatacgagcaagcgatattctgaagacgacattctcaaccagatatgggctatatgaatctttggtgatgtcattcgggctgacaaatgtaccagcatatttcatgtatctgatgaattctgttntcatgcctgaattggacaaattcgtagtgggtttcatcgatgatattttggtgtactcaaagaacgaagaagaacatgccgggcatttgcatgtatggcttcaacgtctgcgagagcaccacctttatgccaagctgtccaagtgtgacttttggctaaaggaaatcatattcttgtgcacactatctct

SEQ ID NO: 20803 - DNA, 443 bp, Zea mays
  unsure (1)..(443): unsure at all n locations
tctagactgcangcatgcaagctcgcacacatagctcttttgaatacctgtgatcatatctctcttatatgctatgactaatgtgtcgtcaagtttatttcaaaccaagtcatacgtatattgaaagggaattggagtcttctgcgaagacaaaggcttccactccgtaactcatacttcgccaccactccgagcaactctctctttcttgcgggagaaatgagcatcgatgaaaaggacttcatccttgggggagagagtaaaagctcaaacacgaaaggagctcgaccttggataatcttaactctttacttatgaccaaggggaagaattacttcgaggctctattgatcactttgggactgtgccacaagggggaaagacccaagctaagacgcccccccccaatcaaaactaggcttcaagtctatattgatcattgg

SEQ ID NO: 20804 - DNA, 389 bp, Zea mays
  unsure (1)..(389): unsure at all n locations
gcctatctcattccatcgcatcgccgtcnaaaatgtatcttcatatgctcaagtttaggcgcangatctcgtcctctcccgctttgcctttgaatgcttccacctcatctgtcgctaccatggacctgtcgtgtgtcacatttcgtgtgcctacagtgttctggctaggaggctgagatctaccgttgatcagcctgagcaactcattctttaatntggcactgttgagtgccccattctcatgtcatgctactacacactcgaggtctgcatccttgcgtgctcgccatgccctatagtttcatggatgatgacgacaaatgtttcacgtaagtgtcatacacatcgcaaatgttaccggatgaagtttaacagacgatctgatgatc

SEQ ID NO: 20805 - DNA, 351 bp, Zea mays
cattcatattacgtatgcataaacgccggtacctgcgcgcggtatacccaccacctgccacgttgacccgcgccccgcacacctagccacgccaggggccggggctctctctagtaatggaagcactgggcttccattacctcgcccctatatatatatatatatatatatatatatatatatatataatatactaccttagtacagtacattaattaattatatatgtacatgtatatgctgtcctgtgcattaacattattccatcttgactctatatggtataatacatatgctgcgcgtcatattcagaagcatgctatatactggagctagagatatatatataca

SEQ ID NO: 20806 - DNA, 494 bp, Zea mays
  unsure (1)..(494): unsure at all n locations
tattgcaactgtcccacaatgatagtgatcatgacctttgtgaataaagggagaagaagaagcattacaagaaggccaagggcgaggcacatatcggaaaggagtgggattcggattgctcctcctctgactccgacaatgaaggactcgccgccatcgccttcaacaagtcatctctcttcccaaacgagcgtcacacatgcctgatggcaagggagaagaagtttatgcatccggnggttcaagctggattatcgacagcggatgcacaaaccatatgacggnggagaagaagatgttcacctcctacgtcaagaataaggattcccaagattcaattatattcggtgatgggaatcaaggcaaggtanaagggttaggtaaaatggcaatttctaatgagcactctatctctaatggtgttttagtagagtctcttggatataatttgctatttcggtagtcaatatgcaatatgggatataactggctat

SEQ ID NO: 20807 - DNA, 434 bp, Zea mays
agcttgacttacaccaaaccgcacccgattctattttatttaggctcaacaatatggtaagtcaaggtaaccaagctggtaccaattaattttgctattggatcatatcgagatgttgctgaccgtgatgatgtgcctatggatgcttgtaatattctgctaagtagaccatggcaattcgattcacattgatgcatcatggtagatcaaaacaatattctctcatataccatgataagaaaattattttgcttcccatgtccactgaggctattgtgcgtgatgatgttgctaaagctacccaagcttaaactgagaacacaagaatatatagttgttggaaaaacaaagatgggataaattgaaggacattgtctgtttcaacaaaactgatgtaatgaatatttgcttcactactgttgctacacctggta

SEQ ID NO: 20808 - DNA, 491 bp, Zea mays
  unsure (1)..(491): unsure at all n locations
actaagcttaagttgagatgtcagaatttactaaatttattttttcagatatttattttcttattattaataattnttttacagagtttgggccttacaccgaccttgctgatccgagatcggtctgatctcataatggtgtcaacaagctcctttaaaaatttcagattttttgaagaaccgagcgaaaagttatgcccggtttaaggaaggtaccttaagttatggttaaaaatgaccgagatgagacaaccgctntgtttcctttccctatntttntgtttgttctatggttctatcctttctctttcngtttctttttttcttctctntttttggttctggtttttttacgtaaccgaaggaaaataacaaggaagcggcgttgactcggtttgtggcgtgatcaaacgggagatggtggcagcgcattannggttgaatggtggaagaaagatgatggtgaaaaaaacacatgcaccagcaacaat

SEQ ID NO: 20809 - DNA, 426 bp, Zea mays
  unsure (1)..(426): unsure at all n locations
gcgagcttcggcatgttcgcagaaaggggaaccgatcttnttatgttaaggccatctacacctcgatagaatgctatagaattatcaccaaatgtgaagggcatgtctgtaatcttgtatgggatgtaccccgtgcctataaataggtgaacagctcccccgtactggtcacgcggacttgacatttgcatttgcgtcacacttgtaagttcatttccttccacgtcgaaggtacatttataattcaatattgtttctattcctttatgatgagtgaataaagtttaatgaataatgttatacgactattcacgctatcttatatgtgtcatatgcctcgacttttactaatgtatattatatcgatgaaggttaattcttcattacctttctccggggatcgntatatcctaatggaaataatgc

SEQ ID NO: 20810 - DNA, 289 bp, Zea mays
  unsure (1)..(289): unsure at all n locations
gactcactttgctaaagagcttactagttgtggatccttatgctctaanntcacttcacaagtgaagtacttctcctgaatctagatcagcctaatctagagcattcacttggcctacactgacttccttttatcacttatagattcacttagtatctacgctgaaagacgaagatccagtcttcatattcgagaagttctgcgatctgaatcgattaatacccagctggggatctccaaccacactacatatgtagcacttaacctctgcatatgtcaaatcgccacc

SEQ ID NO: 20811 - DNA, 367 bp, Zea mays
actctagagtgcacctgtgcgcatgcgagcttatggaaagaacacgcaaggagcttcttcctgaccttatgacagataagcaaggagtcctctggttcaaggaccgcctgtgcgtgctagtgggagaggcacgagaaaccctgctcgatgaagcccacaactcagcttactctatccacccagggaccaccaagatgtacctagaccttaaggccagatattggtggaaagggatgaagaaggaaatatcacagtatgtggcccgatgtgacacctgtcagcgaacaaaggccgaacatcataagcctgcaggcctacttcaacccctcccaatacccgaatggaagtgggaagaaataagcatgga

SEQ ID NO: 20812 - DNA, 337 bp, Zea mays
  unsure (1)..(337): unsure at all n locations
gaagactcaagcttgctgtatggattacaagcgttgcgggagagtgaaatctatatctatagacanaatganagggttcggcttctatgctagccgtctggggctgcctgtaccgcttctctcctactctggctgcctccgcttgttagcgccgtgcgtccatgtgttcatacgttgcatgttcgtctctcgtctttctttttccccctctctcccctcgtggagccctggactaccccttntatagacacaaggagatgcccagctgtacaatgggggtgtagtctagagctaacgtggctggcagggaagtgccctgagccctgacaaataacgt

SEQ ID NO: 20813 - DNA, 425 bp, Zea mays
  unsure (1)..(425): unsure at all n locations
agcttatcttatcttctttccaacgaatctgaccttatctcanaattcgntctgagcgctccgcaatcatcgtagagatttctggacttcctatattaacaagatttgttaaatctgatttaaaggggttgttagcaatatctttattgtttgggttgtcatagtgaaaaaaaagggtttatgcccctgccnaaaaaaacagaagaagaagaaaaaaaaagaatagaaaagaaaaaaaaaggaaaagaagaagaagggggctgaatctctaaatctgttgtttctctttgtgctgtgctagntgntctttntcagtgactacctttgtgcctangctcacgtctctagcctggtttagcctaagaccagcacagtaccacccgtgaacgattattcagcttgctttttgtactaacgtggtacta

SEQ ID NO: 20814 - DNA, 426 bp, Zea mays
  unsure (1)..(426): unsure at all n locations
ttattntctactacatgtcatcctcaaactgatggtcaaactgaagttgtgaatagaactttgtctactatgttaagggcagttctaaagaagaatattaagatgtgggaggactgtttgcctcatattgaatttgcttataatcgatcattgcattctactacaaagatgtgcccatttcagattgtatatggtttgttacctcgtgctcctattgatttaatgcctttgccatcttctgaaaaacntaaatttgatgctactaggcgtgctgaattgatgttaaaactgcacgaaactactaaagaaaacatagagcgtatgaatgctagatataagttggctagtgataaaggtagaaaggaaataaattttgaacctggagaaattagttggtgcatttgagaaaggaaggggttctgatta

SEQ ID NO: 20815 - DNA, 432 bp, Zea mays
  unsure (1)..(432): unsure at all n locations
tggcgctcgtcatcaagagctttcgcttatttttaagcaaagganggggaaggactactagttccgctccacgaacgtttgctacaagagaggtaagcccggtcattttattgctaaatgtcctatatctagtgacagtgaccgaggcgacgaccaaaaggggataatactcgagaagacaacgtgctacaagaagaatggctgcgatgcccatagttgtccggaatgggatgtcgactaaagctctagcgactccttcgacgacgaggacgccgccaacatcgccgtcaccaagggactcctcttccccaacgtcggccacaagtgcctcatggcaaaggatggcaaagagacgatagttacatccaactcctccactaaatatgaatactttagtgatgatcatgctagtgatgaggaggataatatgcg

SEQ ID NO: 20816 - DNA, 232 bp, Zea mays
ctgagctgcacttaccaagacggaaaggctttttatggccacagaaaagcttgttggcacctcccgcttgaagaaaagagacccctatcatgggtataaactccttaaagcgctataagggcccaagcaagccctcagagcattggttgaaggccataaagaattccttatcaccaaaggaatcaaagtcggaaagggcgagaccacactctccactataactcctgaaaaa

SEQ ID NO: 20817 - DNA, 472 bp, Zea mays
actaagcttacatgtctatatgattcagaatcaaacgaagttcaaagctcctcacaatgaaactccttcatgcggcgctcacttatatgacccacaccacagtgccacatgtacgtaagacttacatcattaagctgaggccttgtaacactaatatcacacataggtgcatcatccagacttaaaatgaataacccatgcataatggatgcaaaagccacaagcatgccattcttacagatcacacaaccattgttttcactcgcacatgaataaccatccttcatcaaacatgaaggagacataatgtttcgactcatactatgaactagataacagtcatttaactccgacatagatgctgatgggatgcggagtatcatcgtgccgacagtcaacgcaacaactcttgcattgttgcctacccggagataacttctgattattcacgcttcacttatatcattccctg

SEQ ID NO: 20818 - DNA, 455 bp, Zea mays
  unsure (1)..(455): unsure at all n locations
agcttcagctccatctatattatggattgcctttgaatcagtccagcttccttcggcccttctggcagcttactgactcccatgaatagcaataggcccttggtccgaaggtatctttatgcaaagataagctgggtgaagaaatgcttcataagcatttatggtaccacgaccaatgatggcgtngtangggtattccatgtcaacaatatcaaacacaatttgctcagtccttgtgttatttacaaatccgaaggttaccggcatggtaatcttcccgagtgccacaatctgccgccctccgaagccacaaagagggtgcgtagcatcatgaatcttgtcttcaagctcttgcatctgtctgaatgctttggcaaatataatgtcagctgcactgcctgtgtcactaggacattgtgaccagaaccctttgatcacacagaaatgacatagca

SEQ ID NO: 20819 - DNA, 459 bp, Zea mays
  unsure (1)..(459): unsure at all n locations
ttaattgtgttgccatcaatcacccaaagggggatattgtatgctctcttgtgggttntggtggtttggatgataacccaattaaaggactaacaagtgtgctaagtgttgaacaggtgcttaatgcaaagctgatagggttcaacacaagtgaacaagtgtgatggtccaaagactggattatctatagataatggacatcacaagtaagatggacattgcttaagtgagactcggtgtgcgtaactcagagacaaccgatcaagccaaggatggaggcaagaagagcttcgaggtatcgagtgcatgggagaaggtcaaggagaccaggaacccaaagccagtggtgaagaagaagacttacaaagtcaaggttgatcgagttaagagttatggtgcatcaaggatcactacataaggacatgacttacaaccaatgaggtaacatctacagtgttg

SEQ ID NO: 20820 - DNA, 316 bp, Zea mays
  unsure (1)..(316): unsure at all n locations
ttaagtcacctgaggctgaagcttataacagacacgctgtgcgtttatatgaagtatcttgatcaccctctgaacgtatatgaaattatcatgaattgaccgtntctggatgaaagcattctgggcagaggatacaatctcattcattctcagtgcaagtctgtttgccacaattttggttatgattttcatgaagctattgatgagactgattggtctaaatatgtctattgtgtcagagaactctcgcttacgtagcagaatgatgttcgcctcattgactangtgtaagcttctgcgttntagatgataaaaa

SEQ ID NO: 20821 - DNA, 334 bp, Zea mays
cacttagatactcagcttctaagggagaacacgtgataggtttaactattgtgctattcgaaaaagatagaccttatgcagcttgtcaagcaggtaaacaagtgggaggagcgcatcacagcaagaatgtgatgaccacttcaagacccctggagctgctgcatatggacctcttcggacccgtcgcctatctgagcataggaggcagtaagtatggtctagttattgttgatgacttttcccgctttacttgggtgttctttttgcaggataagtctgaaacccaaaggaccctcaagcgccttctcatgagagctcaaaatgaagttgagct

SEQ ID NO: 20822 - DNA, 477 bp, Zea mays
  unsure (1)..(477): unsure at all n locations
agcttatgttgggttaccacacactctccatgtataaccttgcaatctaagcaggcatgcctgtcctctnttctcaagaggacgaaatcaatctggctagtgtgttggccactactgaaggtcaccacgtgggattgcctcttcttaaagaaagtgtttgctataaacatgtcataggctagggcaaagttcaggatttcctctccttcttgattcctggtcccaaagccgaagcctccatgtacaccctcgaaactggtgctagatgtacccacatggccattgagatctcctcctatgaagagcttctcgccaactggcacactactaaccatgtcctccaggccttnccagaactctctctttgagttctcattaaggcctacttgaggagcatacgcgctggatacattgagaaccaagtcccccatgaccagcttgactangatgattctatctcctaccatcttaacatct

SEQ ID NO: 20823 - DNA, 411 bp, Zea mays
  unsure (1)..(411): unsure at all n locations
ntctccagctgccaccacgtcagcaccgacagcggcgtccaccaacaccgcaccagcgagcgccggccgccccaaagcgcaccggcaggtcctcactcccgtcatcgccacgaaagcgaggacagaggatggaatgttgcatcctagctgggcagcaacagtccgccttccccggcatggctgggggatgcctcctccgcagagctggaggatggtttccacacccagaagctggaagaggcgggacgccagcccacgcgaaggcaggccctggctcgcctcgctctccgccccagcaaggatgatgaagatccttgaagctgagggcgggactgaagtcgcagcctggctcgcttctccccaccatcaaactggtggtcaccgtcttgggtgaccaccggcgaggggatg

SEQ ID NO: 20824 - DNA, 481 bp, Zea mays
  unsure (1)..(481): unsure at all n locations
agctngcttaagccggtatgaaacttatacatgttggttaccttctcttgtaaatactttttatcttataatgctttgttgtgtgcaggatgatggtgccgaagattgatagtccgaagcacatcccgaaggttgtagaagctgctttttaggcctgcctgcatagatcttagaagcatttgtattatctttgtaaaagacattgtaatcgaaatttgaacattactttgtatatttgtccataccttgtaatatattnttacctttccatccatgcataaattgctttgttgtggacgaaacttgtatattttgagccaaaggcgaanaacaccttcccttcttttcgtacacaacgaagcatatactttgcttcttcgtctcatcgaagcattgntatcaaagctgaagtatttgttgtgcttcatgtatgatgatgatgatctacgaatgctacatgaatgatatgaatgcatgaatg

SEQ ID NO: 20825 - DNA, 335 bp, Zea mays
  unsure (1)..(335): unsure at all n locations
ctagtgttcccgccgacctagtttagggctctattgatggcactgaattggttcctgctggttcattgcgagctgcttcgggtggtgaccctatgccaagccatcaattgatctctcatgatttgngagtcccttcattcttctccaacctccaggtaccgtgatatattctagcctgnactttacaccgtatgaactgctgtcattacgctcatttgttctcaatatcaggcattggtggacgggatggctagtcatctgaggttgcaaggtgtttctgttccgaatgagcttcgtctctggcacgttggaatccgtgttgctcaacagcgtgc

SEQ ID NO: 20826 - DNA, 386 bp, Zea mays
  unsure (1)..(386): unsure at all n locations
agctntggaagaggcaagggtatgatatatactnttttgaatctgttttttgattagtaaacttcattcatttagtcattcttattttctacatactaacttcggagatgacgaagttattgaattacccattcttgaggaggctcccctggcaagcattgcctttgagccaaaggaggcttcaattttgaaattctctctggatactacagaggaggatgaatgcatagcttcagtaatgagcacatatttttttgaagatgacgaagacaaagacaaggacaagaccgaggcaaaggtcttatgcgagacaactgtccaaacaattcttgtgatgaaggatagtaaggtgcctcccataactgaagcaacaccaagcactatgg

SEQ ID NO: 20827 - DNA, 402 bp, Zea mays
  unsure (1)..(402): unsure at all n locations
gcgttgcgcacgactcaatgaataatgatgaccccctgtagattgtttatctgaatgatagagcatgaaggcatattgtatcttatcagagtatactatggctaccactataatggaagaccgaagaggnacactctgatgagtcatggatatcgactattggtgaagcccatcaatcatagntcccaagttcatgagagttaagtcaagttattcggaatccgatcggactgcngagcgggtctcgnaaaacggatgctagactacatatggactccattttgacattctagataatgtcggaagctaacgagatagtctttcaacccattagttccacatcaataatgctcaaagtgatggaatcatcataacagtgacgtcaaaatctgtagaatcatc

SEQ ID NO: 20828 - DNA, 153 bp, Zea mays
ccacacagtctctcacattaagaggaaatgagaataatgggtctcccaactatcaaacttactttattgacttacgtatgtaaaccacaatgcaggggatacccacactctggtgacaatcatcacaaagatccccacctatcgtagtttatc

SEQ ID NO: 20829 - DNA, 443 bp, Zea mays
  unsure (1)..(443): unsure at all n locations
aactcgagctntgatttgaggctcaaggtgtccatatatatgagcaagggtatgatgtcgcgtgtgtaccacgccggagttcggtgtccatgcagttccggtgcggagtccttaacggacttggaggagacagtcatggcatgggcccacatgtcggacatccacagacacacgcgcgtatgggcacgagttctaaaactacgtgaagataatcttgggcgtcctgcttgatctcagtggcgtgtccctgtccctggcgtctgcggcagctgaatcctacgcggaaccgacgtagacgagcgtgatgatgaagcattcccacctgtcgcgtgcgggtatccgagcgcgtgtgctcgactgagtgagctggcgcgtatgtggctaaatataaagagagataggagtagggccgatgctagagatgaccatgggtattccaaact

SEQ ID NO: 20830 - DNA, 334 bp, Zea mays
agcttgcatgacaaaaacgtagatgccataaatctgactcatcagaaaaatgaacagaattcaccagtttattacacacatcatgcagtgataagcggaacaagcctccgcagtcatatcctttaccaacaaaagtaccatgtttcgacacaacacatttattagactcaagaacaactttatatccatctcgacatagcatcgaagcactaacgagattcttcttgatagagggcacatgctgcacgctcttcaatggcaccgtcttttccgaagtatacttcagaatgaccgtaccaacaccaagaacatgagcacgccgacccatttccat

SEQ ID NO: 20831 - DNA, 445 bp, Zea mays
  unsure (1)..(445): unsure at all n locations
tcngagaccncatacttctagccatctcccggcagacagatatatttttgttgtctgggagacagtataagaagtcatcttcgtctgtgccattgaatactaaggcccctcttggatacttcagttctcgggcatagtgattagcttcaaaaatctcttcttcagataatttcttccccgaagcatgtcatacaatataatcaagtactctggaagatgcttcgggggcagcagtgccagtttcttagctaagatgtggactgctatttctgttatatcggtttccaaggatttcaccttggcacgcttcgaaagcccggtttcaatttcaggttgttgctttgaagcttcggcgacaaatgcttcagtgtgtgcttcggaagctttaacacatttccttggaggtgtgcttgaagatttgatcgtctcttaaacatctatcaca

SEQ ID NO: 20832 - DNA, 480 bp, Zea mays
  unsure (1)..(480): unsure at all n locations
atccttacagaaacctgaggcatgcaagcttcggcgtctntgtatatttcttcttcctgagcccctggcgtccaatcagcgatgaagtctgccaacgcatgggactgaattgaggatctatgcacatagtcaatggtgaattcattaagttctgtagcccatttcccaatccttcctatagcttctctgttcctcataatgtccttcagaggctgtgatgaaggaacaattatgcgatatgcttgaaagtaatgcccaagctttctggaagccattaacacagcatatagcaccttctccaattctgtatattttttctttgacaggcttaanacttcggaaataatgtacactggagcttgctttttgacttggccatctagcttctgctatacaagtgccacactcactgcagaatgcgaagctgcaacatataagagcaatggagcccctgcnaacgtggagttaatgttgtaaatc

SEQ ID NO: 20833 - DNA, 381 bp, Zea mays
  unsure (1)..(381): unsure at all n locations
aatctgcgggaatatccagccagtcctaggtaacttcggacttgatgaacagtggtcggtggtctccactccaaaatgtccttgacgttgctgggatctaccgcaatccctctggcagatagaacatgtcccagaaattgaatttcctgcagccaagacgcgcatttgctgaacttggcatacaattgatgntccctcaagcgcgttaacacgatccagaaatggtgggcgtgctcctcttcattcttggaatatatcagaatgtcatcaatgaagaccaccacaaacttgtctagctcgggcatgaacaccgagtcatcatatatgtgaagtgggccagagcatttgttaacccgacagacattaccagatattcaaaca

SEQ ID NO: 20834 - DNA, 369 bp, Zea mays
  unsure (1)..(369): unsure at all n locations
agcttatatggtagacaaaattaaagagaatgttgattatgtgtcactatacgatcttacactactgctttcagaagaccaagatgaccctgactcactttgtcccagcccagacagctatgatgatgacatacttgatatgtttgtactgattagagaattatcacatctagaacaaatcatgaggtctccacggcatggcgttctactacattatatcttctttcctctttgtagacacatgacagatgctacaccacattctgtagacattagaggaacgctgngcctacgtcgaaacattgatatgttattcaggcacatacactctacctctttgggctcaccaagatattataaataacatgt

SEQ ID NO: 20835 - DNA, 404 bp, Zea mays
tagaatactcgtgcttgtgcgtcttatgatacctgtcctgagcctcatgtatgacctttttgacgtgatagaccggcttctggatggtttggacccctgtggttggtcccgggacctcaaactcctgaccttccgtcaacgatcgtggtggtcagaccaccaccttctcctgtgggaacttgttgactcccctggggttgtcgtgccaccctttctgcgaccatcaccatgctcaccgcctctaaagccgctgcaatgtacaattacaacggctcccccggctccggagctactagtattggccaagacacatggtgctgcttcaactcttgaaaggctcgtactgcctcttcggtctagagaatgacacaacttcccaatacctgaaaaaggcgtgcctctca

SEQ ID NO: 20836 - DNA, 399 bp, Zea mays
agcttgccaatacttgtcaaaacaacaacatctgtcagcacagcaactacagaccataccagtaacttggcctttcgcatgctggggactggatatgattggacctttcaagaaagctcaaggaggatacactcatgtattggtagcaatcgacaaattcactaaatggatagagttcaagcccattgcttctttaacctcggctaaggccgtggagttcatacaagacataatattcagattcgggataccaaacagcatcataactgacctatgatccaacttcacaagttcagagttcttcgacttctgcgagcaaaaaagcattcagatcaagtatgcatctgtagcacatcgaagagccaacgggcaggttgagcgagccaacgggatgatact

SEQ ID NO: 20837 - DNA, 432 bp, Zea mays
tgtgagcaatacaagtacagaagggagaaagctgcttcggccgatcagccgaagcccatgctcttatgcgatgacatagcagagcagaaggtgctattgggatctcaactgtccgaagaataggagaaaaccttgataaggtttctgttcaacaacaaagatgtttttgcatggtcagctaatgaactttgcggagtcaacagggatgttattgaacactcgctcaatgttgatccatccttcagacccagaaagcagaggcttcggaagatgtctgatgacaaggccgaaggtgctcggaatgaagtaaaaagactcctcagcgccggagtcatcagagaagtaaaatacctagaatggctagccaacactgttatggtaaaaaaggccaatggcaaatggaggatgtgtattgattttactgatctcaac

SEQ ID NO: 20838 - DNA, 446 bp, Zea mays
  unsure (1)..(446): unsure at all n locations
agcttgctaccagcaagcgaggacagaagagagtcattaaaatgttcttttttagtttcttgtaaaccaacgaaatcaattttctcttcccttatgatttctcttaagaaatcaaacttaatgtcgcgacccaaaccctggcaattccaaataaggcctctcatgatttaaaacggatcaggagggaggtcagaacagacagactccccttttttcgtagatgaacctctactttttggggaagccttttttttaatcgtttttttccgatgcttaattntcctaccttttcgtaaaaccatcacatcaagtaagtcctgatcaatattcaggtcagaatcatcatggacactactatccatgtttatgtgatcaacaagggaagggaccnntcacattgaggaattttatttttcaagcttgaaagcccaaattttctgaacgtt

SEQ ID NO: 20839 - DNA, 369 bp, Zea mays
ctctaagggagaaacattttgtgactaaccaatgttcattttgagaaagatatgtgttatagcgcatgtctagcagggaagtatgctggtattcatcatccacacaagaacatcatggcgaccgataagccgcttgagctactccacatggacctattcggcccgatagcttacataagcatcatctggagtaaagattgtcttgtaatcgcggatgattatcctcgcttcacttgggtattatttttacaggataaatatcatacctcaaagactttgaaaggattcttgagacaggctcaaaatgagttcggcttaaggatcaaaaagaattagaagcgactactgggatggagtttaagaactctc

SEQ ID NO: 20840 - DNA, 470 bp, Zea mays
  unsure (1)..(470): unsure at all n locations
agcttataagtttctggatgagaagtggtcccctagttntgttgatgaagcaccagaagaccaatcaagaaaggaatccatgtgggagttcgcaagagaaaggtttgcgtgatggcatcaatgctttctcaataagctagctgccaagcgaaagctagaagcctgaagatgatctttgagtagccagaatcagtgtttgcaatcagcaaccagatgctcctcaaaggccagattttgntgaagttccatcttctcgaagagctgcaaagtgaagatatgtagctgaagtaaagctatacccataacccttctaagccgaatctcgaggacgagatttctttttagtggcgtagatttgtagcatcccaacgaatcaaatcctgatattttctcaaccttctctagattcacaatgaatttcaaattcattccaaatgtttggttgcagtgatatccacaataaatatagt

SEQ ID NO: 20841 - DNA, 460 bp, Zea mays
  unsure (1)..(460): unsure at all n locations
tgtaccctgatattgtataacaattattcaaactctgtactatttgaagtacggaatgtgattactagcctcctgngactagtaattgtatcacattagagtcccagaggatcgggacgcttcagttacataagattntggaacccaaatgcaagtcttacccttcttgtattttggtcccacatttaagcaacaattctatcattcttaaataaagcacataagaagcatcataagtgcgataaagttgtaggatcggtgaggtgactagagggggtgaatggaagccactaaattcttgactagcgagtacgtgactctgatcccaaagtcaaactggaagccctgtatggacacatagcagcagatcagagtgcggcacaatccagtgtctgtgtatgcaccataaccccaagaacaatagacctaacttcttatgaaaatcggattcagaaacacc

SEQ ID NO: 20842 - DNA, 475 bp, Zea mays
  unsure (1)..(475): unsure at all n locations
agcttgtgaagattcttcattccaacatgtgctattcggcgatgccagagccagcccatgttagtcttagcaattaagcaagtgtcgagttcagctctatcaaaatctactaagtatagctgaccctctaacactcccttaaatgctattgaatcatcacttcttctaaagacagtgacacctgtatccgtaaaaagacagttgtagcccattttacataattgcgaaactgaaagcaaattgtaatctaaagaatctacaagaaaaacattgngaatggaatggtcaggtgatatagcaattttacccaatcctttgaccaaaccttgatttccatccacgaatgtgatagctcgttggggatcttnggttttctcataggaggagaacatcntcttctcccctgtcatatgggttgtgcacccgctatcgatgatccaacttgagcccncggatgcatanacctacaaaacaa

SEQ ID NO: 20843 - DNA, 360 bp, Zea mays
gaggggttctgggaagactgactgatgtctggcgaacccctgatatggctaacgacaatttattgggcaccgttgggcctgtgctctaaaccaagaacttcgactaccctgaagtattcttcggatctggtgcactgaacagagcctgacagaaccggcttgttgaaacccttgaagctagtacaagaagtcttcactttgcctgaatgatcgtctggcgaaggaggaaaccaggttgacacactttgaagcatacaaaattggctgacgacatgcacctagagaactgtgctcgactatcaaactgttcggctatggctcaaatggaactagagcttgaacgagcaaggacctgactac

SEQ ID NO: 20844 - DNA, 452 bp, Zea mays
agcgtgatgagtacaagacttctgatctgttttgggcagaggcggtcaacaccgcttgctacgccatcaaccgggtgtatctacaccgaatcctcaagaagacatcttatgaactcctaaccggtaaaaagcccaatgtttcatattttagtctttggtagcaaatgctttatccttgttaaaagaggtagaacatccaaatttgctcctaaggctgtaaaaggctttttactaggatatgattcaaacacaagggcatatagagtctttaacaagtcctcacgactaattgaagtctcttgtgacattgtgttcgatgagactaacggctctcaagtagagcaagttgatcttgatgagttaggtgatgaagaggctccgtgcgtcgcactaaggaacatgtccattgtggatgtgtgttctaaggaatccgaagagccaccacatacaca

SEQ ID NO: 20845 - DNA, 346 bp, Zea mays
  unsure (1)..(346): unsure at all n locations
tggcagccctcngacccgaccggacttcaccggatgccctttatcaccctcaccggacttcggtcttccgccgccgcgcgtggaccgagctattcagtgagtctccgcccaattcctatcgctcatagcttctctggcatcccgtggacctccctgacctttttaattgaactacctcgccgtgaccaggccggtctcctcgccgccgacgagcatccccgcctgcgcgcgtggaccgaccaactccggccatctccgtcgacgttccgcacaccgttgtgatccccgcgacctccccttaatcctcgaccactttaccggaacagtctcgccgccggtaagcccc

SEQ ID NO: 20846 - DNA, 384 bp, Zea mays
  unsure (1)..(384): unsure at all n locations
agcttaaagccatggtaagtagcatatgcaagttatatgcgaattgactcaagcctagctacgggtgcataagtntcatcaaaatccaaaccttcgacttgtgaataacccttggccacaagttgggctttgttccttattaccacaccatgctcatcttgcttgttgcagaatacccacttggttcctataacattttggttaggacgtggaactaaatgtcatacctcattcctcgtgaagttgttgagctcctcttgcattgccagcacccaatccaaatcttatagtgcatcctcaatcctgtagggctaatagaggacaaaagagtaatgttcatagagatgtgcgagtcgagatcgaataggtacccccttattgata

SEQ ID NO: 20847 - DNA, 248 bp, Zea mays
ttaccgtgcactcttgctatatgacccgagacaacctgcgaatcaatattgactatatcccttatgagaacgagtgctttgagcttaccataacctagaagcaaggcttacaactcctacatgtgctttgtgcaactaatatgaatctccgtcggatcactagctttgtcattgaacagcgaatccaacacaacttacgctcctgctccgtaagctccccgatagacatcacataacacagtgcatgc

SEQ ID NO: 20848 - DNA, 485 bp, Zea mays
  unsure (1)..(485): unsure at all n locations
agctngcatagaaaggacattcattatcgccttcccctttttgctacacagaaacaagggcaggctccccgataccaaattccagcccgatggcacggtccgcctctacggttgcaagaagaccgccttcgaactcgaggcatttgagactagcttccatgcagttgcacagcgactgggagcagcaggagagaagctcaagcaaaggcaggaggggtttcctcaggtcgctgctcacgaggcgccggtggaggaacgacgagtcgtccttgtacagttacttggatgagtactgattgctggaatgttggaactgaaaaaagtctggtgttaactgaatcttctatagatggatgcgatgctctctgctttgcaaaagggtttgggtttccgtttccattcttcacttgcccatggtgaaagcgacnggtagatgatgcaccgatccgatcctacccaccctgccctggtcctggtnctggaat

SEQ ID NO: 20849 - DNA, 493 bp, Zea mays
  unsure (1)..(493): unsure at all n locations
cgtctagtacacccttaaaggctagtgaaccatcacatcttctaaagacagacacatctacatttgtaaacaaacagttatatcccatattgcataattgactaacagatagcaaattatatccaagagactctactaaaaacacattagagatagagtgctcatttgagattgcaattttacctaacccttttactttgccttgattcccatcaccgaatattattgaatcttgggaatctttgtttttgacgtaggaggtgaacatcttcttctcccccgtcatatggtttgtgcatccgctgtcaataatccagcttgaacccccggatgcataaacctgcaaggcaaatttatgcttgtgtcttaggtacccaactcatgttgggtcctgcaaggttagcacaaatatccttagggacccaaatgcaagttttgtctcccttgcatcttgcccctaattntctagcaactattcttctattctttatac

SEQ ID NO: 20850 - DNA, 404 bp, Zea mays
  unsure (1)..(404): unsure at all n locations
agcttctggtgctcggctttcgttcgttggcaagtgtctcaccgggccacatactgngctatctctctcttcatccctctccaccagtatctggttttgaggtctaggtacatcttggtggttcctgngtggatggagtangctgagttgtgagcatcatcgagcaggacttctcatgcctgccttttggtacacacagacgattcttgaaccaaaggactccttgttcatctatcctgaggtccggaagttgttccttgcgagctttttccataagtcttgctgtcttcgagtctaggcgttgagctttgcatatgaggtcttctagcattggtttgacttctangcttgccgttgttcccaaacatgcattcaagtgagctgattccttctttcaatattct

SEQ ID NO: 20851 - DNA, 461 bp, Zea mays
cgcgtcaccggagaagccacatcgcgcttatcgtatttaagaacccgccggcgcacgtggaccgggtaaaccccttcaccattttccgattctgtgcgcgcatggcctctgtgtcattccgtgaagctcctcgtgcccattaattgaactctcccgccgtggtttggccggagcatgcgccgccgtcgatccccgccgcctgtgttcgtggccaggggagctccgaccacctctgacgccgacccgcacatcgacgtgaccgtcgcgacctcctgaacatcaccgaccaccttcgcggaccttcctcgtcgtctgtaagccgcgccaccctttgctttccctgcgctactggttcagttaatggaacgactgctggtgagagggagagaaattcagtgcggttagtgaaaagtcagagactcaagcgaatagttgcgtaaggtagatctgcagggttgatt

SEQ ID NO: 20852 - DNA, 473 bp, Zea mays
agcttatctatgctatacttgttgcgtccaagaagttgcgccactatattcaggcacacatagttgtggtggtgacctccttcccgttaaaggccattctccacaactctaacaccacgggcaacatcgccaagtgggcagcggagcttgccgagttccaactggacttctagcctcgccatgctgtcaagagccaattcctggttgacttcatcgtggaatggaccccttccccgagcgcccttgggggtccggatcccgattcggaccctacacctacgaagcccagggttccggtctacaccgagccccactggatgctcttcttctacggatccgctcgccagcagggtggcggagctggagtggtccttatcgacccaagcgaagatcaagtgaagtacatggtgcaccttgagttcaaaggcaccaacaacatgattgagtatgaagcactgattttcggcctgact

SEQ ID NO: 20853 - DNA, 490 bp, Zea mays
  unsure (1)..(490): unsure at all n locations
gctgaagccatggtaagtagcatacgctaggaacatgcgaattgattctatcctagctactggtgcataggtatcaccaaaatccaaaccttcgacttgtgaatataccttggccacaagtcgggctttgttccttgacaccacaccatgctcatcttgcttgttgcggaaaacccacttggttcctacaacattttggttaggacgtggaactaaatgccatacctcattcctagtgaagttgttgagctcctcttgcatcgccaccacccaatccgaatcttgaagtgcttcctctaccttgtgtggctcaatagaggaaacaaaagagtaatgttcacaatagtgagcaacacgagatcgagtagttaccccctttngaatatcgccgaggatggtgttcacggcgtgatctctgtgtattgctaggggactcttgcgttggcggacttgaacttgtcatctgctcatctgacatggcatctgccct

SEQ ID NO: 20854 - DNA, 433 bp, Zea mays
agcttgccttcgcttcagtctatcatccgcagtccaatggggtcgtggaacgcgccaacgggaaaatcttcacagctgtcaggaaaatgctccttgatgaaaagaagggcagatggaccgatttgctaccagaggcaatatgggcactaaacacgactgagtgcagggcgaccgggttcactcccttccgccttctatacggatcggaggccatgaccccgcaagaaataaagcatgggtccccgtgaacagtcccgtcagccgtcctcgacgtggacgagccaacttcaaaagatctcatcgacggagaccgggtcttcgccctacaggccctaaacaaataccaagcccagaccaaagcatggcgcgaccacgcagtcatcccgagggagttcagcgagggggacctcgtactcgtccgaacaggctcgac

SEQ ID NO: 20855 - DNA, 355 bp, Zea mays
  unsure (1)..(355): unsure at all n locations
cttctcctgtncagaataatctacagtatatctgacaggcgatttataatatttgtacatgaaccttcggcacctgtagaacatataagctatagcaaactactttgtccaattaatttttggtgggcaatttctaccaccataattgatataggaaaaggtgtaagcctatatccctgtcagatctttcaccttccaacagacaggcaaaccgcttatgccccttctcatcttaggattagggcgggtgcactccatcaccctaccggtggatttctaccaccgacaagttagcttcgtcgtaaggctatcaatgagagttggacacattacttgctctgccgaggctagttgc

SEQ ID NO: 20856 - DNA, 370 bp, Zea mays
  unsure (1)..(370): unsure at all n locations
agctnttggtcaaaactataattaaatcagagcttctaaagtttctatagtacatagggggttttatatttttcttaagtaggttacattatttagagtctgacaaaattggtttgaccaaatttggatgaattaaacaaaagttatgcattttcaaagtttctgtccaatttaaaaacagatttaataaggttttctggaaaaaacagtttacaccgaggtctctgggtttaaactaaatcaaccttcgcaaatctaccctcgcgccactattcccctgtgtctctgacatttcacaaaaccccctgaccttctcttcctctcacccgcagtccttccccttatgcanacagtaatcgcgggaaagaaa

SEQ ID NO: 20857 - DNA, 491 bp, Zea mays
gcttctatagggataacacattatgggactaacacatgttcattatgagaaagacagggtttgtagcgcatgtcaagcatgatagcaagttggtgtccaccatccacacaagaacatcatggctgacatgccactggagttactccacatggatctattcggctcgatagcttacataagcatcgacgagagtaagtactgtctagtaattgtggacgattattctcgcttcactggggtattctttttgcaggataaatctcaaacccaagagaccttaaagggattcttgagacaggctcaaaatgagttcggattgagaatcataaagataagaagcgacaacggtatggagtgcaagaactcccaaatagaaggctttcttgaggaggagggcatcaagcatgagttctcttctccctacacaccttaacataatggtgtattggagagaaagaatagaactctacttgacatggcgatgaccatgc

SEQ ID NO: 20858 - DNA, 333 bp, Zea mays
  unsure (1)..(333): unsure at all n locations
agcttcngcaccaaaggcttcaatttgcgcgtctgaagtttcaacaattttcttcggagttgtgcttgaagactttattgtttccaacacatccagtatgttaaccattcttctcctcttgggcgtcatcatcggcattggcattggcacctccattcttgctgaaggacttagaatttctgatgactatgtttcatcagccctctgttcttctattttttccgtcgctggcactttggttggcccttcaatattcggcaggagagttggctccttggcttcggtggccgaagaggtctcatcgacatattcaggcactgtggccggttcaat

SEQ ID NO: 20859 - DNA, 468 bp, Zea mays
  unsure (1)..(468): unsure at all n locations
ntgganagccaacactctntgatagagtgctgactacctttaccccaactcggtcccaaaggcatcctaaacactcttcggcaacaccaccgaagagcagcgcccctggctagtactcgcaagatatagcatagtccctcagttcttcttttttagccttagacaactcttgcccaattatgttttgaaagttgaaattcttttcttccgaagcatcttcggcaagctccttctcttttccaggcatcttctcccttttttaggcactgcagccggggtttcctcagcagctacaacagtttcttccttagccatattcaaaatcatttcatcaataacagaaagcgtgttttccaaatttgtggcttcggctgctgcggcttcngaagtagaagctntggcaggagcaacttcngctgctggctattttggcgctgaagctaacagcggcgtttcttcaatatcctc

SEQ ID NO: 20860 - DNA, 392 bp, Zea mays
tcttcacctaaaacatatattatgaatgctcaaggcaaaggcttggaacagattgctctaattggtagctgatcaatagtagttccttccaagtggcattctttcaattggtaataatatattctatggaaaggaatgtccatatgaaagttaaattccttttggcttaaatttgtgaattggtgcatattgtgaattcactgctccatgtgcattaacttaaaagggaattattttatgcctttacgcctcataaatgatgatttgtctgccattcatatatagatgtcatcattcattaaatacctccttgactactaatactcttttaaagtgtttatcgactcttttaaaggaaaagaataacaagatggagtctctccaatgatgaa

SEQ ID NO: 20861 - DNA, 463 bp, Zea mays
  unsure (1)..(463): unsure at all n locations
cttgctactacttaataactcananagattgtnctctatttcatcttttacaagttggcatattcatggcttaacataagcattcatgtatattattgtgtgtagagcacgacagggaatatgaattagaagttatccctccattagaagatcctcctattgatagtgatcttcttagaacaatttgttttggatgcgacaccaagctctagatttcatttcccttgaagttgttgagctcttcctgcatgtccatcactcaatctggatcctgcaaggcttcctctatcctgaaaggctcaatagaagatataaagaaataatgctcacaaaaattagcaatacatgaacgcgtagttactctcttgttgatgtcacctagaattgggtccactggatgatccctttagatggtggcgcgggatgtgctagaggtacctatggtacttcttattcttccttg

SEQ ID NO: 20862 - DNA, 381 bp, Zea mays
  unsure (1)..(381): unsure at all n locations
agcttgtgaaggttcttcatccncacatgtgctaaacggcgatgccacagccagcccatgctagtcttagcaattaagcatgcatctagaccgacctcctcttttgcaaagtcaactaaataaagtttgccgtctagtacacccttaaaagctaatgaaccatcacttcttctaaagacagacacatctacatttgtgaataaacagttatatcccatattacaaagttgactcacagacaacaagttatatccaagcgactcaactaagaacacattagaaatagagtgctcgaatgaaacagcaatttttcctaaccctttcaccttgccttggttcccatcacagaagatgattgaatcttgnggatccttgttcttg

SEQ ID NO: 20863 - DNA, 419 bp, Zea mays
  unsure (1)..(419): unsure at all n locations
tataatanaagaatagaggcaagagctcgtccatatatcattatagaaggggagttatacaagcatggagtttgtgccccgctgctcaagtgcttgtctagagccgaaggtatagagttgatgaaggagatacatgcaggcctttgtggatcccacatcggatccaggccgttacttggaaaagtgttccgtcaaggattttattggccgaaggcagcttcggatgcagctgagttagttcaaaagtgcgaaggttgtcagaaatgtgcaagagatcaaaaacaaccttcgtctttgacacagctaatacaacccatctggccattgcaaaggtggagcctcgatttgctgggcccattaccaccggctcaaggcaatctgaaatatgtngtagttgctggtggaatattttccaagtg

SEQ ID NO: 20864 - DNA, 453 bp, Zea mays
gttgtgagctttgcctcattagatgagaaatcaacaagataaagattttcatgtctaaaacctttaaacttaagattgctaccatcaacactagagataataacatcttcaaccgtgaaattgcaacaaaatcctaaatcacataattgagctacgaaaagtaaattaaaattcaaagactcaaccaagagcacatttgatatagaatgatcatttgaaatagcaattttacccaaacctttaacctttcctttgcgattatctccaaatgtgatactatcataatttgagcaatcttcctcactcatttgggtaaacattttcatatctccggtcatgtgttgagtgcatccactatctaacacccaatgattcccttccgccttttgtagttacctacaaaggaaatcaatctcttttaggtacccaaacttgcttgggtcctggatgtag

SEQ ID NO: 20865 - DNA, 418 bp, Zea mays
  unsure (1)..(418): unsure at all n locations
cttgngcacacacttgaagttcagtttggcttatcacccgcatacagattgttagatagagagaaccaaccagattcttgaagatatgttgagaggttgtgcattgcaagacaagttaggttcggataagaggctactgtatgcagaattctcctacaacaacagccatcaggccagtctgaagatgttaccattccaagcactctatgggaggaatggtagaactccattgcattgngatcaacctggcgaaaggcaggtgttcggtccagatattctgcttgaagccaaagagaagatcaggatggttcaagagaatctgaagacagcgcagtccagccagcgaagctatgatgacacaaaaagaagagaattgagtttgaagtgggagatatgtatatttgaagtatcacccatc

SEQ ID NO: 20866 - DNA, 366 bp, Zea mays
  unsure (1)..(366): unsure at all n locations
agcttgctcaaacacacctaatatatatcgttctttggcaatgattcgctaaatataccagcatccataatgcatattggcattacagaagcatggcatcagatattactatattaaagaacatcaaaacaattatgactgcactggtagaaacttatctcggagctcttattttcacattttcttgaaaagacaaaccgaataaagataataaatttaaagcagattaggatattctctgacacaatgttctgcgacatggactcaaaccttgtntgctgcatatatcatctgtcaaatgagtgggagacggtggtaaattatttgaatgagatgctaatgataccttatccaaggcactcacca

SEQ ID NO: 20867 - DNA, 418 bp, Zea mays
  unsure (1)..(418): unsure at all n locations
cacattctangattacaaatgttcatttttagaaagacaagatttgtagcgcatgccattcatgaaagctagttggcactcatcattcacacaagaacatcatgacgaccgacaggtcactggaactcctacacatggatctattcggcccgattgcttacataagcatcgacgggagtaagtattgtctagaatattggatgattattctcgcttcacttgggtattctttttacagaaaaaatctcaaacccaagagaccttacagggattcttgagacgggctcaaaatgagttcggcttatagatcaagaaaattacaagcgactacgggacgggagtcatgaattctcgattgaaagtttctcgaggggaggggatcagcatgagttctctttccctaacaccacaacaaatg

SEQ ID NO: 20868 - DNA, 233 bp, Zea mays
  unsure (1)..(233): unsure at all n locations
agctnttgaccttctcatgctgtcgaataagttatcatggccaatggctgcattgcacccactggacattaaccacaatacattatgcgaagctatgagccaaaataggaacgctaccagtccaacaccttatgaggaggagctggaccaagaaaatatagacctattagccacttctcctcacgtttagctggaagagaactaagaagcttttgtttgccactcattagaat

SEQ ID NO: 20869 - DNA, 474 bp, Zea mays
  unsure (1)..(474): unsure at all n locations
caacatgggctagtcggcgatgccatagttctcccatattagtcttagcaattaaacaagtatcgagttcagctttgttaaaatcaactaagtatagctgaccctctaatactcccttaaatgctactgaatcattaattcttttaaagacagtaacacctatatctgtaaatagacagttgtagccccatttgcataattgagatacagaaagcaagttataatctaaagaatctacattagaaatagaatggtcaggtgatatagcaattttaccaagtcctttgaccaaaccttgatttccatccccgaatgtgatagctctttgaggatcttcgtttttctcgtaggagaacattcttttctcccctgtcatggtggtcatgcatncgatatcaattatccaacttgagcccncggatgcataaacctgcaaaagaatctatgccttgttctaggtaccgaaatagtctt

SEQ ID NO: 20870 - DNA, 417 bp, Zea mays
ctaagcttgtcgtagaaaccattaagttcttgcagtaccaaatgtctaacaccatatcaagagaaaatcagttacaattccagttgtaccatagaatccttgaaacaacattcgtacgatggtgttgattgactgtaactacataccatatgagggtggcagatgaactattcttttttttaagaacggagacttattttgtcttgtttgacccattatatccgagattacctaattgcctgacatagcactaattgtatctttgcacacaactcaagcggcgtgtttatcatgcttctactatatatgtcaaaatcaccaccacattctcatagcatcatatacattctaaattgttggtatatgcgatactcgtctcattagcccaggatacgtgatgtctcccctctaatgtta

SEQ ID NO: 20871 - DNA, 361 bp, Zea mays
  unsure (1)..(361): unsure at all n locations
agctntntccttntactttntccgcagagctntggaaatatgttaaaaattatagaanaatcctaaaattgtgaaaccaattntcctagactccttattttccctagaatttaataaaaatagttttatgattcttagaggaaataagaaattttagggcatttaaagtagttaaaagtattagtaatggatttttagaaaataattggtaagtccaaaaatgcccaaactttttatgagaacttaaaacaatatttagaagccttgggtagagcttgaattgatttggaccatgttngataactataacccataaccactcccctgccctgagaactactttactgactccagaaaccct

SEQ ID NO: 20872 - DNA, 135 bp, Zea mays
actcagcactgtgtggagttgggagaggatgtgatctctctagtgtgtcttgtatttaatgctatagctcttcgaacgcgtagaactgtataaacttggatgccattgaatgtgcggtgtctccccttattattg

SEQ ID NO: 20873 - DNA, 459 bp, Zea mays
  unsure (1)..(459): unsure at all n locations
agctnggagaagcttacaggctctcggngaagctatccaatggctcggttgaggctgaaggtctctagaaatggttggccacggtggccgacgctcgggtggctcgagcgggtggcgcaaagctcgccggagctaagggtggtgtctggccancgagggtgagtgcggagtgaggtgaggcgcatctgggggtggtcttaaaggcacgggcgagcacggcagaggggtagctctaacatgcgctcgaggtgtgcgcgggccagcgccagtgcgcgctctggcgtctgggcacggcgtcgagcacgaggcagcgcagagagaggtcatgttcaagcatggattagccccaaatctttgagattatggccatgatcccgttgagagatctcttcccctgacattcctttgtcatttgtgtgtggaggcttatgggnttcgctgactggatcaagagatatg

SEQ ID NO: 20874 - DNA, 448 bp, Zea mays
  unsure (1)..(448): unsure at all n locations
aggagtcatcttaagccggtaagaaactgatatttgttacttttacctttttcttgaaatttgcacctttcttattctgctatttggtatacacaggatgacgaagctgaagaatgacgaagctgaagtttgacgaagcctagcctgaagcttgatagttgcttacaatgtattttcctgcaaaaattctagagaaacttttgtaatatagttatggaacaactcatgtaaatttgtacataccttgtaaaatattntggttatgctatatgtgtacaatatgctttgctgtggacgaaacttctcttttgagccgaaggcgaaaaacaccttcccttcttttcgtacacaacgaagcataanaagaatttccttcacagttnttcctattgctgaagtacttgtcttggttgtgtggtatgatgatgattctatatatgtctaaatg

SEQ ID NO: 20875 - DNA, 475 bp, Zea mays
  unsure (1)..(475): unsure at all n locations
agcttcggatttccaactntagaagacggactttcggtgctgtcaaagaacgatctggctgacagcctagcttacaacagtttaaaggtgcgacaaatggaattcttatatttttgttgaattcaaaattttccgtttgtttaaaactattgacacagacatattcctgtctgcagggcctgatactcagcaatgccctcagagcacagaaagatgctgaggacgaaggatgtactatagccctgagcaaccttcgttccgaagtaattgaactgaggaacgaaggtctcgaanaagacaaaatattatactcattgatagataaaataaaggaggacgaagctgctttcanaagtcaagctgaagctcagaaacgcgaaattgaagaccttcngaaacaactggccagagccaaagaagaacgtatacttgaagaaacaaagcgtgaactcagcgatcaatgggcagatcatct

SEQ ID NO: 20876 - DNA, 369 bp, Zea mays
  unsure (1)..(369): unsure at all n locations
tcctctagcattcttgagccncgcaggcatccgaagataacaatatgtaccgctgggggttatgaagcttgtttttggctcatcttcctttatcatccagatttgatggtagcctaaataacaatctagtagactcatgagctctgatgaagctgctgcatctactagagaatatatccttggtaatggaaactcatccttcggacaagccttgttgagatcagtaaaatcaatgcacattctccatntaccattggccttcttcaccataacagtgttagctagccattctgggtattttacttctctgatgactccagcgctaagaagtctcttcacttcattccgagcaccttcggctttgtcatc

SEQ ID NO: 20877 - DNA, 470 bp, Zea mays
  unsure (1)..(470): unsure at all n locations
gagaaacacatttgggactatcaaatgttcantttgagaaagacaggatttgtaccgcatgtcaagcagggaaagaagttggtgttcatcatccacacaagaacatcatgacgactgacaggccactggagctactccacatggacctattcggcccgatagcttacataagcatcggcgggagtaagtactgtctatatattgtggatgaatattctctcttcacttgggtgttctttntgcagganaaatcacaaacccaagagaccttatagggattcttgagacgggctcaaaatgagttcagcttaagaatcaagaagataagaagcgacaatggaacggagttcaagaactcacaaattgaaggctttcttgaggaggagggcatcaagcatgagttctcctctccctacacgccacaagaaaatggtgtagtggagaggaagaatagaactctacttgacatg

SEQ ID NO: 20878 - DNA, 342 bp, Zea mays
  unsure (1)..(342): unsure at all n locations
cctantngagataaccgccaacaaagcgagtgaaaaagcttaactcggatcaaacttgacaagtcttagttttaagnctttagcacttgaattcttactttttatgcaattggtggttcttgaaatatgcatgaggtactgcacttagggggagtattcaaaactcaaatcactcatgataacccctagtgcaaggccaaaatgcatatntcaccatttgcctattttctctaaaaatatctagcctatggccaatattctgaaattatgaaaaagatatgaggggccaatacctgtccaacaagtgtattttgtgtgtcataagttgggatttgtttggtg

SEQ ID NO: 20879 - DNA, 486 bp, Zea mays
  unsure (1)..(486): unsure at all n locations
anctntaacaacgcaaggggcttattggtttatgggcgttgttaacacacagggtcttagttattggaaactcaaagtaacatacaatacaagaggagcagatacaagatagcgatagaagcaaagggtttgtttgttttcttggacaaccaaagaagcaagcattggacaatcaatagacatggctgatggtagacctagaaaaccaaataagcaagcaatcatagaacaacatatgaatgctactgacccatgggaaaacaaccctatactagcaacacaggaatgatacatgcataccccatgttgtaaaatgtaataggagatacacatgtatcatcagagtgatggtaactagagatgtttccctttggtaattatgctccaccctcaaagcatcatgtcatgaaatctcaacccatactggctatcttaacacaagacntaaataaaataatgaaatgcgccannaattaaaaacaacta

SEQ ID NO: 20880 - DNA, 471 bp, Zea mays
  unsure (1)..(471): unsure at all n locations
tgtgaaggttcttcatccncacatgtgctaagcggcgatgctccagccagcccatgctagtcttagcaattaagcatgcatctagaccggcctcctcttttgcaaaatcaactaaataaagtttgccgtctagtacacccttaaaagctaatgaaccatcacttcttctaaagacagacacatctatgtttgtgaataaacaattatatcccatattacataattgactaacatataacaaattatatccaagcaactcaactaaaaacacattagaaatagagtgctcggatgaaatagcaattttccctaaccctttcaccttgccttgattcccatcaccgaatattattgaatcttgggaatccttgttcttgacgtaggagggaaacatcttcttctcccccgtcatatgggttgtgcatccgctgtcgataatccagcttgatcccccggatgcataaacctgca

SEQ ID NO: 20881 - DNA, 470 bp, Zea mays
  unsure (1)..(470): unsure at all n locations
agcttgtgatttatccaatttanaacaagcaccatctcttaacatagattntctatggataaactcaacacaagagatgacattagtagcacaagcactagtttcttatttagcaaccctttatatgtggaagacaagcgtgttgctaaaatagagaaacatcataatatggactaaatttccttgaaccctcatgcacaatatattttgaatgacatggataatatgcatggttattcaatgaagtctaaagggatgacttaatccatattatggtgagtgtctaatatagaagaatcaaatccaaattaactagatagagaatacgtcacataattttggattgttcaccatatgataatattcattcaacttccaattagacctttatttcataatcaacatctgatgtatatcctcaagtgcttcttttcccttagtggctacacaagtcacaacagagataagat

SEQ ID NO: 20882 - DNA, 414 bp, Zea mays
tacggaccttgaaactagcttgtccaggccgcagatcacaaaaaccttctgcttatgtccgaaggttcttgcgtctgagggcacaagtgccaacagtgcccaatgaaattatcattgaggccatgatctaggggcttcggccaggacctacggcccaatacttcgccaggaagccccctcagaccctggagaaattacttcagaagatggatgaatacatccacgctgataatgactttcgggagagaagggaggaagcttacaggttctccgaaatgactaggggcttcggagggagagtccacccaaggcatgtcagatcaatccactctactcagaatgacgacagaggaggtcagcagcagaggccgcaatattccgcccagacttcggtgcagcaacatagctatccac

SEQ ID NO: 20883 - DNA, 273 bp, Zea mays
  unsure (1)..(273): unsure at all n locations
agcttgagatgaanacctttgagtggattattttcagtaatccactcaaagctcgggggctacacccattgggtgtacctctggtgcacccaatgaatcgttaaacccaaaagacagaatgctgatctctaaagcatgaaccaacgataaaatgttgatttccaaggcatgagacgaagataaaacaatgatttctaaaaagtatgagatgaagacctttgagtggattattttcagtaatccacacaaagctcgggggctacacccattggg

SEQ ID NO: 20884 - DNA, 482 bp, Zea mays
  unsure (1)..(482): unsure at all n locations
ggcacgttagctagatgttgcacctgttgccactatagacgatctggtgtgctacccgcacggtccggtgcccgccacatcatatagtcgttggaccacggttcggtgcgccaccagaccggtccgatgcgccagatgtccgagagccaattgcagaactctctgcacacacggtccggtgtgccagctgatagcccacttcttgaatcttctatcttgttttcttgggctcttttggtcttgtgtcttggacttatgctgagtatttgtaagtcttctagtgggcttttatctctttttttgaggtgttgcatcctaagagcctacgtccaatacacttcgcatcctttgaactacaaaacacanacacttgaaacacattagttcactggttatgttgttcattaaacaccannaatcattagtaaaatgggcaggttccattttcttataggtcatccaagtaaggcaacatgttagta

SEQ ID NO: 20885 - DNA, 488 bp, Zea mays
  unsure (1)..(488): unsure at all n locations
ctcgacccggatcttaagcgacgcggctgcagctagtccccatttgcccacaaagtccttcataatgactaagaaatttagcatcacgatcagaaacgattgtgttgggcacaccatgcaagcgaacaatttcacgaaagaacaaatcagcaatatgagtagcatcgtcagttttatgacatggtatgaaatgtgccatcttagaaaatctatcaacaaccacaaacacactatcacgtcccttcctagtcctaggcaatcccagcacaaaatccatagaaatatcttcccaaggagcactatgaacgggtagaggcaaatacaaaccgtgtggatttaaccgtgacttcgccttttggcatgtcgtgcaacgagcaaccaatctcaccacatctcttctcatcttgggccaaaagaaatgaccagcaagtatgtcctccgttntctttgctccaaatgtccattaagccactcatgtgcttctgtac

SEQ ID NO: 20886 - DNA, 385 bp, Zea mays
  unsure (1)..(385): unsure at all n locations
tgcacttacgaccaaaccgcacccgcatccatattatattctatggcttaacaatagtggtaaggtcaaggtaaccaagctggtacgaattaattntgctattggttcatatcgtgatgttgttgactgtgatgttgtgcctatggatgcttgtaatattctgctaggtagaccatggcaatttgattcagattgtatgcatcatggtagatcaaatcaatattctctcatacaccatgataagaaaattattttgcttcccatgtcccctgaggctattgtgcgtgatgatgttgctaaagctaccaaagctaanactgagaacaacaagaatattaaagctgttggtaataacaaagatggggtaaaattgaaaggacatttg

SEQ ID NO: 20887 - DNA, 473 bp, Zea mays
  unsure (1)..(473): unsure at all n locations
agctttggaaatgaaactaggtgttcactacaagcatcaatgtcaaaatctttacacctagtacaaattacaacatgttctacaccagaattggatttatttgctatttctaatttagcatttaaatcattgttgacatctttcaaagtagaaatggtttcatgacaagtagatagttcaatagaaagcatttcatttcttttaacttctaaagcataggatttttgtgcttctacatatttgtcatgctcttcatacaaaaggtcctcttgtttttctaagagtctatctttttcattcaaggcatcaatcaattcattaattntatctactntagttctatccaatcccttgaacaaactagagtaatctatttcatcatcactagactcatcatcactggaagaatcataagtgacattgttnntgatgcataccttcttctcctttccataangcatgtgtgacgctcg

SEQ ID NO: 20888 - DNA, 459 bp, Zea mays
  unsure (1)..(459): unsure at all n locations
ngaaggacaagctaaaaaacaagtcccagtatactttgtcttctaagttttgagtttatcaaagaanaactatacataattggagaaggtgttgtatgttgtgttaatggcgtccaggaagcttcggcattattttcaagcatatcacataattgttccttcatcatagcccctgaaggatatcatgaggaatagagaagctactggaaggattggaaaatgtgtcgtggagcttaatgaattcactattgattacgtacacagatcttcaattcaatcccaagcgctagcagatttcatcgctgattggacgccaggggctcacgaagaggggacaagcaaagatgtcgaagctgggacagtgttttgcgatggttcttggggagccttcggtgcaggagcagctgcggttctagtggcaccttcaaaagtcaaaacatgttatgcagtcaaactgga

SEQ ID NO: 20889 - DNA, 407 bp, Zea mays
  unsure (1)..(407): unsure at all n locations
agcttgtgcaattaagacattgatgatgatgccttattgcaaacatgcaaggaagaggacaggataaactaattgcttgaatgagaacatctgatgtagcatcctctagtcaagatcttccagcgagttttcagagcaatcctgtggaaaacatacaccagaagtaccctcccagcttcctatgtgcactcatcaaaatgcttcagcatcatcatgaattctgatttctgaacttacatgttatttgcattaatgcattttgtaaggacttctgttcctccgttatgagttatgactgaatatatcatattccatccagacaaaggaaaagggaagctaagagaacaatgatancgaaaacctataatgtcactgaatgggcaatcttaaatgaagatgcagagcat

SEQ ID NO: 20890 - DNA, 437 bp, Zea mays
gttatgaaaattggtagatattatattaaaaactattgtcaattcatcagcactaaaaagagactgatagccaataaaataaaactacaatcgcttacctttgcctattttgagagtttatcacgaagtgcgttcaaaagaataacatcatctactacaaaggaatattctcatagccttaacacaataaatccagactttcaattatgtttatatgctaacatctaagatataagactgcatatataaatgatcatggttctactcgttatttgatatctatagagctattattgccatcatggtatatggcgatggcattaaaatattctgctattaccaaacaattcacatacataacttacatacattatatgggatggcattatatgaaatttacaataccataacacactctaccaatcagatgaaattta

SEQ ID NO: 20891 - DNA, 436 bp, Zea mays
  unsure (1)..(436): unsure at all n locations
agctnggcggaacatttgtgacgatatattgcataaaataaacactttgccttgaaaacatagtatgagcctaagcgcgagtcaccgtccattttaaatataactaggtatatatccgtgcgttgtcaagagatgagaagtggatggagcgacactgcaaatataaatattgtttatttctagatactaaggggtgtggtctgcactattttttttgcacatgctgcacgggcgctgggcgtggtgtggatgaaatcatggtagtatcaggtgtccacattaaattcttaatagattagtatagatttataatgaccaacactttgccttaaaaaaatactctccatttttttatttgacgttttctagttcaattttatactatttaacgccaaataataaaagatcgagatagtataacttgcttctacgacta

SEQ ID NO: 20892 - DNA, 288 bp, Zea mays
  unsure (1)..(288): unsure at all n locations
acgatgtgtcatcaacctatatatcacgncnnctatgtttaactatactctgtgaacaatacggtccataatataaaacaatatcttatacaccatatgcatttatttatgtgctagcctcatactgtagtgcaccgagataccatgctagtatcgtgatgcatgtattgaactgcatgcatgattataagctcaaagtaaaatattgcgtgtcaagcgacctattgcacggtcaagtataacctattgatcaaatagtcgaagttgaggagaaaggtttcgttaaga

SEQ ID NO: 20893 - DNA, 392 bp, Zea mays
  unsure (1)..(392): unsure at all n locations
agcttaacagttgctgtaaaagactttcctgcataatattctgaagagatctttgtaatataattgtggaaaaaacttatgtaaatttgtgcataccttgtaatatatcttttctcctttatccgngtacaatctgctntgctgtgaacgaaactnttacttttgagccgaaggcganaaacaccttcccttcttttcgtagacaacgaagcatgaaaatttcctctttctccgaagcttttcctcatagccaaagcatctgccttttctgtatgatacgatgatgatgatcctatatatgtctaaatggatgtttatgaatgcanatgtcatgatgtaatgcattgtgcanatgaatatttgaatgtacatctcaaaaaccataatcatag

SEQ ID NO: 20894 - DNA, 459 bp, Zea mays
  unsure (1)..(459): unsure at all n locations
gcttgactggtgtggaaagcgaccacgacgaatgataagacgatcactattctacgtgcagaatagcttcggcatgacggcagataagaggaaccgacttaatgatgaaaagtcaaattaaacctcgaaggattgctataaagttattgtcgaatgtaaagggcatcaatgtaattttacacgggctgcgtcccgtgcctataaatagacgaacagtactcccgtactgttcacgctgacttggcacacgcttgtacctntactttccatcaatctgaaagtatatttgtaatttatttttatgaatttggtaataaaataagttgatgataatacttatatcattactcatgntttatgtatgtgtatctctttttaccatctatcaatcttacgaaagtctcttccttttgaaccttcgtcctagattcattatacccgaacggacataatagttat

SEQ ID NO: 20895 - DNA, 491 bp, Zea mays
  unsure (1)..(491): unsure at all n locations
ttagagtcacctgcngcatgcaagcttaaccaagttctaacttaaacctcattgtcactaaaggaaggcatctgatcagagtcatattcaataccccaaaacctttcgaagtggtcggcaaagtcccagtctggactaaggttgtcttcaccagggggtggtgaggacaagtcttagggttcgtagttgatgtcaggttggtgggttacgttgttgaccttgtccaaatactcttggaacaccagataatcttgctccatcatgcaagcaatgtcctccaatgctacacgaagtttggtagcgtcaaaggaggtcaacccatgtactggacggattgtttcccgagctactgaaaatatcttgtccacaatctcttgcatccttccaattgccttgtcggctatggagtctgctgaatccatctgatgtggaattaggtggttagtgtactagacaaggggacaatctactaacttccatgtattgacatg

SEQ ID NO: 20896 - DNA, 367 bp, Zea mays
tgctaactgttctgacaatgactgtgatcatgatctatggaactttatggagaactagaagaactattagaatgctgtcggtgcttgggtccgaccgcacacccaaggatgcctctcaaggtgcctttaagagtatgacagtgtcgacaactataacaaaatggtatgtgcctattgtacgaagaacagttgacaggtgttacatgttcgggccgtttatagatgcgcaataccctacgtcctgatgagtatgcatggtgaattgggttacaagagagctcttttgattgattatacaaagagttgacgtgtgtggctaataatatggttgatcgatctgtaagggttgcccctatgcttatatact

SEQ ID NO: 20897 - DNA, 487 bp, Zea mays
  unsure (1)..(487): unsure at all n locations
ctcgtcccggatccttaagcacctgcggcatgcaagcttcgcgagagagggaacgggtcctaggtctcctgatgagtctagtgttgtggagtggagtgcggagtggagttcgatgtctgagtgagtccgtctccattgtccttaccgcccgtgcccccctctcccccttgagaaggccctgtgcatccccctttatagatacaaggggatggtccagctgtacatatgggggtgttgttgtgtgctaacgtggtcggcagagaagtgcttgagccctatagaagcgtagctggcagtgcggccctgngtcctgctgacgtttctttgcctttgtagagagcttgagggctattgatgtcatggacgcatgcggtgaaccatcattacctgttgccggagtaatttagatgtgacaccagtcttgttccttcgtagcctgatgcggctagctagaggtagggtaatgatgtatccnctgtagcgtagt

SEQ ID NO: 20898 - DNA, 448 bp, Zea mays
  unsure (1)..(448): unsure at all n locations
tactgtganttgtctcattctctatctaccggtgcatacgtttcaccgaaatccaaaccttcnacttgtgaatatccctntgccacaagtcgggcattgttccttgtcaccacaccatgctcatcttccttgttgcagaagacccacttggttcctacaacattctggttaggacgtggaactaaatgccataccttattcctagtgaaattgctgagctcctcttgcatcgccaccacccaatccgaatcttgaagtgcctcctctaccttatgtggctcaatataggaaacataagagtaatgttcacaataatgagcaacatgagatctagtagctacccccttttgtatatcgncnacaatggtgttcactgagtgatctcgttgnattgcttggtggactctagagtgggcggcctcgaacttgtcatcttctcatctgacat

SEQ ID NO: 20899 - DNA, 479 bp, Zea mays
  unsure (1)..(479): unsure at all n locations
agctngccaatacttgtcaaagcaacagcacatgccttcacagcagctacagaccataccagtaacctggcctttcgcatgctgnggactggatatgattggacctttcaagaaagctcaaggtggatatacccatgtattggtggcgattgacaaattcactaaatggatagagttcaagcccattgcttctttaacctctgctaaagccgtggaattcatacaaggcataatattcagattcgggataccaaacagtatcatcactgacttgggatccaacttcaccagttcagaattctttgacttctgcgagcaaaagagcattcagatcaagtacgcatctgtagcacatccaagagccaacgggcaggttgagcgagccaacggaatgatattggaggcactcaggaaaagggtcttcgataagaatgaaaaattcgcaggaaaatggataagagaactgncttatgtcgttg

SEQ ID NO: 20900 - DNA, 447 bp, Zea mays
  unsure (1)..(447): unsure at all n locations
tctcctggacaagcgccgcacttactgctgagtgcgaagctgtttcatataacaacagaggagcccctggcgttggcggagttaatgttgtgagatctatcaagtattgcttcaactcttcgaaggctttttgttgacttgggccccattgaaagacttcggctgacttcagcacctcgaaaaatggtaagtttctttctgctgatctggatataaatctgttgagagatgccagccttcctgtcaatctttgagccccttatcttgtagttggtggcttcattcgaagtatagcttcgattntatttggattagcttcgattccctttgttgaaaccaagcatccaagaaatttacccttctttacttcgaagacacatttctctggattcagcttcaaaccagccggtctgaagcttgcgaaagtctcctgcagatcaacaatat

SEQ ID NO: 20901 - DNA, 462 bp, Zea mays
agctttgccttccctcagtatatcacccgcagtccaacggagttgtggaacgcgccaatggaaaaattttcacaactgtcaaaataatgctcctcgacgaaaaaagggcaggtgggccgatctgttactcgaggcggtctgggcgctaaacacgactgagtgcacggcgactgggttcacccctttccgccttctatatggatcggaggccatgaccccacaagaaataaaacatgggtccccgcgaacagtttcgtcagctgtccccgacatggacgaacccacttcgaaggatctcatcgatggagaccgagtcttcgctctacaggctctgaataaatacctagcccagacaaaagcatggcgcgaccacgcaatcattccgagggaattcatcgaaggggacctcgtactcgtccgaacagctcggacagaagtccagggcaagctggagcctaagtg

SEQ ID NO: 20902 - DNA, 378 bp, Zea mays
  unsure (1)..(378): unsure at all n locations
acacacgctcctatgagaagatatatcagatcacacggtactgctgtgatctttactatctgatgagcaatgataagactgtgctaagactttttattcaacaacttagatgtctttgcttggacagccaatgatcttcttggtgtcaacagagatgtcatcgaacattcactttatgtggatccatccttcatgcctaggaagcaaagacttctgaagatgtctgaggataatactgaaagtgctcggaacgaantatagagatcgcttattgctggtgttatcagagaagtaacatatccagattggctatccaacactattatggtgaacaagggctatggctaactgagaatgtgcatcgattctacagatctc

SEQ ID NO: 20903 - DNA, 301 bp, Zea mays
agcttgcacacatagctcatttgaatacctttgatcatatctcttctatatgctatgactaatgtgttttcaagtctatttcaaaccaagtcataggtatattgaaaggaaattggagtcttcggcgaagacaaaggcttccactccgtaactcatgcttcgccatcactccgagcaactctctattccttgggagaaatgagcatcaaagaaaagggattcatcctttggggagagagtatatgctcaaaagcaaatgaccagacttcaatcttggtataatcttaactcatttacttat

SEQ ID NO: 20904 - DNA, 495 bp, Zea mays
  unsure (1)..(495): unsure at all n locations
tgttagtgttggacaacaactgattagctcctaanatggatatctgttttccctactgctgagatacaggagtttgttcattcgctctcttatttaatccatgtattccctaaccaagtggataattcatcttgcataaagaaacggatgaacaacatgaccaaatggatttttacccaaatgcatgaccttnntgttgcaaatatgaactctcaaccccttggcttaccaatggtactgagaggatttgcttaatgtcaaaagtagttcaacaagttggttntaactaacttgtaactgcccgttgaacgaatgttgagtttagagatcgttttatcgagttgtctaagctcacttttgtacaacccctcttaaggaagaattttcaagaatcgagattaagtcggtcaataaccacctaaccatcgctctagtcgtgcctcgaatgcctcatgtatgcttttccagcataagtgatngggtcgagccatgtct

SEQ ID NO: 20905 - DNA, 471 bp, Zea mays
  unsure (1)..(471): unsure at all n locations
agcttgtgaaggtttttcatccncacatgtgctatacggcgatgccacagccagcccatgctagtcttagcaattaagcatgcatctagaccggcctcctcttttgcaaaatcaactaaataaagtttgtcgtctagtacacccttaaaagctaatgaaccatcacttcttctaaagacagacacatctacatttgtgaataagcaattatatcccatattacaaagctgactcacagacaacaagttatatccaagcgactcaactaagaacacattagaaatggagtgctcggaagaaatagcaatctttcctaaccccttcaccttgccttgattcccttcaccgaatatgattgagccttgggaatccttgtcttgacgtaggaagagaacatactcttctcccccgtcatgtggttggtgcatccgctgtcgataatccagcttgagcccccggatgcataaacct

SEQ ID NO: 20906 - DNA, 480 bp, Zea mays
  unsure (1)..(480): unsure at all n locations
tctatagagagaacatgtgttaagacttaccgatgtcntgtttgagaaagacagaccttgtgcagcgtgccaagcagggaagcatgtgggaactaatcatccaggtaaaaatgtgatgacagcatctagaccactggaactcctccacatggatctcttgggactgttgcttatcttagcatcaggcgaagtaagtatggtcttgttattgttgatgatttttcccgcttcacttgggtattctttttgtaggataaattagaaacccaaggtactctaaagcgcttcctaaggagagctcanaatgagtttgagctcaaggtgaagaagatcaggagcgacaatggatctaaatttaagaatcttcaagtagaagagtttcttgaggaggaaggcatcaagcatgagttctctgctccctacacaccacagtaaaatggtgtagtagaaagaaagaacatgaggctcattgacatggcg

SEQ ID NO: 20907 - DNA, 435 bp, Zea mays
  unsure (1)..(435): unsure at all n locations
agcttgtcaaagtcaaagttaaccatattctatgtctctattgcgaaactaggtggaattccacatacaaaatgcttagtattgcattaccttacaaggctatttttgatcgtgcaagaagggttgagaagctatttgattttgctcctagtgagcaagaatggacctttgctacagaggtgcttgataggctcaagttgtttaatgatatcactgaagtatttcctggaacaaattatgtgactgccaatggtcaacttcttataatttgtgaggccaaagagcagattagacagtgggctgcatgtggtaatcccataacagaaaaaatgtcatctgatatnggttgtgaagttgataagtattggaaggaaattctatgaccgataggattggcaccattcttgatcctaggttaagacttgacttctgttg

SEQ ID NO: 20908 - DNA, 478 bp, Zea mays
  unsure (1)..(478): unsure at all n locations
gagacgcggctttgtattgatctttacataccttattatggntatgtaattgtttgtcatcttccatcccatcnccaacattatntttattcaactcttcttcctggtacaaataacatgttactatgcataatttatgttacaaatagtataacactaaaaacatctggaatattattaccttgtcttcctcatcatcactaacatcttgtgactcattacatccaatatctggctctaatcggcttaaaacgacatcgagctcatccaacacatccatcgccttatcgtaccctgcttttgacatacacgcctggcgaactactttcattggtttcgttaacaacaatttatgtctgtatgatttagtaactccatccttccccctgaagcttntatcaattctntcaaacggaacatctnttcttgatgagacagtgtacctttgcaatatatatcttgaagggatcttttcaac

SEQ ID NO: 20909 - DNA, 465 bp, Zea mays
  unsure (1)..(465): unsure at all n locations
agctcatgtaaaattacatccaaactctntgcatttgctaataactctatagtaattcatcggggtctagatagccttttcccctttaagtcagtttccttttttcctgtcatcatgccgaagctcccttgcgcacaacttcggctctgttccatccttcgtttcccttgtgcttcttcacattgtgattttgactcaagtccgaagggtccaagtccgaagatacatgctcatgtattatactccagaaacattgttaaatcacgtttttgtggaccttaggaagccgaaggcccccaactgtagcccctcgcaatattaatttgttagaatgataaattcagattgcgatatggacgaaggccttaagccgaaggtccgaanaaacaccttctctttgctagaatagcaacagtcaatgacaagcggngccctcccatttgcaacgtactgggcgtataaata

SEQ ID NO: 20910 - DNA, 481 bp, Zea mays
  unsure (1)..(481): unsure at all n locations
taacatgcttgtttaagtgcattcttttcatttgcatgaatagctataaaggttttcatattaattacttctttatctttattctctatagatatcttgactaaagatacttccttagtctagacatctagcatttcatctttattgtgaagcaattcttgaagctctaggttcctttccttttcaagaataagcaagtcttcttgagaatcaagagttgcttttcttttatctagcttctccattaattnggtgaaacattgtatccattcaagccaaattctctaatcattttatttttcatggcaatttgttcatcatcatttggaaaatcattactaaataaggttaccttatctccttttgccatgacgcaagttggagtgtangaatcgtcctgtaaggtggtgaagagttgcgagcttgatgtagactggatggtcacgtttgccacacttcttcttcctcgagctagactctc

SEQ ID NO: 20911 - DNA, 338 bp, Zea mays
  unsure (1)..(338): unsure at all n locations
agcttaatgaagatcagtagaaatgtactatatgaaaaaactcaggatactcttgtaacaagttttgtaaatacaattgaactgttctcaaggaactttgtacataccttgtaatatattcttacccttcgattgagtcgctttgatgtggacgaaatcagtattttgagccgaaggcgaaaaaaaaaacacctttccttcttttcgtacacaacgaagcctaaacggccgcttcctctttttgccaaagcttttcttcacatagcaaaacataaaaaactactttctctttctgncgaaagctttacatagcanaaacataaagactacttcttcct

SEQ ID NO: 20912 - DNA, 401 bp, Zea mays
  unsure (1)..(401): unsure at all n locations
tatgaaattatctacaactttgcttacaaacccaagtttttattctgttgataaaagttcctaaatctttagagaacagattctgcatagaattatgagactaaaaaactgctataatcaaactgcaataactctctgatctgatgtccgattaagatgttcttcacggccacggaaggatctacaaattatctacgactcatatatagactttntattnttttgaggcaactaagaccatgaaaaactggcatgaacagaaatggtcgaatctgtcattctgtagaaattaaattcgagatcaaaatctaaccccacatctaatccaacctctaatccttcaatccccataatccagaacctccaaaaacacttaattacagggatgaacatggatctca

SEQ ID NO: 20913 - DNA, 465 bp, Zea mays
  unsure (1)..(465): unsure at all n locations
agcttagtattcccatcagctagttaatagagtgttctagtgtcgttatgtcaattcggttaattgattgagtcgatagatgaaataaattaattgttgacatgtaaattatgtgaggtgtgaaataaaattaaaataattctttgcaagcgatgtagtataatttataaaacaaggaataagggtagcaattaatcaattaactgatgagttgtgtttaggctaatcatgtttaaagtgtatagtttgttgttcgtgatgtttgcgttaggttcgagaagcgtaattattgcgcttagttgtacgttaataactagtgttttcgtgtaagattgtacaacgtatcgcccttatgtgtttaatacgctatcgtatagcactatttagatttgtgctattcctgtntatatgcattcatgtgcataatgcatttcattcaggtacgttaattagtcgcccgatgcg

SEQ ID NO: 20914 - DNA, 446 bp, Zea mays
  unsure (1)..(446): unsure at all n locations
tcnggaaaccaatactctttgatagagtaccgataaccttctctccggtttgatctcggacgcagcctaacttttcatcgtcaacaccaccgaagagtantgcccctggttgatatgcgcaggatatggcaaattcttttaactcttctttctcagccttcgtcaactcttgtccaattaagttttgaaagttgaaaatttcctcttccgaagcgtcttcggctatttccttctccttctcangctctggggccatggttttttcggtggctgcagtagcttcttctgtggccatgtctagaagtatcttatcaatcttagaaactgtgctntctagatttacagctttgatagctgtagcgctctcaacagctgatgaatttgaagccgaagctggtcgtggtgtcccttcgatagcttctgtcacagtaatgattcttcgtttt

SEQ ID NO: 20915 - DNA, 312 bp, Zea mays
  unsure (1)..(312): unsure at all n locations
gcttattcaacgtgcgagtcaatggcttcctatccattattttcccgtccctcttttcaagccggtctaaccatttatggaacttcaccttcagtacaaatttcttcttcttgcaggcccaaaagagaaaagacnaccagaatgatccaatacaagtagacatgtggcacacanagggatagcatgaacatgaacacacaaaaagggaaatgttggagcctgaagtgctgtactaactctgactaggatttaaaagaattgctaagtagaatacttgctcaatcaaaatatataagggtctcagtatgcaga

SEQ ID NO: 20916 - DNA, 474 bp, Zea mays
tgccttcgcctcagtctatcacccgtagtccaacggagttgtggaacgcgccaatggtataatcttcacagctgtcaaaaagatgctcctcgacgaataaagggcaagtgggccgatttgttacccgaggcggtctgggcactaaacacgactgagtgcagggcgaccgagttcactcctttccgccttctatacggatcggaggccatgaccgcacaagaaataaaacatgggtccccgcgaacagttccttcagcagtccccgacgtggacgagcccacctcaaaggatctcatcgatggggaccgagtcttcgccctgtaagctctaaacaaataccaagcccagacaaaagcatggcgcgaccatgtagtcatcccaagggaattcagcgaaggggacctcgtactcgtccgaacagcccggacagagtccaggggcaagctagagcccaggtgggagggccccttcata

SEQ ID NO: 20917 - DNA, 453 bp, Zea mays
  unsure (1)..(453): unsure at all n locations
tgacttanaacaagaggatacaagaagttggagtgcttttgtgaaggcttttgcgaatcacttgaagcgttaggactttngtgaatgattttgtaaagtgtttgcaaatatgtgcaaaacataataacatgtgtaggttttgtgaatgattntgttgtggtgcttgttgatggttttatgtgatgtggatctatcattgtgcaatactaattaaatttgtatatctatgtgattatatataacagttgttgaatgctaattaatggtatattatcattattaacgactataactaggggcaactttctgttggttgctaaatgtatattataacgactcacgattgggtgctaaatctatagtacaacaacccacgggtggtcgctaaatatacaatattagcaacggacggtcggtcgctaaaaagatgtcggtcgctaaagcctttatcga

SEQ ID NO: 20918 - DNA, 402 bp, Zea mays
  unsure (1)..(402): unsure at all n locations
atacccataacatggccatttgcgtgctggagactggacatgaatggacccttcaagaaagctcagggaggatacactcacgtgttggtcaccattaacaaattcaccacatggtagaatacaaacccattgcttctctgacttcagccaaggcagtgatagtcatacaagatataatattcatgtttgggataccgaatagcatcataaccgacctgtgatccaatttcactagctctgaattttttgattgctacgaacaacgaagcatccagatcaaatatgcataagtagcacatccaatggccaacggtcatgtaaaaagggctatcggatgatactggaacactcagaagaatgcttcaacaagatgaaagttncgggaaatggatatagagtagt

SEQ ID NO: 20919 - DNA, 474 bp, Zea mays
  unsure (1)..(474): unsure at all n locations
agctntggtaaccatgatgttgtctttctctgtctcatcatcaatattggccatcatcaaattataataatcctcgataattagttcgttctacctaacaaacctgacaacatttatgattatctccacaggcaagacaacctcctgtccataaacaagctcaaaaggagagactctagtagcacggtgtttagatattctatgagcccataaagcctcagacaaaaccttatgtcaatgcctaggatgatcaaatatcttcttctttataaggctaatcaatgtcctgttactagactcggctaagccattggcctgagcataatatagagaagaattgagcaatntgatcttatattaattagcaaactcacttacctccttcgacatataagcccctgggttgtaggcgaagtttggggaatatcaatttatgaatgatatgctcagttataaactcaattacctgcttat

SEQ ID NO: 20920 - DNA, 375 bp, Zea mays
  unsure (1)..(375): unsure at all n locations
actcagcatgatcagagccgaaggtgttgagccagaaagcttcggcgttacagcaatgagtggaaccgacttacagatgaataggctatctagacctcgatagactactacagagttattatcaaatgtaaagggcatgaatgttattttgcaaaggctgtgtcccgtgtctataaataggtgaacagtatccccgtactgttcacgctgacttggcattcgctttttgcgtcacgcttgtattgtcatttccttccggttgaaggtacacttatagttcaataatatnttcgtatatcgtcaataataataaatgattgttcatgtgatcttttacattctttatattgtatccctcggcattgtttgatgaat

SEQ ID NO: 20921 - DNA, 451 bp, Zea mays
  unsure (1)..(451): unsure at all n locations
agcttgaccatntggtcagttcgttctttcactcataccctntgtttctcaatttgactgtaacaagcgcacaataatttagggatatatagttgttgtctgcaagggcttcctctgatttagcgattntgtgcttggtaggtggatacatcaaaggtcaagttggacgtgatgaaacactgcattgccaagcgggtcactaagctacttgggttcgatgtatgtttctgatccatgcagaggtagttacattntttcacttgaaagttaacccaagtgctacggtcgacggtcgtcttgtgttngtgaccttgcacccttttattntttgtanggtctttacttaatgagaaccccgactcatttaccattgtgataggaccaaaattcacatccaaactttgtactacatctactgcacgtttgctttggtggtccgttccgatatgct

SEQ ID NO: 20922 - DNA, 388 bp, Zea mays
atgtgctaagcgggatctccactttctcatgctagtctcagctattaagcatgcatctagaccggcctactactttgcagaatcaactaaaataagtttgccgtctaatacaacacttcaagctagtgaaccatcacttcttctaaagacagacacatctacattcgtaaatagacagttataccccatgttgcataattgactaacaaatagcagtatatattccaaggactcaactaaaaacacattagaaattgagtgctcatttgagattgcaattctacctaatccttataccttgccttgattaccatcaccgaatataattgaatcttgggaatctttattttacctatgatgtaacatcttctttcccccgcatatggtt

SEQ ID NO: 20923 - DNA, 442 bp, Zea mays
  unsure (1)..(442): unsure at all n locations
agctcggtatacaactgacaatcccgtagcctctgctatactttcctcaagtgctcttcatgctcttgctcattctggcaatatataaggatatcatcaatgaacaccactacgaacttgtcgaggtagtccatgaacacgctattcatcaagtacatgaagaaatctggtgcattcgtcagaccgaccaacatgatggtgaactcataaagtccatacttggtgataaatgcggtgttcggtatgtctgaaggccggatcctgagctgatggtaacatgacgtgagatctatattggagaacacacttgctcctctcatctgatcgaacatatctttaattctgggcagggggtatttgttcttgatagtaactatattcaaagatctgtaatcaatgcacatcctctttgtccatctnntcttctcacaacaaaaatgga

SEQ ID NO: 20924 - DNA, 303 bp, Zea mays
ggataggagttgtgtgtattttttgttgatgcatttcctttcttgattaaacaaccataatacatgttttatgaaaatctagtgatgcttagctctgcttattaatttaggatggtttttaacagatgatgtgtaacatgggatatgggagtttgtgaaataaaaggacttgtgatgatgaacccattgcggccgtgatgatttcattattcaagtagggtacctctctcaggtatcaagttttgggaaataatataaaatgtagaccagacgttgagcacgaaagtttgcccgtctgtgtcg

SEQ ID NO: 20925 - DNA, 363 bp, Zea mays
taacagaattcatcagtttattacacacatcatgcagtgataagcggaacaagcctccgcaatcatatcctataccaacagagggtccttgtttcgacacaacacacttattacactcaagaacaattttatatccatctccacataacatagaagcgctaacgagattcttcttgatagagggcacatgctgcacgctcttcaatggcacccgttttccccatagtaacttcataaagaacgtaccacaccaagaacatgatcgcgcgagccaatttccaacatcaatgcgccagacctcccgacctgatatgaagtaaatatataggcatcagcgcacacatgaatgtatgaccactgtcc

SEQ ID NO: 20926 - DNA, 301 bp, Zea mays
ccagttatctgaccctctaacactcccttaaatgctattgaagcatcacttcttctaaagacagtgacacctacatcagtgaatagacagttagaacccattcgacataattgggatacggatagcaaattcgaatctaaagaatcaacaagataaacattcgaaatggaatgtgtatgagatatagcaattttaccaagacctttgaccaaaccttgatttccgtccgccaatgtgatagctcgatggggatcttgggtcttctcatatgaagagaacatgcttttctctcctggcatgt

SEQ ID NO: 20927 - DNA, 437 bp, Zea mays
  unsure (1)..(437): unsure at all n locations
ctagaactaccatcctctataaacaatcgattctgcaagttgccttgttcctgaaatacgaactctaacccgatacaagtcactatctcttgtaataaaaaaatataactatttgatagaactataatgcacatgggccatttaggattgcatcctcttcggctaccgctacatgatcaacatgtcaaatggcaagagctgggttcttttcaactagcaagagctgggtcgactgtctttaatccataacgatttctactanttttacactgcttttatctctatagattacaactacagttcanatagattactctaatgtgaagcgaagaacctgagcagtgcaagctaggcagcgctcataactcttctcatacacccttagagccagggaggtggacccactgaagttggagctcgatttcccacactctacg

SEQ ID NO: 20928 - DNA, 389 bp, Zea mays
actcagctgggcagttctccgcgtcactgctgatgaacaccatgcatttcgcgctacatgcggagctctccaggctcatcatctgcttccaccccatagggcccgaggccgccgtcgacatgggatggaaggactacttcatgagaggcgtggatctcactctacgagaaattcgcagccatatgttgcgctttcttgtttgatacggctgagtatcgatcgatccttactagccgttctgcatgcagtcgtgccaactgctctcgggacggccttggacataaacctgagcaacgcgtctctggtgttcatgtcggtgacgttggctactatggtgtgttcaccaaaggacttaatctgcttgctctcctttagttagaatccttgat

SEQ ID NO: 20929 - DNA, 359 bp, Zea mays
  unsure (1)..(359): unsure at all n locations
agcttggaggcgtcgattggttgtcctcttggtgtatcctcctccttcttttcctccgctgccttgaatgcgacaggttgagcttctgatgtggtggaatcatcaagctcggtgatcttcctcgagccttcgatcatgcactcaaaacttacaaaattcccgataacttcctcgggggtcattttagtatatctaggattaccacgaattaattgaacttgagtggggttaaggaaaataagagatcttaaaataaccttaaccacttcgtggtcatcccacttcgtgctcccgaggttgcgcacttggttcaccaaagtcttgagccggttgtacatgtgttgtggctcttncccttt

SEQ ID NO: 20930 - DNA, 487 bp, Zea mays
tgaagccatggtaagtagcatatgcaagtaatatatgaattgactcaagcctagctatgggtgcataggttgcaccaaaatccaaaccttcgacttgtgaatatcccttggccacaagtcgggctttgttccttgtcaccacaccatgctcatcttgcttgttgcggaagaaccacttggttcctacaacattttgattaggacgtggaactaaatgtcatacctcattccttgtgaagttgctgagctcctcttgcattgccaacacccaatccaaaccccttaaagcgtcttccaccctgtatggctcaatagaagacacaaaggagtaatgttcacaacaatgagcgacacgagatcgagtgtgtacccccttatgaatatcgccgaggatggagttcacggggtgatctcgtgaatcgcttggtgactcttggtgaggcggcctgaatctcatatcttcttatcttgacatggctctcccctg

SEQ ID NO: 20931 - DNA, 344 bp, Zea mays
  unsure (1)..(344): unsure at all n locations
agcttctcctcttcggntagcttcgtctcaacatctgtcttcttgtcttgagacatcttatcttcggaaatcacgaaaatgtgtccttcaagcctaagctaaaaggcttgacagctatcaagcactagtaagcacaaatcaacaaattgagaaaataaggcaaatggcacaagcagtgtgacaaatgcagtccgtgtgagttcctatttatacgcccagtgcgctccaagatggagggccccgtctgtcattgactgttgctattctagcaaaaagaaaggtgtgtttctgacctttggcttggggacttcctccatgtcgcaatctaaattcgtattctaaca

SEQ ID NO: 20932 - DNA, 438 bp, Zea mays
  unsure (1)..(438): unsure at all n locations
gcgactggcgcggcgcgccaagtcgttcgtcctactgtgttacagaaaggagctctaccaccgcagcccctcatgcatcctccagcgatgcatattatcgccgaaagtcaggagttattacaagaaatacactcgggggcttgcggtcaccacgcagcacctcgggccctcgttggaaacgccttccgacagggtttctactggccaaccgcggtggccgacggcactatgattgtacgcacctgccaagggtgtcaattctacgcaaggcagacacacctgcccgctcaggctttgcaaacaatacccatcacctgtgtcgttgctgtgtggggtctggacctcgtcagtcccttgcagaatgcacccggnggcttcacgcacctgctggtcgctatcaataaattcttcaagtggattgaagtccgacccctaaat

SEQ ID NO: 20933 - DNA, 457 bp, Zea mays
  unsure (1)..(457): unsure at all n locations
agcttcggcanaaagaggaagcgaccttttatgcttcgttgtgtacgaaaagaagggaaggtgttttttcgccttcggctcaaaatactgatttcgtccacaacaaagcgcctcaagcaaagggtaagaatatattacaaggtatgtacaaagttccttgaagatagtctagttgtgtttacaagaattgttacaaaaatatcctgagtttttctacagtacacttctactgatcttcattaagtttcagcttcgacgacataatttaggcatcatcttcaccttcgtcatcctacataaattaagagtttatgagtaaaaatcaagagcaaagganaaggtaactccgaagtatcatttcttactggttcaagatgacttcgtgcttcgtctccagctttctcccgccccgcttttggccatatcattnttataaatctattggagatgcttcggg

SEQ ID NO: 20934 - DNA, 353 bp, Zea mays
tcacggacttgaaactcagctttcggcctcccagggagctatccgaaagcttggatcgagcagaggatggcggcgaaaaggttggccacggtggttgccctctggtggctctggcgggtcgcggggaggtcgccagagctatgggcgagcccggaggagttaggcgtggtacggatgacgcatcggtgaagacagccgggctctatgacgggctttatagccgtggcgcgggtgtggtcactggcggccgcgggcgcgcggagagttgcgcacaggcgtgctctgagcgcgccccccagtgtcagcccgcgtcgaacatgtgggagctcgcttctgccatgttcaacgaccga

SEQ ID NO: 20935 - DNA, 463 bp, Zea mays
  unsure (1)..(463): unsure at all n locations
tctgtaagatagcaactctggtgtcatacctctttcgcccatttcattcaataatgtaaaaccttcttcaggaacccttgttctatcaaaaatttgaaatcaaactacagattcagtgtgtgtcaatcctttcttcaagaatccttattntatccttaaggtaatccttagcgctaatttggccctcatctagttggaagaacttatccttcaacagtcctagctaatgagttatacatgcccccctcatcaaacagcatagtctttgttctattatagattgaatctctttcaattcttcttgtgttttatttggattattattattacgtcttcttaggaactcaaagacatccttatctgttagttgaggattcccctcttgattctgattattatctgtattataactttgaaagacttcatcccagaagttatagactatatctatcacatcttgagt

SEQ ID NO: 20936 - DNA, 470 bp, Zea mays
  unsure (1)..(470): unsure at all n locations
agcttaatcagacaattngnttatctagtgttactagatattgaaatcatgtgcgtatgcatttaaacttactgatacactcatagaacaaacaaaattatttttagagaacacattaaaaatactaactatgctctaacatgttacatgtttaacaaccacatttaagttagcacgtttacggagagaagagagtgtccttaatacacaagccagcaaactcaaaaaacatataaattgatacttagctctaacaagcagttgctatatatggcgccatattcggcgtgagcatgacaagcaacacgatagaatttgtgtagttggaaactacccgatggagacactagtgcctctacaaccaaccagctctcaccanaatggtaagagatagaaattttggaaattataaatagaccttgtggtcagttgtgggtataattttggcactccatacacttgtgcacaca

SEQ ID NO: 20937 - DNA, 477 bp, Zea mays
  unsure (1)..(477): unsure at all n locations
tctaaagggagaacacgtgatanggttgactaacgtgcaattttaanaagatagaccttgtgcagcttgtcaagcatgtaaacaagtgggaggagcacatcacagcaagaatgtgatgaccacttcaagacctctagagctgctgcatatggacctcttcggacccgtcgcctatctgagcataggagggagtaagtatggtctagttattgttgatgacttttcccgcttcacttgggtgttctttttgcaggataagtctgaaacccaagggaccctcaagcgcttcctcaggagagctcataatgagtttgagctcaaggtgaagaagataaggagcgacaacgggtccgagtncaagaaccttcaagtagaggagtttcttgaggaggaagggatcaagcacgagttctccgcttcctatacaccacagcaaaacggtgtggtagagaggaagaacaggatgctaatcgacat

SEQ ID NO: 20938 - DNA, 359 bp, Zea mays
  unsure (1)..(359): unsure at all n locations
cttcatccccacatgagctaaacagcgatgccacagccagcccatgctagtcttaacaattaagcatgcatctagaccggcctcctcttttgcaaaatcaactaaatagaagttgtcgtctaatacacccttaaaagctaatgaaccatcactccttctaaagacagacacatctacatttgtgaataagcagntatatcccatattacaaagctgactcacagacaataagttatatccaagcgactcaactaanaacacattggaaatggagtgctcggatgananagctattntttntaaccctttcaccttgccttgattcccgtcacccgatatgattgagtcttgggaatctt

SEQ ID NO: 20939 - DNA, 497 bp, Zea mays
  unsure (1)..(497): unsure at all n locations
ctcagcttatcttgtgatttcacaacaagtaagtgacacctgagtctcttttagtggcaatgtccgacaagggttggctatggcatcaccggctagcccatgtcggtatgaggaatttggccaaacttcaaaaggataatcacatcattggactaacaaatgttgtatttgagaaagatagggtttgtggcgcatgccaagtaggaaagcaacatggagccacatcaatcaaagaatgtggtcacaacaaagaggccattggagcttcttcacatggacctcttctgacccgtggcttacattagcattggtggtagtaagtatgggttagtcattgttgatgatnttttctcgattcacctgggttntctttntgagtgataaaggtgaaactcaagaaatattgaagatattcatgagaagagctcanaatgagtntgagctcanaatcaagaaagtgagaagtgataatgggacggaattcaagaacacaggtg

SEQ ID NO: 20940 - DNA, 503 bp, Zea mays
  unsure (1)..(503): unsure at all n locations
ctgagctgacttgctcccatgttgaaccaatgccatccttaaagccagtgtgtctctcattgcaaagcatgctacgagcaaatataaaattttcattttcaagctcatgctcggcacatttagcatctaatttggctatatgatcattttgtttcttaatcatggcaaggtgatcatctatagcctcaacattaatgtctctacatctagtgcaaatagaaacatggtcaacaaatcctctatcttagattttaacatgtcattttcatttataagacaagatatagaatcagcgcaaacatttaaatctttaaccttagaaactacgctagcattttcatctctaatgttagagattaatctcgacgaatgctaagctccttagataaattctcacatttttctactttctgagcataagcaattntcaattaacatgctcttggtctctttaataacgaagtcctcttggctatccaagagttcatccttctcatgaatag

SEQ ID NO: 20941 - DNA, 333 bp, Zea mays
  unsure (1)..(333): unsure at all n locations
ctgcagctacattnatttataatacaaatttttatcctatgatatattatcctccccctaaatatgtgcatttcaaaanataacacttttgtactcaaatgccaaaaccacatatttgggtcaaagtatacacaacttatatcatactattcatagggtgcagagtgtcatataataaacgtgatgctcatgacatagtatgcactcatcaattttctacatcttatgtttttcttatgattccccatattgttaattatttctcccctttttaaaagatttctaacacttagttacataagactaaaggtaagctttaatgcataatttctc

SEQ ID NO: 20942 - DNA, 376 bp, Zea mays
  unsure (1)..(376): unsure at all n locations
cttccctatgcnccaagtgcaaaggtgtaatctaattctataacttcngcaaanatagaagaacttctaacataagctagaggagaagctaccaaatggtggcctaaacccgcacaaccgaggatggagtaaatacattgttgctctgatgtcatttgtaaacaatgtgtgtaaaaccttgaggggcatgattttaattctgtacaaaggcggttcaacttccctataaataggtgaatattgccctgcataagacaccttttggaggaccatcagttcgttttacttatcctacaaagaaccttggtgccaccatgtatgcgggagccaaaggtatgcttgtacacttatttataagagaaatggaataaatact

SEQ ID NO: 20943 - DNA, 338 bp, Zea mays
  unsure (1)..(338): unsure at all n locations
cgagatcctataagtcacctgcggcatgcaagcttanaataatctggtataaatcggcggtaatagccagtcagcccaacgaaacttcggacttgatgaacagaggtcggaggtttccaactccaaatatccttgacattgctgggatccaccgcaatccccttggcagacaatacatgtcccagaaattggatttcttctatctcaaatgcacacttattgaatttggcatataaatgatgttctcttaagcgcgtcaatacgatccgtaagtgttgagcatgctcctcttcattcttggaatatattaagatatcatctatgaagaccaccacaaa

SEQ ID NO: 20944 - DNA, 175 bp, Zea mays
caatgacgatggcggaggataaaactgaccatagaggaacagactgctcattcctcgacagcgtaccttttggctaacagtaaatggaatggacataaacgtaattgtacctaagctacgtcctgtaccttatagatgatgaacagtaacatcatactcgtcacactgaattgta

SEQ ID NO: 20945 - DNA, 481 bp, Zea mays
  unsure (1)..(481): unsure at all n locations
agcttctaaagggagaacacattntatgactatcaaatgttcattncgagaaagacagggtttgtagcgcatgccaagcacgaaagcaagttggtgctcatcatccacacaagaacatcatgacgaccgacaggccgcttgagctactccacatggatctattcggcccgattgcttacataagcatcggcgggagtaagtattgtcttgtaatagtggatgattattctcgcttcacttgggtgttctttttacaggaaaaatctcatacccaagaaaccttaaagggattcttgagacgggctcaaaacgagttcggcttaatgatcaagacaattagaagcgacaacgggacggagttcaagaactctcaaatcggacgttttcttgaggaggaggggatcaagcatgagttctcttcttcctacacgccacaacacaatggtgtagtggagaggaagaatcgaactctattggacat

SEQ ID NO: 20946 - DNA, 453 bp, Zea mays
  unsure (1)..(453): unsure at all n locations
gtcagcttatattatgaaatanataacgcttcatatgccataataattttattctatagcttcaagaggctgcacagttagatcttactttacgtgatattttgcgacatatgctagggttcgtaaagcatgagcacataagatagccctgttttaaatatacgaatcattgtatgaaagttaaaaagtgtgggtgtaaataaaaggagctcatgacataaggaataaatcatgattggctcccggttaccgtaccaattcttgctcacccatccctcccatcagatcactgcatctcatctaggtcggcctagtcctagcgagccgcggtggctggcctctgccgaaccgatgagacggacacggtggcactccgagtgatcgttccccagcctcagtacatgatgtttctgacagcatcgacagactgagagatatatangaatgtgtctt

SEQ ID NO: 20947 - DNA, 445 bp, Zea mays
  unsure (1)..(445): unsure at all n locations
agctttgccaaatcctcaagcaaaggagggggaatgagtacaaaccccgctgcaagagggtgtgctacaagtgtggtaagcccggtcattttattgcaaaatgtcctatgtctagtgatagtgaccggcgcgacgacaagagggggaagaagaaggataagaagagatactacaagaagaagggcggcgatgcccacgtgtgtcgggaatgagactccgacgagagctccaccgactcctcgtccgacgaggatgccgccaacatcgccgtcaacaagggactcctcttccccaacgtcggccacaagtgccttatggcaaaagacggcaaanagaagaatgtcaatctataaccacccccaagtatactatgtctagtgatgagggtagttctagtgatgatgaagatgatctgcttaccctttttgcaacctttaacatgcac

SEQ ID NO: 20948 - DNA, 497 bp, Zea mays
tgtctaatcaatataaattccattttaactccgaatagactcgttccagttgcattaattatgtttaaatattgcttatcacctagtaactttggttagacatgaaacatatattcaaattgtctacttaatttattctataccaagcacttaataacttcaggaaatcgtaactcgataaccgtaaccccgattatagcggttctcgaacccacaatctcgtagtgacgcgtagattattattatgcggttagtattatgtttggtgtaatgataattttgcctataccatgttttattacgactagcagcgaggttacgagtcactcgaagagcaagttggtacctggaatctcaagtcctaagcaagttgtgcccttgatcacttctttttactcaatcatgcttttattaatcataatgatctgcataggttaattttgataggacctaatatgctacgctagtatgactatctgtataccttgattaccact

SEQ ID NO: 20949 - DNA, 434 bp, Zea mays
  unsure (1)..(434): unsure at all n locations
ancttatgaacattcttcattccaacataatctattctgcggtgccacagccaacccatgttagtcttagccattaagcaagtgtcgagttcacctctatcagaatctaccaagtatagctgaccctctaacactcccttaaatgctattgaatcatcacttcttctaaaaacagtgacacctacatcaataaatagacagttgtagcccttttgacataattgggaaacggaaagcaaattggaatctaatgaatcaacaagagaaacattggaaatggaatggtcatgagatataacaaatttacccaaacctttgaccaaaccttgggttccattcccgaatgtgatagctcgttggggatcttggattttctcgtaagaggagaacatattcttctcccctgtcatgtgggtggtgcacccgctatcgat

SEQ ID NO: 20950 - DNA, 409 bp, Zea mays
agtgattatagttcttgcaagccctggctataaagggaatcacggcttatgggtaatgtgcacaacctctgcagagtgttatgaatctgatttatcatccgtgctcacagttaagagcggcctatggagctcctgagattagtgatacttgaacacgaaacattttggtacaggtggcaatgatattgatggttcttattatgattatggtaatggtaagtgggattctttccgttggaaaggatacatttggctaataactagtgttaatgttaatactgtctctctactagtaggtattacctgaccactataagcaattgcctgcttattccccaaaaagctagtgactacagccaacagatgcttgctgagatgttatgtgtactcaccttgcttaacacaatcc

SEQ ID NO: 20951 - DNA, 432 bp, Zea mays
  unsure (1)..(432): unsure at all n locations
ttctaaacggaaaacacattttangatttttaaatgttcattttgagaaaaacatgatttgtatcgcatgccangcgggaaagcaagtttgagtccatcatccacacaagaacatcatgacgaccgacaggccgcttgagctactccacatggatctattctgcccgattgcttacataagcatcggcgggagtaagtattgtcttgtgattgtggatgattattctcgcttcacttgggtattctttttacaggaaaaatctcaaacccaagagaccttatagggattcttgagacgggctctaaatgagttcggcttaaggatcaagaagataagaagcgacaacgggacggagttcaagaactcacaaattgaagggcttcttgaggaggaagggcatcagcatgagttctcttctctctacacacctc

SEQ ID NO: 20952 - DNA, 386 bp, Zea mays
  unsure (1)..(386): unsure at all n locations
agctntatatggacgacggcgtcaaactccgcttaattggnctgaacctggagaaagatacttctttacgcctgatatggtaaaagacgccgaagaaaagattcataaaattattcttaatatgaagaaagctcagactcgacaaaagagttatgcagaccgacgacgataacccttatgctttctggtagacgactatgtctacttaaaagtttcaccaatgaagggtgtatcgcgtttctgggttaaagggaagcttgcacccacgtacattggtccgttcctggtgattgagcaatgtggaccagtggcatatcgactccaactaaccgaaacattgtcggctgtgcataatgtgttccacgtgtcacaattgaagaaatgtc

SEQ ID NO: 20953 - DNA, 461 bp, Zea mays
  unsure (1)..(461): unsure at all n locations
tgtggaaagacaccgaacctaaagtgcatgtcttaagtgattggcaaggtggaacggagggaaaacgggaggaggcgcgcggcgacgggcggcagggctgttcggccttgcgtttgggctgaaaacgaggggttcgccatggcgcacgggccgaaaactgaggctggggcacaaccccgaaaataaggtaagtccaagcatgtggaaagacaccgaacctaaagtgcatgtcttgagtgaagggcacggtggaacggagggaaaacgggaggaggcgcgcttgcactggcggcanggctgttcggccttgtcgttgggctgaaaacgatgtgttcgccatggcgcgcgtgccgaaaactgaggctcngtgcagaccccgaaataagctaagtcacacatgtggaagacaccgacctaaatgcatgtcttgatgaaggcaggtgaacggtggaaaacggaga

SEQ ID NO: 20954 - DNA, 434 bp, Zea mays
  unsure (1)..(434): unsure at all n locations
agctntaaatgaagatgagaaagaaccattctagaagaaaaatccgaataagaggaaagcgtcttctccgaagcaaaaaatgtccgacgaagaagaaacccccgcatcaccctctgctgctgacgtggaggaaattttgaaggtaatgactgaatccctgcctgcgaagctaagtccattggggcctcaactgacaaagttttttcagaaggaaaaggagcccgaaaaatcgaagaaaacaactaaagcaaagagacaaagaattatcactgcgacagaggtcattgacaagacaccaccaagagcttcagctcagaagacaccagcggctgaagaaaaacaaatattgaaatacaccttcggaggtcgcggctgccgaagctgcctcagttgaagattgaacctggaaagcacaatcgaagacatcgacaaaa

SEQ ID NO: 20955 - DNA, 422 bp, Zea mays
  unsure (1)..(422): unsure at all n locations
tcggaataccacgacttcattntcctcatgagtcggacaagtcttctctcctttatcagccctcacaacggacaagtcccgaaaataccggcccctcatattgacaagatgatnttctttaatacttgatttaccaaaaaccgcatggcttggtcgccaaggtcgatcttcggagtcttcaccaccactatccacatcataactgtcactgtcaccggtatcttcagataaaccctccaaaatttccttagtaatcttctctgtattagtctttgacattgattgaagaaagcccagatgcatttcctcagaaagacttagcttcgagtcaccaacgacttttttatcttcagacatccttgcaaatgctgagaaggtgctctcgaaaccgaagcttataaatctaaaaagccaagcaagtg

SEQ ID NO: 20956 - DNA, 466 bp, Zea mays
  unsure (1)..(466): unsure at all n locations
agctngtattgggtgaattttttantttagttatttataaactttatgtaattgtaatatttaaatttaatgtagtcaaatgacgctttcattgtttaatatctttaatttagtaagttatggactttctgtagttgtaatatttagactttatgtggttcaaatatatgggtcgagcttgggctaatacggcctgataaagacacgacattctttatggtcgagttggatcgttgtttctactctttgggctggcatgacacgacccanaagtttttttgggccttctcagtccgagtctatttgatccgaagcacgatgggcttgctccggccaggctagcccgacccaattccaaacactactcatatacctgacggtgtatgcaacggaccacccatacctttagagcttatttggatattctcgtatcacctcaatctacatgtattgagttaaattacac

SEQ ID NO: 20957 - DNA, 464 bp, Zea mays
  unsure (1)..(464): unsure at all n locations
gcatatttggtactcatctattgatgggtccatctttgctagtcaacaaaagtctaggaacccaaacgtcctttgtgctancactatgtaaactcattacctttctagcacaagttgcaattttgggttgcctagttacatgagaattaattgacaagctaggagtggaatagttaccgatgggacaatccttgcattgatgtcccttctttcggcatatgtagcataggcgatcctcaagtcttgaagatttcttcttttttgctacatggntagtgaatattntcttttctaacactatngccttttgtttcaaatggggacaagatttaataaagtggtcctcttttgaacatttaaaacaaagtttatcatccttgttaatcaagctattattaatatggggacatgatctaatcaagtgtcccttttcaaagcattcactacacttcttatttctcttt

SEQ ID NO: 20958 - DNA, 393 bp, Zea mays
  unsure (1)..(393): unsure at all n locations
tcgactgttgtttcaggagtgacggcagccttcttcggaggggtgcttgaagaattgatcngttccagcacatctagcacattagccattctccttcttttcggagtcactgctggcactttttgatttcttactgcttcaatgtttgccacaggactcaaaacttctgatgttntggagtcctcggttgcttcctttacctttttcattatttctgtgaatggcgcttcagccttctctttcgtttctggtagcaaaattttagactgctccaattttgccttcctggtattcagctgtttctgtacttctggcacaaggttggtcggctggatttcactttcgtggctgacaagctcttcagcgactatgcaccgacctggttcaaatacc

SEQ ID NO: 20959 - DNA, 94 bp, Zea mays
  unsure (1)..(94): unsure at all n locations
agcttcaacggtcagaatccaacggcagtgattatcgnttctgtggcatctgacatgtctggtgtgcaccggactgtacgatgtgcactctaac

SEQ ID NO: 20960 - DNA, 307 bp, Zea mays
gttatgcttcgcttctagtgacgcgtgattttcttctttgtccttgtacttggccaggcatgacgagaagagatcatcatccatcttatacaacattctcttgacagttaccgtcagattcaggactatcgcacaaaaataaaatgatacttgcacagtactgattatggaacctatatgtatgccaattgaaaaaagatactttgctactgtggttcacactcttatttgtctagttgagttttatggatggatactgccggcgtttcgagaccggggggttcctgatccgacgagtgagtgtgcc

SEQ ID NO: 20961 - DNA, 435 bp, Zea mays
  unsure (1)..(435): unsure at all n locations
agcttctaaagggagaacacgtgataggtctaactaacgtgcatttcgaaaaagatagaccttgtgcagcttgtcaagcaggtaaacaggtgggaagttctcatcataccaaaaatgtgatgaccacatcaagaccgttggagatgcttcatatggacctcttcggacccgtcgcctatctaagcataggaggaagtaagtatggtcttgttatagttgatgaattttcccgcttcacttgggtattctttttgcaggataaatctgaaacccaagggaccctcaagcgcttcctaaggagagctcanaatgagtttgagctcaaggtgaagaagataaggagcgacaacaggtccgaattcaagaaccttcaagtggaggagtaccttgaggaggaagggatcaagccgaagttctccgtccttcacaccacag

SEQ ID NO: 20962 - DNA, 387 bp, Zea mays
  unsure (1)..(387): unsure at all n locations
cgtgaagagtgccttcctcaacggaccaatcaaggaggangtctatgntgagcaacctnccggctntgaagataatgagtatcctaaccatgtctataggctctctaaggcgctttatgggctcaagcaagccccaagagcgtggtatgaatgccttagagatttccttattgctaatggcttcaaagtcggcaaggccgatcctactttattcactaagactcttgacaatgatttgtttgtatgccaaaattatgttgatgatatcatatttgggtctactgacgaatctacttgtgaagaatctagtaggatcatgacacataaattcgagatgtcaatgatgggggagttgaagtattttctaggattccaagtcaagcaact

SEQ ID NO: 20963 - DNA, 473 bp, Zea mays
  unsure (1)..(473): unsure at all n locations
agcttatcttgtaaatgactatctacaaagggcaaatgatagctcagtcataataaaaaatgtttatcagtggagaagagaagaaccaagcatagaactactttcaaactaaataagcataaagcacatttcatgaatttggtgctttagcattgttcaacacatttcccctactctaagcacgaatagtctttccatgctatatgaaatcctatgaacaaactngataaaacatttcatttaattcattctaggtaaactggagccatatcattgcttctatttgccataaagtaaatgcttttactcaatagcttatggctgatcaagccaaacattattcctataacttataaggcatacagagctnttatccagtannataaatgtctagacaatgtataacacttccttcgattgtnatacaagttcatcttgggttgtctaagtcanactttntaactttgatcatc

SEQ ID NO: 20964 - DNA, 410 bp, Zea mays
  unsure (1)..(410): unsure at all n locations
gcttcggcttcatctatgttatggatagcctttgaatctgtccatctcccttcaaccttcctggcagcttcttgactcatgtgaacagcaatgtgcccttgttccgaaggtatcttcatgcataaatatgctggatgaaaaattgcttcgaaggcattaagcgttcctcgaccaatgattgcgttgtatggatacgccatgtcaacaatgtcaaagacaacttgttcagttcttgtgttatggacgtaaccgaatggtactgacattgttattntgccaagtgtcacgatctgtcttcctccgaagccacaaagagggtgtgttgcatcatatattctgtcttctggctcttgcatctgtctgaagggcctntgcaaagatgatgtccactacactgcatgtgtcaatca

SEQ ID NO: 20965 - DNA, 431 bp, Zea mays
  unsure (1)..(431): unsure at all n locations
agcttggtntctcgtgctttggctcccaatagcaaaacgactctggctctntgatggctctcagtgaggagtcgtttttttaagaccgtttggtatggatccatcgcgtcgtcttcttcccgccccctccataaaagagtgcttctttcgtgcatgcattgctgccgtagagtanggaagggatacgctttcaaataaaatttagctctctaaattacaaatttaataagttgttaaataactttgacattaaaaaattgtgagttctcaaatagctgtaaatatattttgtagttttgtttgaatttatccacgtcataaatgtcacaaatctcaatagtcatcttcgttacccacataatgcggccttctttngtttatgagattgataaatgatccacatgtgagaggacacgtatgtagacgagaat

SEQ ID NO: 20966 - DNA, 311 bp, Zea mays
tggattgccagaagcttactgcgaagatccatgtctttgatcaaatcacgattggctatcgctactgactcagaagcgaccctacaaaatcctagtctattagcaatgtctaccaagtctacattgttagaatcaagtcttgaaaagagttagtgaacgtacctttgttgatgaaagcatcttcggcttgagctctggtcatagctatatcacccaccttcacaacaatattcttctatatcctagaaatatgcctgatgccctccgctgaataaatgagattttccagaggctctttacctttcatttac

SEQ ID NO: 20967 - DNA, 481 bp, Zea mays
  unsure (1)..(481): unsure at all n locations
cgacccggatcttaagtcacctgcggcatgcagcttttggaacagcctncgccttcaccttcgntgcaacaaggccagcagccagaaaggagccagtatgctccacaccagagggacttcagagagcagtccgaagctcgtacagtcaataacactgtgccagagtcaaagcacatctattgacaaatatcctaccttaatagcaatctttntcattcagttttattttctgtaataaaggacattgtttaaatttcatgtaattagtttcgttgaatcctacaaggagaaatatatttcttcacaagcttatgataacaaagaggaccttcgaactatcgaaaattcttcgaagcaacaaaaagtcgttctaaggaacgcagagtaagtntgccgaagtcacaaaaagtcgttccaaagggagcgcagtgtaagtnttctgctccaaagtcgttccanagggaatgcagagcatacagcg

SEQ ID NO: 20968 - DNA, 339 bp, Zea mays
  unsure (1)..(339): unsure at all n locations
atactcagcttcgcaaggtgaacgaaaatagagaatttgagaatggagttatggttcaagtgagtcaggttgatgtgataaaaatcaaggatgccacggtaaaaaggagatatgggaaggccgacgccgcgaagaatgaaaggagtgttaaccactgactcgtgggtatcttctgttgggacagtagtcccatggcaagaacgccaagaacagagttcccgtggagggagaaccccgatggagacaaagcggagaagctcaacttcagaaatcacagacatatggttacctgcgaagggtaactgactgttgggatcgatggcggngatcactgtaaca

SEQ ID NO: 20969 - DNA, 418 bp, Zea mays
  unsure (1)..(418): unsure at all n locations
atcttcggagaaacccgacctcgttgcaacatgacaccagaaggttcaacccaaccagccgtggatgaattcagaattattgctgagcatatcagtacaagagacctggttcaggagtntttggctttcagggtttttcctagtttaaaagaatgggaaatgccgaatctagagggggagaagaaagaatgggaacttgtgcggttaccttactattacaagtttaagaaatactntaaaacaccttgccaagagtggctggatacaatcgatatgatgtgcaatgaaatactcggcaattactccaacaaagaagatcagttgatgactgctgtcttcggcacccgtccgaagcgaagactgaatcgagtgttgacgccttgggttttgataccctgactacgaaatctgaataagg

SEQ ID NO: 20970 - DNA, 442 bp, Zea mays
  unsure (1)..(442): unsure at all n locations
agctntaatacacaagcatatgaataacacactatctaagcttaaactaacacatcaccccttaggataagctatcctctctcccccttagacatcaaacaccaaaaaccatactcaagcaagaacatatgatgatgtcaagggacagcagggtgttaaggaggaaaaacgactatcaaaactcccccttacttattgaacatatgcactatcaacatttaggtaagatacatatatgcaaaaagattaatacttcctttngtacctttaccatgttgtagtgtacttcccatcttgaaagtatttaatctttcgagagcttctccacacttgtgcctgattctttatcctaactttctcttgttgctaagacatcaaacttagaacaagtcatagtattgggcacaagaagaaacttctattctaatgattatcaaaagat

SEQ ID NO: 20971 - DNA, 472 bp, Zea mays
  unsure (1)..(472): unsure at all n locations
tcatatcatctctctgccctgcatatcttgacaagcatattttggtccccatcgcttgatgggttcatcaaggttagacaacaaagatctaagaacccaaatgacctttgtgttagcacttggtaaactcattacctttctagcacaagttgcaattttgggttgcctagttacatgtgaattaattgacaagctagaagcgggatagttaccaatgggacaatccttgcattgatgtcccttctttcggcatatgtagcagaggcgatcttcaagtcttgaagatttcttctttccttatttcttgcttgctacattgttagttaatattttcttttctaaagctatgcctttgtgttttacatggngacaagacttcactaagtgttccttcttagagcatttaanacaaagtttatcatcctttgtaataatcatgccattcttaatatagggatatgacctagtcaag

SEQ ID NO: 20972 - DNA, 434 bp, Zea mays
agctttcatcgcttagcagacaggcaaaactcttatgcccctcctcatcttaggatttagggcgggtgcattccgccacccggccggagatttcctctccgacacattccatcctccccgcacaacccattctcatgggctgtcattttccacgtacagcccacgtctagctaaaatataaaaaacataaatgacctgacctcaaagggattcgaacccacaacctcttcatcaaatgcaagtagtatctaccactacaccacatgtgtgtttatgtttacatctatgacagaacaaacatctactacatctttctgcaagcctaccctacttacccttgacaatgcgtaggagtagataagtatcaccgagattcttgaattattattttggatggaatgagcagtatttaaagaagaaccttgcatgcaatt

SEQ ID NO: 20973 - DNA, 462 bp, Zea mays
  unsure (1)..(462): unsure at all n locations
agcttganataaaggtgtgataaataaatggtatatagagctgttgtatatgtaattagtctttgttcggttaggagagaattgagaggggttgggggagatattaaaccccttcctattcaattacaaatagagagatttaatctacttcaacacacctctaaccgaataaggctttaaggagaaaccgaacattctccaaataaccaacagtccaatcaaaatgtgtatagggggcgtggttggttgctatgcccgcgagagctatgctcgcaccagcctgtgcgacccgtgaacctccctcccccgtctcccgcgtgcagatagagatgttaaaaaaatatctgagttaggcccgcacatgtatgctacgttcaagccgtgaaggctatcaatcacatacgcatacgcggttaataacacataccgctggcctaggcgcgaccagccgagcaactaata

SEQ ID NO: 20974 - DNA, 386 bp, Zea mays
  unsure (1)..(386): unsure at all n locations
ntagtggaatagtcataaaatgctctcaagaatgaactntatttacatttctacccctgggataccaaaaaccctaattggaaccctggaaaaccctaaatccaaaccctaggggcctatgtgcaaaaatagtgcacatttggactaaagtgtgaaaactactatgataaagcatattaagtcatatggttacaaaattagggatttgcaaatgataccctaagtttgtgttatttgaaaaagtaccactgacctttattagcctaagtctgattcagtgtttgagcacaacttgagcccttgtactttcaagtctaaggttttgcccatgtcaccacatcaacttgagacctataaagagaaaacttttttaaagggtagatatt

SEQ ID NO: 20975 - DNA, 425 bp, Zea mays
  unsure (1)..(425): unsure at all n locations
cgcttcttgctntgntatcatanaattattatttgtattgatttatcacttccgcattatttgaaagctatactctttactatcaagaacttagttnttatactccgataattgttcatcttgttctaaccactaatcaaaggatctagttgggggataaagttttaattttcaggtttcgcctatccacccccccccctctaggcgactttcagaaggtcatgaacaaaaatcacgaaggtcgtaccatcgtgaccagagttgtgaaatagtgaaagacaaaatataaaatatataacatgaaggaataatatatcanaaacacataaacttattcatatatttcattgacaaactttaaatattaaacatgacatttaatcacatttataccttcgtcttgacataaggcaataatccaagtg

SEQ ID NO: 20976 - DNA, 376 bp, Zea mays
gaccatgaagagagatcgagctcatggacaagtatcgatcatcttttatccaatcttagtgtattcccaatacagcacatgtgaagaagaatattttgtttgactactggcaatgtttaaggcaatggaaatttacaaatctgatataatcgtggtatatgcatgttatttaaaggagacttcgtctgcagtttactatatccttcagttgcacacatgctagcttacaagtgccacacttatggttctggattatgatcacatgaggtgcaatacaaaaatttaatattgcatctatggtctgaaatgtaaccttctctttgcccctaattacattaaattatgttccatgttcagttagtgatggcataatctg

SEQ ID NO: 20977 - DNA, 437 bp, Zea mays
  unsure (1)..(437): unsure at all n locations
agcttgtacactgatgatgccattgtccttgtccacctggacatgcaagatgcatgcatattgttggacatcagaattggcggaaggtcggcgacgcctcgattaaattgactcagccgattatccttatctcatgcatgatctaatcacgtgaaatctgttgactatcgtctaagaacggatctagacccgtctatatatatgaagggatacgaccgattgagaaaccccgaacacattctaatcaaactaatctatttacctatatttatctttcatgccgtaggagtagacatagcgtagctttagtttaaatttatttgtgacctgccacaatcatcttccttcgactctacgccaactagagacgccctgngtggcctgtcgatctcggggcacgccttggaactctccttcttgacgagatctctccccga

SEQ ID NO: 20978 - DNA, 404 bp, Zea mays
tgccaatacttgtcaaacaacatcatctgtcatcacagcatctgctgaccataccagtaacttgggctttcgcatgctgtggactggatatgattggacctttcaagatagctcaagggggatacactcatgtattggtagcaatcgacaaattcactaaatggatagaattcaagcccattgcttctttaacctctgctaaggccgcggaattcatacaagacataatattcagattcgggataccaaacagcatcataactgacttaggatccaacttcacacgttcagagttcttcgacttctgcgagcaaaagagcattcagatcaagtatgcgtctgtagcacatcccaaggccaacgggcaggttgagcgagccaaccggatgatactggatgcactc

SEQ ID NO: 20979 - DNA, 274 bp, Zea mays
  unsure (1)..(274): unsure at all n locations
actctctctcgtatgtcatcatttncggactcggtctctccttgtgtggccacatatccagcgcaacatacgcatctcttgcacacacaagtgttggacatgtcgtcctttaatgggccaacattctgctccatacaacatatccggccggaatgctgtncttgagaatttgccttttagtttgtgtggcacccggcggtcgcataagacacccaccgctttgccgcacttcaaccatccagctttaattctatgactgacatgctcatcgatg

SEQ ID NO: 20980 - DNA, 471 bp, Zea mays
  unsure (1)..(471): unsure at all n locations
actagcttaaggggaccatntagatacaatgttcatttgagaagacttgacttgtagcgcatgccaagcatggaagcaagttggtgcccatcatccacacaagaacatcatgacgactgacaggccactggagctcctacacatggatctattccgaccgatagcttatataagaatcggcgggagtaagtactggctagctattgtggatgattattctgcgctcacttgggtattctttttacaggaaaaatctcatacccaagagaccttatcaggattcttgagacgggctcataatgagttcggcttacggatcaagagaattagaagcgacaacgggacgaagttcaagaactcacaaatagaaggcttncttgatgaggaaggcatcaagcatgtgttctcttctacctacacgccacaacagaatggtgtagtggagaggaagaatcgaactctattggacat

SEQ ID NO: 20981 - DNA, 325 bp, Zea mays
ctcagcttctaagggagaacacgtgataagttggactaacgtgcaattcgtattagatataccttgtgcagcttgtcaagcaggtaaacaagcgggaggagcgcatcacagcaagaatgtgatgaccacttcaagacccctggagctgctgcatatggacctcttcggacccgtcgcctatctgagcataggagggagtaagtatggtctagttattggtgatgaactttcccgcttcactagggtgttctttttgcaggataagtctgaaacccaagggaccctcaagcgcttcctcaggagagctcacaatgagtttgagctc

SEQ ID NO: 20982 - DNA, 218 bp, Zea mays
  unsure (1)..(218): unsure at all n locations
gtccatatgctccacaccaaaaggacttcagagaacagtccgaagctcgcacagtcaacagcactgtgccagaagtcaagcacatctattgaccaatatcctaccttgatggcagtctttttcattcaggtttattntctgtgtaataaaggacattttttttagatttcatgtaataagtntcgctgttggccacaaggaaaatatactttcttcac

SEQ ID NO: 20983 - DNA, 296 bp, Zea mays
tattgaagctataatatttgagacctaaattggtataattcacaaattataataactttgatcaatcttgatcgttccaaaaaagataagggctgttggaaataagttattacagttgctaaatagcttaataataagttggtactactgctacaccaatagattatttaaatagtcactatacttctgttaataagcctaactattgactattagtactgcatcctctataaaacttcatgcgtctgattaaatatgctagaatggcttactttatgacaaatgctattatgaca

SEQ ID NO: 20984 - DNA, 362 bp, Zea mays
  unsure (1)..(362): unsure at all n locations
gttcatcatccacaccagaacatcatgacaactgacagaccgctcgagctactccacatggacctattcagcgggaagtagtacttgctagttattgtggatgattattctcgcttcacttgggtattctttttacaggaaaaatctcaaacccaagagactcntaaggtattcttgagatgggctcanaatgagttcggcttgaggatcaagaaaattagaagcgacaacgggacggagttcaagaactcacatatcgaagactttcttgcggagganggcatcaagcatgagttctcttctccctacacgccacaacanaatggtgtagtggagaggaagaatagaactctattggacat

SEQ ID NO: 20985 - DNA, 459 bp, Zea mays
  unsure (1)..(459): unsure at all n locations
ctcagcttagcatggcgattataattattgccatctatcatttaatgtaaaaagtacccgggcttatataccttatataagaatagatgacctccagtctacacatgaaaatgatagaatgaagtatcgcttatgttaaaacttggatacttagagtgatttcacgtgttattcatgcgacatgtgaaagtggaatgaaagatacactagcatattattggatttataggacatatattttggagggtataagtggcatatgttgtgcctcataacantcataaattctgaggtatttgcgtatactagttctttctacacacatcactaaatgccacggctctcggatacatatcaatatcgaaagattatcgaaaataccggatttcaatccgacgaatagacatttggttcaattcataccaacgattctatatcgatcgtatcaaaaagcgatat

SEQ ID NO: 20986 - DNA, 411 bp, Zea mays
  unsure (1)..(411): unsure at all n locations
gcttctgtgatcgtttcaacagggaaggagactagactagtgggaccttactacagnggcccaaacgtgcaacacggaggagagaatggctgacaagccggtactctcgggctgacaaggtggtccttctggagggccaatgtgggcgagagataaattgttttagatttccaaatattaaatatcatcctaatgtggatattaatcctactaaattatggactattattatttattcaccttctttgtttcaattctagaagtaatanatgactattacacattcttgtctcattgtctcttttatgaatggatttacaactctgacacagatttaaattatgataccttattctaataggatgttcaccacaatatttattttgtggctattntactagagtaacatta

SEQ ID NO: 20987 - DNA, 496 bp, Zea mays
  unsure (1)..(496): unsure at all n locations
ctcagcttagtctcacggtagtaccttngcctgtgataagtgagccactcctcttattactngaagaactngagaanataagggatggagaatggaatccttatagtgacaacacagaaaccgaaaccatatggtgacacaactaatatattgccagttatctatcttcctgagatcttcctgcagacagaagcaagaaggaaacaatcaaacaattgttcatggtaaataccaaaacanaatatagaagacaacatcatcaagctaaacctcagcatgcacaaatagtgttttctttcttttcatttgggcatgtatatcaatataaggatcttcttgtattatcacaacagatatttagaaaggcttacgggagaaaatatattaacatgatatataanttctacagcgaanagggtgtgccanagaaaacataatanatttgatgcagaatgggactcaagtactcaacccatcgttntaagcatgtaacaac

SEQ ID NO: 20988 - DNA, 491 bp, Zea mays
  unsure (1)..(491): unsure at all n locations
taactcataccttgggcctacctttttctttgaacctgaatttaccttataatgctttggtatgtacaggatgacgaagccgaagaacaatgatccgaagcttggtggatgatctgaagcttagcggatggtggtgaagctaaagacattgctatgaaaaaacttttagagaaacttttgaattattcttggtaaanatattgtaatttaagaatcagatactactctataaatttgtccataccttgtaatatatttntacctttccgtccatgaactgctttgatgtggacgaaacttgtatttttttgagccgaaggcgaaaaacaccttcccatcttttcatacacaacgaagcataaatctgcttcttttcctttcgccgaagccttatcattaaagccaaagtaaatgtctgtatttgatgatatgatgatgatgatcctatgtatgtctaaatgaatgtatatgaatacaatgaatgatgtgat

SEQ ID NO: 20989 - DNA, 423 bp, Zea mays
  unsure (1)..(423): unsure at all n locations
tctaaagggagaacacattctaggattaacanatgttcattntgagaaagacttgatttgtagcgcatgccatgcanggaatgcaagtggagcccatcatccacacaagaacatcatgacgaccgacaggccgcttgaactactccacatggatctattcggcccgattgcttacataagcatcggcgggagtaagtactggctagttattgtggatgattattctcgcttcacttgggtattctttntacaggttgagaatttcaagttcgccctattcacccccctctaggcgactntcaattggtatcggagcccggtgcttcattagagcctaaccgctcgaagtgatgtcnggagatcacgccatgaaagagatggagaccggcgaanagcccactacaagccacgggagcacttcat

SEQ ID NO: 20990 - DNA, 418 bp, Zea mays
  unsure (1)..(418): unsure at all n locations
ccttgaactaagctctctgtcagcgcccactcactgagagtgcaaactgcctcatctatattaatggagccccttgcgcaagtggaggtaatggtcgtagatcaatccagtatagcttcagctcttcgaaggctttcttgtgagctggcccaattgaaaacttcgctgacttatatttcaagaaggcagttttttctgctgactaatataattattcatgatgcgtcttctgtcactgtgggcccctttttggctgcggctcataaaagatacttcatctgctggatagctcatcccttcgcaactaaccgcaagactgccttttactcaaactttttgattaatcagctactgcgaatacaagttttgaacagatggattctgtcnctttcataatctcacgagtaccatttgcatt

SEQ ID NO: 20991 - DNA, 192 bp, Zea mays
gaagaagaagaactataagaaggcgaagggcgaggcgcatctatgcaaagagtgggattcggattgctcctctttcgactccgacaatgaaagactcgccgccaccgcctttaacaagtcattcctctttcccaacgagcgtcacacatgccttatggcaagggagaagaaaggatgtactcgaaactctac

SEQ ID NO: 20992 - DNA, 331 bp, Zea mays
  unsure (1)..(331): unsure at all n locations
tgatgacttctcaagatacacttgggtggtctttcttcatgacaaatctgaagttgcatctatattgcaagaagttgcccagagagcacaaaatgaatttgatttgcagattaagaagattagaagtgacaatggcaaagatattgacaacaccaacattcatgagtactgtgatgaaattgggatcaagcatgaagtatctgccacatatacacctcaacaaaatggagttgttgaaggaaanatngaccttgatcaccctcgcaaaacaatgatgatgagttaacacaccggagaggtctgggccgagctgcaacactgcttgtatgca

SEQ ID NO: 20993 - DNA, 233 bp, Zea mays
  unsure (1)..(233): unsure at all n locations
agaaatntctagaatcaagaatattgagctcatgccttagtctggtaaaagaatggtcatcaagtggcttggtaaagatatcggctaattgatctttggtattaatgtaagaaatctcgatatcccccttttgttggtgatccctaagaaaatgataccgaatggctatgtgcttagtgcggctatgctcgacgggattgtcggccatcttaattgcactctcattatcacat

SEQ ID NO: 20994 - DNA, 491 bp, Zea mays
  unsure (1)..(491): unsure at all n locations
ctcagcttacctggtgcttgtcgtcattcttgcgggattcaagtttgagttaatatggtaagccgattcactactcatgctattgattcgatgtccggaatggttatatatatatataatggtcgatgattatcttgtttgcaacgtatgcattgtggcggcattagacatttgttaaaatgatccatatatacggtatgtggttaaatcagttatacaaaggacctgtctagtgtttacaacgtctaactgataagtgtcgtcagtattgcttgtgaaggattgtgttcgtatttgacaaataatcgtgtcacgtaaagcttatggttaaatgcatattatgatagaaatgtattactgaatatataaatccagtatgaatggattgataataggaaaagcanggtaagtattntaatcgactcgcgggcgggattaccagtgtntctacggttttaggagttaaagctataaatttatggaattctatt

SEQ ID NO: 20995 - DNA, 363 bp, Zea mays
agacccttatcaacaaaataaggagctacgaaagcacacgatggacggaccatgacgtcgtccgactgatgctaaggtcctttaccgttcttgatcctcatttggcgaataatattcgtgagaatcccaggtacaccaaaatgtcgcccgaagaagtccttggaaaattcgtaagcgggcgaatgatgatcaaagaggcgaggtacgtggacgacgcgttgaacggtccaatccatgagcctcaacccattgctctcaaggcaacaaggagcaaggaggcgttacctagtgaaagggaattaggcttacacctagttcctaaataattttggtggttgaattggccaacacaaatctttggac

SEQ ID NO: 20996 - DNA, 253 bp, Zea mays
tttccagcctagctccatggagcatcgaccacccataacaagaattaaaccaccagcgtatgataggtcattcagctttaccctgctctgcatgtttgtccaaaagtgaccaccatgtgctcatgtagcataacacatccatcgtatcactatcatatacctgctgaattctgaactatgggcgattctcagtattggagggccaccaaatactggatatgaacacttaacaattgctatatgtatatcgtga

SEQ ID NO: 20997 - DNA, 451 bp, Zea mays
  unsure (1)..(451): unsure at all n locations
gagatcagcccagaaagatttactgcatattctgtggtgaagacaagggccacactaccaggatgtgtcacgttaccatctagaagcaaaaggagatagcagaagctgcagcacaacaaagtcagccgaagcaagtcatgcatactgcttcgtatcattcgccttacattccagaatatgtaggcaaccaccctgcagcttctggtgcttcggcaagccaaccccaagcatcttggcagcagccttcgccgccaccaccaacacanagaggccagcagccagaagggagtcagcgcactaacctctagcgggacttcagagaggagtccgaagctcgcacagtcaatagcactgtgccagagtcgaagcacatttactgacanatatcctacctcgacagcagcttttcgcattntcacattcagtattgctttcttnttaatatggaaca

SEQ ID NO: 20998 - DNA, 180 bp, Zea mays
  unsure (1)..(180): unsure at all n locations
tttactttggtgacatagctgctaaccggtatcatttatgtgatacttgttgtcatttaaaggccaaacttctgttacgattgacaacttaatatttaatttccaattgtaggtatgaaccaccaaattcaactgttgttcttcgtgatactggtgaagacactnttctcagagctcctg

SEQ ID NO: 20999 - DNA, 288 bp, Zea mays
atagattccgttatcaagatgaataccatcaattcctgacctcgcgcgagtgctagaaaaaacactcgactttaccgagatcctaatagcaagcagctactcgactacgtactataccatctcaaaagggaatctgagttcatgaaactagaagtttcaagcaacttctacacataagtgcacattacaatggatgaggacatcaacaccaacatgagtacatctacaccagcatcaccttcttcagcctaggcactatcttttccagtccaggcgccaccccttcca

SEQ ID NO: 21000 - DNA, 143 bp, Zea mays
tcacaatttatcatatcaggccatagcagcatactgatgatacatttacatagtgacacataccactaatgcccatgccatagtatggatagccttttgatagaatattttcaaaaagaaagcatacgacaactggatgtgac

SEQ ID NO: 21001 - DNA, 357 bp, Zea mays
ctctcgctgctcgaaaacataaataaatctaagtgaatacactagggatttcacacgcccatcccgctttcataaagagaaagagacctatatcatacatgcttcatattgtggagttgaagtcactcttctttttcttatagaaaggcggtactgttcaaggctttcctgaagacataaaagtaacacgttgcttaaccaccactgagctttccgctcccgtggcaccattgtctttttcagagacacatctacacaacacatattttccttgtcccggatgttgaatacactaatttcataccacacatactcatcattctattgacacggactattcgaataagttgaactcta

SEQ ID NO: 21002 - DNA, 336 bp, Zea mays
  unsure (1)..(336): unsure at all n locations
cagaacatgttatgccacatggctagatttatgtgtacaaataacattgctgaataccaagcccttctcttggggcttcggaagctaaaggcaatgggaataagaagggcgatcctcaaaactgactcccaagtcatcttcggccatggagacanaagcagcaaggcaagggatccgaagcttataaaatatttggacacagtccgaaggttggaggcctctttcgaaggtttntcttgtaaaaatattccaagaggggaaaatgagcatgcagatntgttagccaagtcagcagcacaagggctccccctaccttcggaagtattcttgaacaat

SEQ ID NO: 21003 - DNA, 332 bp, Zea mays
  unsure (1)..(332): unsure at all n locations
tatttctttgcgatgcatgaaatttacacacataccggtttttaacctttggcgaagaaacaccttcccttcttttcatgcttcataaagaaagagatcccttatgacaaggctggtaaaactctatttcccgaagctcacttcgtgccttagcacattntcaattngacgaagcatttgtcgaagatnggattcgtattagattcttgtgtcattaatgcaatatgatgtatgatgtaatggtatgcanaatgatgagatgatatgatgcanaatgatgaggatgccaaagacacacacacccacacgcccacactggaatacacaagctc

SEQ ID NO: 21004 - DNA, 306 bp, Zea mays
  unsure (1)..(306): unsure at all n locations
tagtgagtactctaaccatgtctatatgctctctaaggcgctctatggactcaagcaagccccaagagcatggtatgaatgccttagagatttccttattgctaatggcttcaaagtcggcaaggccgatcctactttattcactaaaactcttgacaatgatttgtttgtatgccaaatttatgtngatgatattatatttgggtctactaacgaatctacttgtgaagaattagtaggatcatgacacaaaanatcgagatgtctatgatggnggagttgaagtattntctatgaatttaagtc

SEQ ID NO: 21005 - DNA, 461 bp, Zea mays
  unsure (1)..(461): unsure at all n locations
gtcttggctgtctaactgcttgtcgntgtcaactgttagttcggacggtactccgaagcggcaaacaatgttntgccaaaagaatttctgtgcagtctttgatgttattgtggaaacagctcttgcctcgatccatttggtaaagtactcgacagcgatgaaggtgaacttgaggttcccctgagccatgggcaggggcccgacgatgtccaggacccagcgctggagaggccatgtgtgggcgaatcagtttgtgaattgcgaggngctgtctgatcgaggagataacttctggcaggcttcgcatgaccttgtgacccgatttgcggcgtagatcattgcgggccagtagaaaccttggcggatcacctttgcggctagggcccttggccctgcgtgagagccacaggtaccactgtggacgtcgcgcangaattggacgccttcggtctcggtgacac

SEQ ID NO: 21006 - DNA, 352 bp, Zea mays
  unsure (1)..(352): unsure at all n locations
acaacaacttatcacccctagtcagatggtcaaacagagagagtgaaccaatgtttggaaacctacctccactgttttactcatgcctgtcctctcaagaggaaacactggctttctgtggcagagttctagtataacactatgtaccttcttgaagcttacccctttcaaaagttcatatggatatcccccagacactttggtatatatatcacggattcttgtatcgtccnctctctttatgaaatggtaaatgaaagaaatcttatgactcaaatggtgcaacagcaactagccagagctcagcatcatcagagacaacaggtcgatcgccaccattctgacagaaact

SEQ ID NO: 21007 - DNA, 227 bp, Zea mays
tctcactggtagtttcgccgccaatgggcttgatatatatcaacaggaggcaactccccagagtataaccagatctatggagacgagctccccctcactttttcctttggcccctgacaaacacaaaatgccttctacttaacaaaggtaacctgattgaactcacagtctacccctagaaaacttcaggttctgataaagatcaagaagttacaaaacactatttt

SEQ ID NO: 21008 - DNA, 288 bp, Zea mays
  unsure (1)..(288): unsure at all n locations
agtaccctaaccatgtgtataaactctctaaggcgctttatgggctcaagcaagccccaagagcatggtatgaatgcctaagagattttcttatcactaatggcttcaaagtcgaaaaggctgatcctactttattcactaaaactcttgaaaatgacttgttcgtatgccaaacnttatgtgatgatattatatttgggtctactaacgagtctacatgtgaagaatntagtatgatcatgacacanaaattcgagatgtctatgatggnggaggtgaaatatttct

SEQ ID NO: 21009 - DNA, 142 bp, Zea mays
gacaggatatgtaacgcatgccaagcatgagagcacgttgggtcccgacatccacacctgaacatcatgacgaccgacaggccacttgagctactccacatggatctattcgagccgaatgcttacataagcatcggcggga

SEQ ID NO: 21010 - DNA, 455 bp, Zea mays
  unsure (1)..(455): unsure at all n locations
gtaaatgcgaattgactttagcctagctactggtgcatatggttcaccaaaatccaaaccttcgacttgtgaatatcccttggccacaagtcgggctttgntccttgtcaccacaccatgctcatcttgcttggtgcgaaagaccaacttggttcctacaacattttggntaggacgtggaactaaatgtcatatctcggtcctagtgaagnntgtgagctcctcttgcatcgccaccacccaatccgaatcttggagtgcttnctctatcttgtgtggcccaatagaggaaacaaaagagtaatgttcacaataatgagcaacacgagatcgagtagttacccccttttgaatatccgcgagaatggtgttcatggngttgatctcgttgattgcttggtggactcttgggtgtggcggtcttgaatcttgcttatctcctcatcttgatcatg

SEQ ID NO: 21011 - DNA, 340 bp, Zea mays
  unsure (1)..(340): unsure at all n locations
gcataacacattctaagaactcgatccaagaagattaaatgacaccagattgacactttaatttgcatggatgccaggaagaaaccgattattagtacaagaaactaattgagagggtagaatatataaaggggttgacatgcaacattcagcatgcgtccacttgccaaaaccacatgataagtattctccttgctttgaaccatacgaacaccacaatggaaacagaaacaatgaccttgcagatgtgtattgtccacccctaagaatactacacattgtgacatatnacccagttaattaatgtacaatccaacctgcttttcactatatgtgaaca

SEQ ID NO: 21012 - DNA, 365 bp, Zea mays
aatgatgaagttgctattcttaatgctcaacttaagactagccaaagtgattttgaaaaactaaaatttgctatggatgcctacaccggtggtagacacccctcaattaaggatggacttggcttccagagggaagccaagaacttaacaagccattagactcctatcttcaccaaggagaaagggaagggctctatggctaataagtgtaagaagaatcatgctttcatgtaccatgataggagatactctagaaatgcttttagaagtaatgatgtatttgattcacatgcttatgactcttatgctatgactgcttctagttctcatgttatgcatggtagaaatgtgttagaagaaatgta

SEQ ID NO: 21013 - DNA, 426 bp, Zea mays
  unsure (1)..(426): unsure at all n locations
ccggtggccagttttgaacttttgttagtataaacatctctcccacattggcgatttgagcaacctccgttgaaagctttctttgtcccgccaaaagaaaaggcattntgcatccttggtcttcgttcaagcaagtctaatcacacaagtgagatacaaacactgagtcgggagtatcaactaatttcatttaaatggctgggaaagaaatcaactaattggttggtagcccgcatggtactaagaaggtccttgcccttcttccatttggtaaagagatattcttaggatttgctggcacggaagtatgtttgtatgtcaaagttggaactagaatcggggaactctgtaaagtagctttcatagctgtcacatattngtgagccctatgggtagatagaagaatgtacccgacatcatccacct

SEQ ID NO: 21014 - DNA, 490 bp, Zea mays
  unsure (1)..(490): unsure at all n locations
taagtagcataggccaataatatacgaattgtctcaagcctagctacgggtgcataagtttcaccgaaatccaaacctttgacttgggagtatcccttggccacaagtcgggctttggtccttgtcaccacaccatgctcgtcttgcttgttgcgaanaacccacttggttcctatcaacatttgattangacgtggaaccaaatgccatacctcgttcctagtgaagttgttgagctcctcttgcatcgccaccacccaatccgaatcttgaagtggcttctctaccctgtgtggctcaatagaggaaccanaagagcaacgctcataanaatgtgcaacacgagatntagtggttacccccttatgaatgtcgcctacgatggtgtngacngngtgatctcgccgactgcttggtgactctngggtgngcggccttggtcttcattctcttatatgatcatttgatctccccttgatcatgccgcatc

SEQ ID NO: 21015 - DNA, 496 bp, Zea mays
  unsure (1)..(496): unsure at all n locations
actctatctccaatctgaaactctctgtctgatctatgcttatcagcctagaggttcatcctatttcgagtagctaccaacttctcctttagcatgctaacatgtaactgtctgtcagccaacacttcagtcacagaactaggaggaaccctagaaagcatatgagcaacagcaaacacatggtcatagccatacaatggccttgaatggagaacaccccaaagctgtgtgctatgaagtattgtaccaaaattcaacaagggccaaccatttcttccaagtattaggtgcctcatgaatagaacaacgaagatacatttncaaacactgattcactcactctgattgcccatcagttgngggtatatgcgtagtgagagcaatttgatcccaagcctgaacaagattncaaacaattagtgaacactgcttatctgaaccaagactatgtgtcatgcactaacaatattgcagaacaatgtccactctacacagg

SEQ ID NO: 21016 - DNA, 443 bp, Zea mays
  unsure (1)..(443): unsure at all n locations
accgccccttaatgcggtgactatcaagaacatgtttcattgcctcgtattgatgttcttttcgatcagttggtcagagccaaagtgttttctaagatagaccttcgcttcggctatcatcagatcaagatacgggcaagtgatattccgaagacagctttctcgaccagatatgggttgtatgaattcttggtgatgtcttttgggctgactaatgcgccagcatatttcatgtatctgatgaattctgttttcatgcctgaattggataaattcgtggtggttttcatcgatgatatcccggtgtactcaaggagcgaagaagaacatgctgggcatttgcatgtagtgcttcaacctctgcgagagcaccgtctctatgccaaatngtcaaagtgtgattnttggctaaaggagataaattcttgggcacactatctctc

SEQ ID NO: 21017 - DNA, 387 bp, Zea mays
  unsure (1)..(387): unsure at all n locations
gaatagagaatttganacacacttaaacttatgtattgcacccnctttatagtatggtgattcctccaatcaaattcaaaatataagaaatttaaaacatcctttagagtccatcaccacacatcttcaaaattgggggctccacaatgcaataacacatctccgtacttttatcacctgcttgtcaacctaataaatctcattagacctctaattatatggtcatntataaaaaccataataggtcttgattgcattacanctcaaccattatgaaggatctaaatctngtatgtcctacatctaagacnatctttcttcattgagatgtacaaaaatataatataatgtggtaataatatgtgtgttcaaaagtatcataattat

SEQ ID NO: 21018 - DNA, 318 bp, Zea mays
catatgcttcttgcagtattatatgcatcatacggactaatggttccggtgcgatgaattatttggcttctatagtgtaatagatagtcatgtggataatggtgcattgtggtagataatcatgttgataatggtgcatcgtgctaatggtgctctaagattgttctaaattggcatcttagttacattggtgttagcttgactggttcttaaaagtgaatagaggtcggtgatattcctgtatatatccactatttgaatggagttaactctgactatgtgcattgtgtgtatagcatatgcttgatcttgacacat

SEQ ID NO: 21019 - DNA, 303 bp, Zea mays
  unsure (1)..(303): unsure at all n locations
gatagagagggctacattntatatcctacatactatcttgagcataaaattatgaaaatacatgctagaaagcctcacaatgtttctcatcatgattntatgtataaaaacaaggcttctagttctaggcataccactcatatcaaaatgccttaganaaaaattcctaatgcatcaaatgagcatactatttcatttaanacgtttgatgcttcttatgtgctaactaacaaatgaggcaaagtatttgccaaatatgttgggggcaaacacaagagtcccaagacttgtgtttgggtaccg

SEQ ID NO: 21020 - DNA, 358 bp, Zea mays
  unsure (1)..(358): unsure at all n locations
ttctgagatctctggcctatggtaagaccaacacgctttgctgcccactctgatcttgtggtgatgttggcgcattgtcttactggggtagcggctacccccttaaaggagcattgaacacacttggtgaagatggngtcgaatttgatcttgactgatttggaagagttggaggttgccaaatggacaggtgcaagacgaaataatagcgaggaaaggtagtatagacggatagagagagcacgggagagaacccactacctaaaatatggcactcacctagagactaatgtcattgcggacaatggccacaacacatcacactcatcacagagatgcaatcagcatcacacataga

SEQ ID NO: 21021 - DNA, 370 bp, Zea mays
  unsure (1)..(370): unsure at all n locations
ccttatgcaacaattatagcagttgtttcttcaattctggcaactcagtgggtggcatccgggtaggcctcatggaaataggtgccgatcccgggtgcaattcgatgggaactcgatatcccgatgtggcggcattcctggcaactcatctcgaaagacatctgcataatcataaaccactgtgactttcttcaaaggtagttctatcatcgagacagcacatgaatgcacggtctcctggctgggcangtacaacgtaacgtcttcgaaagtaggagaatggatgcctagagttctgggagctacatccaacaccacccgatgctgagtcatctagttagcttccagaatgatatctacgttctctaac

SEQ ID NO: 21022 - DNA, 384 bp, Zea mays
  unsure (1)..(384): unsure at all n locations
actcagctttctgcattgggttctttcatatgatcatatggcagttaaaccacgttctcttgcttgagaattggatgttctggataaatacaaactatggcagtgtgcagcaagcaaattgttacatgggatggtccaatctttntatgttagctcggtgatgaaattttgtaaagttcattcctgaatcactaaattatagataaatctatcagaaatagcacacacaantttaatatgggctcagaaatgtaatgtctagacacttgatctataattggtgacagctataaattagtggntctattaacatgatcttagactgtaaatctattgtcttaccacagattntannttaatcctcattttaatggttggattcca

SEQ ID NO: 21023 - DNA, 282 bp, Zea mays
  unsure (1)..(282): unsure at all n locations
tggcacctctagaacttgttcattctgatctgtgcgaaatgaatggaaatttgaccaaagggtggtaaagatactttctcacttttatagatgactccactagatnntgttatgtgtatctcttaaaaacaaaagatgtaagcgtcaattattttaaagcctatnaagctgaagttgagaactaacttgagaggaaaataaaacgtctaaggtccgaccgatgtggagaatatttctctaatggtgtcgatgagttctgcgtggaacatggtattattcatg

SEQ ID NO: 21024 - DNA, 416 bp, Zea mays
  unsure (1)..(416): unsure at all n locations
tggttcaggtttatggtcggacactctccttctgcatttttggtcccatgactaanatttattcataggctgatgtttcattttagaaagctttcacgggtaaatactctaatcctgttatgctccggttggatgttggaattggagatggtggaattgaattggatccaataccaaatcagcctggctttggaaatcggatccaataccanatccagttcaattctaatgcaatcaaaaggtggagggtcngaattggagagtggaggcgtgtgtaaaagttgaataccggctggaattggtggatttccaattccaaatactgtgaccatccaaacaccagaattcgggtttgccaattccaattctgaattccgagtctaaattccaacatccaaacgcacttgtatatactt

SEQ ID NO: 21025 - DNA, 274 bp, Zea mays
  unsure (1)..(274): unsure at all n locations
ctggctgtggcatcgccgcttagcacatgtggggatgaagaacctncacaagcttctaaagggagaacatgtgataggtctaactaatgttcatttccaaaaagatagaccttgtgcaacttgtcaagcanggaaacaagtggaaggctctcatcacaccaaaaatgtgatgacaacatcaagacccctggagctgctacatatggacctcttcngacccgtcgcctatctgagcatangaggaagtaagtatggtctagttattggtgatgac

SEQ ID NO: 21026 - DNA, 476 bp, Zea mays
  unsure (1)..(476): unsure at all n locations
atgatatgatagtgaaaagcacgaagcaagaaaatcacattgctgatttacaagaaacatttgccaatttcaggcaagctggcctgaaattaaatccagaagaatgtgtttttggagtgaagaaaggcaagttccttggctgtctggtatcaacaaaaggaattgaagctaacccaagcaagatcgaagctatcctttggatggagccacaaagcacgaagaaaggggctcaacggctggcangaagattagcatcattaaacagattcatatccagatcagcggaagaaatctgccatttttgaaatactgaagtagcctaagctttcaatggggcccgcacaacaaatagcttttgaagaagtgaaacaatatttgattgattaacaacattaacttcacccgcgcccagggctccattgctcttatatgtggcagcttcgcattcttcagtgagtgcggcactgatacatgag

SEQ ID NO: 21027 - DNA, 409 bp, Zea mays
  unsure (1)..(409): unsure at all n locations
tgccttcgcttcagtctatcatccgcagtccaacggggtcgnggagcgtgccaatgggaaaatcttcacagctgtcaagaagatgctcctcgatgaanaaaaggcagatggaccgatttactaccggaggcagtctgggcgctaaacacaactgagtgcagggcgaccgggttcactcctttccgccttctatacggatcggaggcaatgaccccgcaagaattaaagcatgggtccccgcgtacagttccgtcagccatccncgacgtggacgaagccaacttanaagatctcattgacggagaccgggtcttcgccctacaggccctaaacaaataccaagcccagaccaaagcctggcgcgaccacgcagtcatcccgagagagttcagcgagggggacctcgtac

SEQ ID NO: 21028 - DNA, 300 bp, Zea mays
  unsure (1)..(300): unsure at all n locations
ctcagctatcnnatttaagactcnngtttgtagaaaagcttactagtagtggatccttatgccaaaattntactttacaagctaagtacatttcctgaatctagatttccctaatctagagcattcacttgtcctacactagcttcattttagcagctttagtttcacttggtatctacgatgagggtcgaagatctaatctttatatccgagaagtacggtgaaccgaatcaattaatacccaactatggatctcaaccacatgaaatatgtagcacttaacccttgcatatgtcaact

SEQ ID NO: 21029 - DNA, 339 bp, Zea mays
tcatacccctagcgagacctactgctacattcggatgcccgaagggctttataatgccacaagaagcttcagcaagatgactgctaaagtcctttgctcttatattggcaggaatgttctaacatatgtcgatgatatcatagtaaaaagtatcaagcaataaaatcacatcaccgatctacaagagacatttgccaattttagaaaggacgacctcaagctcaatccagagaaatgtgtcttctaagtgaagaaagggtgggtgtcttgtgtcaacaaaaggaattgaggctaacccaaacaagatagaagctatacttcggatggagccaccgaagt

SEQ ID NO: 21030 - DNA, 237 bp, Zea mays
gattcggattgctcctcgtacgactctgacaatgaaggactcgccggcaccgccttcaacaagtcgtgcctcttccccaacgagcgtcacacatgtcttatggcaagggagaagaagggatgtactcgagactctacctatgcttcttcaagtgaggacgaatctagtgatgaggatgacatagaatattcatgtttatttaagggcctagatagaaccaaggtagataaaatcaat

SEQ ID NO: 21031 - DNA, 400 bp, Zea mays
  unsure (1)..(400): unsure at all n locations
ttcatgttaattacttctttatctttattgagaattaactcttgaagctctaggtttctttccttttcaaggataagcaagtcttcttgagcatcaagagttgcttttcttttatctagcttttccattaattntgtgataacattgtatccatttaagccaaattctttaatcaatttatttttcatgggcaattgatcatcatcatcatcatttgaanaatcattactaaataaagttaccttatctccctttgcatgangcaagttggagtgtangagtcgtcttaaaggtggtgaagagttcgcgctngatgtagattggatggccacatttngccaccacttctcttcctcggagctagaactctcttcatcggagttccattctttaccaatat

SEQ ID NO: 21032 - DNA, 360 bp, Zea mays
gcaagtattcaaactcaagcatctgcttatatatgttaagaccgcattaactgaattgatctacaacctatacatcaaagtgtatcagaagataattgataatgttttatctttcattcaaaaataaaaaattcataatgaactcatagcttattaatgaacaaaacacacaagtttataccttgattgatgaaaaatccatgaattatcattgtccgtaatgcgattcgttccagaatcttgtgaagtaccttaatagtcaccaacaatcatacctatgatggcattcaatgaagatcgatgggagttcgacgctttgcttgcattcataccactgtgaataggagcattataattcac

SEQ ID NO: 21033 - DNA, 400 bp, Zea mays
  unsure (1)..(400): unsure at all n locations
gacaagctcgaccgcctgcacacgtggcccgaccgattccggccatcatcgtcgccgagccgcacctcgacgtgaccgccaggacctcccggatctaaccccgcccttcaccggaccttnctcgccgtcggtaagccacgccaccctgtttattccccgcggttactgtttcaaggtgggagggagctcgagggaaaagaagaagccggngggttntttgaactgtcagtgactcggatgaatagtcccgcaggggtataagttaaagacttaggtaagggaaagcccaggggtctcggtgtagactggttgttcattaaacctcttaaacattattcatttaaatgtagacaaagcttgcaaattcataacttagtttatccaaccaaattatgcaact

SEQ ID NO: 21034 - DNA, 374 bp, Zea mays
actcagcttacgttaaattcttcctttcttggctcgaagcttcgactttatgatgagttcactggttaatctggcaatttcggcttgggcttctgccagtgaaccgttcattggttgaagaacaaaatctttcttttcaagagcaggttcatgatctttgattctactttccaagccttcaattataacctcatttgtcttatctttgaggtcttgttgcatcctcaaggctttacttagtagcatactctgtgcaaaataaccttcataaaaaatcaccttcatcacagaacaataaaaagttgagggataaatgttaccttaaaattagaatagaataagctgccgacgatgtgctatcgtcggtagcgact

SEQ ID NO: 21035 - DNA, 426 bp, Zea mays
  unsure (1)..(426): unsure at all n locations
tctctgcgctgacgaacttcatgagctgctccatgggctntcgcgggtcgatcaagagattcgagccctactttcttcttctgctcctgctcggacagctgaagcccgcggtttgatgagaggtccgccgccggctttgcattctcagggtcgaccgcggccaccacgacggctgccatgggtttcgtcgcaatcgcaaccgccatccctgcccattntgagagcaccgtgcactctttcacatnccttctctttacgagcccacctgtgcagcagccatcgtctctacgagccatgtccangatgctgctccgacatacccagttgtcgcaccgctcttcttcgatggtgcctcgtctacctaatgaagcccaccagtacagctatcagagcccaggggtggnccgcatcgctggcaacaacatc

SEQ ID NO: 21036 - DNA, 498 bp, Zea mays
  unsure (1)..(498): unsure at all n locations
tctgttctgtggccaccacgcacatggttgatctcaaatattgttagacgnttttaggctggaaactaaagtagagtctgttggaaagtgaaactatcgccccacgactagaaagtggtgcccgactaattaacagagaaagtagctagctagtggtgcgcggcatttatacggacggacggacggacggacgcttattgagcagtgcatgaatgggaggtgtactgtatgtagttggcttgacttgggcctagcttcttcttgtgtggaggtggtgtgaaatgattggttgcgtngcgtggtgtaattaactgggtgaatactgattattagtaggtgagacgtgagagagagagaggnggacgagctggccgtgcaggccgggcggccgggtcgtagctaggggtttgcttgacagctagcagtgacaccaanagtgcaactaccaccacactagcagactagctacagctacccgatacatacatacatacatat

SEQ ID NO: 21037 - DNA, 452 bp, Zea mays
  unsure (1)..(452): unsure at all n locations
ctggctagtcttaatgctcaacttaagactagcattaatgatttcaataagctaaaatttgcaagggatgcctacacaatcggtagacacccctcaattaaggatggacttggcttcaagagagaagctaagaacttaacaagccataaggctcccattcccgccaaggagaaagggaaggcccctatggctagtaatgtgcaaaagaaccattgctttatgtattatgataggagacaaactagaaatacttataggagttataatgcttttgatgattttgactctcatgccatgnttgctcctagttcctcttatgtgtatgatagaaatggtactangagaaatgttgtcctaanagaaatgctattcatcatgtgcctagaaagaatgggtactcatgctctanganaatagcanatgaaccttctacaatttattgtgctttgaat

SEQ ID NO: 21038 - DNA, 475 bp, Zea mays
  unsure (1)..(475): unsure at all n locations
gcatgccaagcaagaaagcaagttggtgttcatcattcacacaagaacatcatgatgactgacaggccgcttgagctactccacatggacctattcnggccgatagcttacataagcatcggcgggagtaagtactatataggtattgtggatgaatattctcgcttcacttgggtgtttcttttgcatgatatatctcaaacccaagagaccttaaagggattcttgagacatgcttcaaatgaagtcggcttaatgatcaaaaagaatagaagcaacaaccggacggagttcaagaactcacaaatagaaggctttcttgaggatganggtatcaancatgagttctcttcttcctacacgccacaacaaaatggtgtagtggagagaaagaatagaactctacttgacatggcgaggaccatgctngatgagtacaagacttcngaatcggtttgggtgggaagcatcaaca

SEQ ID NO: 21039 - DNA, 431 bp, Zea mays
  unsure (1)..(431): unsure at all n locations
ctcagcttacgggctctcaggaagctacctatgggctnggatcgagcggatgatgacaaggaatggttcggccgtggaggttgtcctcgggcggctctgacgggtcgtggagaggtcgtccgagctatgggcgagctccggtgagtttggcgcggggcataggatgcaacggtgaagacagtctggctctgggacgggctttatagccgtggcgcgggcgtggccacaagctgcccgcggcgtgcggtggttcgcgcacgggcgtgctctgagcgccccccccccgagtgtcaacccgcgtccaacacgtgggagcttgcttctgccatggttcaacgacggatttaagctccttagcgtgcatatcgtggcaaaaccactgtgtatgggctcttcccttgctcatatactacctttgttatgtgagttcc

SEQ ID NO: 21040 - DNA, 512 bp, Zea mays
  unsure (1)..(512): unsure at all n locations
acatcttttccgatgttgatccatctatgcctctgacagattcaccatcgagatgtattctcgaatacaaccctcccacatttgccaaacatcttttggtaaacagatcctttcgttgttctaaagcaatactaatcatagaaataccttcttgaaaaacagggtgtcaaggaaagtaatcaatgtcaaagaagcgaatgcatgaatcgtttaagcattcaactcctatcacctactgcatcgagccagtgagaaagatgttataagcatcaaggaggtggcaaatgcaccagggcttgccttctgtagaggtgagtaggctccgtcccgcagatatcgaagtagaaacaattgccggcctgagaatgcgaaagtggtggtgtcttctcttcggtcacttcaatctcgtcttcgttntctaaatataaccatatacgtatatatataagaatgaatgccatgtaatgctcatgagagtgcgaagataatacagaattattatctaagtcttg

SEQ ID NO: 21041 - DNA, 395 bp, Zea mays
  unsure (1)..(395): unsure at all n locations
cacatgtgctcagcgacgatgccactgccagtccatgctagtcttagcaattaagcatgcatctagaccggccctctcttttgcaaaatcaactaaataaaagttgtcgtctaatacacccttaaaagctagtgaaccatcacatcttctaaagacagacacatctacatttggtaatagacaattatatcccatattacataattgactgacagatagtaaattatatccaagagaactcactaanaacacattagagatagagtgctcattagatattgcaatcttgcctaaacctttcaccttgccttggttcccatcaccgaatatgattgaatctngagaatcctttatcttgacgtangaggtgaacatcttctttctcaccgtcatat

SEQ ID NO: 21042 - DNA, 268 bp, Zea mays
cagctctattaaaatcaactaagtatagcggaccctctaacactcccttaaatgctactgaatcatcacttcttctaaagataagtacacctatatccgtaataagacactttgagcacatgttgcataattgagaaacaaaaaggcaagtataatctaaagaatctacaagaaaaatattggaaatggaatggtcaggtgatatagcaattgtaccaagttctttgaccaaaccatgatttccatccccgaatgtgatagctctttg

SEQ ID NO: 21043 - DNA, 366 bp, Zea mays
tcttgtagctggtgcccaaatgatatgtgaactgcgttcccctatctgacactatcttcttcggcacaccatgaaggcagactattcgtgacatgtataactcaactaacgttgctccggtgtatgttgtcatcacaggtatgaaatgggccacctttgttaaacggtccacaaccacccagatggaatcatatccggcccggttacgaagtatgccaactatataatccatcccgaactcatcccaacttcactgaagaatccgcagaggcttgaacaatccggcgggcctatgatgctctgctttggttctctgacagctatcacagatggcaacatattctgcgatctctcttttcatgccat

SEQ ID NO: 21044 - DNA, 293 bp, Zea mays
  unsure (1)..(293): unsure at all n locations
gcactattgtagctntggcgcttgcgagactgaccagcactggagcaagtacaatgatgtacttgtggagagctgaaccatgagcggagcgatacgaatcattactgatgttatagccggcatttgaactagctagctggactgatgcctccgtataggtgtacgatatagcatactatgtgcaaaagatccattagtgaatatactctcatcgcgatgcaatagtgaatatatggatgagctggtcctgagtatatgagaaggatgaacgaccgacgattaccgatcaactg

SEQ ID NO: 21045 - DNA, 400 bp, Zea mays
  unsure (1)..(400): unsure at all n locations
tgtatgccaaatttcatgcctcgtaaagaattgaactattaatagattatatattacattccaaggtaccatgtattacacatgttacattccaaatattnttacaatagcatctaatccctcttaagaactatttctgcagcttcgttcagtagctgatcgacaaccttgtccatgatggcttcggccattnttctaatttcatcgtcccccttcgggtggnggcccggagatgcctcagcaggttctgagggaggagaagatatgactatattactattacaaaccgcgaacaaagtctggaatcanaaatacaacagaataaaaccactagtaatacctatttgccctcaggctctgtgcnttctcagcagcctctgctatctttctagcatcatgg

SEQ ID NO: 21046 - DNA, 454 bp, Zea mays
  unsure (1)..(454): unsure at all n locations
tgtggaagccaatgccatccttaatgccagagcatctcccattataaagcatgctacgagcaaatataaatttctcattntctagttcatgctcggccaatttagcatctagtttagctatatgatcattttgntgtttaatcgtagcaaggtgatcatgaatagcatcaacattaatgtctctacatatagtacatatagaaacatgctcaacggtagatgtagagaggttgcaattatttaattcaccaatcttagcatgtaaaatagcattcttatctctaagattagaaatagaaacattgcaaacatctaattccttaaccttagcaattaatttatcattctcaaacttaaggctagtaagagattcattcaacatgtcaatcttagcaattaagctagcattatcatttctaagattaacaatcgaatcatcacanacatttgattt

SEQ ID NO: 21047 - DNA, 141 bp, Zea mays
cttctactttgaagtattggggccgaacccctctggcgtggtaacgtcgcagagactgctgatatcgcgccgagtgtaacaaggccacgtcctgagcctctttcaacttgtccagcgagtcttctcggctggtctgggtgc

SEQ ID NO: 21048 - DNA, 255 bp, Zea mays
  unsure (1)..(255): unsure at all n locations
aactagctgttgtgtggaatgccatcattgccagaatcaacttcttattatatgctagtgaagaagctcacaccaaggaagctgaagagagtctaataagtcgttggtttatgtggtatcacaatatttaaatctcctaataagctgttgctgggagatggaccattcaaggatttttagtccgtctctttggtgtgctaagtactttagactgaaacanatgtgtgttggtatgttcaagatcatgaactatta

SEQ ID NO: 21049 - DNA, 327 bp, Zea mays
tactcagcttctaagggagaacacgtgataggtctaaccaatggtactctcgataaagatagaccttgtgcagcttgtcaagcaggttaacaagtgggatgagcgcatcacagcaagaatgtgatgaccacatcaagacccctggagctgctacatatggacctcttcggacccgtcgcctatctaagcataggaggaagtaagtatggtctaattattggtgatgacttttcccgcttcacttgggtgggtcttttgcacgataagtctgaaacccaagggaccctcaagcgcttcctaaggagagctcatatatgagttgagctc

SEQ ID NO: 21050 - DNA, 266 bp, Zea mays
  unsure (1)..(266): unsure at all n locations
ctaagcttcctggacataatggtaatctcggaggggtcgggttcctgcccttcttccggatctaagagttccggaggatcggatccctcttncgctaattaaacatagccaaaaacaatacatcaaacatggtgacctttgtggagtgtgcaaatagttatactttattanttctgtgccctaataatttatntaaactatttttggtgcaaaaaatatcagtatataagtatatatggaaaaatgggagaaagagatgggaatag

SEQ ID NO: 21051 - DNA, 373 bp, Zea mays
ttgatcatcaagcctacatcgaccaagtccttaatcgactagactgagaactacaccgagactctcttctcgtgcaagtcaaccgtccggtctcagctttatcaatgtaacccagaagttggtacctaacagaggtacatctttttcgatgttggaaccatcacgcccatgatggatccaccatccagttttatttttgataacatcccatcccacttgaagcatcgtcttttgtaaaacaaaacattgtgttttctagagcaagactaacataagaaaaccttttataaacaggtgatcaggaaaagtatcaatcttccaggaatgaaatgcataattgttagcacacaactcctatcactaacgcataagc

SEQ ID NO: 21052 - DNA, 68 bp, Zea mays
gagttgatgaaagaaatacatgcaggcctgtgtggatctcacattggatccaggcccgtacttggaaa

SEQ ID NO: 21053 - DNA, 414 bp, Zea mays
tgatactcagctatgagattctcatcccacatgtgctagtcggcggtgccagtaccagcccatggtggtcttagcaattaagcaagtgtcgagttcaactctatcaaaatctatcaagtatagcagtccctctaatactcccttaaatgctattgaatcatcacttcttctaaagacagtgacacctacatcagtgaatagacaggtgtagcccattttgcataattgagatacagaaagcaaattgtaatctaaagaatctacaagagaaacattggaaatagaatggtcaggagatatagcaattttacccaatcctgggaccaaaccttgatttccatccccgaatgtgatagctcgttggggatcttgggttttctcgtaggaggagaacatcttcttctcccctgtcat

SEQ ID NO: 21054 - DNA, 427 bp, Zea mays
  unsure (1)..(427): unsure at all n locations
ttctactatgcacgaaccgttggtggtagcgcctgatcgcctgtttgtatcgcgcatttcggattgcttcttgccacctgtngttgtcgatgaagtccacatcttcacgtcgtagctgttcttgcgcagactcatcaaaagactggacccgtggggagcccataatgattntcggaggaaggcaagcttcagcctcgtataccagaaagaacgaggtctccccggtggctcggctgggcgtggtccagttcccccacaacacggatgggagcttactgacccaattcgcgccatgctcttttaagcagtcataagtgtgcgtcttgagcccactgagaatctctgcatttgccctctncacctgtccgttactcctagggtgagccacggatgcatagcatagctgggtgccgatgccctcgcaata

SEQ ID NO: 21055 - DNA, 247 bp, Zea mays
agtgggcgcgcctgtcatctgcgcgcgcagagcgcgcattaaatgcgcggcagagagacggtggcgcggagaataacgttgctccggagtcgcaccggacagtccggtgcacaccggacagttcggtgaattattgcggacgaaccgttggctttttccgaagctggcgagttcctgaaggcgaacttcattggcgcaccggacacagtccggtgtacaccggacactgtccggttgacaccggaca

SEQ ID NO: 21056 - DNA, 376 bp, Zea mays
  unsure (1)..(376): unsure at all n locations
caactctattaaaatcaactaagtataactggccctctaacacttccttaaatgctactgaatcatcacttcttctaaagaccagaacatatatatccgtaaaaagacaatttgagcccattntgcataattgagaaatagaaagcaagntgtaatctaaagaatctacaagaataacatnggaaatagaatggtcnggtgatatagcaattttactaagtccttngaccaaacctttgatttcatccncgaatgtgatagctctttggggatcaatggttntctcgtaagaagagaacatnnctttctgcccagtcatgtggtttgtgcacccgctatcaatgatccaacttgagcccctggatgcataaaccta

SEQ ID NO: 21057 - DNA, 176 bp, Zea mays
aatttagagtgtcatttatcagttattggtggaagcacactgaacgtctgtatccgctaaacttaccgaacagaacttgccccctttgtggagacaaccttaatggctatatgatgggccggtaggcaagtggactgcatatttgtacttggccttggccaacaaattattttaat

SEQ ID NO: 21058 - DNA, 395 bp, Zea mays
  unsure (1)..(395): unsure at all n locations
ggatctctaagtcacctgcggcatgcaagcttcttcttgtcctcatcaaccttgacatagaaccattctgatttccagcctgccggccatttgcttcggtagctgattacaggaaactttgcggttttccggtaggcaaaattgtagcaaccgaagttntcatgaagcccatcttttctggcctttgtttgataatgcaattcatgaactcgacagaaactgtcagcaaaaggctccactgcttggcttcggagggcccaaatataaacgctaagcctaacgatagcgttaggagttaactggtgaaggtagatgccaaacctcttcaatatctccgcaacaatctcgtgaacagggaatcttagcccagcctttaaaaagcttttgaagatgac

SEQ ID NO: 21059 - DNA, 362 bp, Zea mays
  unsure (1)..(362): unsure at all n locations
gggagagcacgtnttaggattaacaaatgttcattntgataaagacaggatttgtagcgcatgccaagcaggaaagcaagttggtgctcatcatccacacaagaacatcatgacgactgacaggccactagagctcctacacatagacctattcggcccgattgcttacataagcatcggcaggagtaagtactgtctagttattgtggatgattattttcgcttcacttgggtattctttntataggaaanatctcatacccaagaaaccttatagggattcttgagacgggctcaaaacgaagtcggcttaaggatcaagaaagttagaagcgacaacgggacggagttcaagaactctc

SEQ ID NO: 21060 - DNA, 396 bp, Zea mays
  unsure (1)..(396): unsure at all n locations
ttgcttttgccggtggcgacaagcagtgttgaaagggcattttctgcaatgagtttggtgaagactaaattgagaaacaagatgtgtgatagtcttttggatgattgtcttgttacatacatcgagagggatattttcttcgaagtgaatgagaaagatataattgaaacttttatggcgttgaggaagcgcacgccaaataagtagtattattgcaatttttatgcttaatgtatgcaatttttatgcttaatgtatgcaattttcatgcttatttgttgagtgtcaaactctatatctatatatcaaattggttaccacaattactatganattatatgtacattaaatagaattccatatgaaaaatttgttgcggcacatcctatgtaaaaa

SEQ ID NO: 21061 - DNA, 410 bp, Zea mays
  unsure (1)..(410): unsure at all n locations
ttttatagagccggtatgcgagctgcatatatatcccctttcagnntcagcatggtcgactgtcctattcggctgttgctgccgctactactgcaggntggatctatgcatcacgttgtggagcccacacacgagtagcggatcagcttacaatatggcccgaaaggtcttagcactcgttctaggttactaccatttttttaacaatgagcacagagatggactgtcagcttgggcggagccagtgtggcgggcagtatagatggccaattggcactaacatgataggccagttcagacataatctggtccgactactatagtgtcagtgtctatcacggcacggcacctaagcacgcatctcgatccgtagatcttgtactgacacgaacatattatatatnttttta

SEQ ID NO: 21062 - DNA, 374 bp, Zea mays
  unsure (1)..(374): unsure at all n locations
acaacaacatctaccaacacagcaactgcagaccataccggtgacttggccctttgcatgctgggggctagatatgattggaccttttaagaaagctcaaggaggatacactcatgtactggtagcaatcgacaaattcactaaatggataaagttcaaacccattgcttctttaacctcaactaaagccgtggaattcatacaagacataatattcaggttcggaataccgagcagtatcataactgacctgngatccaacttcacaagttcagagttctttgatttctgcgagcaaaaaagcattcaggtcaagtatgcttcggtagcacacccgagagccaacgggcaggttgaacgagctaacgggatga

SEQ ID NO: 21063 - DNA, 252 bp, Zea mays
  unsure (1)..(252): unsure at all n locations
atgcacactgcttcgtatcactcgccttatattccagaatacgtaggcaaccaccctgcagcttctgttgcttcggcgagccaaccccaagcatctttgcagcagccttcacccgcaccgccgatccagcgagggcagcagccagaagggagtcagcacagtcatcttcagcgggatttcagagaggagtctgaagctcgcacagtncacagcactgtgccagagtcgaacacatctattgacaatatctac

SEQ ID NO: 21064 - DNA, 477 bp, Zea mays
  unsure (1)..(477): unsure at all n locations
gcttgtgttggccttgacattatngaattctcgtgcctctttacaagtagagtctgtatctttttgttctcctataaagaaatgttcatgaaatcaatgtcattctgactggtagtaggtctctattcttagattctgtttgaataagggggatggaatccaaatccttaggatttagttcaactttgaactaaatttctagagcaacccccttatttgagcacccatgtatgggccagattatgtgattccctgtaccatcaaccaattgactaataaatactcacatgttgcctgtatttctcttctttntctttgagtgtgaacatgtagtctttcaacattgccagaagcgggagcctgtaaagcttatgttagtagttttgttcaagaaattaagactntctatcatttggaatcagcacttgatagtcaatctagctgacttccatgtctatttggttttttaatgaaatg

SEQ ID NO: 21065 - DNA, 413 bp, Zea mays
  unsure (1)..(413): unsure at all n locations
gtcgtacttctcttgaagtatgtccaagaatntctggtgatgaagcttctattatatttagtagtatgcttgaagccaatggttagtcatgttttttaggaacttcngaagacgaagggccccaatagtatccccttacaatattagtttggttctttggaacaaaatcagactgtgaaatgaaccaaagccttttgcccgaggtccacaaaaacacccttccttcgctagaatagcgagacgttctgtattggtggacccatctgtcaatggtgctttgtgtatatatatgagggtttgcgttgaaatatttttcgtgctatccagctttgtgcttgggttggcattttagctttctgatttgtaaccgcggctgcttggagcttcngcttttgttanatcaacgctgagat

SEQ ID NO: 21066 - DNA, 439 bp, Zea mays
agcttgctacatgccttcttctttttctccataacaggaactttactggaacactacctcacttaaaaagaatgagggtagaactcttgaatcttggggatttgaactccttgaagtacctcataacaagggtgttacggagccttcttctgctgttgctgcttgaccaggctgcggagagatgactggcacagggttgattctgggagaaccttcttcttatcttctcttcactatcttcttttctcttctcacttttcacttttcacttttcactgcctctttctttctctttgctcttcccactggaggattctatcaaagagtattactatcatacactggaggaaaccaaagactatgaaccatgtgcaacagtcttcaacccaaaaatcaccaagcattgtgatcttatgggcgagggagtggaaaaatggag

SEQ ID NO: 21067 - DNA, 394 bp, Zea mays
  unsure (1)..(394): unsure at all n locations
cgcagcataagaaaagagtagagaattctccaacagcactgaacagatgagcatcttcactgatctccaacacagaccacacagcttctcagataaagaggaaaggagaataatgggtttcccaactatataactaactntattgacatagtatgcaaaccanaatgcaggggatacccacactctggtgacaatcattacaaagatccaaaccaaacatagttcatcatgacaaacataaatgcacaggatatagcaaactaccctgtctaactaaaactaactaagaccgagactaacgctaagactgaagcttctatgtatatatttatttcgtattaattacaagatccaactctaacgatctatggttctaggtttatcttggtcttgc

SEQ ID NO: 21068 - DNA, 317 bp, Zea mays
agaatcaagaatattgagctcatgcctaagtctggtaaaagattggtcatcaagtggcttggtaaagatatcggctaattgatctttaatattaaatgaagaaatctcgatatcccccttttgatggtgatccctaagaaaatgataccgaatggctatgtgcttagtgcggctatgctcgacgggattgtccgccatcttaattgcactctcattatcacatagcaaagggactttggttaatttgtaaccgtatgcccgcatggtttgcctcatccaaagcaatagcgcgcaacaatgtcctgcggcaatgtact

SEQ ID NO: 21069 - DNA, 389 bp, Zea mays
tatgtatggattgctgttgagtcagtccagttttctctcggtccttctggcagcttcctgacttccatgaatagcaatgggtccttgatccgaaggtatcttcatgcaaaggtaagcaggatgaagaattgcttctaaagcattgagggtgccacgaccaataattgcattgtaagggtattccatgtcaacaatgtcaaacacaacttgctcagatctggtgttgttgatgaatccgaaggtcactggcatggtgatctcgcccaatgctacaatctgtcttccttcgaagccacacagagggtgtgtagcatcatgaatcttatcttctcgctcttgcatttgtctgaaggccttatcaaatatgatatcagctgcacttgctgtgt

SEQ ID NO: 21070 - DNA, 411 bp, Zea mays
  unsure (1)..(411): unsure at all n locations
cgtactaagcacatgccgggaaaaatggtaaccggtaaacctaatacttgagtgaagccgggcgcagactttatccctcatgcgacctgagactgggtctcccatgctagctatggtgggtacaagtgcggtcactgcacggcggcagccgaggtcagtggagcattgtatgccaaggcggtgaggcctggacgcgaacgaagaatcgatggggatagttgtcatgtgtggggtcggagtaccctgacatgctgtgtgtttaggtttaccttgcaaggttaaaactcgattcgaatcgtctgcttctcgcagctaatgagactgcttgaccccttgtactgcatcgagtaagaagtgaaatgaggttacatgagataatttgctgatngaactaaatgcttngtaccatgt

SEQ ID NO: 21071 - DNA, 452 bp, Zea mays
  unsure (1)..(452): unsure at all n locations
agcttggtgccgatggagaagcaaaaatccttgaagtcttggctgtcaaactgcttgccgttgtcgactgttagttcggacggtactccgaagcggcaaacaatgttttgccaaaagaatttttgggcagtctttgatgttattgtggagacagcccttgcctcgatccatttggtgaagtattcgacagcgacgaaggcgaacttaaggttcccctgagccatgggtaggggcccgacgatgtctagggcccagcgctggagaggccatgtgtgggcgatcagctttgtaaattgtgaagggctgcctgatcgaggggaaaacttctggcaggcttcgcaggaccttgtgacccaatttgcggcgcagatcattgcgggccagtagaaaccttggcggatcaccttagcagctagggcccttggccctgagtgagagccgcangtaccact

SEQ ID NO: 21072 - DNA, 417 bp, Zea mays
  unsure (1)..(417): unsure at all n locations
tcacgggctactggcggagctagccgaagcactggcttgcccggaagatgggctgggtgggctggccacggtggccgaagctctggcggcaatggcgggcggaattaagctcgccggagctaangggaagtggctggccggtgagggtgagtgcggngcgaagtgnggcgcgcttgggaaggctttatangcgcggcgcggtgcacgggcggtcgtggaccagcgagtgcgagcgggcgtgcacggtgaaggcgcggtgcgcgaacgggcgtgaaccatgggtgtcagccgcggtcgaacacgtgttcccgttgcctctgcccctgttcaagcgccgattgggagcaaatcttcgcgaatttgggcaagatcactgcaagggagtttgtcaccagaccaagctntgtcttttgtgta

SEQ ID NO: 21073 - DNA, 453 bp, Zea mays
  unsure (1)..(453): unsure at all n locations
gcttaccacatttgaagcatgagtgnttcctctttgtcttggtcttgcttggctgcccttgcgaccttttagcgtcgtcttgaatctcttgatgatgagagccatctcttcatcaataagtccggccacctcaatatgtgccaccttgctaggtagcgtctccttgcttcttgttgccttgagagcaagaggttgaggctcattgattggaccattcaatgcgtcgtccacgtatcttgcttccttgatcatcattcgcccactcacgaactttccaagtatctcctcgggcgtcatcttggtgtacctaagattctcacaaatattgtttacaagatgaggatcaaggacagtaaaagaccttatcattatgcggacgacgtcgtggtccgtccatcacgtgcttccatagcttcttatcttgttgataagggtcttgagcccggtgtatgt

SEQ ID NO: 21074 - DNA, 383 bp, Zea mays
  unsure (1)..(383): unsure at all n locations
tgtgaagccaatcacaggtttattgaagaatgatattaaattcaattggtcttcaaagtgtgatgaagcttttgaacaattgaagatattattaaccactgctccggtattggctcaaccggatattaataagccctttgatgtgtattgtgacgcatcaagcagtggcctcggctgtgtgctaatgcaagaaggccgagtaattgcatatgcttcaaggcagttgcgccgacatgaggaatattatcctaatcatgatctggagttagctgcggtggttcatgccctanaggtctggcgtcattattngctgggtaatgtctgtcatatttatacagaccataaaagtttgaagtatatcttcacccagtcagaattgaata

SEQ ID NO: 21075 - DNA, 432 bp, Zea mays
  unsure (1)..(432): unsure at all n locations
agcttctccttgtcgtcatcaaccttgacatataaccactccgacttccagcctgctgcccatttgcttcgatagctgattacaggaaactttgtggttttccgataggcgaagttatagcaaccaaaattgtcgtgcaatccatcctttctagccttcgtctgataatgcaactcgtgaacccggcaaaagctgtccgcaaatggttccactgcttggcttcggagtgcccagatataaacgctaagcctaacgatagcattaggggtcagctggtgaaaatagataccgaacctcttcagtacctctgcagtaatcccatgtagggggaatcttaatccagcctttagaaagcttttgaaaataacaatntcatccttctccggctgtggggtggtctcttctcccttcgaagcgtaatagcttttctga

SEQ ID NO: 21076 - DNA, 370 bp, Zea mays
  unsure (1)..(370): unsure at all n locations
tgtgagcaatacaagttcagaagggataaggctgcttcggctgatcagccgaagcccatgctcttatgtgaggatatagcagagcagaaggtgctattgggatctcaattgtccgaagagcaggagaaaaccttaataagggttttgttcaacaataaagatgtatttgcttggtcagctaatgatctttctggagttaacagggatgttattgagcactcgctcaatggtgatccatccttcagacccaganagcagaggcttttggagatgtctgatgacaangccgaaggtgctcggaatgaagtgaaaagactcctcagtgccggagttattatagaggtagaatacccacaatggttggcttaca

SEQ ID NO: 21077 - DNA, 420 bp, Zea mays
  unsure (1)..(420): unsure at all n locations
agcttggatcaggatattaccatgtaccgggtcacgatatcacatcgggtgggtcgtgcacgagtaccgcctccatggcaagctcctatatggcgcacgagtaccacctccatggaaagaactcactactactagtcgcatccatctcacaccctagtctttcacatttatggtgattataaatttataattatgtaatgcatgaacgggtacctaggcgcctggtgcacatgcaccaggcgagacggngaacatgtccaagtatttttcttggagtacgctccggtcaccgtacgtgtgtttntttcagcagttntaacatgaaccaacaatacanttttggcgccaaattagctaaaataagctaccattggatagttntaacatgaaccaacaggaggaacatagaaggataaaatt

SEQ ID NO: 21078 - DNA, 304 bp, Zea mays
  unsure (1)..(304): unsure at all n locations
cacaccggacatgcacttgttgatgtccggtgcaccggtatgggcagccctgacatctgcgcgcgctgcgcgcgcatttaatgctgcgcanggagccgttggcgccgcagagagccgttgctccgctggcacaccggacagtccggtgcacaccggacagtccggtgaattatagcggagcggctgtcgtgaaaacccgaggatgacgagttccggaggccgcggttcgttggcgcaccggacatgtccggtgcacaccggacagtccggtgaattatagcgcgccggccttcgcgaattcccg

SEQ ID NO: 21079 - DNA, 374 bp, Zea mays
  unsure (1)..(374): unsure at all n locations
tgtgaagagtcttcatttcacatgggctagtcggccgtgccatattcaacccaaggtagtcttagcaactaagcgagtgttgagttcagctcttttcaaatctaccaagtatagctgaccctctagcactccctttaaagctattgaaacgtcacttcttctaaagaccagtacaccagtatcagtaaaaagacaggtgtagcccattttacataattgggataccggaaagcaattggaatcttaagaatctacaagaaaaacaatgggaatggaatggtcacgtgagatagaattttacccaaacctttgacaacccttgattccaatcccgaatgtgatagctcggtggggatctntgtgtttctcatatg

SEQ ID NO: 21080 - DNA, 410 bp, Zea mays
  unsure (1)..(410): unsure at all n locations
ttgatgccatcttagacgcctgatgggtgcgataagtcatggatcggtccattcgagggactcgatcacgcctcgcccgagcctagcctcgggcaagggcagccgaccccggaggatctccgtctcacccgaggccccctccagcgacgaacatacttncggctcgcccgaggcccagtcttcgccaagaagcaaccctggccaaatcgccacgccaaccgaccaaatcgcaggggcacttaatgcaaaggtggcctgacacctttaacctggcgcgtgcccttcagtcgacagagccgaagtgaccgcagtcacttcgccgctccactgaccggcctgacagaaggacagcacccgctacgccgctccgactgctgtgccactcgacagagtgaggctgacaggcagtc

SEQ ID NO: 21081 - DNA, 382 bp, Zea mays
  unsure (1)..(382): unsure at all n locations
tctttacagaagaagaaggagcctgcggctaccgagaagtctgttgtactataaaagcgaagaattattactgtcattgaggctattgaagaaacaccgccatcggcctcagcgcagaaaatagcagcaaccgaagctgctcctgccgaagcttctacttccgaagctacagcagctgaagccatagatttggaaaacacactcattgatattgatgaaatgaatttaaatatggctgaggaagaaactgctgcatctgctgaggaaatcccagccgcagtgcctgaaaaaggggagaagatgcctgcaaaagagaaggagcctgccgaagatacttcggaagaagaaaattcaactttncaaaacataatgggcaagaatt

SEQ ID NO: 21082 - DNA, 420 bp, Zea mays
  unsure (1)..(420): unsure at all n locations
ttaagggaaaccgaataggctactatgttccttcgaaaagaataccttgtgcagctggtcaagcagggaaacaggtgggaagctctcatcatgcaaaaaatgtgatgaccacatcaagacccctggagttacttcatatggatctcttcggacccgtcgcctatctaagcataggaggaagtaagtatggtcttgttatagttgatgatttttcccgcttcacttgggtattctttttgcaggataaatctgaaacccaagggaccctcaagcacttcctaatgagagctcanaacgagtttgagctaaaggtgaagaagataagaagcgacaatgggtccgagttcaagaaccttcaagtggaggagtatcttgaggaggaagtaatcaagcacgagttctccgcttcctacacaccac

SEQ ID NO: 21083 - DNA, 376 bp, Zea mays
  unsure (1)..(376): unsure at all n locations
ttatcatatggacgtgacgagtgccttccttaatggaccaatcatgaagagggctatgtttgagcaacctccggatttgaagatagtgagtacccttaccatgtatataaacctctctaaggcgctttatgggctcaagccagccccaagagcatggtatgaatgcctaagagattttcttatcgcttatggcttcaaagtcggaaaagtcgatcctactctctatactaaaactattgcaaatgatttggttgtatgccaaatctatggagatgatattatatgtggggctactaacacatctacatgtgaagaagttagtaggatcatggtacacaaattcgagatgtctatgatgggcgagcngaagtatttc

SEQ ID NO: 21084 - DNA, 450 bp, Zea mays
attgctaactgtcctgattatgaaagtgaccaggaaaaagggaacaaaagggagaaaaagaagcactacaagaaagccaagggcgaggcgcatataggcaaggagtgggattcggattgctcctcctccgactccgacaatgagggactcgccgccaccgccttcaacaaatcggccctcttccccaacgagcgtcacacgtgtctcatggctaaggagaagaaagtaagtactcgaaattctacttatgcttcttctagtgatgatgattctagtgacaatgatgaaatagactattctagtttatttaaaggtctagatagaattacaattggcaaaattaatgaattaattgatgcattgaatgagaaggataaactcttagagaaacaagagggattattgtatgaagagcatgataaatttttagaaggctcaaaatctcatgct

SEQ ID NO: 21085 - DNA, 479 bp, Zea mays
  unsure (1)..(479): unsure at all n locations
gcttgacaacatcaaattcttctttacccacattgagatcacgtctcaggtttgcagcagcatccacttcaccgtaccaatcagtaaactccttggcttctctagcacatggcaaacccaaaatcagatgaaccgtatcttttggtatcttcaantccttgccaacccctgggcgtatggtcatgtcatgtggatccaatttatccatcaaccacctgatgagtgatatgctctctaaggcatcagttcgcaaatcaaatatactagaaaatcccaacctagcgacagcatcgcgctgccgatcgctcattatccaagatgatacaataacatcatagggaatgcagcggatattcaatntctcggagcataaatgaatatgcattaatacacaaagtatatatattggtagaactaatgatactatnattacatacaacggatatttattacaggcttgtaaataactagtctacaac

SEQ ID NO: 21086 - DNA, 463 bp, Zea mays
  unsure (1)..(463): unsure at all n locations
tgtagtctataattgtaccctcgttctctttcttcttgtactccttctagggcggtaatattggaatatgttgcctcagtacgatcccaccctatgatgcaaactttgcagcttgaataggtgcctctggccttcgcttcccatcagagatttggattggaatcttaaagcctaaccctctgctcaaggattcaagttgtttgcccctacttctttgccttagtaccaattatggtgattaacatcataataggcaaaaagatattaaattacgaaactagcaaaaaaatcttgtgaatgacaaagatcggatgtgttctgaagcatgtgtgcattntcctaagacagagcggaacatataataatttctagacaaatatacaacttcattactctagctntattctatgtttaacaactcaataatcanaaaccaagtattagttgcatctattacctacat

SEQ ID NO: 21087 - DNA, 444 bp, Zea mays
agcttctaaagggagaacacgtgataggtttaactaatgtgcaattcgaaaaatatagaccttgtgcagcttgtcaagcaggcaaacaggtgggaagctctcatcacaccaaaaatatgatgaccacatcaagacctttggagatgcttcacatggacctcttcggacccgtcgcctatctaagtataggaggaagtaagtatggtcttgttatagttgacgacttttcccgcttcacttgggtattctttttgcaggataaatctaaaacccaagggaccctcaagcgcttcctaaggagagctcaaaacgagtttgagctcaaggtgaaaaagataaggagcgacaatgggtccaagttcaagaaccttcaagtggaggagtaccttgaggaggaagggatcaagcacgagttctccgctccctacacaccacagcaaaatg

SEQ ID NO: 21088 - DNA, 408 bp, Zea mays
  unsure (1)..(408): unsure at all n locations
ctacgctgnaagatcttatgccacatgggctagtcggcgatgccggagccaacccatattactcttagcaattaagaaagtgtcgagtttagctctattgaaatcaactaagtataactgccttctaacactcccttaaatgctactgaatcatcacttcttctaaagacagtaacacctacatcagtaaatagacagttgtagcccatattgtataattgagaaacagaaagcaaattgtaatctaaagaatctacaagaaaaacattggaaatagaatggtcaggtgatatagcaattntaccaagtcctttgaccaaaccttgatttccatccccgaatgtgatagctctttgggggtctntgtttttctcatatgaggagaacatccttttctcccttgtcatg

SEQ ID NO: 21089 - DNA, 416 bp, Zea mays
  unsure (1)..(416): unsure at all n locations
agcttgttaatttcgatgttccacacttangtcttattcgggcatgagatcgaaaggggatgagatgtattaaatctattaatagctctgattgtattcattcatttttaaccaaacatgcccttgatacaggagtaaaaaaatgatggtgattacatgatttacatcacttcgcaagtattactgaattctagagtaccgagagataacgtgagtgagaatgagagaaataaataagataatatctggccgttgtaatttataatttatttaactttttacaccgagtttgaccattcaaaanaataattattatntatttntattgtgatatcatttaacatatatactntaagtattactttgcanatttttaaataagggaaccggtataaatggagtggaattggacgtca

SEQ ID NO: 21090 - DNA, 388 bp, Zea mays
  unsure (1)..(388): unsure at all n locations
ccacagaaaatcgacgaaccttaatcgtgtctcaagctataatacgaagcatcgtccaagcaccaaattacctncaagtcgaaaactggctagaaagtagaaaaggcgaagtctataaagttctccttgccaaccaggacacgacaccaatgatgctattggtgctcagccatggagatgcagagtcttcatccaaaggaagctagcagagtagagcgggatggatgcctncaaaaagcatatgacacccgcaagagtcgccgtccagggttntgccttgacctcaaccaacagccctaccgctagtgcctatgatagcttagaagtagttgaatgaacaactgtcctgccggaagtccttctgtagttcttagcggattactaactt

SEQ ID NO: 21091 - DNA, 364 bp, Zea mays
  unsure (1)..(364): unsure at all n locations
tatttgcaagcgtatgtccgaaggtttctgcgtctcaaagtgtaggcgccaaccgtgccaaatgagattgttatttgagctatgatcaagggacttcgaccaagaccaacaacacaatatttcgctaggaagcccccacaaactttggagaagcttctacagaagatggacgagtacatcagggccgataatgactttcggcagagaagagaagaagcctacatatactctgagatgaccagnggcttcggagggagactccaccctatgcatgtcaggacgatccaaaatcctagctcaagcgacgacaggggaaatcatactctatggcatcagcacagcgcccaatcatcanggacacaac

SEQ ID NO: 21092 - DNA, 494 bp, Zea mays
  unsure (1)..(494): unsure at all n locations
agtgtcaatcacatatngtttgtttgcctcacganaacattccagtttccttgcatcaaagcagagtgaacttggacgcaagccctangtctctggacgatattattcctgactggattttccatanattgagagttactactctttgggggtggggacaaatcagttttttgcagaggttttctgggctatttggcacatcagaaataaaaagagttaaaaaaaatccctaacaaatctatacatgcattnttactcattcctagctaatctggagtggtggaaatgctcctagcaatctattcaaaagaaatttctgaataaccttataatacgtgcaaaactaaactgacatacttgtgaaactcctcagccaatgctataaataattatcaggactgtaactcgtatcacgaagcanaaagaaagcaacaggagacattcccagcgacatgaaaatgacattaatcagcttcatctcatcgcgttgccct

SEQ ID NO: 21093 - DNA, 416 bp, Zea mays
  unsure (1)..(416): unsure at all n locations
agcttctgctttgaaaataagtttttagtgtcttcgaagatgtccgaagataagaagactgctgctgagacgaagctgagcctcgacgaagagaanaatttggggtttcttatagcgatgtcaaagaccaacacagaaaaaatcaccaaggagattctggaaggtttgtctgaggatactggtgacagtgacagctatgatgtggacagtggtggtgaagacttcgaagatcgtccatggcgaccaagccattcagtttatagtaaatcaactatcaaagagaatcatcttatcaacatgagaggaaggtattntcgggatttgtccattgtgagggccgacgaaggggaaaaaacttgcccacacccttgagagaatgaagtcgtagtgtaccgaagctttttgaaagctggact

SEQ ID NO: 21094 - DNA, 387 bp, Zea mays
  unsure (1)..(387): unsure at all n locations
tgccttcgcttcagtctatcacccgcagtccaatggggtcgtggagcgcgccaatggaaaaatcttcacagctgtcaagaagatgctcctcgatgaanaaaaggcagatggaccgatttgttaccggagacagtctgggcactaaacacaactgagtgcagggcgactgggttcacccctttccgccttctatacgggtcggaggccatgaccccgcaagaaataaagcatgggtccccgcgtacagttccgtcagccgtccccgacgtggacgagccaacttcataagatctcattgacggagagcgggtcttcgccctacaggccctaaacaaataccaagcccagaccaaagcatggcgcgaccacgcagtcatcccgagggag

SEQ ID NO: 21095 - DNA, 409 bp, Zea mays
agctttctcggcccagctcccattaccaccaccattgccacctactcacacccgaagccaacagccagaagggcaccagcacgcccaacaacagcgtgacttccgggaggagtccgaagcttgtacaatcaatagtactgtgccagaatcaaagcatatctactgaagaatatcctactcttaatgtacctttatcttttatgtcattttattttttgaaagaaacaagttgcgaaggactaattttcgatttcatgtaataattgtgcttgcatcaatgagtaaaatatgccttcctcacagttttctgaagctcgaatatcgatcctaagggagcggagtaagtttcaaagctacaaaaaatcgttcctaagggagcgcagagtaaattccgaagctacaaaaagtc

SEQ ID NO: 21096 - DNA, 467 bp, Zea mays
  unsure (1)..(467): unsure at all n locations
tgcacccaggtacattggtccatttnctatactngaaagatattggccaatggcataccgactccagttacctgaaacattgtctgctgtacatagtgtgttccacgtgtcccaattgaagaagtgtcttcnggttcctgatcgaaccgttgaagtgacagatgttgtccttgaaccggacttgacatactctaagcaccctattcgagtcttggatcanaaggacagggttacccgaagaaaaactctcaagttttataagatacagtggaaccaacattccgaagatgaggctacatgggaaactcaagactttntagataagaatttcccagactttttagcctcttngtaaattgtaagcctgtataactatgtaataaagaagtgacccncacatcacccctgccttgtaccagaaataaggaaataaaagtatgccgcgttttcttttcattacttaccct

SEQ ID NO: 21097 - DNA, 437 bp, Zea mays
  unsure (1)..(437): unsure at all n locations
agcttgtatatgttaactacaacctgaggctactcctaaaggatgcaattgggttcacaagtgtgcaaggggaggatgatccattttcacagttgatggaattatccttatatgacacaaacaatccaatccgtcagtggatggaaatgggtcgctcaaacgcggatccattgctagatgaggaggacaccgagagtgacccaccgttgccatcaagcatcgtggctcaaggcacttcaaaagacaatttggttaagtggacaaagaagaatgtgggggacactcatgttggtaagagaaaggcgcagttcgtacaacgaanaacaagcaagaaaggaaagaaagcagtggctagcgatgatgattctgatagtggtgataaaagtccacaatacattgagtctgccgatagcagttcgacgacgtcttctgatgat

SEQ ID NO: 21098 - DNA, 428 bp, Zea mays
  unsure (1)..(428): unsure at all n locations
ttatatggnttgcatcaagcacctgtagcatggaatcagaaattggatgagaaattaggtgttctgggttttattaagtgcccttctaagcatgctatctattgccgtggagatggagctgaaaaactgatggtgggagtttatgttgatgatctaataatcattggttgtagcagcaacatcattcaaaatttcaagtcacaaatgtccgatgtgtttaaaatgagtgaccttggagtattgtcttactatctgggcatagaggtgaaacaagattatctatgaattacaatntctcaagagatatatgcaaacaagattctagaccaaagtggctttgctgactgcaacacttgtgaagntccaatacagacaaagctgaagctgaatangaagagtgacagcggctgtgttgatacaacagaata

SEQ ID NO: 21099 - DNA, 456 bp, Zea mays
  unsure (1)..(456): unsure at all n locations
ttaagtcacctgttgcatgcaagctatagctattgtatntgcaacttcaaatgctataatacaggctttattcccncggttgggtcctccagagagaaagccactgccaggattcaaatttgtcatgctactcccgagcgtatctaacacttcaacagccttctccagaccagcaatgctagctcttcccaaaaatgtacctgtgtctgatacctgacagaacttagtatgtcagagttcatgcgaaaagacctactgctaggctctcatgtagtaatcttttagttntatttcatcagctacagataacaaacagaaagctaactagctattgcacaaaacaacgtcaagaaaagaaggttgaatatattatcactttcggaaacatgacactaggtgtgagctcatgagatataaagcaagatttatatattctaagaatgctgttctgttctg

SEQ ID NO: 21100 - DNA, 406 bp, Zea mays
  unsure (1)..(406): unsure at all n locations
aatcaaaaaccgaagaagcaacatagatgccccagattctaaatccttcagcaaaagcaacaatgctgaaggcagaaaaaatgtctgcaataacccctagaaggaaaaggatggtaaatgtattatatattttggaaacaacagactccaaacgcccctcttccataagaaagttgctgaaactgtcgaggcacgaactgaagctgatactaagcagataaaaggaataactgcaacaattgaggctggaaccggggccgaatccacagtgcctgttgagaggaagcttgccacagccgagcaaagggcccaagaagtaccttcaaatactgatatagcttntgagagaagtgtggtcatagaagcccgaatccttacttccgaagcacctttcgaagatcttgat

SEQ ID NO: 21101 - DNA, 471 bp, Zea mays
  unsure (1)..(471): unsure at all n locations
tgagaaggggacaaccgtagcatgcacaaaccctcttcanaagaatgctaagtttcctaaaaaaggcatgagaaaacatcaagagaagaaagccaaagcacatgacaagtgcctcaaccacgcctccacatgctccacacaaggtaacaaacaagccactcttccaaataagagaaggtgcactagaaagtgttatcaatgtcatgagaagggacatgagattgtaatacccaatttgtaagagagaatataaaaggagaaaaaaattatttcctttatttatatgtgtgggtggatctattaccatcacatgtgaacaccatattaaaaaaagataattaataaatgaatatgccactaaatgtgcatcatgctggactntattgtgtgtgcattntgtaacaatataaaagtaatataaaaagaaatatattaatatccaaatttggagattaatcctaacttgaaatc

SEQ ID NO: 21102 - DNA, 427 bp, Zea mays
  unsure (1)..(427): unsure at all n locations
acgtgaagagcgccttcctcaatggaccaatctttgaggagatacacttggaacaaccttctggctttgaggatgacaggtatcccaaccacgtctacaagctctctaaggcgttctatggacttaagcaagccccaagagcatggtatgaatgccttagagattttcttattactaatgctttcaaggttgggaaagttgatcctactctctttactaagacttgcaatggtgttctttttgtatgtcaaatatatgtcgttgacattatatttggttctactaatcaaaagtcttgtgaggagtttagtatggtgatgatgcaaaagttcgagatgttaatgatgggcgagttgaactacttccttggattcangtgaagcaactcaaggaaggaaccttcatatcccatacanagtacactcaa

SEQ ID NO: 21103 - DNA, 473 bp, Zea mays
  unsure (1)..(473): unsure at all n locations
atactcagctctaaggaacactttagataacaatgtcatttgagaagacagattgttcgcatgccaagcaggaacaagtggctctcatcatncgcataagaacataatgacgaccgacaggccactggagctcctacacatggacctattcggcccgatcgcttacataagcatcggcgggagtaagtactggctagttattgtggatgattatattattctcgcttcacttgggtattcttcttacaggaaaaatctcanacccaagagaccttaanaggattcttgagacggggctcaaatgagtntggcttaaggatcaagaaaaatagaagcgacaacgggacggagttcaagaaattctcaattgaaagctttcttgangagganggcatcaagcatgagttctcttcttcctacacgcctcaacanaatggtgtagtggagaggaagaatagaactctattggacat

SEQ ID NO: 21104 - DNA, 480 bp, Zea mays
  unsure (1)..(480): unsure at all n locations
agcttganatatatcttcacgtagaaagaactctacctaagacagagaagatggcttgtgttaatcaaatactatgatttggaaatacaatatcacccaggaaaagcaaatgtagtggcagatgctttgagtcgtaaatgtcaagtgaacaacatcactactcatttgatgtcacaggaattgtgctgggaaatggaacaactcaatcttggtatgctcaataatatggaagcaacagttatggaagttgaatctaatttgaaacaagagattcgtaaaggacatgaatctgatgacaaaatcaaggaaattaaaactctgattagtttaggtaaagccccatantttacggaagatgaacaatgcacaatatggtttagaaagagaatctgtgtacaagaaatcgagcacctacgcgaagcttatttaaaagaagcccatgattcggcttattctattcaccctggaagtacaaaaatg

SEQ ID NO: 21105 - DNA, 386 bp, Zea mays
tactaccagcaaatttaaatttttcattctctagttcatgctcgataattttagcatctaatttagctatatgatcacttttgtggttaatcatagcaaggtgatcatgaatagcatctacattaacatctctacatctagtgcaaatagaaacatgatcaaccgtagctgtagaggggttgcaatcatttaattcaacaatcttagcatgcaaaataacattcttatttctaagattggaaatagaaacattgcaaacatctaattccttagccttagcaattaatttatcattctcaaacttaaggctagcaagagaatcattcaacttgtcaatcttagcaattaaactagcattatcatttctaagattaacaattgaatca

SEQ ID NO: 21106 - DNA, 470 bp, Zea mays
  unsure (1)..(470): unsure at all n locations
agctnttctgcnaacagagtctntgattcttgataagccactccttgactcccttaagccagcatacccttgagagtcttttctttagtcgggtaagtcttgctgagtaattccatactcagggttntattccctgttgtttttcaggttctaactttgtgctgttgttgatggtgttaagtgccggtgggctcggccttcttataagtctaagtaacccttctatacttcttattgaggatgatcccttgagctagcatatatatttcaaacttatacttttgtaatcactccgataaactaatgtaaaatttttgtaacctgtaaaaattggtagtaagatttccgctgcaacaatnatggtgtgtgtgattngtgttacttaatcccgcggttctggttgaaagtggtttatccgatgtccttgnggcaatcngacagatccnntgtgagtatctggtgcacatgca

SEQ ID NO: 21107 - DNA, 462 bp, Zea mays
  unsure (1)..(462): unsure at all n locations
tcacaatcagcataatcatgataggacccatagagaaataaacatgtaccgagcgtgttaccttgagcttatcgccctggttaagccattgaatatggtanggttgtgggtgtggatgtgtggggagagacaacttctccaccagctctgtgcttgccaagttgttgcagctgccaccatcaataatgatgcgaatggaacgttcttgcacaacacctttggtatggaacaaggtgtggtgctggtgctgctcgggttgtgcaacttgtgtgctaagtacgcgttgcatgacaagactctcatacttgtcagtatccgtggcatccacatgttcttcttgggttcctgcaatgtcagtggcaagcataacatatatggtttcttcggaattactagcanaagaatactcaccattgtcacatataatcagtgtngcacttgtggggcagtcccgtatatgtg

SEQ ID NO: 21108 - DNA, 378 bp, Zea mays
  unsure (1)..(378): unsure at all n locations
ctcactgctcctcggcttcgtcattctgtacatatcanagcggtatgatgaaagtgcacacttcaaggagtaaagcagcaggcacaagtttcttaccggcttgaggtggcttcgagcttcgtcaccagccaagtttcgcccgccttttgcccagatttgagtaatgaatatgtttccaatgcttcgggccaggccggggatgtcatccaagtctgctggtgacagtctgaaggttggtctgtttacaatgttttcatgtgtacagccagccttcatgaaagcaacagctgtgcctcgagaagctagctgagcacagagtcaccatgtgcagctataacttcgtcgagagcatcaacttcaccttcaatatgatcaaat

SEQ ID NO: 21109 - DNA, 339 bp, Zea mays
  unsure (1)..(339): unsure at all n locations
tggcagcatagcagtgcanatagcaatgaatgctgtggtaacttcacacctactcgtctgtttatatagtactgcaggtaagaaggcgaagcgccaggatttttacaccaggcgggcacccgctcgcactcgctgcgtggtggaccgcanggaccaaacagtaactctgcaaggtgggaccgctacgcgctgggaaactgaatcgtttctcgacaacgagctcanggaaggtgnnttttggaccttcggctccccgaagcttaagagactttnttcacggatcaagctcgttacgaanaacgatctagcaccgcgaaaggggctactggtgggtctatg

SEQ ID NO: 21110 - DNA, 367 bp, Zea mays
  unsure (1)..(367): unsure at all n locations
agctntattgggatgtgtattagcaacctgctttccggcttgacatgcactgcatggcttgtccttttcaaataccacatcctttaatcctctaaccatatctttctttaataccttcttgagtgtgctcatcccaacatgtgcaagcctcctatgccaaagccatccaagagaagncttggtgaagaggcaagttcttaagtctgcatcttctgaagtgaaatccactaagtagagggtgttgtatctaaaacccttgaataccattgattcatcatccatttttgttacaataacctctgatggagtgaataagcattgaagtccaagatcacagagttgtnccactgataataaatngaagctc

SEQ ID NO: 21111 - DNA, 348 bp, Zea mays
  unsure (1)..(348): unsure at all n locations
gatgccatctatttctagttggcctcgaaccttgtcctgcatatanggcttattangtcgccatgttagttnagtgggcagatcttctctaatctataggatattttgaggaagcagtggtataagactataagccaattgattaaaagtttggacttaatgatagtttgagttggtgtcgcgtggatgatctggctttggaagtgattattctagtgaacttcgagatatatggctcgtgggtctgagacccactcatctcttcctgcaccaatactggtgggcgagttgtccaagattagtcctagtggtgtgatttctttgttctagcatgaaacaggcgatctc

SEQ ID NO: 21112 - DNA, 426 bp, Zea mays
agctttcccgctcacgtcttcggcgctggatcaaccttcgtattgggcttctcctactgtaattccgacttgggtccgaaggtacctgttcacacattatgctctagaaatactgttaaatcctatttttgaggaccttcgtaagccgaaggcccccaacacatattggaagagcaactgatcaaaagtaagtccggctttgaccagccgaccatgtgtgctttgcccttgcgtctctttccttgctttgtgtggaggctgacgcctctagcaatgggcggactgtctgactgagtcagccggaccgtccgaacgaggaccgggccatccgtgcgtaggtgctggacagtctgtgatgcttgagtcagagagttttgctcggctgctcgattgagcctgcccccacggcttccgacttgttagtct

SEQ ID NO: 21113 - DNA, 383 bp, Zea mays
aataccaacatgaaatgccattcactttgggtaggcacaaatccaaacctttctggtcagctgattataacgctcatcaacctgttcacatgtaacaaattcagtccagagtgaagcacagactatggtgcctacagccattatccataagaagcatgctgaaaggtccacagttggtcgatttggtgaatatagctgcacttccactgagacaatagaaaataaatatttctcattatcacgcatactctggtgtagcataattaattcaaaaggaacatataacttaggttagtcatcatttctacaggatcatctgccacaaacagctgtgccaattttggaagtaacagaaatcactcaagagcatcaaacccataaac

SEQ ID NO: 21114 - DNA, 442 bp, Zea mays
  unsure (1)..(442): unsure at all n locations
agctngatacgggaacaacagtggcatgcactatatcccttgaagaanatgtcaaggacttgaggattgccaagaggagcgaacaaaagaagaaaatcaatacctcttccaaaagcctcaaccatgcctccatacaaggtaacatccaaggtaatgatcaagccacacttcacattaagagaaataagaggtgtagtgaatgctntaaagagggacacttgattaggtcttgtccctacattaaaaatggcttgattattaacaaggatgatagactttgttttgaatgctcaaaaaagggacactntattaaatcttgtccccatttgaaacaaaaaggcatagggttagaaaagaaagtttntactaaccatgtagcaagcaacaaacaaggaaagaagaaatcttcaaaacttggaaaacgcctatgctacacatgccg

SEQ ID NO: 21115 - DNA, 468 bp, Zea mays
  unsure (1)..(468): unsure at all n locations
tgtttaatgcctttctatatgaaacatccacctatactaaataggaccaccaaccttagcttcatatggaagatgtataaggagatgttgcataggattgaagaaccccggtggaattattttttccatttgcaccaaaagcactgtntctaatttctcagcttactcaccatatctcttatgaattcattacccctagctatctgtagaaatagcttacttcagctaacgttttccacacaacatcggtaacgtacccacgaaacattatangcacgagtctttccataattatgtggaagtcatggctcttcaatccttcatcttcattgcttcaaatcatagatcttctanaccagcagcataaccaccagngaatttcagattcttatccagctcatacttcntttcgtgcttaagttcagacaagatcaactttggtttgctctgtctttctagtacttgggt

SEQ ID NO: 21116 - DNA, 445 bp, Zea mays
  unsure (1)..(445): unsure at all n locations
agcttctgngcaacaacagaactatcctcggctctcagctccaaggtgcagaggcgccaggggcttcggaggaaggtttggggatcagcccaagaaaatttactgcctattttgcggtgaggacaagggccatactaccaagatgtgccatgtcaccattcaaaaacagaaagagatagcagaagctgcagcccaacagagccagccgaagcaggttatgcatactgcttcgtaccactcaccatacattccagagtatgtgggtaaccatcctgcagtttctgttgcttcngcaagtcaacctcaggcatcttggcaacagcccccacctccaccaccaatgcaacccgcttatccccagggccagcagccagaagggagtcagcacaatcaccagcagagagactttatggagcagtccggagctcgcacagtcaacagtact

SEQ ID NO: 21117 - DNA, 440 bp, Zea mays
  unsure (1)..(440): unsure at all n locations
tctagctccagcctncccggagacgatctttttccgaagagccggaggtagcgtctttccagcattttcggagtntgttggaggaaacttcttttccggcagatctgcgatgcggtgtagaattccttcttcgtctgccacagatgagattgtcccgaagcagaatacaaatccgggacgcacggtgatcttgctgcggaaggtgatggccattgagctagcttggatcgtcgacacaccccctacctggcgcgctagctgtcggtgttttgggtccgaccgcacacccggngttgcccctcaaggtgtttttaggagtaggacgatgtcaacgactgtagcaaaatggttcgtgccgatcgcacgagggacaatggacaagaattgcatgttcgggccgcttagaagtgcgtaacaccctancgtctggtgagtatatg

SEQ ID NO: 21118 - DNA, 420 bp, Zea mays
  unsure (1)..(420): unsure at all n locations
agcttctaaagggagagcacattntaggactatccaatggttcatttgagaaagacagggtttgtagcgcatgccaagcaggaaagcaagttggtgcccatcatccacacaagaacatcatgacgaccgacaggccgcttgagctactccacatggatctatttggcccgattgcttacataagcatcggcgggagtaagtattgtcttgtaatagtggatgattattctcgcttcacttgggtattctttttgcaggaaaaatctcaaacccaagagaccttaaagggattcttgagacgggctcaaaatgagttcggcttaaggatcaagaaaattagaagagacaacgggacggagttcaagaactcacanatngaaggcttccttgaggaggagggcatcaagcatgaagtctctt

SEQ ID NO: 21119 - DNA, 373 bp, Zea mays
  unsure (1)..(373): unsure at all n locations
tactcannctgggggccgttggagatgcacaagtccctgaagtcctggctgtcttaactgttgccattgtcgactgtgagctcggatgggactccgaatcggcaaacaatgttttgccagaagaacttctgggtcgtcttcgacgttattgtggatactgtccttgcctcgatccacttggtaaaatattcgacggcgacgaaggtgaacttgagggtccattgagctgtaggtagtggcccgacaatatccagcccatagcgttgaagtggccatgtgtgggcaatcagcttggtgaactgcgaatggttgcccgagcanggagaanacttctggcaagcttcgcacgacctcgtgactcgattcgtggcgc

SEQ ID NO: 21120 - DNA, 414 bp, Zea mays
agctagccggcggtggtgctgttatcaaaggtggagctgcaactgagactgagcttgatgaccggcagctaagaattgaggatgcaaaaaatgccacttttgcagctatagaggagggcattgttccaagaggtggtgcggcatatgtgcacctatctacggttgtccctaagatcaaagaagcaattgaggaccctgatgagcggcttggcgctgatattattcaaaaggtaacttggctagcatatttataaactgatcagtgcctatgcagttagatggtatgaactgtatttgccagaggtccaatgcttgtaatatgtttatctgtgctggtaaatgtgactaggacatatgacccatcatttattatgtgcggcactaagttcatgagtagacctataccatcgtagt

SEQ ID NO: 21121 - DNA, 437 bp, Zea mays
  unsure (1)..(437): unsure at all n locations
tcgcatagaaactacctgtccatctgagtttgatggtgaattttaatgatctgaacaagatgttgaggcataacaggattggtaaccaggatttggtggcgatccgttcttgatgggacgctctgaatccttgaagagatcaagtggtggtgccaaccatgcctgatttgtgctaacttcacccatcgtagcatcttccccataatctgtaatatgagggtgccgaacctcttcatcaaccgagtgtatggngaaaaacttgcgggttatatgcagagatgaaggagatctctcatccaaaggattgctactctcataagataagtacttattcactgagtccatcttaggtggaaaatcctcctcagtgctgncaaacagctgcagtgacaagtatggtccgggttcttggtctggctgcttgtatctatgagtat

SEQ ID NO: 21122 - DNA, 473 bp, Zea mays
  unsure (1)..(473): unsure at all n locations
ctcgacccggatccttgagtcacctgagctgcagctcttagattgatttaaacttccaaatcttatatgatatgtatccgtggtggcaaaaacgaaccaaagatgtttntggtgatggtggatctcgtggtgaccaaaacgtggtagaactcaaaactctaaaggaataaactaagaccagcaactcgacacaaccgatgcaaccaaaaactcaacaagccctaactaagtagtactagtaaatgctcaatggtttataggattgcggtaaaactaatctactatttttttggctttttctggactataggagataagaaaacagcgaagaaaagtaaatctctcaccgataaaccttgctctgattaccaactgatgtgcacccgttgggtgattgcccgatctttcgatgagagggtgtggaataactcgattgggggaggagacgacgttcacgggccgactacagtctt

SEQ ID NO: 21123 - DNA, 441 bp, Zea mays
  unsure (1)..(441): unsure at all n locations
ctttattttctactacatgtcatcctcaaactgatggtcaaactgaagttgtgaatagaactntgtctactatgttaagggcagttctaaagaagaatattaagatgtgggaggactgtttgcctcatgttgaatttgcttataatcgatcattgcattctactacaaagatgtgcccatttcagattgtatatggtttgttgcctcatgctcctattgatttaatgccttcgccatcttctganataactaaatttgatgctactangcgtgctgaattgatgttaaaactgcatgaaacaactaaagaaaacatagagcgtatgaatgctagatataagtttgctagtgataaaggtagaaaggaaataaattttgaacctggagaattagttttggtgcatttgagaaaggaaagggttcctgaattgcgaaaatcta

SEQ ID NO: 21124 - DNA, 486 bp, Zea mays
  unsure (1)..(486): unsure at all n locations
tgtgcacgctngcaagacacacctaattgtgtggtgtccttacggggtcttagtgacccgtgagattaataagaagctctcaactggtctaagtaaccgtttgagagagggaaagggttgaaatagactcggcctttgtggcctcctcaatggggactaggttctttggaaccgaacctcggtaaaacaaatcatcgtgttcactcgtgttgatttccatttgatttgttttccctctttcctctctctaaagtttccttgccaatattgatttgagtttgctcccaaacgtcatccgcattatttgagcaactcgtagcaagagaaacaatcttccacactcggatttaattctaacactaaccctagccttagttcaagtttaagtttataaatttcaggtttcgcctattcacccccctctatggcgaattcacaaggctcanactagttggttcgtaggatgcctcagctacatacatcact

SEQ ID NO: 21125 - DNA, 419 bp, Zea mays
tacaaattcagaagggagaatgcagcttctgcagatcagccgaagtccatgctcttatgtgaggacatagcagagcaaaaggtgctgttgggctcccaattatccgaagaacaggagaaaaccttgataaggtttttgttcaacaacaaagatgtttttgcatggtcagccaatgatctttgcggagttaacagggatgttattgaacactcgctcaatgttgacccatcttttagacccagaaagcagaggcttctgaaaatgtctgatgacaaagccgaaggcgctcggaatgaagtcaaaagactcctcagtgcaggagttatcagagaagtaaaatacccagaatggctagctaacactgttatggtaaaaaaggccaatggcacatggcgaatgtgtatctatttacggatctc

SEQ ID NO: 21126 - DNA, 459 bp, Zea mays
  unsure (1)..(459): unsure at all n locations
atgccctcaagtcgaagctcacacaagcaccactgctgtaacttcctgantttgacttgacattcgagctcgagtgtgatgcgagcggcattgggattggaggagtgctcattcaaggaggtaaacatgttgctttctttagtgaaaaattgcatggtccaactctgaattattctacatatgacaaagaattatatgctttagtacgagttttacaaacttggcaacattatctatggtctaaagaatttgtcatacattcggatcatgaatctttgaagtatcttaagggacaatctaatctaaacaaacgacatgctaaatggatngaattcatagaatcatttccttacattattaagcataaaaaggaaaggataatgtgattgctgatgctttatctagacgttatactatgctgtcccaacttaatcataaaatatatggtttggagactat

SEQ ID NO: 21127 - DNA, 515 bp, Zea mays
  unsure (1)..(515): unsure at all n locations
cgtacccgngatcctttgagacacctgcggcatgcaagcttananaaatctggtatgaatccgcggttatatccagccagtccaaggaaactttggacctgatgaaccgtggtcggnggcttccactccaaaatgtccttgactntgctgggatctaccgcaatccccctggcagacagtacatgtcctagaaattgaatttcctccagccaaaacgcgcatttgctgaacttggcatataactgatgttctctcaagcgcgttaacacgatccataaatgctgggcatgctcctcttcattcttggaatatatcaaaatatcatcaatgaagaccaccacaaacttgtccaactcgggcatgaataccgagttcatcaaatacgtgaagtgggcaggagcatttgtcaatccgaaagacattaccagatattcaaataatccataccgcgtagtaaatgcggtctttggtatatcttcnggccgaataccgatctggtgatagcccgatctgag

SEQ ID NO: 21128 - DNA, 394 bp, Zea mays
  unsure (1)..(394): unsure at all n locations
aatcaaaacatgttatgcagcaaagcttgacttcagttgtacaaataatattgctgaatacgaagcacttctgttggggcttcggaagttaaaggcaatgggaataagaagggtcatccttaanactaactctcaagtcatttctggccatgtagacaaaagtagtaaggcaagaaatctgaagcttgaaaaatatttggatacagttcgaaggctggaggcttctttcgaaggtttttctgtcaagaatattccaagaggagagaacgagcatgcaaatttgttagccaaatcagcggcacatgggctccctctaccttcagaagtattntttgagacaataaaagcaccttcggttgaacttatggagagagcagtgcttacaatattccct

SEQ ID NO: 21129 - DNA, 419 bp, Zea mays
  unsure (1)..(419): unsure at all n locations
nacttctacaccatgtcgctgctagccaagttgttgcagctacctccatcaatgatcaaacgacatgaacgctccttaatgacacactntgtttgaaacaacgtatgtcgctgattctgctctgccttctccatttgtgcactaagcacacgctgtacaatgaggctctcataatgctctgcatcatctgcaccaatctgttcttcgggtggttccttagtgcctacatcatcagccgcaagcaaagcaagtgtagcttcatccaaatcactagcagaggaatacccaccatcgtcttttaccaccaaaacacgctgattaggacaataacgctgcacgtgtccatagcccttgcatcgataacacagaacatctcttggtctacctgtggaagctactgaagaggcactacctgcggg

SEQ ID NO: 21130 - DNA, 499 bp, Zea mays
  unsure (1)..(499): unsure at all n locations
tgcacttacgaccaaaccgcacccgcatccatatcacattcaatggctcaacaatagtggtaatgtcaaggtaaccaagctggtacgaaattaatttgctattggttcatatcgtgatgttgttgactgtgatgttgtgcctatggatgcttgtaatattctgctaggtagaccatggcaatttgattcagattgtatgcatcatggtagatcaaatcaatattctctcatacaccatgataagaaaattattttgcttcccatgtcccctgaggctattgtgcgtgatgatgttgctaaagctaccacagctaaaactgagaacaacaagaatattataagctgtggtaataacaaagatgggataaaantgaaaggacattgcttgctttgaacaaaaactgatgtaatgaattatntgttncactactggtgcctcgccttggatgcaggatgcttgattcaattcagaatcagcatcttgcctctgtttactaca

SEQ ID NO: 21131 - DNA, 464 bp, Zea mays
  unsure (1)..(464): unsure at all n locations
tagaannatctggtatgaatctgcgataatacccagctagtccattataactccggacttggtgaacagtggttgggggtttccactccagaatatctttgaccttgctaggatctaccgcaattcctttagccgataacacgtgccccaaaaattgaatttcctccagccagaacgcgcacttgctgaacttggcatatagctgatgttccctcaggcgcgtcaatacaatccgtagatgctgagcatggtcctcttcattcttagaatatatcaagatatcgtcgatgaagaccaccacgaacttgtctcaactcggcataaacaccgagttcatcaaattggtgaagtgagcaggagcatttgtgaacccgaaagacattaccaggtattcaaacaatccataccgcgtagtaaacgcggtcttcggtatatcctcgggccgaatatggatttggtgatag

SEQ ID NO: 21132 - DNA, 445 bp, Zea mays
  unsure (1)..(445): unsure at all n locations
agctattttgatgtatagcaacgtgcgtgagtcttgctaagcaatcatattaatatccttcgctacttattttggatgctggtggcttggcttattaactgctctaaaccttgcaatgatcatggagggcgtgtttgcactcgtatattttatcgggtctggcactcgtatatttgcatattcccgttctcgtcctatagcctatagcggatcaccttacctcaaataagaaagaactaactggctaaccctcgcactccaatagcctgcctccaaagcaagaaacccatctataagtctataagagagccctggcactatagacccgcanaagggttgatcgatcaacatgccaagaaactagatctgctgttccacactttgtcttttattngacgtattcgacctggcgccccanacagaaggcagatactggcagatctac

SEQ ID NO: 21133 - DNA, 513 bp, Zea mays
  unsure (1)..(513): unsure at all n locations
acctatgaaactcagcctttaagcccccccatctgcccanatcttattaatctcaagcggacctggtgggtggaaatactattagaggcctaacctacgtacgtgtatcattaggtgccgggtgggtaagttctttcagctgcaatatggggcttcttctttggtggaaaagctttgatagaaacggcaggcttctaccaatggaaaataggtcgagaccacgaacactagacactaggagattgctttcgccgtcggcatatgcggaagtattcgttctttgaaatattcgatccacaagcaagctctagtcaagtgtattcgaagatacaaagcatagctaggaacaatgcaagattacatagactgtacccatgatagtagtggtggcttaatggaaattgaattccactttttcacatanatcactacaaggcctgaagaggaagtaaaagtccccaatgggtgagatgatgtgtggctcagnctctactcagatngaaacgtctgaaa

SEQ ID NO: 21134 - DNA, 420 bp, Zea mays
  unsure (1)..(420): unsure at all n locations
tggtcgaggctcatacggaagaggacttatgtgtgcggccgtggagtntatccaccggcgtccatggtgacgtggtgtcgaagtggaggaagaagagagagagcgagggcgagcgagagggcgcaaaggagagctgatggaggcgagagcgactaagtgctcagtcgaagtggagcgagcgtggctaccgcgcttgcccacgcgcggggacaacgcgctgcaagcctagagctcacgctccatgcgttcgcatgcatagcacaaggatagaaggcccccaagcgttggctactatagacgaattgctcccctctctactggtgttagacacaattctcccatcctttattacttgtgaacttcatttcttttatagtttgaatccatctactaagtagctttatggagttagatactcac

SEQ ID NO: 21135 - DNA, 452 bp, Zea mays
  unsure (1)..(452): unsure at all n locations
tccggactaaatcggcggtattaaccngcagtncattggagcttccaacttggaggatagtgggttgggggtttcacttccaaataatccttgaccttgtgggaatcaccggaatcttttggtagaatataccatgtcccagaaatggatctcctctagttagaacgcacacttactgaacttagcataaatttgtgtcccttaagcgccgtaatacaatccgcaaatggccgagcatgctcctcttcattttggaatatatcaagatatcatcaatgaataccaccacanatttatccaactcgggcatgaataccgagttcataagatatgtgaagtggacaggagcanttgttagtccgaaagacataaccagatattcaaataatccatatcgcgtagtgaatgcgggcttgggtatatcttctggtcggatatggatctgatgataa

SEQ ID NO: 21136 - DNA, 454 bp, Zea mays
  unsure (1)..(454): unsure at all n locations
agcgtgttaagcatattntggtcacccatgcttgatgggtccatcaaggttagtcaacaaagatctangaacccaagagtcctttgtgttagcacttggtaaacttattacctttctagcacaagttgcaattttgggttgcctagttacatgagaaataattgacaagctagaggaaggatagttaccaatgggacaatccttgcattgatgtcccttctttcggcatatgtagcaaaggtgatcttcaagttttgaagatttcttctttacttgtttcttgcttgctacatggttagttaatattttcttttctaacatgccttttgttttaaatagggacaagatttaattaagtgtcccttctttgagcatntaaaacaaattttatcatccttgttagtaatcaagtcatttttaatatagggatatgacctaatcgagtgtccctttt

SEQ ID NO: 21137 - DNA, 492 bp, Zea mays
  unsure (1)..(492): unsure at all n locations
tattacggacctatgaaactcagcttaagccttcgaactgtgtccaaatatttctcagacttcggatctcttgctnntgcaactttgtcaacatgtccagaaataacttgggaatcggttntgagaaccgcccttcttatccccattgccttcaacttccgaagccccaaaagcaaagcttcgtattcagcaatattatttgtgcagctgaaatcaagttttactgcatagcatgttctgactttggaaggtgcaattaanacggcagctgcacctgccccgaagttccccaagagccatcgcataacactgtccaagcttcggcatctntacttggcttcttctcctgagcccctggcgtctagtcagcgatgaagtctgctagcgcctgtgactgaatcgaagatctatgcacataatcaatgctgaactcgtttgagtccgcagcccactttccaatccttccagtagcttctctatttctcataaata

SEQ ID NO: 21138 - DNA, 405 bp, Zea mays
  unsure (1)..(405): unsure at all n locations
acatccttggacatcaattagggagaagaagcactacgagaagcacacaacccagaaaggaaggcagttagctcgacacaacaagatgaagcacttgaccaagagatacagaacctggagaccttccatcaacaagcagaaaacacaaaggaaagatgctccacctcttagagttacaaaagaagatcgacgacacaactgaagaaatgtgcaacgttgcgtagaccacagagaatgtaacaccctcgaatttggggtataaaatttcttctctaaatgcctaccaaattcaggtggtaccctggtatctctctctagacttcctctctctcctncttttgtatagaagtagggttaataggttagggagtaattattttatttttcaaaacaatgtgagtcatg

SEQ ID NO: 21139 - DNA, 483 bp, Zea mays
  unsure (1)..(483): unsure at all n locations
ctttcttcgaatgatcttacccctagcctatcacgtcgttctggactcaatcgcttcttgtatggccacaaatccaacacaacatatacattntcataacacttactgaacatgtcgcctttttgtaggtcaacattatgaaccagatagcaggtctaatcgtcatcctataaaacttgccttttaactgtggtaccctcttgtcacatagaacgctatgttgttgcataatctaagctcggttatntatntcctccttagttgatttattagtttccattnttagctaatcgataattgatcgaatagttctctttcttagctaattgattgctgattggtgctataatttatggctatgaagcctttgaattgtttatataatagatcaatagaataaacctattgtggtggctagttcggagcacacaaaagtgtgtcttccatgttctgtgagtttgtgacattgagtgactaggatca

SEQ ID NO: 21140 - DNA, 405 bp, Zea mays
  unsure (1)..(405): unsure at all n locations
agcttgactggggtggaaagcgaccacgacaaatgataagacgatcacgaagctacgtgcagaaaagcttcagcatgacggcagaaaacaggaaccgacttaaggatgaaaagtcaaattaaacctcgaaggattgctataaagttattgtcaaatgtaaagggcatcaatgtaattttatacaggctgcgtcccgtgcctataaatagatgaacagtactcccgtactgttcacgctgacttggcatacactttttcgcatcacctctgtacctttactttccatcgatctgaaggtacattngtaatttgtttttatgaatttggtaataaaaaataagttgatgataatactcatatcattactcatgttttatatatgtgtgctcttttntatcatctatc

SEQ ID NO: 21141 - DNA, 408 bp, Zea mays
  unsure (1)..(408): unsure at all n locations
tgttgtagctgactntcgttntaagattcgttntcaacagaataagcataactaggtcactagaacaaagtggtggaagcttaaaggggatgtggcccaaactttcaaggagagagttatcgaggagggcccttgggcagaagagggagacgcaaacatcatgtggaggaagatggcgacatgcatccgaaagatagcttcagaagagtttgggttgagtcaaggaaacagaagggaagttaaagacacttggtggtggaacgaagatgtccaaaagactatcaaggagaagaaagattgctacaaatgcttacatcatgacaagtgtgcagacaacatagagaagtacaggatagcgaagaagcctgcanagcatgcagttagtagagctctgggtcaagcctatga

SEQ ID NO: 21142 - DNA, 445 bp, Zea mays
  unsure (1)..(445): unsure at all n locations
agcttctagacaacagtgttgacatcaacttatttgataaaggaagttatatgcctttggtttctattattcataacttgcaaattcagattntgtcatgactgacaaacccatatatgtattagttgtaaaagagtgtgtgtttgttgcccctaagtttattgtgagttcttattcacaaaccactttgagttccgattcacaaatttctgtattgtccataccttatttaaccaatattggaaccttggaaaagtagtcatttcctatatttgtatacttgtagaaattgtagcttaatgtggtgagatttagccaaataaaagtggacttgtcctgtatacttgaaccgttgaaccaattaaacaaagcataaaagaaaagaagaataggtaatctctatcttccaacaaatcagaattcacctattgtccatcttgagaca

SEQ ID NO: 21143 - DNA, 375 bp, Zea mays
  unsure (1)..(375): unsure at all n locations
caactttatcaaaatctactaagtatagctgaccctctaacacacccttaaatgctattgaatcatcacttcttctaaagacagtaacacctacatcagtaaagagacagttgtagcccaatttgcataattgagatacagaaagcaaattgtaatctaatgaatctacaagaaaaacgttggaaatagaatggtcaagagatatagctattntaccaagacctctgaccaaaccttgatttccatcctcgaatgtgatagctcgttggggatctnggtctttctcatangaggagaacatnctcttctcccctgcatgtggtttgtganccgctgtcatgatccaacttgagccccgatgcataaactacaaac

SEQ ID NO: 21144 - DNA, 442 bp, Zea mays
  unsure (1)..(442): unsure at all n locations
agctattttcttcctccttattctatttgtgttttcgctatcatattcaatagccacacaacacatgttggaatcgaaatgggaagacaaactctttggagaggtggaatcatcgattggtctccatcgttcattctcttcttctttcttgcaagggctagtatcacaaataccaaaagaagtagagacacaaaatgaactatcatgtttggactcatcaaatttgcgtctaattctagtccaaatatcacgcgcatcatggacggattcgtcatagtttgatatgaaggcatgataatcttctctgctaagagaattatttaagatgtcacaagctagatagtttaagcgataacaatttttgatcctcctcggaattaattnttccactagaattagagggaaaaatactcttgtctatacattgttctaatcgtggatc

SEQ ID NO: 21145 - DNA, 452 bp, Zea mays
  unsure (1)..(452): unsure at all n locations
tgagtctaaatgtccggataatattcatggaccatgatcccgttctgttngaggagtgtcacaagaagtttgaggaagaggaagcccaagaagctggcgtaaggtcaagacgggaggctagatggaggcgcctagaagatatcgcctcgtcaaagtctcctcagtgaagtagcgcgtcctcctgaggctgtagttcttcatcagtagagttcttctagctatcttgtcttgnggacttgcatattagcnagctctttggacaggatcaagtaaatgctgatgatgtagttgctggatgtcttcttgccgcctgttacttgtgaccgaacgttctacaggccgacatgtaaatacgaggcacatgatgggctgtgaagcttcaacagagcctcggcgggttctctttgccgtgtgatccactgatgacagtgtcngtttcatcatcatatgac

SEQ ID NO: 21146 - DNA, 258 bp, Zea mays
  unsure (1)..(258): unsure at all n locations
atacccgtgcgccagcaggtccctcgcccccctggcgtttgccttctccccggcttccttcaagctgtggccctagcgccctccctctggtgctcctctaccaggacgtcggtgaccttctcccagcaaatccccatccatggcgctagctatngggggcatcttcttcctcactggtgagctctaaaaagagcagtgcagacggtccggccccgaggccagacggtccgcggtccggactgtccgcggtggtggcgc

SEQ ID NO: 21147 - DNA, 478 bp, Zea mays
  unsure (1)..(478): unsure at all n locations
ctcgtacccgngatccttagagatcactctgcatgcatgcaagctttagaanagtcattacacaaacataccattgtgatcttacttacttttgagatcaacatcatggctattaagtccaatttttttctgccacaattgctacaagtttattttcagcggtcgtctttcagcagccatcgaatataacttattttcgacaggccaccaccaatcagcgttattttatgcaacgaacttatgacgaatgccaaccgtcgaaaataaacctgtgtccaccaaacaatagttatttacgtgggatacacttagtttcggatggctttgatcagtgaacaattaccaatgagatacaatcacatacgaacttctggtgcttatttgctgttacctttgtcagtcttgaatagactaggatgagctattgagcgacaaaaaacaacaagaccatcaaccgttgagttgtgatctatttcct

SEQ ID NO: 21148 - DNA, 409 bp, Zea mays
  unsure (1)..(409): unsure at all n locations
acgccctncgctttccagctaccaaacataaacagtagctcgtgcaatgcacactgacaacctagctgatcacccgtggacaaccatacatgcacgccaactattgcggtagattattatattatatgacatgagatgtggcctcattgatatataatcaatatacctgtatcggtttcggtggtaatgcgtgcctagggatgacagtgggtacgaggtttcagtggtaatgcgtgcctatggatgacagtgggtacgagtatgtggtaaataactgaatatgtggtaaataactgtggataattatccattggatatgggtacagcgaaatttggatccgcatgtaaactatagtataatatccacgaagtaattttcgtgtgattgatatcatgatcctacccgtac

SEQ ID NO: 21149 - DNA, 439 bp, Zea mays
  unsure (1)..(439): unsure at all n locations
agctntaccaaatggacatgaagagtgccttcctcaacggaccaatcaaggaggaggtctacgttgagcaacctcccggctntgaagatagtgagtaccctaaccatgtctataggctctctaaggcgctttatgggctcaagcaagccccaagagcatggtatgaatgccttagagatttccttattgctaatggcttcaaagtcggcaaggccgatcctactttgttcactaaaactcttgacaatgatttgttcgtatgccgaatttatgttgatgatatcatatttgggtctactaacgaatctacatgtgaaagaattagtaggatcatgacacaaaaattcgagatgtctatgatgggggagttgaagtattttctatgattccagtcaagcaacttcaagagggaccttcattagcgaaacgaagacactca

SEQ ID NO: 21150 - DNA, 438 bp, Zea mays
  unsure (1)..(438): unsure at all n locations
atactcacgctagcaagtgtgagttctggatcnggaagtcctgttcttgggtcatatcataaaccgagatggattaattgtggatcctaagaaggtagcacccattctggattggaaaacaccaaaagttgtatgaggaatcaagagtttcattggaatggctggataatattggcgtttcattgaaggtttctctaagattgccaggccaatgacagccttgctggncaaagaaagtgaattcaagtggaccctatagtgccaagagtcctttgaaacattaaagaagaggttgactacaacaccagtattgattctactagatgttcacaagccattctcagtatactgtgatgcttcgtactccggactgggatgtgtgttaatgcaagaagatagagtagtggcgtactcgtcttgacaattgaagattcatga

SEQ ID NO: 21151 - DNA, 440 bp, Zea mays
  unsure (1)..(440): unsure at all n locations
ttctaagggagaacacgtgataggtctaaccaatgttactttcgaaaaagatagtccttgtgcagcatgtcaagcaggtaaacaagtgggaggagcacatcacagcaagaatgtgatgaccacatcaagccccctggagctgctacatttggacctcttcggacccgtcgcttatctaagcatatggggaagtaagtatggtttagttattgtggatgacttttcccgcttcacttgggtattctttttgcaggataagtctaagacccaaggaaccctcaagcgcttcctaaggagagctcaaaacgagtttgagctcaaggtgaagaagataaggagcgacaacgggtccgaattcaagaaccttcaagtggaggagttctttgaggaagaanggatcaagcacgagttcttcgcttcctacacaccacaacaaaatg

SEQ ID NO: 21152 - DNA, 454 bp, Zea mays
  unsure (1)..(454): unsure at all n locations
taccatgtatagcatgcttaatgaaacttcgtanaatgatgcagtttaatacgaaaacttggtcatcaaacagactggtgaccttctgaccagtcagcactaaagtaggtcggctgcctttctggtagatttgattaagtcggccgtagaagcattggaaactagagttcaagagctttccaaaaagtacttatgagccttcatagctattgggaatcaaaagatatgactgtttcttctggacggttctgtagcgctgaactgactcggacatagctcttcttgctgattcgcctttgatantgtttgtccttcctctttggtaaacctaagtaatatcagcatacacgacttaggtagcataaaattctcattagtggttaattgaaattcataaagtagcgcgtgcacctcttgctgagcttcttagctcggctacgtgtaattgatccgt

SEQ ID NO: 21153 - DNA, 416 bp, Zea mays
  unsure (1)..(416): unsure at all n locations
agcttgttgcacccttcggcgtatagtcgcagttctagtaccaagtcttccacttggaagcctcagggccgaacccttcaagcgtggtagctgtccaaggactgctgataccgcgccgagtgtagtaaggccacgtcccgagcctctttcagatggtccaacgaatcttctcggntggtctgggtggcttggtcgtcgtaagcctttgtcctcggagaaccgtattctaagtctgtgggtaggatggcctcggccccatatactataaagaatggcgagaaacccgtggctcggctcgacgtcgtcctcagactccataccaccgagggtagctcttttacccatcgcttgctgaacttattgaggttgttgtagatcctcggcttcagtccctgcaaaatcatatcggtggcatg

SEQ ID NO: 21154 - DNA, 432 bp, Zea mays
  unsure (1)..(432): unsure at all n locations
aagctgccttcgcttcagtctatcatccgcagtccaacggngtcatggaacgcgccaacgggaaaatcttcacagctgtcaagaaaatgctccttgatgaaaggaagggcagatggacccgattgctacctgaggcagtatgggcactaaacacgactgagtgcanggcgaccgggtttactcccttccgccttctatacggatcggaggccatgaccccgcaagaaataaagcatgggtccccgcgaacagtcccgtcagccgtccccgacgtggacgagccaacttcnaaggatctcattgacggagaccgagtcttcgccctacaggccctgaacaagtaccaagcccagaccaaagcatggcgcgaccactcagtcatcccgagggagttcagcgagggggacctcgtactcgtccggacagctcgga

SEQ ID NO: 21155 - DNA, 451 bp, Zea mays
  unsure (1)..(451): unsure at all n locations
agcttctgtttcatctatgttgtgaatagccttctaatctgtccaacttccttcggctctcctagcagcttcttgactcccatgcacagcaatggacccttgttccaatggtatcttcatgcagaggtatgctgggtggaggatagctttgaaggcatttagcgtccctcaaccaatgattgcattgtatggatactccatgtcaacaatatcaaaaacaacttgctttgtccttgtgttgtgaatgtagccaaaggtgactggcattgttatcttgtcaagtgccactatctgtctccctccgaagccacatagaggatgtgttgcatcatgtatctnttcatctagctcttgcatttgcctganagcctttgcacagatgatatctgttgcactgcctgtgtccactangacattgtggactagaaatcttttgataacacaagatatg

SEQ ID NO: 21156 - DNA, 437 bp, Zea mays
  unsure (1)..(437): unsure at all n locations
tctaaagggagaacacantttgngactaacatatgttcattntgagaaagacagggtttgtagcgcatgtcaagcaggaagcaagttggctcccatcatcttcacaagaacatcatgacgatcgacaggccgcttgagctactccacatggatctattcggcctgatcgcttacataagcatcggcgggagtaattattgtcttgtaattgtggatgattattctcgcttcacttgggtattctttttgcagtaaaaatctcanacccaagagaccttaaagggattcttgagatgagctcaaaatgagttcggattaagaatcaagaagataagaagcgacaatgggacggagttcaagaactctcaaattgtaggctttcttgaggatganggcatcaagcatgagttctcttctccctacacacctcaacaaaa

SEQ ID NO: 21157 - DNA, 434 bp, Zea mays
  unsure (1)..(434): unsure at all n locations
agcttcttaaggagaacatgtgatagggttgtcttacgtgcaatttctaaaagatagaccttgtgcagcttgtcaagcaagtaaacaggtgggaggagcgcatcacaaccagaatgttatgaccacttcaagacccctggagctgctgcatatggacctcttcngacccgtcgcctatctgaacatangagggagtaagtatgggctagttattgttgatgacttttcccgcttcacttgggtgttctttttgcaggataagtctgaaacccaagggaccctcaagcgcttcctcaggagagctcaaaatgagtttgagctcatagtgaagaagataatgagcgacaacgggtccgaattcaagaacctttaagtggaggagttccttgaggaggaaggggatcagcacgagttctccgctctctacacaccac

SEQ ID NO: 21158 - DNA, 380 bp, Zea mays
  unsure (1)..(380): unsure at all n locations
ntctctgctcttatggaagaagcagtggattcaaatcctagttctcataatcatgcagtggaaccgaatagaagcaaatcaaaacagtccaatgatcgatagataacagtatgcattctctttaaatatgtgtttgtaatatgcacgatatggttcatcaatttntttctgctttntatttgtatcatgatgccntgtgtttggatacagctagcggaagcttgatgtccaatctggtaccttacattggcatgngaattggcaattcaaatgaagctagcttggctatattgatttaactacggtgagcaaaaaaggatntgaggtcaggaagaagtatacagacaaaagggggcagtcgatggcagaattacatcatg

SEQ ID NO: 21159 - DNA, 446 bp, Zea mays
agcttcagaataacacaagaggagtgaagcaaacatcgtttgacaagctttatcacggtgaaacgggtagacaacgtggctttagcataatgaaagggaagcacaacaaagcatgcttcattaagcaggcttcgtcacaacgaagcaatgagacacataggtttaattttgatgggacctaataggtcactctagactggttatcttttaccttgtttacctctgaatcatttgggtagttttgctattgctttatatggttttgggttaatatttctttatacccatgttccaattattcgtttattttatttatgttcacgtcaagatcattatctttaattggaaaatggagcttaacttgagaaacacgtgccaccacaagggtggaatgggacgcccttggctgactaattatgaaagctagtggaagactaccttacccg

SEQ ID NO: 21160 - DNA, 368 bp, Zea mays
cgtgacctatgaaactcagcttagctcctctatgactctggcgcttttgagtcagtccaattaccttcggcctttctggcagcttcctgacttccatgtatagcgatgggtccttgatccgaaggtatcttcatgcaaagataggcaggatgaagaattgcttcgaaagcattgagggtgccacgaccaataattgcattgtaagggtattccatgtcaacaatgtcaaacacaacttgctcagttctagtgttgttgatgaacccgaaggttactgacatggtgatcttgcccaatgctacaatctgtctccctccgaagccacagagaggatgtgtagcatcatgaatcttatcttctggctcttg

SEQ ID NO: 21161 - DNA, 439 bp, Zea mays
  unsure (1)..(439): unsure at all n locations
gctttcacttagtgtcgcttttcacccttagacagatggtcagtcagagcgaacaatccaaaccttggaagatatgttgcgtgcttgtgttctgtcatggaagggtagctgggaggatcatcttgcactggcagagtttgcttataacaacagctaccaggctagcatcaagatggcaccatttgaggctttgtatgggaggcggngtatctctcctctgtgctgggagactttgggagagagatcccttgttggtcctgattgggttcagcaaacttctgaaaagggtcaggaaattcgttagaataatttggcagctcagagtcgtcagaagagttatgctgatgtgaggaggcgggatctggaatttgctgtgggtgaccaagtccttctcagggtatcacccactaannggagttgtcggntcggtgtctcttgg

SEQ ID NO: 21162 - DNA, 498 bp, Zea mays
  unsure (1)..(498): unsure at all n locations
ctcagcttcgtgaagatattttccgaagctacacttcccaagatcaatagtgtatctccttgtgacttaacatgattttcccctttntcaaaacattcttctgaagatcgatattgtgtccccttcttgtgccatatgcagcatgatgtatgatgcttatgccatgcgaaatgatgtgatgatgttatgctatgtaagatggtatntattccgaagatacacgcacatccctgtaatgaaacacataatctttntaaatcagcgttgactnttcgctgtaagcctcccttaggagcttcttcgccttttacttcagcggaatcagcgtttatttttcgctgtaagcctcccttatgagcttcttcgccttttactttcagcggtattcgcgttgacttttcgcgcttcgccttttacttangcggtatcnagcgttaattttcgctgtaagctctgcattccctttggaacgactttggagcagaanacttacactgg

SEQ ID NO: 21163 - DNA, 468 bp, Zea mays
acccggatccttgagtcaccgctgctgcagcttcagccaccataagaagcaaagaatgtgcatagagaagagtacaacgtgttggagtgcaaggacccttcatcaagttgcaaatggtcccatgtgtcgattacattttctcaagaagaccttcagcttaaggattaccctcacaatgatgccatggtcatatcatgtgtcattaaagggttcttggttcataatgtccttgtagacacgggtagtgcagcagacattatttttgcaaaagccttcagacagatgcaagagcaggatgacaaaatacatgatgtaaacacaccccctgtgtggcttcagaggaagacagatagtggcacttggaaaaataacaatgtcattcaccttcagctatgtgcataacaccagaacagagcaagttgtatttgacattgtagacatggattatccttacaatgcaatcattgg

SEQ ID NO: 21164 - DNA, 475 bp, Zea mays
  unsure (1)..(475): unsure at all n locations
acctgcattacggacctatgaaactcagcttgngccaggagtcgctntagaggctagcattcccgctgaccaagttntgggctctggtgatggtaccgagttggtccctgctggttcattgcaagctgcttcgggtggcgaccttacgccaggtcgtcaattgatctctcacgatttgggagtcccttcgttcttctccaatctccaggtactgtgatatattctggcctgaattttacaccatacgaactgcttccaacacgctcatatgttctccatatcangcattggtggacggaatggctagtcagctgaggttgcaaggtgcttctgttccagaaggagcttcatctctggcacgttggaatccggtgttgctccaacatcgtgtctctgatttggaggcgatgaatggctggtaatactctnttgcttctctntgttgaccttattgaactgctttacattatgactc

SEQ ID NO: 21165 - DNA, 469 bp, Zea mays
  unsure (1)..(469): unsure at all n locations
cgctntaacctccaagagtatcaaatccgctctagatcttgatgcttgcccaaagctntaaacaagtgaaataaaagaatggtgctcaaagatcagagatctcaacctaacactaagtttcccaaaagattttggggagaaccagatttgtggtgtgtgagagaaaggggaggagtacatgctcttttcaacttttgtctctggtttggtgtgacttgaaatcatggagagaggttgaagaaaaaataagggctatataagatctagccgtttggatgaagcctgggagttatgcggttgaaccacataaatgacgattggaccgtttcagcagatgaaacacagttaatgatggtgagctatgtggttgaagcacccatttcatcttgtgcagttgaacttgcccgtcgaatggttcaaccgcttatcaagagaggatctctaggcangtttggatgaaccacacctt

SEQ ID NO: 21166 - DNA, 295 bp, Zea mays
  unsure (1)..(295): unsure at all n locations
agctgggtcctgtgcctataaatagagaacaggtggtacttttctgattactctattctgtaactgctaacgcattactctggaagtatttgttctttgtcaagggcaaggtattaatgtaaccaaacatcatgttctaatatctcaatttgtattatnaaatgagcaaatgatgttattcattcctaatattctttaaccttttatactctatatcttatattgcattattttacttcttgatacgaaggtaggaccttcgttatttatcattcatgaccttcgtccgagctca

SEQ ID NO: 21167 - DNA, 456 bp, Zea mays
tagcaatgtagccgtattctgtcctacttcagattctgcttaagcgtcttcgggccctcagccgaaaggagacgacgaaattaaaaagatggctgaagatattatggacgaagtcgtcaatcggctcctgaacgaggctgcagaagtcgttttgaaagaagattaagtatttttgtaaaaaacttctgaaatgtaatatactgtaacattttgtaaaccctaatgtaatatacctatttttgttactccattctttacgatgcatgaaactttacacgtaccgcttttgagtctttgacgaaaaaacaccttcccttcttttcatgcttcgtgaagaagaatttttcttcgtcacaacaatatccagtgttctgatgaataatatccaggcttcgtgaagatattttccgaagctacacttctgaagatcaatgatgtatccttttgtgacattat

SEQ ID NO: 21168 - DNA, 415 bp, Zea mays
  unsure (1)..(415): unsure at all n locations
gagaaggctgcttaagcagatcagccaaagcctatgctcctatgtgaagatatagcagatcaaagggtactgctgggatctcagctatatgatgagcaagaaaatactctactaagattcttcttcaacaataaagatgtcttcacttggacaaccaatgatctttgtggtgtcaacagagatgtcatttaacattcacttaatgtggatccatctttccggccaaggaagcaaagactntggaagatgtatgaggattaagctgaaggtgcttggaacaaagtatagagacttctcagtgctagtgttatcagagaagtaacatatctagaatgactagccaacactgttatggtgaagaaggctaatggcaaatggaaaatgtgtattgatttcacagatctcacaaagcatg

SEQ ID NO: 21169 - DNA, 415 bp, Zea mays
  unsure (1)..(415): unsure at all n locations
atctatgatcncaggtggatgttatcatttggcggtgaagagccaagggctggacccatatgccgactgtctttgcaacatacacgagttatcctaccagatgaaggcagttgggaaggagcagtatcataacattttttgctgttactccttcgtaaatcgctctggtgcgagacgctctgtttcatccctccggaatatcatgcctcaatcttagatgaagcggtggttttatgttaagaatgacgtatttgagagggaagatgtgaaagatgtgattcagcgacccattcaatcacgctttgtcattagaagacctatgattgtggatagtgaaaaagcgcaagcttgcctggtagcctttaacactgtatgcagctacatcggcttcagagatttggttcaagagcatata

SEQ ID NO: 21170 - DNA, 475 bp, Zea mays
  unsure (1)..(475): unsure at all n locations
atccttagagatcatctgcggcatgcaagcttcatactntgctatattatttgtacattgttattgtagcttggcaacgtacgatgtcttcaccatagatggtgacacaataatggctgcaacaccagccccgaaggacccccatgagccgtcacaaaaaactgtccatacgacttcatatgaatgggttgcttcgtcctgtgggcctgaggtccaatcagtaataaaatctactaatgcttgagtctgatggaagacatgtgaacaaaatcgaagatgaactcgttgagttctactgcccactttccaattcggtctggagcttctctgtttcttataataaccttaagtggttgtgaccacggtacaataatattatgggactagaaatactgtcgaagctttcttgaagccatcacgaccgcataaaggaccttctccatctcagtgtaatttattttgggatggctcaata

SEQ ID NO: 21171 - DNA, 372 bp, Zea mays
  unsure (1)..(372): unsure at all n locations
ttcgcttctgtctatcatccgcagtccaacggngtcgtgtatcgcgccaatgggaatatcttcacagctgtcaagaagatgctcctcgatgaaaaaaaaggcagatggaccgatttattacctgaggcagtctgggcgctaaacacaactgagtgcagggcgactgggttcactcctttccgccttctatacggatcggaggccatgaccccgcaagaaatatagcatgggtccccgcgtacagttccgtcagccgtccccgacgtggacgagccagcttcaaaagatctcattgacggagaccgggtcttcgccctacaggccctatacaaataccaagcccagaccaaagcatggcgcgaccacgcagtc

SEQ ID NO: 21172 - DNA, 465 bp, Zea mays
  unsure (1)..(465): unsure at all n locations
agctcgagacaggaacaatccgggcatgcactatattccttgaagaagatgtcaaggtatttgaggattgccacgaggagggaacaaaataagatattcaacaccttctccataagcctcaaccacgcctccacaaaaggtaacatccaaggtaatgatcaagccacacttcacattaagaggtgtagtgaatgctttaaagaggggcacttgattaggtcatgtccctacgttaaaaatggcttgattattaacaaggatgattgactttgttttaaatgctccaagaagggacacttgcttagatcttgtccccatttaaaacacaaaggcatatggttagaaaagaaaatttttacaaaccatgtagcaagcaataaacaaggaaagaagaaatcttcataattggatacgcctatgctcacatgccgaaaaaggacataatgcnaaattgtccattataaa

SEQ ID NO: 21173 - DNA, 170 bp, Zea mays
cacaaggtagcatgaaaaggttgcttgcaacataaaattgttcggggtgttagatttttgaaccttgaaggtaaaaggttattatgacgatggtgggactgtcgaacacctattatataatgacatatgaaaaattaatgcttacagtgtctttatgattgtggcaaaaa

SEQ ID NO: 21174 - DNA, 429 bp, Zea mays
  unsure (1)..(429): unsure at all n locations
agcttatgaatgagctcaatattcttgattctcgaaactttgattgaaacattgcacacattgctcatttatatacctttgnattggtacaaatgcatatttcttattcatcttgtgccaaagctaagacaaatgtgcttccaagtgtatttctatccttagtcttagattgaaagggaaatggagtaatcggcaaatgcaaggcttccactacgactctgttggtaacatttatcctttgccctcactcataaactttcattcatatcctttaaaaagggggagaaaagacaaggcctctcaagatttctttcgttttggcgattaatgccaaatggggagaattatatgcccaaagcagaggaccgcaccccaccctattttttgaaactgttcacagaggggagatatatttaattgcataccctt

SEQ ID NO: 21175 - DNA, 365 bp, Zea mays
  unsure (1)..(365): unsure at all n locations
ctggtcttttataggaaccagggacttagtaccagagcatatcgcccttcaggtgtgggcgcttgcggagaaatgggaaatgccacaagaaaccattaaagaggccgacgaaggtggacttatcagatttaagtacacttttaaatttggagataaatntattgagccagatgatgagtggttgaaaagcattgataatttaagtgatgagctgcttgggacctactcgaaggccgaagatactgcaatgtcagcagccttcggaggccaacaaaagaagaggctgaatcgggtattttgatgccatcggttcgtctaccctgactatttgctatccactccgaagcagaagagaaaaaacacaa

SEQ ID NO: 21176 - DNA, 449 bp, Zea mays
  unsure (1)..(449): unsure at all n locations
gcttgtgaaggttcttcatccccacatgtgctaagcggcgatgccacagccagcccatgcaagtcttagccattaagcatgcatctagaccggcctcttcttttgcaaaatcaactaaataaagtntgccgtctaatacacccttaaaagctagtgaaccatcacttcttctaaagacagacacatctatatttgtaaacagacagttatatcccatattgcacaattgactaacagatagtaaattatatcctagtgactctactaaaaacacattaaagatagagtgctcattagaaattggcaatttacctaacccttntaccttgccttgattcccatcaccaaatatgattgaatcttgggaatccttattcttgacgtaggaggtgaacatcttcttctcccccgtcatatgggttgtgcatncgctatcaataatccagctt

SEQ ID NO: 21177 - DNA, 273 bp, Zea mays
  unsure (1)..(273): unsure at all n locations
atactagctgtaccctattgaccctgtgagataatagctatccctctggttatctgatcatcatctggtaggacacgcgcgtaaattcactagtcggttgaaggtcctcgcgggtccaaatgctgacagttggcgcgccaggtatgggaccagctgcctgttggcaattatttcttgttgagttccagatggacaatctttagcaacgacctctttggtccgagacggtgctnctgctttggagtcttgagttcatgttccccgacgacagct

SEQ ID NO: 21178 - DNA, 416 bp, Zea mays
agcttgttaatgttcttcatccccacatgtgctatacggcgatgccaaagccagcccatgctagtcttagcaattaagcatgcatctagaccggcctcctcttttgcaaaatcaactaaataaagtttgtcgtctagtacacccttaaaagctaatgaaccatcacttcttctaaacacagacacatttacatttgtgaataaacagttatatcccatattacaaagttgactcacagacaacaagttatatccaagcgactcaactaagaacacattagaaatagagtgctcggatgaaatagcaatttttcctaaccctttcaccttgccttggtcccatcactgaatatgattgaatcttggggatccttgttcttgacgtaggaagagaacatcctcttttccttcgcatgt

SEQ ID NO: 21179 - DNA, 475 bp, Zea mays
  unsure (1)..(475): unsure at all n locations
tggatttacccggactgaacagatcattgcagcagctgtgtntgtgaaaacaccagatcaaatgagcatgcttctaacactntacgagactntgaggagagagttcatcctacacatgcttgatatttgttgcatgctcagttcttcggttgcctagaagtagtagtagtatttgctagtttctagttggttaattccattgcacagcttaagtgcccctttaaattccattgcctagttgcttaattccattgttagtttctctatttctattgcctagcagtagtagtagtaagtaagtagtacatagtatttgctagtttctaagatcattgtaactcgctgcattattgataagtcgcttgtaatatgcctcctgttgctggttgattgacaatagcatgcttctactttatattcttatgttgggaaaccttgttttagaggatgatgaaaggaggcagatggaaagtgg

SEQ ID NO: 21180 - DNA, 316 bp, Zea mays
  unsure (1)..(316): unsure at all n locations
gtgctcatatgaagcaggggtattgtatataccggtgtacagaacctcatggcgtatggaggaggaaggtctgccgtcaagcaagtatgtggcagctgcgatggcctcaacccaatacttgggtggcatggacgcatgaatgagcanggtacacacagagttgttgagggtacaaagaacacgttcagcctttgcattctgtggtgaagtgtggggacaagaaagattataatgatggtgtgggcacaaggagatcatcatggcattgtaacaaattatgtccattatagcttgaaacacttaatatgtactaact

SEQ ID NO: 21181 - DNA, 475 bp, Zea mays
  unsure (1)..(475): unsure at all n locations
tatgaagattcttcattccaatatgggctagtccgcgatgccatagccatcccatgttagtcttagcaattaagcaagtgttaagttcaacattggtctcattaaaatcaactaaatatagctgaccctctaacactcctttaaatgctattgaatcatcacttcttctaaagacagtaacacctatatctgtaaatagatagatgtagcccatcttacacaattgagaaaacaaaagcaaattgtaatctaaagaatcaacaagaaaaacattggaaatggaatggtcaggagatatagcaattntacccaaacctttgaccaaaccttgatttccatccncaaatgttatagctcgctggggatcttcattattctcataggaggagaacatacttttctcccctgtcatgtggtttgtgcacccgctatcgattatccaacttgaaccacctgatgcataaacctacaaaac

SEQ ID NO: 21182 - DNA, 428 bp, Zea mays
agcttctatcacaaagaaatgtccttaatgtgatcatcaattatcaagagatagcatagtgctcaggattcagtctgtctaaaccagtcgccatgtatttgtaaatacacatcgattactagaacatcgaagcttctaccacaaccaaatgttcttaatgtcaacaaaaattatgaacagaaaacctagtgctcaaggaatcctacatccatcgaatgtatgttgggtgaacctcaccctagatctggacgagttgtagcatttcaagtactagaatcatagaaagcataatggatcttcaatgtgtacctttttctcttcggatctggaccacccgaccaaatggaagacgatgacgatggtggcgtcgagatgcgcttgcgtttctccgcaccttccttcgtcggcgccgtggatcttctcaactt

SEQ ID NO: 21183 - DNA, 417 bp, Zea mays
  unsure (1)..(417): unsure at all n locations
tctttatcatgacgacagtctaagcactttcttcttagataggcagatacgtgctaacatatgtngacgacatcatagttgatcgttcgaggctagaagatcacagtgctgatctacaggaaacatttgctaactttacgcaagctggtctgaagatgaatccagaaaaatgtgtcttctgagtacaagaaaggcaatatttcttggatgtctagtttcaacaaaaggaatcgaagctaatccagacaaaattgaagccattcttcggatggagccgccaagcacaaagaatgaggctcaatggctgacaggaacgatggcatctctgaatcgatttatattcagatcagccgagagaaacttaccattctttgaaatgctgaaatcgaccgaagtctttcatggtgatcagtcagc

SEQ ID NO: 21184 - DNA, 117 bp, Zea mays
tgaatcgaacaatgtatctaaaatacaaaaacttgaatgatggagaatacatttccaacttacaactgattctccaggacgcgtggattggtttaagagaacactttcctgatatgt

SEQ ID NO: 21185 - DNA, 287 bp, Zea mays
  unsure (1)..(287): unsure at all n locations
gttagttattaattgatgacttttcccgcttcacttgggtgttctttttgcaggataagtctgaaacccaagggaccctcaagcgctttctcangagagnctcaaatgagtntgagcctcaggtgaagaagataaggagcgacaacgggtccgagttcaagaacctttaagtggaggagttccttgaggaggaagggatcaagcatgagttctncgctccctacacacctcagcaaaatggtgtggtagagaggaagaacaggacgctcatagatatggcgaggact

SEQ ID NO: 21186 - DNA, 439 bp, Zea mays
  unsure (1)..(439): unsure at all n locations
agctnttcgcaagcgcgctggcgtcgtccactttctcgggattggcgtgtncgcgggagacggcgctcgccttcatctcaaacgcgaggtcgacgcccagcgcgctccccgttggggtgctagggacgtcgactcgctcgacagccgatgaggcgcgacctcctgcttggccttggttgccccgcctcctcctccgttggcgggggagaggacggggcgagctctaatgttgttcttccgccacgcggggaagacgttgtcgattccgccgccggcgggcgggctgtcggccgccattgtcgttgtcgcgcggcggtggaaggagtatcatgtcgtggctgctgtcgagggacatgaactcaagactcctcgaacggagcaccgtcccgggttggagagggtgtcggagactgcccatctggagcttgactggaagctt

SEQ ID NO: 21187 - DNA, 483 bp, Zea mays
  unsure (1)..(483): unsure at all n locations
tcggatgtgcatcgactacaccagccttaataaggcttgtcccaaggacccgtatccacttccacatatagatcanatcatggactctacctccgggtgcgacctcttgtacttcttagatgcctactctggtttccatcanatccagatgtctagggaagaaaggaagcataccgcttttgaacagtggatgggctntattgctatgtcgtaattgtaacacccctggtgttactgttactaaaatttgagcataacatcataagcattggcatatcatgtgtttgtcacacctagagtgcatntactaggcaaaaatttcaaacaagttgtattgctatgacatnttatgggtaaagccctagagtaggatacttaaccctagattgagcttaaaggggtaaccaaagcctaaacaatagaaaacttcaaaacttgataataatgatcataanataccaccattaatgaattaaaggacat

SEQ ID NO: 21188 - DNA, 418 bp, Zea mays
  unsure (1)..(418): unsure at all n locations
agcttgtgaaggctcttcatccncacatgtgctatgcggcgatgccacagccagcccatgctagtcttagcaattaagcatgcatctagaccggcctcctcttttgcaaaatcaactaaataaagtttgccgtctaatacacccttaaaagcgagtgaaccatcacttcttctaaagacagacacatctacatttgtaaatagacaattatatcccatattgcataattgactaacagatagcaagttatatccaagagactcaactaaaaacacattagagatagagtgctcatttgaaatagcaattttacctaatccttttaccttgccttgattcccatcaccgaatattattgagtcttgggaatccttggttttgacgttggaggtgaacatcttcttctcccctgtcatat

SEQ ID NO: 21189 - DNA, 366 bp, Zea mays
  unsure (1)..(366): unsure at all n locations
ctgggtagttcacaatatctatgttctagcaaaattggtttgacaaattttggttgaataaaactcagtgtagtaaattttatagttctttgctcatttaaaaagaataattcttaaagtttaaaggaaaagggctttgcaccgaggtccctgtgttgtttcttaactaaaccgttcaaaccgtgcccctgtntaactgagtcactgacttcgcgcataaccccctatctttttcctttcttaacccgcgctccctcatcgcccgaacagtagccgcagagaggaaaagtggtggcgcggcttactatcggtgggagaggtcccgtggagggtctagtgatgtctggnggcttctggtggtcacgt

SEQ ID NO: 21190 - DNA, 382 bp, Zea mays
  unsure (1)..(382): unsure at all n locations
agaagcttactctccacatcactaggtgctcgagcnttgaacctatcataaaaatggtttggttatctcccgtgtaatcaaaggttttgcagtacataatgttatggtcgacacaggcaagtgttgtagatattatatttgtcatagctttcaggcaaatgcaagagcccgaagataagcttcgagatatcagctttcctctttgtagcttcagaggacagcatgtgatggcactcggaaagttgatcatgctcgttaccttcgacaatgtcaataacacaagaatataagaagtcatgtttgatgttattgatatggaattcccatacaatgtcgtcatcggaagaggaactctcaatgttgttgaagtaattctgcattt

SEQ ID NO: 21191 - DNA, 374 bp, Zea mays
  unsure (1)..(374): unsure at all n locations
acgaagctccagtttgaaacttgcttctgaggaagacacttatgaagantctcaagttcataattgagcggccagagtccgctctaccgtccaggctgagcgctagggggaggaaactgaagcttcggagactctccccatctgcgaagccatgccacgatctggtctggtgacttcagaaaagatccctcgtgatgatgcacatcatgcgaatcatgcattctgtgaagcagaggaagaagatactgacgtaactgattccgaaaatgattaccgcattgacatgccaagcaagccgagccacttggacttcaggatatctactgtttcgaaagctgatttgctcaacatggttaacgtcggggtttttactg

SEQ ID NO: 21192 - DNA, 264 bp, Zea mays
ctttggaatggtgttctctttgttgagagattgagccctattaagttttcgcttgtgagggacataacatcatgcttggtggttggaaatcttaaagcaaggagaatttagtggtgtagaactaacaaacaggatggttgtccagaccttatgaattgtgagggaaaatgaagaaagattggatgggctattacatggctgataatgttaacccttatttagctcaatagccctcatcttgacaagagatgggagatgggttat

SEQ ID NO: 21193 - DNA, 452 bp, Zea mays
  unsure (1)..(452): unsure at all n locations
gcttggtcagttagctacctaaggacatctgcatttacacttgctagagatacatctatatggatcacaatagcctcaagtacatcttcacccaagctaacctcaatatgagaaagaggagatggttagagttaatcaaggactatgacctagaagtgcactaccaccctangaaggcaaatgtggtaggagatgcgttgagtcgcaaggcccaatgtcattgcttgaccatggactctcatatcaccactctgcgcgatgaattgagcaagatgagcatagaagtagttccttttggtaccttggattatatcttagtggagccaacctttcaagatcatatcatcatggcacaactcaatgacaagggagtacatattatcaaggaaatgctcttttattatgtgatcctatgaaantaattattaacaacacaaactttggttataaat

SEQ ID NO: 21194 - DNA, 370 bp, Zea mays
caccacgagaactttgccttcacagaaatggcaggagaacaattagtccctgagctagctttagtgcttgctttggaaacccctgagacgagggttgagagctcatttgtggtagccgaagctactgcaccgcaagttgaaggtgctgctacgaacccaactgaagggtcagccgatgacatcgaggatatcgatattgaagaggacaacgccatcatttgccccacgaagccaagtcatgtggacttcagacaatccactatcaaaagagtcatattgagtactcactaagttcgattgattgacaatgttgactgggtctagcaagtgcaacccatcttggatattatacccttacttatcatgcaca

SEQ ID NO: 21195 - DNA, 466 bp, Zea mays
  unsure (1)..(466): unsure at all n locations
gcaagcttctaaagggataacacgtgataggtttatctaacgtgcaattcgaaaaagatataccttgtgcagcatgtcaagcaggtaaacaggtgggaggagcacatcacagcaagaatgtgatgaccacatcaaggcccctggagctgctacatatggacctcctcggacccgtcgcctatctaagcataggaggaagtaagtatggtctagttattgttgatgacttttcccgcatcacttgggtgttctttttgcaggataagtctgagacccaagggaccctcaagcgcttcctaaggagagctcaaaatgagtttgagctcaaagtgaagaagataatgagcgacaacgggtccgagttcaagaaccttcaagtggaggaagttcttgaggaggaanggatcaagcacgagttcctcgtccctacacaccacaacaaaatggtgtggtatagatgaagaac

SEQ ID NO: 21196 - DNA, 409 bp, Zea mays
  unsure (1)..(409): unsure at all n locations
atatctntgcgacagtctaagaacatcttgttacaccgacacacaagtcaatcatttgcgaatctaaaaatacatgagcaataaggatcaaacacaaatgtgctgagatttaaacatattattccaacatattctggaggactaacagcaaaagtttctcttgtcaagagaagcgtaatccctttgtcatcctacacaggcccgaaaggaggaacctacggaaggtgctgctatgcttcgagagccatatgccatcttctgccaagtcttggccaccgtcaactccccctcaaactactggtaaaacatcagcatatgacagcaagtcatataatataaatgtaagaacagatggacccattccatttgactaagtgaatttgatggttgatgatcaatataacttatg

SEQ ID NO: 21197 - DNA, 210 bp, Zea mays
cgcaaaatacgtggctatacaggtgcgcccagcgcactacaccacgacgcgttcccggtcgatactcacaagggtgggccacctcgaccattgcgacaacaataccgccggaatgaaggccatgcgcagggatgggtggtacatatggcaacaaaaccagacgggtttttcgtctttcagaatataataattgtgatcaatcaatatgct

SEQ ID NO: 21198 - DNA, 347 bp, Zea mays
tgagcatctgtttggtgaaggcaagtgtcctctgacccattatgtcctatttactttataattcacttgcccgcatactatgaacaacctaaggattgactagctttctatttacctggtccttgaatacctattgggctactatggttagctacatgctagcgctttactttaatcaatgaacatgatgagatacaatgatgatactatgattttattctggatatgatgatatacttgtggcatttaagggactcgagcggtttctcgagtgcctctccgtaatgacctgttcgttgagagaccaccctggataacagtgcaaccatgatggtgaaatgggatgc

SEQ ID NO: 21199 - DNA, 401 bp, Zea mays
  unsure (1)..(401): unsure at all n locations
tcccttcccttcttccgcgcagcgcagattattgtgcggacgggcgtacccccacgcccctcggcaccccctaaaaagtggacaggccgaagtcgcaggagcactacacccgcactcaactgaagcgtcgccgttgtcacctcgcgctcgcgccccaccagccaaacgggtcgatcgacgacgccacacaactgttcaactaataaaaaccagtcgattgtccgtgcgttgcgacggcttacaataatatttatataaaatatccaccaaaaagatcttaaagttttttattgatcgtccgctcttcgcataataatctttattataaacgcacgggtaccataggcagcaaattagagactccatncatcgtctccgccacttccaaaggttcgtagagc

SEQ ID NO: 21200 - DNA, 336 bp, Zea mays
  unsure (1)..(336): unsure at all n locations
ttcttcctgtcgcctgaatgcaacgggttgagcttcggatggctcggcaagctcattgatntttctcgaaccttctatcatgcactcaaaacttacaaaatgcccgataacttcctcgtgggtccatttagtatatctaggattaccacgaatcaattgaacttgagtgggatttagaacaatgagagatctttaaataacatttaccacttcgtggtcgtcccacttcttgctcccgaggttgcgcacttgtgttaccaaagacttgagccggctgtacatgtgttgtggctcctcccctntgttaagccagaaccgaccgagctccccctcgat

SEQ ID NO: 21201 - DNA, 223 bp, Zea mays
gcatcttttgaccttgctgagaacctttttggatacaagcccttaacccatctgaatctatctaaccttatatgagaaagaggcgatggttagagtttatctaggactatgaccgtgcctatcactagcaaactaggaccgccaacgtgggtatgatatgcttggactcgctttgtgcaatgcccttgctctatcatggactttcatatgaacggtctgttcg

SEQ ID NO: 21202 - DNA, 201 bp, Zea mays
tggttttgcacagtgctgtacttcgcgtccaatactgccgcctgcacggcgtggttcttgtttaatgtttcaatggggcgcaattgactgcgcgatgtgggttagcatatctttggatgaagaagaaagtgttctgccatcattttctttgtatggatgcatattggaaaattatggatcttattatcagcagtaatgatg

SEQ ID NO: 21203 - DNA, 400 bp, Zea mays
gcatatatatctcgtatacattctttatccaactcttacgatctattggtctagatttatcttggtcttgccatcgggattgccataagactggtgtccacgctgaggtgaacggtaccggtgctgaattcccacgggagcggaggaaccaccatccaaataacgactgtccgcgcgctccacccgcaacagggcgatctcagcacgagccctactcagttcgtctaatgcatgtgccaactctgtgtttagcacggcggctatggtgactgtgctgctcaacctatgaatgccctcaccgacaggtgagacaatcacgcctcctgtgctgccggatggaccgtgggggtaatacttcaggtcatgaccatcagctgccccaccgaaacccagcactact

SEQ ID NO: 21204 - DNA, 403 bp, Zea mays
  unsure (1)..(403): unsure at all n locations
ccagatcatacaagctggccaacaatcaatgcgaggtctacagcaacgcttggaacatccgacagctacatcgctcttacccttaagacgtttttcagtcattcatatacctcgttctctatacatacacaaataaagtctaaccgtcaaggaagtgtcagcctttcctcggcagagcccgaccctccctctggggctagaagggggaaccccctctgcgtcaaaattttcctcggaaaaagtctttctgccagaacatctttcgtgcttttcgactgctctgatagcgggatcctgaanatgacggagtacacgtaagcggcaatgccgaccgagccgagggactcctacgccttcgtgatacggatacctcactcatcacctctgcgataagaactcacac

SEQ ID NO: 21205 - DNA, 380 bp, Zea mays
  unsure (1)..(380): unsure at all n locations
tatatggctgggcgatgaagcgccggagaggctctccattgatggtcaccggtgataatggcggtggcagtttcctgngagaagaacgaacgtttgagtgtggngagagagggtcggacgcggctagtagagtactatgacaggcggagagccgagtantcgggaggggaggcgagcggtcggacagtcggctgggcgtaaggacgtgaggcgttcaaacaacagaaacggccgccggtggctacatacgaggcgaggcgctgttctgggcactgcagagagaatcgtgggggagaagagagcatgcttatggtgggtctcacacgtcattgagagggaataaggaaaggatggcccacgttagttaaattgagaaagtc

SEQ ID NO: 21206 - DNA, 419 bp, Zea mays
  unsure (1)..(419): unsure at all n locations
ctgcagctatttttattctgttagaactttgcatatctgaattcaaaaaccttctacgtatggctccctctggccttatgctgagttttggtctcgagtcgatccatgggcccttctgctatactcttctttgtgaagttggcttataccatgctacatgtgtttcataatagacctcgagtcctatttacccaactcattaattcagccaaatgagactcttatgaatnttctaanatgaatngaactatcatgactaggtaaatctatctttggctaagtccctggctcattccagttggttgagtctataggatacgatctatntattaatccaacgcttcaaattccatgatctaagcataatttagcttctccaatcctctataaaaagaanacaatgtggcgcttcagttttc

SEQ ID NO: 21207 - DNA, 500 bp, Zea mays
  unsure (1)..(500): unsure at all n locations
tacgtgacactatgaaactcagcttctaagggagagcacattntgtgactaacaaatgttcattnttgtaaagacagggtttgtagcgcatgtcaagcanggaagcaagttggtgttcatcatccacacaagaacatcatgacgactgacaggccgctagagctactccacatggacctatttggcccgatagcttacataagcatcggcgggagtaagtactgtctagttattgtggatgattattctcgcttcacttgggtgttctntttgcaggaaaaatctcatacccaagagactttaaagggattcttgagacgggctcaatatgagttcagcttgagaatcaagaagataagaagcgacaatgggacagagttcaagaactcacaaatcaaaggctttcttgaggaggatggcatcaagcatgagttctcttctccctacacaccacaacaaaatggtgtagcggagaggaagaatagaactctattggacat

SEQ ID NO: 21208 - DNA, 344 bp, Zea mays
gcgtctcccattattaagcatgctgttagcaaatttaaatattcattttctatctcatgctcattaattataagaggtaaatgcgctatgtgatcattttgctggtcaatctaggctaggcgatcatgaacagcatcaacattaatgtctctacatctagtacaaatagtaacaagatcaacactgcatgtggagggtttgcacgcatttaaatcaacaatcttagcatgtgacagtgcattcccatctctaagattggaaatagaacagtgcgaactattaatctatagccctggaattgaactagcactttcaatttaaggctagagattgatcatgcgatg

SEQ ID NO: 21209 - DNA, 406 bp, Zea mays
  unsure (1)..(406): unsure at all n locations
actacaagagaatataggcaagagctcgtccatatgtcatgattaaggaggagttgtacaaacatggagttcgtgctccgttgctcaaatgcttatccagaaccgaaggtatagagntaatgaaagaaatacatgcaggcctgtgtggatctcacatcggatctacgccgttacttggaaatattttccgtcaaggattttattggccgaaggcagcttcggatgcagcagaattggttcaaaagtgcgaaagttgtcagaaatgtgcaagagatcaaagacaaccttcgtccttgacacagctcatacaacccactttggcatagcaaaagtggggccttgactcgttaagatcgttccaccggcccaatggaacttgagatatgttgtggtacctgtggaatat

SEQ ID NO: 21210 - DNA, 459 bp, Zea mays
tgacaatctaatagcccctgcagtaccttcctcaaatgctcttcatgatcttgctcattctgggaatatatgaggatatcatcgatgaacaccactacgaacttatccaggtagtccatgaacacactgttcatcaagtacatgaagaaagctggcgcattcctcaaaccgaatgacatgacggtgaactcatatagtccgtacttggtgataatgcagtcttgggtatgtccgaatgctggatcctgagctgatggtaacctgaccttagatctatcttcgagaacacactggctcctctcaactgatcgaacaaatcttcaattcgaggcaaggggtacatgttcttgatagtgacttcattcaaagatctataatcaatgcgcattctctttgttccatctttcttcttcacaaataacactatggcggtctaaggcgaggtacttggtctgatgt

SEQ ID NO: 21211 - DNA, 472 bp, Zea mays
  unsure (1)..(472): unsure at all n locations
tggtgccctgacgcgctcttgccacggagtaattgtgcatcggnctagtgctctgaactcagacgagggaatggtgtattctcggtgacccctcttgctcataagttgcttgctcgggtttctgtgctatggacaaggggcgcttgggccatgattttatgcctaaccacggaagggggttcactggagatgaagtggggcgtggccgaaatcccaggcagatccatcggattcaagtgcaacaaaccaagcatgaagacggttctgttcggtgggcctcgcaagatagtgcgcgcgcgatgcngcaactgtcatggcggccccgggtgtcagcacatgtctgtggactgtgccgcgcgccaatgctgagtgggccgagtttggggaaatcacccacacannggtttccttcttttctttattctatttctttgcgggttcaattaaatctcaaatcaattctattataatc

SEQ ID NO: 21212 - DNA, 376 bp, Zea mays
  unsure (1)..(376): unsure at all n locations
tcaactatgtctttcccatctgaaattcataacctgatagcccttctttgcatcacttgtactcttagtagcacttatttttatggttgtgacacataacaaagggtgttctttgataatcatactacaagtttgttatagtgaccataatctatagctccatggattataagttacagtgcctcataacttgacaaaatgcactgaaactcagcttctgagattcccatatctgacatctcatctttggacacagttttcatctaatttcatatggttcttgggcaangtgcttaagtaactttgtacacctaatgcaacaacttcaactttctacattaaccatctccgatttgctattattaaaagttgcatg

SEQ ID NO: 21213 - DNA, 477 bp, Zea mays
ttggatgccgtcttgccacataggacgcataattatacctttgatgtcttctcgtgctgataggtcattcttcacatataaccattctgtcatccaatccccgggccatctcttccgaaaggttggtacgggacagcttgccccagaccgagagacgaaactgtagcagccaaagttattatggtactgttctttgccccaaggctttgtttcatataataattcatgtatattacagaagcttcttgcatcaggcttcagaccttggcttctcgcggcccacacgaagatatttagccttataattgcctcgggggtaagttgatgaagatagacttcgaagatttcaacacctccacgacgaagctgctcaaggggaatcgcaatccagctttcaaaaagcttcgatacaccacaacttcattttcttcagggtgtggacaagtcttttccccttctgtcgccctcacaatggac

SEQ ID NO: 21214 - DNA, 406 bp, Zea mays
  unsure (1)..(406): unsure at all n locations
ctcatgcaactgctgncaaaaatgagaagtgaactgcgttcctcttactgacactatcttctttggcacaccatgaagacaaacgatccgagacatatacaattctgccaatacggcactgctataattggtcttgacaggtatgaagtgggctgacttggtcagacggtccactactactcaaatggaatcgtagacggctcgagtgcgaagcaatccgactatgaaaatcataccaatttcatcccatttccactgagggatctgcancggttgcaacaatacagcaagtctctggtgctctgccttaattcttcgacaactatcacacataaccacatgctctgcgatgtcctcttcattccgaccaccagatttcttttcaaatctgaacatctttcactgc

SEQ ID NO: 21215 - DNA, 454 bp, Zea mays
tgcaagctttatcaaatggacgtgaagagtgccttcctcaatggccccatcaaggaagaggtctatgttgagcaaccacccgactttgaagatagtgagtatcctaaccatgtctataaattctcaaaggcgctttatgggctcaagcaagccccaagagcatggtatgaatgcctgcgagattttcttatcactaatggcttcaaagtcggtaagccgatcctactctcttcactaaaactgttgcaaagacttgtttatatgccaaatttatgttgatgatattatatttgggtctactaacaagtcaacttgtgaagagtttagcaggattatgatatagaaattcaagatgtctatgatgggggagttgaagtatttccttggatttcaaatcaagcaactccaagagggcaccttcatcagccaaactaagtacattcaagatatactt

SEQ ID NO: 21216 - DNA, 415 bp, Zea mays
ctcagcttatactcggctgcgttgttagaggccgggaatagcagctggagagcatacttgaggtgctcgcctccacgtgcagtgaagagaattcctgctcctgctccctgcagcttcagcgagccatcaaaatacattcgccatacttctgcggtttctggattatccggtacttgctgttctgtccactctgatacgaaatcaaccagtgcttgagttttgatggctgtgcgaggtcggaactcgatatcatgggatcccaactcgcatgcccacttggctattcggccaatggcttccttgttgtgaagaatgtcccctattgtaaaaccggtaactactatgactttgtgatcgtcatagtagtggcgcagctagcgggcagttagaagtactgcatataataacttctgaa

SEQ ID NO: 21217 - DNA, 438 bp, Zea mays
agcttgcgtagtctacctcatcatcactagactcatcatcacttgaagaagcatacgtaatagtacttcgagtacttaccttcttctcctttgccatgaggcaggtgtgacgctcgttggggaagagagacgatttgttgaaggccatggcggtgagtccttcgtcatcggagttagacgaagaacaatccgagtcccattcttttccaaggtgtgcctcgcccttagccttcttgtaaaccttcttgttctctctcttcccattctttccttgttccttgtcactatcattatcgggacagttagcaataaagtgaccaatcttaccacacttgaagcaggagcgctttcccttcgtcttgctcttgttgggatgctccttgcgacctttgagcgccgtcttgaagcgcttgatgatgagggccatttcatcctcat

SEQ ID NO: 21218 - DNA, 410 bp, Zea mays
  unsure (1)..(410): unsure at all n locations
ctgctttgaccgntatatccttccttgtcgatgttgtcttttcttctccagtactggtctcattaatttaaggttaatgtatatcagcagagttggggcatatagttgaggtaattatgggtgagatggactatatgatatacgtcaaaatcttatttgatgttaggtggggagagacagattatgccatccatcacgactctattgtgtgggttagatctcatgcacatggctgagttggtctaatgtgccaagttaagttaacatcttgctattaaggtctaatctatttcactagtactaactaatttgttaataactcacaattagttggatcttattagattaagtgggatctagattagatcggtatcaccagaatagactagaccatatcccattactttgga

SEQ ID NO: 21219 - DNA, 350 bp, Zea mays
  unsure (1)..(350): unsure at all n locations
gatgcttgcttcaacccataaatggatttctgtagtctgcatatctttccaacattgatcggatcgacaaaaccctccggctgtattatatacacctcctcatctatgtttcattaaagaaagctgttttgacatccatctgccaaatctcatattcgaaatatgcgacaatagctataatgattcgaatagattaagcatcgctactggcgagaatgtctcgtcataatcaactccttgaacttggtgaaaacacctttgcaacaagtcgagccttatagatgtgaacatttccatccatgtctntcttcttcttatagatccatttgcattctatangtctaacacca

SEQ ID NO: 21220 - DNA, 234 bp, Zea mays
cctaatactcaacaaattttataacgaattattactgttggtgctcttctttgaaatctcagactcttcatggatgtggaagagtaggactgaagacaattagcaagactagcatactcccctaaccacttctcctaaacatcaacttgcgtatttgtacgattcggagttctcttaacgttactttcttttcggatcgatttgctcatcagatgtgtctgagttacaataatg

SEQ ID NO: 21221 - DNA, 406 bp, Zea mays
  unsure (1)..(406): unsure at all n locations
agcttgttcttgacacttctttccgatgtatgttcggaaacaattgaccattgcgcgcagagatctcgcagcgcattattgcatgtgtaactatacctattgggccatcaataagccataacacattctagttgctgtaaggggccggtatggtatatcttcttcacgtgtaattaagtaaaggagagagagctatgcttgcactccaggaaacgttcaatttgactactactggcagttagggttcctccctggcccnccatagtagatgtaggtgccaaagctgttaccggcaccaccattgagcacgttatagcagttgggtcgtgaagcaaacagacccagagcacttggcgacagaagagtgttggacgcatcgaccacttggatgttccggatgtaactg

SEQ ID NO: 21222 - DNA, 373 bp, Zea mays
  unsure (1)..(373): unsure at all n locations
ttaaatgatatctatgaaaccttgngtgaagttagacatgatttggacaaagtttgatacctaaaccccacaaccctaaacttgttagtagtgcctgccctatgaactaaaatactgacttcacaaaccctagtttcctggagtaccgtgaaggaaaattgtattcaagacctaatatgatgtacccttattatcattacattttcctcagcattacatgagcattcatgattatatatggttctatatagaaaacgaagaagaaatagtagttgaagaaggagttgcaccaccaccacctgaagacccacgtgctgggaactgcttttatttcgatatctgtggagcagagcctgattctcctataacacaa

SEQ ID NO: 21223 - DNA, 437 bp, Zea mays
  unsure (1)..(437): unsure at all n locations
agcttcttagggagagcacattatgggactatccaatgttcattntgagaatgacagggtatgtagcccatgtcaagcaggaaagcaagttggtgttcatcatccacacaagaacatcatgacgaccgacatgccgcttgagctactccacatggacctattcggcccgatagcttacataagcatcggcgggagtaagtattgtcttgtaatcgtggatgattattctcgtttcacttgggtgttctttttgcaggaaaaaactcaaacccaagagactttaaagggattcttgagacgggctcaaaacgagttcggcttaaggatcaaaaagattagaagcgacaacaggacggagttcaagaactcacanattgaatgctttcttgaggacgaaggcatcaagcatgagttctcttctccctacacgccacaac

SEQ ID NO: 21224 - DNA, 447 bp, Zea mays
  unsure (1)..(447): unsure at all n locations
actcagcttcacttctagaaatgctatctttggctcttcactggtcttgatttcttcgaagcttatcatcatactttaacgatcgggcagctagtctattcataatctaactattgctatgctatttatccctttggctcctctgtcgagcttctcatagtttggataatcaaagtttaaggcatccataatgcggattagccttcgttttggtcgggtgccgaaggcgacagtcatcaatcgaacttcttttatggtataataccaagtattgcattgcacatggtcataattctctccagccattctttgcaaggtgtaactntccataatcttacccaagtttgaaccctaatctaacccnctttcttattattattccaaaactccttaaatcttgcatatatgcatacacttagttgatttgaacccttcctaatttatttc

SEQ ID NO: 21225 - DNA, 220 bp, Zea mays
gagttttggctagtatagataaatcactgttggcttactatgtagatatacgctactgttatatacatagtaaatgcaatgtttctagaaaagcctaagcatcttataatttggaatgaagcgcctggtccaacgtacaatacatggatccacaagactcatggctaactttgatggagtagtacatgcaccgtgctgctcctttttttgaccccagcct

SEQ ID NO: 21226 - DNA, 417 bp, Zea mays
  unsure (1)..(417): unsure at all n locations
agctagatgtancaacctcttgtgatgtattgttttctagaagagcaactactctacatgctgaattgactgtataagttgtagtcctgactttagacaaccaaaaatngaagaattatttgactgatgcaactactataagaaaagttgctattgataacaatgatttcaacaatgagtttgcagtggatatatcaaaggcttaagaatgaggtcttgaaacttaatagtgaaaatgaacattttgctacatgtgtgctaatgttcaacataggtcaatactcttcaaatgagcttgttatgaacactgttatgaaaaatatcaagagtgtgattggatacaatgcttttgtgcaaagaaagctttcctcaatgctaccaatgagattacgagctatatatgctttagtctgaaat

SEQ ID NO: 21227 - DNA, 459 bp, Zea mays
  unsure (1)..(459): unsure at all n locations
ntatcacccttgcattntgcccctaatttcctagcaactatcttcctatcctttctacaaatagcaaaggaagcatttatagcatgataaattgtagagggaccattcataatttttctagggacatgaacaatattctttctaggcacatgatgaatatttttcctaggcatatctctaccatgcatataggaagaactggaagcatacatagcataagagtcataggcatgtgaatcaaaagtattacaactcctatgagactgtcttctatcattgtacataaaagcatgattctttttagtactacttgccatagggaccttccctttctccttggtggagatgggagccttatggcttgtaagttcttggttccctcttgaaccaagcccatcctaatagangggtgctaccaatcgtgtggcattcctacaaatttatgttatcaaatacttt

SEQ ID NO: 21228 - DNA, 417 bp, Zea mays
gcttgtgtgcacttcattctttgggtgactcttaccactgactcttcaatgccttcatattttctctcatacccttgttcgttatcgtctttgacccttgcgatatttatgtcttctacttaaacgcttaccttgaacatatcgtttagaagccttccctttctttcaacccagtttgaggattgtgagttacccatctcttcattgatttcttttcactccttgtcgccttacaggttttgtcttaattccatcctttgatgtgtatttatttgctatcaccatcaccttgtcatccatcaatcttgccttgatactcctctttattcctactcttgtaaaagatcccctctctttcacctcaatttgagagtggcagttacctgtctgacccttggacgtaccctctcctttcca

SEQ ID NO: 21229 - DNA, 475 bp, Zea mays
  unsure (1)..(475): unsure at all n locations
tagatgtatttagaagcctanggtaaagtgtggtatgatttggacccatgttggtacctagaacccanaaccctagtcttctagtggtgcctgccctataggacttcactgtgactccaaaaaccctagtttcctagagtcccatgaaggaaaattgtattcaagacctaagataatgtacttttattatctttgcattttcatgagcattacatgagcattcataattatatatgtggtatatagaaaatgaagaagagatagaagttgaagaagcaagagctacaccaccacctgaagaaccacaggccaggaactgcttttattttgacatctgtggagcagaacctgactcacctataacacaaggcaagccccggtgcatntgccacctnctttgctatttaaaatctttctcacttgcttgatgcattangtgataggaagtgcatgctaaacannaatgatgcatttc

SEQ ID NO: 21230 - DNA, 438 bp, Zea mays
  unsure (1)..(438): unsure at all n locations
agcttgccttctcctcattgtaccacctgcaatccaacggagatgtggaacgcgccaacggtataattttcacagccgccataaaaatgctcctcgacgacaaaaaaggcaaatgggtagacttgttacctgaagcggtctgggcgctgaacacgactgagtgcanggcgactgggttcacccctttccgccttctatatggatcggaagccatgactccgccagaattaaaacatgggtccccgcggacagtcgcgtcagccgtccccgacgtagacgagcctactttgaaggacctcatcgactgagaccgcgtcttcgccctacatgctctagacaaataccaagctcaaacataagcatgacacgaccacacagtcatcccgagggaattcagcgaaggagacctcgtactcgttcggacagctctgacagagt

SEQ ID NO: 21231 - DNA, 423 bp, Zea mays
tatcaatctcgatctcatggatggctgctcctcattaaataacgtatcaatccttggctgaccaatcccgcgatgatcataaaataattctctaagttgaagaaaattctcatgtgatgctcttttgcaacaatctttgcttcaactctagtcacattttctgagccatactctcatcggctccatctatctatgatatgtggattcctcatttggtgcgttgggtaatgtgattatggctaacgactgatggtgccgcgatgaaaccgatagtctactatggtgcacacactggtgagcttctctggacgcgctggtatcgctgttatagtctggaccgttcgacactatactgagtgcttcttttgggatatcctcagatgatcctgcatttgctctacatgcgcatatttatcaaatatc

SEQ ID NO: 21232 - DNA, 467 bp, Zea mays
  unsure (1)..(467): unsure at all n locations
ctcagcttaccgccganatactaacttattntcngtgtcccggctctggccgccgaanactactgtagtctgtattgggtctgtcagcttctttgctgagtgctcttggaggcactcgacaaagcttgctcactcggcaaagcttgcttctttgccaagtgtcagggccacaacacttgacaaagaatctttattggtgcccaggtgttgcttctctgccgagtgctatggccctgacactcggcaaaatcacctttttgccgagtgtacactcggcaaagtgaccattatacaccttnttaagttgnttttgctattcccatcccacaaacaaaagatatcacatatacatcacanatatcacataatcatcacatatataacatatacatcacataactcacaaacaccatatatcanacaagttctcacaacattacccaacatgtcggacacanacataagta

SEQ ID NO: 21233 - DNA, 277 bp, Zea mays
cacaccggacaggtactggtggctgtctgtagtgccaatatgggcgcgcctgacatctgcgcgcgctgcgcgcgcatttattgcgcatcaggtattcgttggcgcggagaataccgttgctccggagtcgcaccggacagtccggtgcacaccggacagtccggtgaattatagtggacgagccgttggcatttcccgaagctggcgagttcctgatgccgacctcccttggcgcaccggacacttgtcggtgtacacctgacagtccggtgatata

SEQ ID NO: 21234 - DNA, 259 bp, Zea mays
  unsure (1)..(259): unsure at all n locations
ggcattgcatggttaaattccttgtattgcatctacgacttgtctaacatagttcttatattcgtcaacaaagcgagtgacaaagcttaactcgggtcatacttgacacgtcttagctntaagcttttaacacttaaattcttactttgtatgcaattattggttcttgaaatatgcatgaggtactgcacttacggggagtattcaaaactcaaatcactcatgaataccnctagtgcaagccaaaatgcaaatttca

SEQ ID NO: 21235 - DNA, 305 bp, Zea mays
  unsure (1)..(305): unsure at all n locations
ntctcaatctctcttgttgcttaatacatatactttaacttatataattggctcatctcataattctaaattcttcattcccttttccttatattcttgaatattgttcatggcgctcacttanaattctagactanggttacacactcttatctttcanaagtctcaattgtttgatcatgacacattctagtatatacttggcgaaacctttattacttaagttaatttgatgctcatgcttactttggttcacataaaatgatggttcttggtttggatttaagaaaaaccctgagtgacac

SEQ ID NO: 21236 - DNA, 180 bp, Zea mays
gggcaattaacaccgcctgctacttcattaaccagctctaccttcaccgaattctcaagaagacatcttatgaactcctaaccgctaaaaagtgaaagggaaatatggtcaaactctttcctaaatgatattggtggttgaattgcccaacacaattaattagactaactaagttgctct

SEQ ID NO: 21237 - DNA, 388 bp, Zea mays
  unsure (1)..(388): unsure at all n locations
tattctgtggtgattataaanggcatacaacaaggacatgccgagccacaattcagaagcaacacgaaatagctgaagccaaagcacgacagaatcagccgaagtaagtgcttcatactgcgtcgtgctattgcccatacatccccgagtacgtgggcaatcaacaacccacaacatcaaatgctctggaagccactcacaagctgcatgggtcccgctaccaccaccacgactcatggctccaacctttgctaacaatcaacagccacaagggcgaccgcaggcacaccaacacgtgatgacgcaagagtctgagcttaacaataacacactgtccgagttgagaccattactgatcaatacagacgctcaataaaaatcgacatac

SEQ ID NO: 21238 - DNA, 236 bp, Zea mays
  unsure (1)..(236): unsure at all n locations
cgtgctgtgagtcttcanatatgcagaaactcgatccacttcttggagttgaaagatattccgctgggtgggaggagattcacgtggtccaaccagagagaagaccctactcttgtcaagctggaatgctggatcatgtcttttgtactaacagctgggaagatatttttcctgactgtatgctctataggaatgccaccgaaatctctgaccactgtcctttgactctcaagctc

SEQ ID NO: 21239 - DNA, 431 bp, Zea mays
  unsure (1)..(431): unsure at all n locations
gctggtacgaattaattttgctattggttcatatcgtgatgtntgtgactgtgatgttgtgcctatggatgcttgtaatattctgctangtagaccatggcaatttgattcagattgtatgcatcatggtagatcaaatcaatattctctcatataccatgataagaaaattattntgcttcccatgtcccctgaggctattgtgcgtgatgatgtngctaaagctaccaaagcttaaactgagaacaacaagaatattanagtctgtggtaataacaaagatgggataaattgaaggacattgttgcttgaacnaaactgatgtaatngaatatttgcttcactactgtgctacgccttggatgcaggatgcttgattcaattaaatatcacattcttgctctgtatactacattgcagagatctgtgat

SEQ ID NO: 21240 - DNA, 385 bp, Zea mays
  unsure (1)..(385): unsure at all n locations
tgtaanacttagagggagctaaacactcanntccccaccgataatntaaatgtccttgtcttctttggtagcttgaatcttataatgtctttccactagaagaagcctttcacctgagaagcatggnggatccgacctgaggcataatatgagttccagaanagatcaacctatgggatgccatgcctgtcatagaatttatggaaaaacttaagaaatagagttatgttctagatcttcaagttgagaacaccaagaccacctcttttcttcgaacgagttaccttgtnctatngcataagagaagtccgataagcannatcattggtgcctctccaagactatctattctgatgcagtcactggtattgatcatgaaaatcag

SEQ ID NO: 21241 - DNA, 275 bp, Zea mays
  unsure (1)..(275): unsure at all n locations
cttgaactagcttgcttaataatgttagggcatgaatgtattttacccangctgcgtcttgttctctattaatagatgaacaacaacaccgtactgctcatgctgaattgtaatctctctctcgtgtcttcccctttgagcgagccgaaggtatcaatgtaatatgaattttctcgatattcatacatgttttacgaagtacaagtacgaatgaattaaagagtaatatttggtggatccatctctttacattcttatttatttataacatgatg

SEQ ID NO: 21242 - DNA, 340 bp, Zea mays
  unsure (1)..(340): unsure at all n locations
gtgttcgctttaatgccccggtacgaaaccaggaaccccagcaacttccctgcggagacaccaaagacgcacttgtccgggttcagctttctgctgtgtgcccgcagcctgtcgaagaccacggtcaagtcttccactatggtcgaccctctcttagtcttgactacaatgtcatcgacgtatacttccaccttgtccctgatcaagtccccgaaagtcttactcatcgcccgcacaaatgttggcaagacgtttttcagaccgtanggataacaacatagcagtaaagcccatccactggtacaaaagcggtatgcttcctatcnttcctagacatctg

SEQ ID NO: 21243 - DNA, 286 bp, Zea mays
ctcagcttatgaacggcacccttcggcatcacgttcagacagcttcttcctgcaggaccttctgttactaatcatgatcccaacaggctcgatgtctccctctgatgggattccgctacagaatcgctcctgctggtctcggaaatgtcctatggtacctcgggagcgtagcccgagccttggccatgtatcagacgtacccagagtcatccctcgctctgcgtgttctgaggcggctgtcgaacccttcggtggccagccttcgaacccctgatcagtagtgggc

SEQ ID NO: 21244 - DNA, 448 bp, Zea mays
  unsure (1)..(448): unsure at all n locations
ctcagcttccttttcttccgaatttcttcgtactggctctttgtaccttcatctttgtcttttntacccttttccttttttggcctncggcacctttgttcagattatcgtagactgggtattcgaaacccaaggccgtcagcactcgatttagccttcgtttcggacgagtgccgaaggctgcggtcatcaattgatcttcttttttggaataattgccaagtatttcattacacattgcttcaatcgtatctagccactcttggcaaggtgctttaaagtactttctaaacttgaaataataagggaaacgtacgaagtcaccttctttctttttccctgtagcttcggcatttcccattctctcanactgggaaaaactntgaatgctanaaactcttgaccangacccttgtgtaatatgctctgaataattctgaattactca

SEQ ID NO: 21245 - DNA, 530 bp, Zea mays
  unsure (1)..(530): unsure at all n locations
atctacatctcacagttgaagccatgtcagtttgagtagattttattttgttgaacacttccaattcagtcagcccttcctctcaactttgtcaacttcacttttgtcttgtatctttgtatctcacttctactttntgatgtgttggactcttagcatgtataaagagtcttcattatgactttgtaatgtcttataagggtcttataatgtcttctctgaggtgttgcatccttagagcctcagtccaatccacttcacatcctgtgaactacaacacacatacacttgggaaatacattagtccacatggtatgtngatcatcanacaccataacctattgagctaaatgtgcctgggtccatctccttacaatctctcccttttnggtgatngatgacaacacagccaaagcaagcaaatataacanacatttgaatgaaatatgcaatctcgttgtaggatgcatgatgtcncatagagtgagatatggactaagcctccccctaactcatantcacttactact

SEQ ID NO: 21246 - DNA, 295 bp, Zea mays
tcccacatgggctagtctgcggtgccagagccaactcatgttattcttagcaattaagcatgtgtcaagttcagctctatcaaaatctactaagtatagctgaccctctaacacacccttaaatgctattgaatcatcacttcttctaaagacagtgacacctacatcagttaagagacagttgtagcccatttagcataattgagatacgaaagcaaattgtaatctaaagaatctacaagaaaaacattggaaatggaatggtcaggagatataacaattgtacccaatcctt

SEQ ID NO: 21247 - DNA, 359 bp, Zea mays
  unsure (1)..(359): unsure at all n locations
ctcagcttctaagggagaacatgtgttatgactaaccgatgtctggtttgagaaagatatatcttgtgcggcatgccaagcacggaagcacgtgggaagtactcatcaaaacaagaatgtgatgacaacatcaagaccactggaactcctccatatggatctcttccggcccattgcttatctcaacatcggnggaagtaagtatggtcttgttattatagatgattnttcccgcttcacttgggtttctttttgcaggacaaatctgagacccaaggaactctaaagcgcttcttaaggagatctcanaatgaatttgagctaaaggtganaaagataaggagcaataatggatctga

SEQ ID NO: 21248 - DNA, 180 bp, Zea mays
tgacgaagcaccagaagaccaatcaacgaaggaatccatgtgggagttcgcaagagaaagggttgcgtgttggcatcgttgctttctcaataagctagctggccagccaaagctagaagcctgaagatgatctttgagtagccagaatcagcgtttgccatcagcaaccgggtgctcctg

SEQ ID NO: 21249 - DNA, 460 bp, Zea mays
  unsure (1)..(460): unsure at all n locations
atctatgcttntttacacggggagattattattttatggnnagcanggggcactggacattgtatgttgtcaataaagtcaaatggtgcattcacattttagattccaatccctatgggccaacacttggnggtactacttggaaggagtatcattntgcccaattggacttaagtggcagaaagttaccatgggctaaggttattatgagtaggttaaacaaagccctacaacatgtacggcccaagacatgcttttccaaaattggcaactacgcaatttgacttgtcccaaactatcctaccatggcagcaggatccaatgattgtgggtttatgttatgggatacattatcttttatgactgcgtcgaaggatctctcnggtcagacatagaagcactacgtacaaatttatcacgtaactctatagttggccaaagcacatatggtcacatgata

SEQ ID NO: 21250 - DNA, 413 bp, Zea mays
  unsure (1)..(413): unsure at all n locations
gtcagtctcagaggtcgtagtatacctcacaatcttcggggcaacagcanagctcttttatgccaccagctccaaagggcagaggtgccatgggcttctgaggaagatctggggatcagccctaaaaagatttattgcttattctatggtgaggacaagggccatactacaaggatgtgccatgcacgattacaagcaaaggaaatacgaagctgaactcgtagaccagccgaagcaggtcttacacactacttcgtgtcactctccctgcataccagagtatgtgaacaatcatcctgcagcttctatcgcttcggtagccattcacagggcttctggccacaactnccaccttcaccacactacaaccgacttattcctgaagcagcatccagaaggcgctacactctcac

SEQ ID NO: 21251 - DNA, 391 bp, Zea mays
  unsure (1)..(391): unsure at all n locations
taagcttaccctgtagtctggactataagatggttacgctaggtgtaccttatgcggntgaccatttttcattttngcataangaggactctagggaaaagcctcgtagtgagaccctagccattcacctcggaagtgaataccggtgtagctaacccgggctagaagggaatcatgactcatgggtaaagatgtgccacctctccagagtgtaaaactgatatatcagccatgttcacggctatgagcaggctggactcctcacatgataattgaacttgaagaaatcgagatctgatgatcaggcaatggcttgcttaagtggatcacttaagtggttttgatatactcttatacctttcttaatgggaatactcgggattcacactta

SEQ ID NO: 21252 - DNA, 210 bp, Zea mays
gagaaaagggtggagtaaatgttgatattttttttattttttacagtttttttttttgttgctggtttttgtttgctttatttgtatttttttttgtttctgcttttgattttagtctttttttttttttgtttttattttttctttatttttttgttttcttttattatattgattttttttgttattttattttttttttttattttt

SEQ ID NO: 21253 - DNA, 284 bp, Zea mays
  unsure (1)..(284): unsure at all n locations
gacttaaagatgaaaaggctattcacacctctatagactactatagaggtattatcaaatgtaaagggcatgaatgtgaatttgtaagggctgtgtgccgtgtctataaatatgtgaacagtattcccgtactggtcacgctgacttggcattcgctttttgcgtcacgcttgtactggcatttccttccgaatgaaagtacacttgtaggtcaataatattttttggttatgctcaataataataaatgaatgntcatggtttcttttacaattcttatattt

SEQ ID NO: 21254 - DNA, 237 bp, Zea mays
  unsure (1)..(237): unsure at all n locations
gctttttccnncctgcagtgtctctcttatcggtggaggcacagacgctgactaatgtcttatggatggtcacgaggaccaccaacttatacccttggccccanggcaaggcacgagtcccgccaacggccatggcgagctctacaacgactttcgaggcgaggaagtcagcttcaggcgcaaccacccgaggaagacccggcctggccggtggggcccaatcaacattgagagcac

SEQ ID NO: 21255 - DNA, 444 bp, Zea mays
  unsure (1)..(444): unsure at all n locations
gctgcttcctggattctgttgcatctcacggaggtggcggcgctccatctcccaatgtttgtgacacacaaccacctgtaacaagcgcaggaaagattcctcaccgtctgtaatggaagaagattgcagcaattcgaatttagacaacgcccagtgtangaaacgggtgacgcctaagaggggggtgaattaggacttctaaaactttcgctaaactaggccacaaataaatccttagagcgaaacctatgcaaataaacaaactagaatgtgcaaactatgttttgtctaagtgttgctatctctacggcaatgtctaagtttcaatctacactatatangcatgaatacacgaatgaaacttatatgtttaatataaatgtggaaacttaaagagcacagtagagaagcatactctcgtggatgacgaccggtattttaccg

SEQ ID NO: 21256 - DNA, 277 bp, Zea mays
  unsure (1)..(277): unsure at all n locations
cgcttgggattgaattgaggatntatgtacgtagtcaatggtgaattcattaagttccgcaacccattttccgatcctttctgtcgcatctctgttcctcattatgtctttcacgggttgtgatgaacgcactattgtatgatatgcttgaaagtaatgtcgaagcttcctggaggccatcaatacagcatacagtaccttctccaattatgtgtaattattctttgataggctcagtacttcggagatgaagtataccggtgaaatgtcttttact

SEQ ID NO: 21257 - DNA, 153 bp, Zea mays
  unsure (1)..(153): unsure at all n locations
gagtaccactccgtaaggacctgttcattgagtgaccacctgcgataacagnacaactatgagtgtggaatgggacaccccttactgattaattagaggaactngaagtgtacgtggcttcgncgtacggcgtctatggggtctaggcacaac

SEQ ID NO: 21258 - DNA, 297 bp, Zea mays
ctcagcttagaggacagtgcccatcttgatgctcagcgcgacacagctataggttatttcgttctcgctagacagatcctgaggaggaggtccggcgtcccggtgcctgacgatattgttgctgatgtcaagggcgcgccagatgctgcaagccgtccttcttcttccgtagcacctgtgaagaaagacattgccacccaagatgtttcgatgcactgatgtcctgcaaagcactctcttttatcgagttagcatcttctctagaggatgtaatatgaattctatgtgcatgtgaca

SEQ ID NO: 21259 - DNA, 428 bp, Zea mays
  unsure (1)..(428): unsure at all n locations
tcgcatgccaagcaaggaagcaagctggtgctcatcatccacacaagaacatcatgaggaccgacagaccactggagctcctacacatggatctattcggcccgatcgcttacataagcatcggcgggaagtaagactgcctagctattgtggatgactattatcgcttcacttgagtattctgtntgcaagagaaatctcatacccaagagaccttaaagggattcttgagacgggctcaaaatgagttccgcttaagaatcacgaaaataagaagcgacaacgggacggagtccaaaactctcaaattgaaggcttccttgaggagganggcatcacgcatgaagtctcttctccctacactccacaatanaatggtgtagtggagaggaagaatagaactctattggacatgggcagaaccatgc

SEQ ID NO: 21260 - DNA, 521 bp, Zea mays
  unsure (1)..(521): unsure at all n locations
actaagcttaacaacttatagcctgtagaggagatatattntccttgtggcagacaacgaaatcattacttgagatttaanaagtgtcctttattacacagaanataaaactgaatggaaaagactactatcaaggtaggatatttgtcaataaatgtgcttcgactctggcacagtgctattgactgtgcgagcttcggactgttctctgaagtccctttggtgttgagcatattggcccccttctggctgctggccttgttgcagcggtggtggaggcggaggctgttgccaggaagcttgaggttgactcgccgaagctacagaaactgcannggtggtgcctacatattctgggatataaggcgaatgatacgaagtagtgtgcataatctgcttcggctgaccctgttgtgctgcagcttcggctatctccttttgcttctggatggaacatggcacatcctggtggatgcgcctttgtntaccacagaacaacaaaatgtctccttggtgatctc

SEQ ID NO: 21261 - DNA, 540 bp, Zea mays
  unsure (1)..(540): unsure at all n locations
tactcagcttgtgngatcttgctagtctatcanagacaatggttcagcttgagaggcatattgtgtttttctctggtatatcaacttattgagttagcattgttgttaccggtggcgactgcaacagtggaaagggccttctcaactatgaagattattaagactgagttgcgcaacaagatgtccgatggttgcttaaatgacttggtgtgctacattgaaagagaaattctaaaggactcgaccttcanaaaatcaagaaggcatttcaaaataagaaaactagacaaatacaattgcctagatctcctagaactagactcaaccaaaggtatattcttatttcacttgntcaacaatntttacttcaatntgcccattggtaactcatttttcttttttccagatttattcgctatatggcattctggtgtaaatggattgtgtaacaccccgtccaatccctggaccggcggactttactctgcagctatctaggatcatatatgtcncacagacaacactgtctttgtgccactt

SEQ ID NO: 21262 - DNA, 371 bp, Zea mays
  unsure (1)..(371): unsure at all n locations
gaagagagtgagtatcctaatcatgtttatagactctctaacgcgctttaagggctcaagcaagccccaagagcatgatatgaatgcctaagagattntcttattgcaaatggcttcaaaatcggaaaagctgatcctacactctctactataacacttgcaaatgatatgtttgtatgccaaagttatgttgatgatatcatatttgggtctactaacgaatctacatgtgaaggagttagtaggatcatgacacataaattctagatgtcaatgatggtggagttgaagtattttctangattccaagtcaagcaacttctagaaggcacctgtcttagccanacgaagtacattcaagatattctaac

SEQ ID NO: 21263 - DNA, 161 bp, Zea mays
ctctagtcccaaacagaaaaagactagcatacctgaatactcagtgcttgatgccacttatatatataaggtgcctgcatttccagcctcattcgaacaaggtttgagagtctctcactcagtatcaaggtcttcaactgctcttcttcttcagcatcaat

SEQ ID NO: 21264 - DNA, 495 bp, Zea mays
  unsure (1)..(495): unsure at all n locations
agagcctcactctatatgtgagaggatcaaattctatactggatcactaatgtcttggtnggcggccacggaattagagtaaattgacagaacttaaatctctcgttcttgaaaaataaatagaagatgactctagctctctcaatactctcgaatacgccctaagtgcgaaaatgtcacggagctagaagttcctaaatggccgccgaattaggagacgcacatataataatcatgtcaactttaatgaanatcatgcgtcattgcgtgaacacagcatcgcgtgttagctacaaaggccagagggcccaagtgcagactcatcacccgccgactactgcatactatccgcacatctggaacgaaccaggcgcaatcttaactaccaagaacaactcccgcttctccacaaacaccacgagcagaattggaaataatacttctgcagaacctgattatttctctaaacgtcgtaatcgtcctaaaggcatgtca

SEQ ID NO: 21265 - DNA, 532 bp, Zea mays
  unsure (1)..(532): unsure at all n locations
attggcacaagatgaagctactattctagngattatcattattgtcaattgaagcaaactatcacagctaccaattgagagggcatttattatcatagctccatgatatttaaggataagcatatagtatcaccaaatattatagagcatgagcaatctaaaaatatgcaattactcacgacttaatataccaatttcttgacttacagaggtacccaagtcctgattgctccatttcttgctcatcttctcttttccccttgagactatacaagatcgctcaagaaacaattagtttcnaagacacaagttatgtgcgctccnctaacttgtgcatcagtatttaataacttgactttgacattctactttctanaactagagggatacaacatctcttgtcaaagatactctatcaattcaccacaaaatataccaattgataccaaatgaanggttgactaatacaatatgcatgccttaagaagtatacacctangcatgcctatacatgataaatattcaccatata

SEQ ID NO: 21266 - DNA, 462 bp, Zea mays
  unsure (1)..(462): unsure at all n locations
cactatanaannactaagcttcggaaccccctactnctagccatctnccgacagacagataattctctgttgttatggttgcagtatangaagtcatcttcgtctgttccattgaacactagtgcccncttctgatattttaattctctagcatagtgaatagcttcataaatctcttcttcagataagtttttccccgaagcatgtcgcacaatgtaatcgcgtatgttggaaagtgcttccggggcagcaatgtcaatttcttcaaccgaaattggctctgacatttataatttttcgagttccaaaggggtgttcttggagggctctgaaggcctaacttcagcttcaaagtggtgcttccaagttcagcaagcatggcttcagtagacacttcagaagttccaatggntctcttnggaagtatgctcgaagattaattgtctcaaaacatctaacaca

SEQ ID NO: 21267 - DNA, 234 bp, Zea mays
agaattaaacacttgagaaaaaaccctctatctctttttttacgccactcattccttttttcttatatgaattctcttttcatatatggcctgatcctaagcaacgcgttaagagcgcaaaagagcgccgaagatgaaagttatgaaattgcgtttaataatttacgctccgaaggtatcaaactgagaaacgaagctttggaaaaagataaaattctacttacactggtagat

SEQ ID NO: 21268 - DNA, 335 bp, Zea mays
  unsure (1)..(335): unsure at all n locations
agcgcatgtcaagcanggaagtgaaagggaaatgtgcccttgtgccatttctaagtattttggtgattgagtgccaacacaagtgcttaaatgtgaattcatgcttatggatggacaaagtgcaaaacaagagcaaaggtatgtttctaagtcttagtacattggntntgtgtactaatatacttgtctaagtattagaaacagaaagaagaagaatagagaagagttggctgtgtacagccaaaatgcttgtttggtctggggcaccggactgtccggtggtgcaccggacagtgtcctgtgcgccaggctgcctcgggcgtgaagtggcactc

SEQ ID NO: 21269 - DNA, 318 bp, Zea mays
  unsure (1)..(318): unsure at all n locations
tgcgtcatttcctggagagaaatgtgggatggctctatatttacgatacatcgtgtgattatgttgttgatcttaagaaactttgcgatcttagaacaaaatgcgaatacaatgaacactcagcattgctgtgtggtgctatatctgtntcgctgnttattttctttagattagttgctaacatttaaatttaagtttctatgccaacaatacagaatctgaactggatgcactggacacaagcacacaaaaactgaggtggtaccaatgaacaaatggccatctgaagccctcactatccnctctgtttctctcatt

SEQ ID NO: 21270 - DNA, 355 bp, Zea mays
  unsure (1)..(355): unsure at all n locations
gatatttagaaaccttgtgtgaacttataaatgattnggacaatggtngatacctattctctaaacttctatgtagtgcctgtcctatgaactaanatactgactncacaaaccctagttttctagagaaccatgaaggaaanatgtattcaagaactaatatgatgtacctttattattgcattttcataagcattacatgagcattcatgggtatatatgatatatatagaaaacgaagaagaagtagtggttgaagaagaaagagttgcaccaccaccacctgaagacccacctgccgggaactgcttttattttcgatattgtggagtagagcccgactcttctataacac

SEQ ID NO: 21271 - DNA, 355 bp, Zea mays
ctcagctagaaaatctggatgaatcggcggtgatatccagccagtccaaagaaacttctgaccttatgaacagtggcccggggcttccactccaaaatgtgcttgactctgctgggatctaccgcaatccccctggcagatagtacatgtgccacaaattgaatttcctccagccaaaacgtgcatttgctgaacttggcatataactgatgttctctcaagcgcgataacatgatccgtaaatgttgtgcatgctcctcttcattcttggaatatattaaaatatcgtctatgaagaccaccacaaacttgtccaactcaggcataaataccgagttcatcaaatacgtgaagt

SEQ ID NO: 21272 - DNA, 423 bp, Zea mays
  unsure (1)..(423): unsure at all n locations
atcgaggatttctcgacatttcttggattttcttactgacccttaataactnttgtgtagagtgatatagagtggttgacaagatgacagggtttgtgaatttaaaatttgctttgtcagacagcagttcagcatgctaggattaaatttccacgaaatttggtcaactttgaaaatatttaaaacacttgtagaagagataatgatgattgagataacagctgattgataaaatatagaggtgacacacagaattctgctcagatgcgattcaataatagtcgactagacgatataagaaatcgatcggaataatcgatacatacactatcaagttgataatgactgttgagatgcaagcaatgcgtcaattgattgttagaacaaagttaaagttaattggtgttacacgatactcaaatg

SEQ ID NO: 21273 - DNA, 407 bp, Zea mays
  unsure (1)..(407): unsure at all n locations
ctttaaccagcggtctatttgcaaaacactctatacaacacaacttggtgtgaaattttgcctagtgaatgcactctangtgtgtcaaacatatgcaatgccaatgctatgatgccatgctcaagttttagttatagtaacaccaggggtgttacatccttcctcccataaaagaatctcgtcccgagaataanaatcctacggtaggtaatggtaagggaaacacatcacanttttatttccttaattntggtacaaggcagaggtgatgtggnnggtacttctttattacaacaactatacaggctntacaatttacatgaggctaanaagcctagttaattcttattcaagaagtcttgagtntcccaagtagcttcatcttcaaaatggctggtcactgtatc

SEQ ID NO: 21274 - DNA, 345 bp, Zea mays
  unsure (1)..(345): unsure at all n locations
ggacaacaccattngacatcttacataacacttctgagatcaagaatatctattttatttctcatcacgcacaagcgggtcttatcaagaggcttagtgaaaatatctgctaactgatcttccgacctcactccttctaaaatgatatctccnttagccacatgatctctaaggaagtgatgacggatatcaatgtgctcggtgcgagagcgtcgtacatgattattagcaatntcgagagtggtgtacatgattattagcagatttaatagcactctcattatcacacaacacaggtaccctttctagaactacgccatagtctataagagttagtttcatata

SEQ ID NO: 21275 - DNA, 352 bp, Zea mays
tgtcgatgagagcagcagcgtcctccaccgtctggatctcttgagcgctctatttgctccgctgatttggaacgcttcctcaagccccatcacgatttctagctagtaacaacacaccagattctttgcttgtttggttgtttgagatcatcatacaaacaaacagagtactgttaccgtgtccagtgagtcggcttcaatgtgtacaaactttgtctctcctgatactacggtgtcttcgggtagagctaactgattcttcacgatctcgctgaccttctcaactgtttcttgttttgtctatcaagaaatcgaaaaataaccgttgtcatgcatgcatgaacaacacaaa

SEQ ID NO: 21276 - DNA, 260 bp, Zea mays
  unsure (1)..(260): unsure at all n locations
tatcataagagaatagcggcaagagcccgcccatatgtaataatagtatgggagttatacaagcatggagtctgttctccattactcaaatgtgtatccagagctgaagattagagctgtcggcgtttcgagaccgcggggggtccctaagccgacgagtgagtgtgccgcgtgccccagcccanatgggtcgagcgcgtgggctaacgcgaatgggggagagcgaggtggccggagactggtcgtgagagaagtggaaa

SEQ ID NO: 21277 - DNA, 400 bp, Zea mays
  unsure (1)..(400): unsure at all n locations
ctaagcttgtgagggtcttcatcncacatgtgctaagcggcgatgccacagccagcccatgctattcttggctattaagcatgcatctagaccggcctcttcttttgtaaaatcaactaaataaagtttgccgtctaatacacccttaaaagctagtgaaccatcacttcttctaaagacagacacatctacatttgtaaatagacagntataccccatatgacataattgactaacagatagcaaattatatccaagactctctactaaaaatacattagagatagaatgctcattagaaaatgcaattntacctaacccttttacctgcctttgatccatcaccgaaataattgaatctgngaatcttattttgcgaggaaggaacatttctttcccc

SEQ ID NO: 21278 - DNA, 381 bp, Zea mays
  unsure (1)..(381): unsure at all n locations
gactcctatcaacatggtcaacctaagaagccaatgaagtagttgtgctttcatggaactcccncaaaaccaattgtacctagaggattatattnttaattntttaatgcctacatatagccattagaaacatgaccactaaagtggcttgtggtatgccttctccgcctcacacaaggacaacataccatggtgccaaaatccaagcttgaccagatatgtgatgggtataaagaagtggatctggacatctgaggggtgataatgaaacaatacttgcagacgccatacattgttatattntatggtacataaaggcacattngtatactcanagcccaacaaccataaactactactagtgtgggctcctcactacta

SEQ ID NO: 21279 - DNA, 259 bp, Zea mays
tgacatctcttgttcttgagagaccatctcctcccagcccgcaggtgggaggtccagcgaagctggtgcgttctaacccatggcgtgaggggctggtggaacccaagctccacacactgtgggaggaggagcccacacagttgttgctggggatgcgtgtgttgccgatgataccctatgcgtgacactaaccgtggctatgtcccttgcaagggagtctgcatcattagccagctcacgagccttatcagggcacatg

SEQ ID NO: 21280 - DNA, 496 bp, Zea mays
  unsure (1)..(496): unsure at all n locations
actcactgtgagactctaaaaccgtcatccatgaggcagctgattcagctcttaatcttctctggcatcactcttgaatatcaacatatatattggcacacccagttgggagggtcccatgaagagtcttggctcctaacataatcaattctggctaacaccaatcagttacattactatctatataatatgtccgctcagccgtagcagcaacatatgaaacgacatagatgctcacggtgatggttgatgaaactttggcaatgacacttggtgtgaatgagcggatcttatcaatcggcactctggagatgagaggatgtacaggttgcagctatgctccaatttctccaccatgaagagggactgcattatgtctgagcgcatgtgcgataacagagttctaattagcatgtatattacaacngaatatgttaaagaagtgcagaactcaacattctagtgataggcaatgtatccgacaagtatcgtatat

SEQ ID NO: 21281 - DNA, 535 bp, Zea mays
  unsure (1)..(535): unsure at all n locations
tgagctccatctcgatgggagcaccctccttttccttcatcttgagaatgcgncttctacgagaagaggtctaccacaccgaatctctgagaacagagtcaagatagcagagaaatttctgccccaaaacaattggaatgtaggggaaaatgaacatgaacagagtagcactttggcaattactcgtcagacattgttgaatattgcacatctaagattgaaacaacacataatcacaaggtcacatgtataccagagacaacaccctttctaccagcaacacagattactcaatattagtacccttcataaccataacctggtcgaagctactttggcagccgaatgttgtgagaaacgtaatcnntgaattttgacatagcaacatanagcaatgtacaagcatatggatgtagcaggacaatcacaatgaaataaatcacataataatgagtcctcttgctangaataaggagtgggatcagaaaataatggtaatatgcttgtgtctcagaaataatggtggctactatca

SEQ ID NO: 21282 - DNA, 308 bp, Zea mays
  unsure (1)..(308): unsure at all n locations
gccttggggcaaagaacagtaccataacaactttggctgctacagcttcggttctcggtccggggcaagctgtcccgtaccaacctttcggaagagatggcccggngattggatgacagaatggttntatgtgaagaatgacttatcagcacgagaagacatcaaaggtataattatgcgtcctatttggcaaagcttcggccttcggaggccgaaggttgaaatgaacgaagccgncgaagagtgctaaagagccttcggcgttgtctgctcttttatangaacangggacttagtacaagaacata

SEQ ID NO: 21283 - DNA, 217 bp, Zea mays
  unsure (1)..(217): unsure at all n locations
tgtctgtntatatagtgctgcangggagaaggcgaactaccataccttctacactggctgagcgatggaccgtccaacgcccagaatattntaatcgtttctcggcaacaagctcagggaagggtgttttcggaccttcggcattccgaagccttcattgttttcgcagatcgagctcgttaccgaaaaaccatctagcaccgtgaatgggctacta

SEQ ID NO: 21284 - DNA, 499 bp, Zea mays
  unsure (1)..(499): unsure at all n locations
ctaagcttggatacaactggcaatctcgtaacctctgaagtaccttcctcaaatgttcctcatgctcttgctcattctggaaatctacgagaatatcatcaatgaacactactacgaacttgtcgaggtagtccatgaacacactgctcatcagatacatgaagtaagctggtgaattcgtcaatctgaatgacataaccatgaactcatatagtccatacttggtgatgaatgttgtcttcggtatatctgcgggacggattctgagctaatggtaacctgaccttatatctatctttgagaacacactagctcctctcaactaatcaaataaatcttcattctaggtaggggtacttgttcttacagtgacttattcaagctctctatcggtgccatctcttctgcatnctcttctcacaataaactgggctgtcaagtangtactggctgatgatcttcttaaaactataatctgctatgagtcaccaacttgtcc

SEQ ID NO: 21285 - DNA, 485 bp, Zea mays
  unsure (1)..(485): unsure at all n locations
ataccttccgggatctgagtagcaatcccaaggtaagaaaaccatatatcttcgtaggatgaacgatcccgcanacacgagtgtctgtccaacaaaaggtgaaaatgcatgagaactatacctctatttataggggcagtgcgacgtacaactttgtataaaattacaaccatgacccaaaatcctatacacatgaactattgggtctggtgagggcaacatcgtcttttccttttgaagacgtggtgtgcacgctgctcgacttctttctcacttcttttgtcgctcnatcgtgccaaagaaacttagtgagtgtcataaccgaagctccccgaccttcgctatagcactatgacaaaggtgtatanagtgaatacatacaatgtgaaacttgtagttgtgaccttcactagtcagcatccacaatgtcaacttgatgtgctattaatagattggttagaacagaagataagggatgcttgttt

SEQ ID NO: 21286 - DNA, 143 bp, Zea mays
agtgatgtctacttgtgcactaaaccagttcaacatcagcgcacgaagcatattgagattgatctccacttcgtctgagagccgattgtcattaatgatggtcgcgttctttcatgtcccaacgatgtctcacattacaaaca

SEQ ID NO: 21287 - DNA, 384 bp, Zea mays
  unsure (1)..(384): unsure at all n locations
aatagaatccccgtcggtttagtgtttattccacgcggctctaagctgactggaattaaatggattcctgtaatggacaaactcttctactacagcttcttactcatgtactatacatgataatacatgtacatgaaggcttatgctatgtcatgaatatgtagttacacaataggattataataagttgaacttgaataccactattcttcatggaacatatcaatcactatggtcttctagntaggcatgcttctatgactagtactaagtaattaatcctatgaggcttattattgggattctgaacagactactgacaacatatttcanacttcactcagggactctaatcatcatattaagcctactcataaagtttat

SEQ ID NO: 21288 - DNA, 311 bp, Zea mays
  unsure (1)..(311): unsure at all n locations
tttcgccttcggctcaaaatactgatttcgtccacatcaaagcgactcaatccaagggtaagaatatattacaaggtatgtacaaagttccttgagaacagttctacttcggctcaaaacacttgttacanaagtatcctgagttttttctatagacattctactgatctcataagcttagctccgcacagttccgcgactaactagcatattttacctcgcatctacataataagaatcggataaatcaatgcagatatgtagtacaagatattctactgtcaaatgactcgctcgctcacttcttcacg

SEQ ID NO: 21289 - DNA, 263 bp, Zea mays
  unsure (1)..(263): unsure at all n locations
tatatggtcttttcttctgttgcctcttcttcaatttcggcaggctttntctcaatggactctgtangcccagcatccgttccagcttcaattcctgcagcttcaacttctatctgcttagtatcagcttcagtttgcaccctatgaacttcgacaactttccctgtagaagcgggattcaaagtttccggtgtttctagtgcattcagtacatataccattctcctcctcttatgagttacgacggaacccatttatacctt

SEQ ID NO: 21290 - DNA, 315 bp, Zea mays
  unsure (1)..(315): unsure at all n locations
tgtatctcctactacaagcaccccggtgcaagataatataagcctcattcttcctctgctggaagtanggccttcttagcccanaccaggataaaccttgtgtttcatcttgcatcaatccatccgggcagggacacgcagcataaaatttactagtcggttgagggtcccccgggtccaaaacaccgacagttggcgcgccaggtaagggagcgctgcgtgttgacaatactttcccgttaagttcaagatggacaatcttcaacagcctcttcagcccggaacggtgctccgctttgggagtctcgagttcat

SEQ ID NO: 21291 - DNA, 275 bp, Zea mays
  unsure (1)..(275): unsure at all n locations
cagctgtcaagaagatgctcctcgatgaataaaaggcagatggaccgatttattaccggaggcagtctgggcgttaaacacaactgagtgcagggcaaccgggttcactcctttccgccttctatacggatcggaggcaatgaccccgcaagaaataaagcatgggtccccgcgtacagttccgtcagccgtcctcgacgtggacgagccaacttcaaaagatctcattgacggagaccgggtcttcgccctacatgccctanacaaataccaag

SEQ ID NO: 21292 - DNA, 277 bp, Zea mays
cacatgcccgcacagcaactacagaccataccagtatacctggcctttcgcatgctgtggactggatatgattggaccttacaagaaagctcaagggggatatactcatgtattggtggcgaatgacaaattcactaaatggatagagttcaagctcattgcttctttaacctctgctaaagccgtggaattcatacaagacataatattcagattccggataccaaacagcatcatcactgacttaagatccaacttcaccagttcagaattcttc

SEQ ID NO: 21293 - DNA, 369 bp, Zea mays
  unsure (1)..(369): unsure at all n locations
tacttcagatcctgctgaagcgtcttcnggccctcagccgaaaggagacgacgaaattaanaagatggctgaagatatcatggacgaagtcgtcaatcggcttctgaacgaggctgcagaagtcgttntgagagaagattgagtatttgtgtaaaaacttctggaatgtaatatactgtaacattntgtaaccccaaatgtaatatacctatntttggtagtcaattctttacgatgcatgaaactttatacgtaccgcttntgagtctttgacgagaaaacacctttcctttctttcatgcttcgtgaagaagattnttctttgcacaacaatatccagtggtctgatgaataatatccaagcttcgt

SEQ ID NO: 21294 - DNA, 249 bp, Zea mays
  unsure (1)..(249): unsure at all n locations
ctaagctttgttatcttgccttgttacctattctcgtgggttattctggnttagctatatgctattgcttcaaattaatcaatgaacatgatgagattatctatgatacgttgctttccctcttgactatgatggtggtactgtgacatttaagggggctcgagggtgttctcgagtgcctctncttaaggactggttcgctggatgaccgcccgagaaaacagtgcaaccatgatggtggagtgggac

SEQ ID NO: 21295 - DNA, 247 bp, Zea mays
  unsure (1)..(247): unsure at all n locations
ctcagctgagctataaccttatctaaggtggggagggtggatctgacctatacacggtggatctggctggaggaacgactggattaaccaccggcgtnaccctctcgctnttcaccaggcggctacatgcacgacgtggtgagcaagctcccctctaaccctctctcacatgtggtggtggcacccctccctccctctgtatcaagtggcggtgggtgcgtctacctccctctgtcatcaggcagct

SEQ ID NO: 21296 - DNA, 192 bp, Zea mays
tgcgagaaccgaacctcgcgaaaacaaatacttgtgtcacactccttatttgctcgagatttcgtttgcaccctctctcgcggacttgtgtttatttctaacgctaacccggcttgtagtgtgtttatatttgtgaatatcagtttcgccctattcacccccctctatgcgactatcaattggatttgaaaa

SEQ ID NO: 21297 - DNA, 265 bp, Zea mays
  unsure (1)..(265): unsure at all n locations
gaagaccgttggcagaaagttttctactgatgactcgnncgtccacggagctgtgtaccgaacgcgagttacttatcgcataagtgatgatgaggtatccgcatcccggaggcgtatgaagtccttggcttggccagccttggctgcttacgtgtacttcggcgttactcaggatccgttctccgactattacccaatcccgcatgtaattctgcttacatcagatttcatatccggcatatctcctgcgctttatctctaattc

SEQ ID NO: 21298 - DNA, 431 bp, Zea mays
  unsure (1)..(431): unsure at all n locations
agcttgtaccttataacaggaggatacatgaagctggattgattgtctgaaggcttttgaactgcttgaagcattagtgtagctntggtgcttttgtgactgatcaactctggagcagctagagtgatgtagttgtgggcttttgaacaatagctggagtgatatgaaacattagtgatgtagttgtgggctcttgaactgcttcaagctggagtgatgtcaatgtggtgcttttgtgattgatcacctttggagtctttgtgaatgatctagctagctatctgtaaatgatctagttgtgaatgatattataattgcgatgcttttgtgaatatataactgcggtggctttgtgtttatgtgatggatttatgactgccgtatactgattaattgtgtatgctttatgatttgcgattaaaatatgtgat

SEQ ID NO: 21299 - DNA, 440 bp, Zea mays
agcttctaaagggagagcacattctaggactaaccaatgttcattttgagaaagacaggatttgtagcgcatgccacgcaggaaagcaagttggagtccatcatccacacaagaacatcatgacgaccgacaggccgcttgagctactccacatggatctattcggtccgattgcttacataagcatcggcgggagtaagtattgtcttgtaatagtggatgattattctcgcttcactcgggtattctttttacaggaaaaatctcacacccaagagaccttaaagggattcttgagacgggctcagaatgagttcggattaaggatcaagaaaataagaagcgacaacgggacggagttcaagaactctcatatcgaagctttcttgaggggaaggcataagcatgagttcttttctccctaccacctcaacaaaatg

SEQ ID NO: 21300 - DNA, 475 bp, Zea mays
  unsure (1)..(475): unsure at all n locations
agctngcaactcttcaccaattttacttttttatctcctacnagccccaacttgctctcatggtctaaaggaagataagtggtaaccttattctaactaatgatttctttcacaatgaatgtgtgaatgattgaaccacatattgtccatgatacacattaccattgactataacgatatttgcgctttgaatgggataccaatgttattcactcaaattaaatgtgagacgcttagatatatagataagcaacttcttgatgctccaagaagacttgcttatccttgaaaaggaaagacacctaaagcttcaagaattgctacacaataaagatgacatgctagatgtcttgactaangaagtatctctagtcaagattactatagagaataaagataaagaagttattattatgaacacctctatagctaatcttgcaaatgacaagagtgcacttgaatccagcatgttaag

SEQ ID NO: 21301 - DNA, 350 bp, Zea mays
  unsure (1)..(350): unsure at all n locations
agcttcatgaaagtcgggcttcttttccctctatacaaaatgttggtcgaagttttgaaaacctttgaaatttatcttcaccaacttacccccgaagctattgtcaaagtaggggttttcatatgggccatgaggagccaaggattaaaactggatgccaggtgcttctgcaatatgcatgagctattatatcagacgaaggcaactgggaaagagcaatatcacaacaattttggctgctacagcttcgtgcaccgcgccgaggccagctatcatgtgccgacatnttagaaaaagttgccaggctcctggatgcaagaatggctntatgtgaaggttgatctgagtga

SEQ ID NO: 21302 - DNA, 386 bp, Zea mays
agcttctaaagggagaacacgtgataggttttactaacgtgcatttctaaaaagatagaccttgtgcagcttgttaagcaggtaaacaagtgggaggagcgcatcacagtaagaatgtgatgaccacttcaagacccatggagctgctgcatatggacctcttcggacccgtcgcctatctgagcataggagggagtaagtatggtttagttattgttgatgacttttcccgcttcacttgtgtattctttttgcaggataagtctgaaacccaagggaccctcaagcgctttctcaggagagctcaaaatgagtttgagctcatagtgaagatgatattgagcgacaacgtgtccgagttcaagaaccttcaagtggacgagttc

SEQ ID NO: 21303 - DNA, 398 bp, Zea mays
  unsure (1)..(398): unsure at all n locations
agcttcggctcgggcgatgggtatctcttcttggaggagatattgcaggtacggggtctaccagtttcgattaggcgtgaccccgctccgctcttnctcgacgcgcagagcctcaccctcgggggccgagggtacctcgggccgagccgagggtgcctcgggctaagccgagggtgcctcatgccgagccgagggtgcctcgaactgagccgaaggcttctcgggctcgggtgtgtcgtcggccttgacggagggttgatgcaggtcacgggagaagacatccggtggaaccattggtcgccccgaggctantttagccagctcgtccgcagtctcgttgtaacgtcaggcgatgaggtngagctcgagcccgtaaatttgtcttcaggcgccgaacc

SEQ ID NO: 21304 - DNA, 406 bp, Zea mays
agcttccacaattgagacaagtgatcattagtgattaccgacttgagagagagagtgatccgtgtgatatttgtcgctcttgttgcttggcttttgcaatcgtgctttcttcttccccattcttgttcttcaagcacttgtaatcaaagcaagagacaccaagttgcggtggtccttgtgaggggtctaagtgacccggttgattaaggagagagctcactcggtctaagtgatcgtttgagagagggaaagggttgaaagagaccgggtctttgtgaccacctcaacagggactaggttctttggaaccgaacctcggtaaaacaaatcaccgtgtcatccgctccatttctttggttgatttgtttttgcctctctttggactcggtttaattctactctaacc

SEQ ID NO: 21305 - DNA, 399 bp, Zea mays
  unsure (1)..(399): unsure at all n locations
agctntagggtaaaagtcataaaatgaccctaagaataaacttgaatcacatttatacccctgggataccagaaaccctaattggaaccctggaaaaccctaaaaccaaaccctaggggcttatgtgcaaatttagcccacttttgggttaaagtgcaaaaaccaagctaaataagtatttaaagtcatttggttcacaaatatgtggacttgaaagccaaaccctaagttttggaccaaaatgcaaaaaatcacttcttaaagcactatagaggctaagtctgaaattaagtgttgagggctcaactntggagcattggatcttccacagtattgagaatttaccctatgtcaccacatcaatattgtagatctatggaaggagaagaacttttgtat

SEQ ID NO: 21306 - DNA, 366 bp, Zea mays
gcttagagactagagagagagatctgtttgtgcttctttcatctctcgcgcccggatcggttacttctttcttgagttcttactgcgaacaaactcacttgtaattgacgcaagagacaccaatcttgtggtcgtccctgtaggaactctgtgttccaagtgattgataatagaaagctcactcggtccgagggaccgattgagagaagtaaagggttgaacgacaccccgtctttgtgaccacctctacggggagtatgttagcaagaactccacctcggctaaacatattcgcgtgtcacactctttatttgcttgcaatatggtttgcaccctctctcgccgacttaactatatttctaacgc

SEQ ID NO: 21307 - DNA, 423 bp, Zea mays
agcttgacggatgaagatgattcttaatatactgctatgaaaaaactctagagaaattcttgaattatcgttgtaaaaaatattgtaatttaagaatcagatactactctgtaaatttgtgcataccttgtaatatacttttaccttttctgtccatgtgtgaattgctttgatgtggacgaaacttgtattttttgagccgaagtcgaaaaacaccttcccttcttttcgtacacaacgaagcataaatttgcttcttctcttttttttcttgctgaagccttgtcattaaagccgaagcaactgtctatacttctgtggtatggtgctgatgatcctacgaatgtctaaatgaatgcatatgaatgcaatgaatgatgcgatgtattgtgcaaatgaatgtccacacacacgcttacgaag

SEQ ID NO: 21308 - DNA, 287 bp, Zea mays
  unsure (1)..(287): unsure at all n locations
agcttgctacaggccttcctctttttcttctatcaggaaccttactggaacactaccccacttaaaaagaatgagggtaaaactcttgaatcttgcggatttgaaactccttgaagtacctcataacaagggtgttacaggggcctctttctgtgttgttgcttgagcangctaccgtaagatgactgacatagacttgattctgggacaaccttctttcttcactatctactttctctctcactgcctcccttatctcctctgtcttccaaaggatgtctcaccct

SEQ ID NO: 21309 - DNA, 361 bp, Zea mays
  unsure (1)..(361): unsure at all n locations
agctatatcaaatggacgtgtttagtgctcttatcaanggaccaatcatagaagaggtctaccgtgagcaacctcccggatttgaagacaatgagtaccctaaccatgtggataaactctccaaggcgctccatgggctcaagcaagcgccaagagcatggtatgaatgccttagagatttccttatcactaatggattcaaagtcggaaaggccgatcctactttattcactaaaactcttgaaaatgacttgttcatatgccaaatttatgttgatgatattatatttgggtctactaatgagtctacatgtgaagaacttagtataatcatgacacaaaaattcgagatgtcaatgat

SEQ ID NO: 21310 - DNA, 430 bp, Zea mays
  unsure (1)..(430): unsure at all n locations
agcttggatattcttcatcataacactatggatatagntgngataaatgaaaattcttcttcacgaagcatgaaaagaagggaaggtgttttttcgtcaaagactcaaaaacagtatgtatgtaaatttcatgcatcgtaaagaattgaaccataaaaaacaagtatattacattcagggttacaagatattacacatattacatttcagatgttnttacaatagcacctagtcttccctaagcactacttccgcagcttcgttcaggagttgattgacaacttgatccatgatagcttcagccatctttntagtttcatcgtcatctttcggctgagggcctgggggcgctttagtangatctgangaangacaggatacggctacattgctattacaaattgccaacgaagttaaaatcaaaattata

SEQ ID NO: 21311 - DNA, 405 bp, Zea mays
cgctcgacagatattaggcctttcctgatttttatcttgcatataactatggcactgttcttgggttgaatacatccttttcagaacaagctcctctttgccttcaaactggcactatcctcaatgcgcgtgaggattttagatatgagctgtgctctaagcttcgtccagattttcataacttagtgagaagcaatcggtctctcttccgtagtgagaccccatagtcttgatgtgtggaagcctaaacttgaacgtctgagacaaaaccttaaaggttggaacagtaatattgtacgtcactacaagaagttgaaacaagatttgattgataaaatcgatactctgacaaagttagtgagacttcaggattatcacaagctgatagatctttgaacacgatct

SEQ ID NO: 21312 - DNA, 182 bp, Zea mays
cggaccaacacgcgcgcgcgaccccttcttctatcccaccgggagcaacgaggaatccagcggccaccacgacctgacgggacgcgccccaacgaggcaacgcgacccggaccaaaaacaccgtgaaccagaaccagaaacccgcacaccgggggagaagcctgaccaccgccaactccaac

SEQ ID NO: 21313 - DNA, 385 bp, Zea mays
  unsure (1)..(385): unsure at all n locations
agcttctaaagggagagcacattntatgactaacaaatgttcattttgagaaagacagagtttgtagcgcatgtcaagcaagatagcaagttggcactcatcatccacacaagaacataatgacaacgaataggccactggagttactccacatggatctattcggcctgatagcttacataagcatcggcgggagttagtattgtctagtaattgtggatgactattctcgcttcaattgtggattctttttgcaggaaaaatcacaaacccaagagactntaaagggattcttgagacaggctcaaaagggttccgattgagattcagaagataaaagcgacaatggaccgagtcaagactcacaaatagaagatttttgaga

SEQ ID NO: 21314 - DNA, 223 bp, Zea mays
tgaacctggaaaaacaagcataatttcaatgatcagccatctcggtgcataagttcaccgaatcctaccctcacttggaatttccttggccacaagtcggctttgctccttgtcaccacacttatgctcatcttgctttggtgccggaagacccacttggttcctacaacattttgggttaggacgtgggacctaaatgccatacctcatttttagtgaagtt

SEQ ID NO: 21315 - DNA, 226 bp, Zea mays
aaactccactattcactggcatatcttcaacgtgtggaacatttgacttacggtgctctaatactctgggttgaacactgggatcctgaagcgcacaaaaataacacttaaccccctacggctcaaggtcaaggtttcccaatgactttgactgggatgtaagcactttacggtttggggtccctaatgccttaacacgagactatgatgaacatgttcatatctc

SEQ ID NO: 21316 - DNA, 402 bp, Zea mays
  unsure (1)..(402): unsure at all n locations
agctntaccaaatggacgtgaagagtgccttcctcattggttctttcaaggaagaggtctatgttgagcaaccttccggctttgaagatagtgagtacccttaccatgtgtataaactctttaaggcgctttatgggcttaagcaagacccacgagcatggtatgaatgccttagggatttccttatcactaatggattccaagtcggaaaggccgatcctacactctttactaaaactctttgaaagacttggtcgtatgccaaatttattgtgatgatattatatttgggtctactaacgaagctacatgtgaagaatttagtcggatcattgaccagaaattctagatgtctatgatgggggagttgaaggatttcttaagaattcaagtgaagcaact

SEQ ID NO: 21317 - DNA, 352 bp, Zea mays
agctcataagaaatgttgcatttatactcttcctccaactcagcggtcaaatggcgtaaacaataaatacctgaaagctgaaactgacccgtgccaaccccttcatcatcgtgctcacgagcgataataaactctgctttacagggagaagcaccaagaatttattgtgcaaaaatagtatcataaggtctctagttcaaaggtacctctagtatgctattactgattacagggagaagcatcaaaattttatcatcactctaaaccaagcaataagaccttgggagagaatggactcatgttggccatagcatggtaaggtcagcttaactattttttgttcaccctaaga

SEQ ID NO: 21318 - DNA, 412 bp, Zea mays
  unsure (1)..(412): unsure at all n locations
agcttcngcatgacagnagatttgggatccgacttaaagatgaaaagccgaatcagaccctgaagaattactgtagagttcttgataaatataaagggcactaatgtaattttacacgggctgcgtcccgtgcctataaatagatgaacagtactcccgtactggtcacgctgacttggcattcgcttttggcgtcacacttgtattntcactccttcaagccgaaggtacatttgtaatttaatatagtctgtacaataagataaatggagatagattaataataatgtttataaaagatcatattactttctgtactttgtatgaatgttctttacttctcatcatggtcatgaagggcatgtcttcataaccttcgccctagattcattataatcgaagggaataatga

SEQ ID NO: 21319 - DNA, 409 bp, Zea mays
agcttctaaaggaagagcacattttgggtttataaaatgcccatttagagacagacagggtttgtatcacatgtcaagcaggaaagcaagttggctctcatcatccacacaaaaacataatgactacagacagaccactggagctactccacatggatttattcggcccgatagcttacataagcatcggcgggagtaagtactggtgtaacaccccgtgatccaaaaacaccacagaatgctactaaactacacatctaatattcatatataaaatttcgacagcatctcctttgaaaattgcataaacggggaagcaacatagtataaatagatatcatgataagaaacataatagatattactatctgctagcaataagaaacaaccatattgacatgacctgatt

SEQ ID NO: 21320 - DNA, 421 bp, Zea mays
  unsure (1)..(421): unsure at all n locations
agcttgccaaacaccctatctccatagttgcagactctatagaggttttagagatgcagtacaattttttggaataccttttcaattgctttgaaatctttaaaaaccaacctagacatggagtttggagttatatacctgtaaccggcacctgttatgagaaagcaatctaaactttagagcagagctgctccacctagagttttcgactaaagctactctagagtagagcaaagtcatgccaaagaagcccttaaagtagagcgactgagtagtattaaaattggatcctaactctataatttaattaaataaaaataaatattgagcgcattttagatctaacacgaattacatangtgatttgacttatatggagctattttggatgaagagctataggatgattacataaaattgc

SEQ ID NO: 21321 - DNA, 354 bp, Zea mays
agcttctgacttgtgggcccgcctgggtgtccggtgcacaccgaacaactcctgttcattgtccggtgcgccggaatgggcgcgcctgccttttgcgcgcgcagagcgcgcattaaatgcgctgcaggtagccgttggcgccgagtagtcgttgctccggggtcgcaccggacagtccggtgcacaccggacatgttcggtgaattttagcggactagccgttggagttttccgaagctggcgagttcctgaggccgctcttcgtggcgcaccggacactgtccggtgtacaccggacaatccggtgaataatagcgcgagtgcctttggaaatttccgaaagtggcgagtttg

SEQ ID NO: 21322 - DNA, 435 bp, Zea mays
  unsure (1)..(435): unsure at all n locations
agcttcggggctntattagttcttcttctctgacccctgtcgtccaatcagcaattaagtctgctaatgcctgggactgaattgaggatctatgtacataatcaatgctaaactcattgagctccgcagcccattttccaatccttccagtaacttctctgttcctcattatgtccttcagaggctgtgacgaaggaacaattatgtgatatgcttgaaaataatgacgaagctttctagcgggcattaacacatcatacaacaccttctccaattccgtgtaatttttctttgataaacttaaaacttcggagacgaagtatactatggcctgcgttttgatttggccattatagctttccctatacagcgcaacacttactgcagagtgcgaagcttgcacattgagagcacctagaagggggtgaataggtg

SEQ ID NO: 21323 - DNA, 405 bp, Zea mays
  unsure (1)..(405): unsure at all n locations
agcttcttgcatggcttcaacagcagctatcttttctgattccctgtgcctgagaagctcctgtaacagacacggacagaagagcatgccaattcaaaaattgaaatactcagttgcgcagcgcttgatctttcgaactattgcggaagcgatatcgattgtctccatggattttagcaaatacctttcctagcttggcaagtgatggcgggagtgatgtccatgaagcgctaacgtctgctagttttctgctgctgggaggaatcttcactagatctgtgacactccagntccctaaacccccggaagttttcttcgctgcaggaatatgcttcttcttcactgcttttgcagcagcagcgtctgacgcgggagcacttgtggtgctcttctaacagctttctg

SEQ ID NO: 21324 - DNA, 113 bp, Zea mays
cgggccaagggaattaaagaagaagaaaactgaaagcacccggcaacgaagcagaaagggacgcgagaaaacaacacaccacagacaagggaacgaagcaacaaagaccggaa

SEQ ID NO: 21325 - DNA, 366 bp, Zea mays
  unsure (1)..(366): unsure at all n locations
agcttccactccaaatctacttttttcttatgtctcacaagcctgccattggtcttcaattggttcgccattgattctcaaattggtatctttgagactaagtttaatatcatttacaggtcttctcgcaatatttgattagactatatttcatatattatacttcccatgttgctaaaatgcatatattattgactcatattttggtacctatgcataagggaagtcagtctattcaaatcatgtcttgcaccactatttctcacatgccttttcctaagtagaagatctctgtcanggggagtatttcttcgtctctaatgggggagaaaattcttttctaaatagaacactcatttaggggga

SEQ ID NO: 21326 - DNA, 324 bp, Zea mays
agcttgaaaatagtgccgaagcttcctgttggttatcaagacagcatacagtaccttctccaactctgtataatttttctttgataaactaagaacctcagatacaaaatatattggggcctgcctcttaacatgaccttcaagcttctcctgaacaagtgctgcacttaccgctgagtgcgaagctgccacatataataacaaaggagcccctggcgtaggtggaggtagtgttgctagatctatcaaatactgtttcagctctttaaaggccttctgctggattggtccccattgaaagacttcggctgacttcagcacttc

SEQ ID NO: 21327 - DNA, 316 bp, Zea mays
  unsure (1)..(316): unsure at all n locations
agcttctaattaaaccatgactgcgcncttgtctcgttaccacgagagcgaaggtggatgtgctgctacttcccacttcccttgatgagcaataagcacctgctttgaggaatgcacgagtgagatgcaacatctcaacatgcgaactgttttgacgagatattctaaccacacattgaattaatcaacattttaaagagtcacatttaagatccgaaatacttgtaatatagaactcagtagtcccaatataaccaataccctctcattttctcgaacaactgcaataagtagtatacacttccctgcgtcaaca

SEQ ID NO: 21328 - DNA, 416 bp, Zea mays
agcttattgaaattatttatgaagacaacgatgcgaaaaagatggtggagattttgttgagcatttcaagggacctgcccaagaataacataaatctcacccaggttgacccgcttagtccaggtcatctcgcacttgtcacactgtggcttttatgaactttacttgcatgcctccgctgtgtttaaacgtccttaggtgaactgttgggcatgttcttttggactcgtttctagataatttaattgtacgagctatggtattgatttttgtgtggcttcgtgctcaagactcaagtccttatggtgtaagcttgcatgctgcaacgcgaataaaaagatgcatttttgcttcgtttctttgcatattcagtttggtggatgcaagccaagatgaatcttcgagttcatttcgtc

SEQ ID NO: 21329 - DNA, 329 bp, Zea mays
  unsure (1)..(329): unsure at all n locations
agcttgcacacatagctttttngattttctttgatcatatctcctttacatgctatgactaatgtgntttcaagtcgatttcaaaccaagtcataggtatattgaaaggaaaatggagtcttcggcgaagacaaaggcttccactccgtaactcatacttcgccaccactccgagcaactctctcttctttgggggagaaatgagcatcaaggaaaaggacttcatcctttggggagagagtaaaaaaactcaaaagcaaaaggaccggatttcgcctttggtataatcttaactcatttacttatgaccaaaggggaagaacttactt

SEQ ID NO: 21330 - DNA, 358 bp, Zea mays
  unsure (1)..(358): unsure at all n locations
ccaagcaccgagctgcactaaccttgaataactggttgttcgttttttcgtcggacaatagaatactgacctgaaaacctttccgactagtgtnctggatgctgcatgtatcccacattgccctgcatggacctcctccagaaaatggttccccagggacgggagaacgcaccttatgaggatgcctgacgcaccccttctatacaatacactcccaatgagcgtataaggagctgattgcctggcaatgcgctctgccgcgttcttgacatctggttcttcttacttcttatatacttaaaatcggccgcctccagtcattaaagctgactcgggtgatctagatgttgcttcttct

SEQ ID NO: 21331 - DNA, 266 bp, Zea mays
  unsure (1)..(266): unsure at all n locations
ggaccttaagacaccgcaggctgcgctcacactctgaactaactcggctgtgcattcttcctgtggccaaagaatcctgacctgaaaccttccgactaggtctgtatgctgcatgattccacattgcccggatggacctcatccaaagtcgttccagtagatagagaagcccttnagtgaagacgcctgagcaccctttgttaatgtcttccaatgaggtgtgtgagccactgttggcatacgctcggtgcattttagcatctgac

SEQ ID NO: 21332 - DNA, 456 bp, Zea mays
  unsure (1)..(456): unsure at all n locations
cttaagncacctgcggcatgcaagctttactcaacagcatactctgtacactagcaactcttattagaaaacaccttcgttgttcaaaacagcaaaaagttgaagaaaagtttttaccttgaagttagaatagaataaactaccgacaagatgttgtcgtcggtagcggcttatgtcggtctcaaacttcgggaaaccaatactctttgacagagtaccgataaccttcgcctccaatttgatctcggacgcagccaacttttcatcgtcaacaccgccgaagagtagtgcccctggttgatacctgcaggatatggcgtattctctcaactcttctttctcagcctccgtcaattcctgcccatattaagtttgaaagttaatgttntcttctttcgaagcttcttcagctatttccttctccttctcaggtactggagccatggtttcttcagt

SEQ ID NO: 21333 - DNA, 436 bp, Zea mays
  unsure (1)..(436): unsure at all n locations
agcttcagctccatctatgttatgtattgcttttgagtcagtccaatttccctcggcccttctggcagcttcctaacttccatgaatagcaatgggtccttgatccgaaggtatcttcatgcaaaggtaagcaggatgaagaattgcttcgaaagcattgagggtgccacgaccaataattgcattgtaagggtattccatgtcaacaatgtcaaacacaacttgctcagttctggtgttgttgatgaatccgaaggtcactggcatggtgatcttgcccagtgctacaatctgtcttcctccgaagccacagagagggtgtgtagcatcatgaatcttatcttctggatcttgcatttgtctgaaggccttagcanatatgatatcagctgcactgnctgtatcaaccaagacattgtggaccagaaaccctttg

SEQ ID NO: 21334 - DNA, 437 bp, Zea mays
agcttctaaagggagaacacgtgataggtttgactaacgtgcatttcgaaaaagatagaccttgtgcagcttgtcaagcaggtaaacaagtgggaggagcgcatcacagcaagaacgtgatgaccacttcaagacccctggagctgctgcatatggacctcttcggacctgtcacctatctgagcataggagggagtaagtatggtttagttattgttgatgatttttcccgcttcacttgggtgttctttttgcaggataagtctgaaacccaagggaccctcaagcgcttcctcatgagagctcaaaatgagtttgagctcaaggtgaagaagataaggagcgacaacgggtcctaattcaagaaccttcaagtagaggaattccttgaggaggaacgtatcaagcacgagttctttgctcctacacaccacact

SEQ ID NO: 21335 - DNA, 388 bp, Zea mays
agagcacctgaggcagcaagcttgccaagccctcggacccgaccggattctctggaggcccgagatcgacctcaccggacttcggtcttccgccgccgcgcgtggaccgagctatccagagagtctccgcccaattcctttcgctcatgtcttctctggcatcccgaggaccttcctgacctatttgattgaactatctcgccatgaccaggccggtctcctcgccgccgacgagcattcccggctgcgcgcgtggaccgaccgacttcggccatctccgacggcgttccgcacaaccgtgtgaatcccgcgaccttcccttcaccctcgaacacattaccggaacagtctcgccgttcagaagcccttccgccttttcttcgccgcg

SEQ ID NO: 21336 - DNA, 365 bp, Zea mays
  unsure (1)..(365): unsure at all n locations
agcttgtgaagattcttcatcctaacatttgctagtcggcgatgccagagccaacccatgttagtcttagcgattaagcaagtatcgagttcagctctattgaaatcaactaagtatagctgaccctctaatactcccttaaaagctactgaatcatcacttctgttaaagacaataacactggtatccgtgaaaagacaattgtagcccaatttacataattgagaaacggaaagcaagttgtaatctaatgagtctacaagaaaaacatttgaaatggaatggtcaggtgatatagaaatnttacccaaacctttgaccaacccttgatntccatcctcgaatgtgatagctcgttggggatc

SEQ ID NO: 21337 - DNA, 378 bp, Zea mays
  unsure (1)..(378): unsure at all n locations
agctngctatatgtatttatgcatgtactgcgttggagactgctgtagaacttgtttttcctaatgcagacaagagagagtgctttagacatctgatgcaaaattttattaagaattttcatggcaatagctatagaggcatgtaccctgctgcaagagcatattcaactgaagtttttaatagtcatcttggtccaattttgcaagctgatcctgatgtacatgcttggttacatagaaaccattctttcaaatggatgagatgtacttttgatcgtgatattaaatgtgactacataaataacaacttggccgagtgtttcataactgggtgaaagatcataaagaccttccagtagttgaattagctgataaaat

SEQ ID NO: 21338 - DNA, 355 bp, Zea mays
  unsure (1)..(355): unsure at all n locations
agcttgctcttggcctcccccaaagtagtctaatttctttatcataaccatgtcgnctgccttcatagtagatttaccaaattcaatgtggctaggtttcactgggctcagaataatgtagtcctcttcttcttcattctcacttcctccttcaactgcgatctattcagcttcagcaatcgaggtaccttcggcaacagcctcctctggcacaacaagacccgattgcctcatcacttctgatattggtgccgtttcagtcacttcggtttcgtccccctcacgagacaccctagcagtggatcatactctggccatttcaatgtttacgcttttttgagacgaaactgatctc

SEQ ID NO: 21339 - DNA, 357 bp, Zea mays
agcttgtggaggacccgatcatccaagcttattattttctggatgagaagtggtcacccaagttccgttgatgaagcaccagaagaccaatcaaggaaggaatccatgtgggagttcacaagaagaaggtttgcgtgttggcatcgatgcttcctcaataagctagctgccaagcaaaacctataatcctgaagatgatcttggagtaaccagaatcagtgtttgcaatcagcaaccagatgcccctcataggccagattttgttgaagttccatcttctcgaagagtctgcaaagcgaagatatgtatctgaagtaaactatacccattacccttcctaatcgaatctcgaggacg

SEQ ID NO: 21340 - DNA, 111 bp, Zea mays
agcttgcttctttgccgagtgccagggcctcaatactcttcaaagaagctttaccggtgcccaggtgttccttcttggtaaagaagcttctttaccgagtgctaaagcttg

SEQ ID NO: 21341 - DNA, 342 bp, Zea mays
agcttcgcaagatgtcagatgtttagacttaatccgccaaggcggaggtgcatcgcctcctggaggctaaattcatcgagccggtggcttaccccacgtggctctccaatgttgtgatggtgcaaaagaaaagcggaaaatggcgcatgtgcatagacttcaccagtctcaataagtcctgcccaaaggacaatttcccgttgccacggatcgacaaaataatcgatagcgcggccggatgcgaggtcatgtccctcctcgactgcttctccggctatcaccagatatacatgaaggaggaagacaaggccgcaccagctttataacacccttcggcactta

SEQ ID NO: 21342 - DNA, 359 bp, Zea mays
agctggacattgcttccctgttggaatctatgccatccttaatgccaaggcgtctcccactatagagcatgcttctcgcaaatttaaattcttcattttctatctcatgctcattgattttagtagttaattgagctatatgatcattttgctgtttaattaaagcaaggtgatcatgaatagcatcaacattaatatctctacatctagtacaaatggcaacatgctcaccagtagatgtagatggtttgcaagcattaaatcatcaatcttagcatgtaaaatagcattctcatttctaaaattggaaatagcatcattgcacacatttaaatctttagcttaaaaaataatctagc

SEQ ID NO: 21343 - DNA, 358 bp, Zea mays
  unsure (1)..(358): unsure at all n locations
agcttgcattggatgtttaaatttcttgtattgcatctagggcttgtctaacctagttgagataaccgtcaacaaagcgagtgaaaaagcttaactcggatcaaacttgacaagtcttagttttaagcttttagcacttgaattcttacttggaatgcaattgttggttcttgaaatatgcatgaggtactgcacttaaggggagtattcaaaactcaaatcactcatgaaaacccctagtgcaaggccaanatgcaaatttcaccacttgtctattttttcttaaaatatctaacctatggcaaaatattttgaaaattatgagaatatatatgagggtgccaatacctggtccaac

SEQ ID NO: 21344 - DNA, 434 bp, Zea mays
agctttatgtgaccagataggtacaaaaatacactttgcatcagtgagacatctggaatcaaatggactattagaacgagccaatggaatcataataatagggataatgaagtcaatcttcaatcaacccaaaggaatgtggtcagatgagttgataaaagtggtatggaaccacaacactgttgtctcgaggtcaacatgattgaccccgtttaatcttctgtttggtgatgaagcaataacactataagaagaaagaatgggttcaataaggactttagcttcagcagaagacgaagaggattgcataataatataagacaccatagaagggaccagacttcaggcaatagagcacatcaacatatattatgcccgaacagtcaaatggcggaatcggaaggtaagattaatgaatatcatgccacgacact

SEQ ID NO: 21345 - DNA, 352 bp, Zea mays
  unsure (1)..(352): unsure at all n locations
agcttctaaagggagaacacgtgataggtttgactattgttcaattcgaaaaagatagaccttgtgcagctngtcaagcaggtaaacaggtgggaggagcacatcacagcaagaatgtgatgaccacatcaaggcccctggacctgctgcatatggacctcttcgaacccgtcgcctatcttaatataggaggaaataagtatggtctagttattgttgatgacttttcccgcttaacttgggtgttctttttgcaggataagtctgaaacccaagggatcctcaagcgcttcctcaggagagctcaaaatgagtttgagctcaaagtgaaaaagataaggagcgacaacgg

SEQ ID NO: 21346 - DNA, 363 bp, Zea mays
catgcaagcttctacagggagaacacattgtaggactaactaatgttcatctcgagaaagacaggatttgtagcgcatgtcaagctaggaaacaagttggagtctatcattcacacaagaacatcatgacaaccgacaggctgcttgagctactccacatggatctattcggctcgatagcttacataagcatcagcaggagtaagtattgccttgttattgtggatgattattctcgcttcactcgggtattctcttttcaagagaaatctcaaacccgatagaccctaaagagattcttgagatgggcctaaaatgagttcggattaagaataaaaaagattataagtgaaatggaacgga

SEQ ID NO: 21347 - DNA, 317 bp, Zea mays
  unsure (1)..(317): unsure at all n locations
agcttcgggaaccccatacttctagccatttctctgacagacagataattctttgttgtctgggaggcagtataagaagtcatcttcatctgtgccgttgaatactaaggccccgttcggatacttcagttctcgggcatagtgattagcttcaaaaatctcttcttcagataatctcttccccgaagcatgtcgaataatataatcatgtattttggaagatgcttcgggggcagcagtgccagtttcttcactcaaaanttgttctgccatttctgttttttcagcttccaaggaattcaccttggcgggatctg

SEQ ID NO: 21348 - DNA, 386 bp, Zea mays
  unsure (1)..(386): unsure at all n locations
agcttatttagaggctatagacatttgtttctataaagccgccatccaagggttccccgaacctagagatgccacaaatcttatgggtgatgagtacaactataaaaaatggaatgcaaaggccaaaaacactctttttaggggtctntgtaaggatgttttcaatagagttagaaatcacaaaaatgctcatgatttgtggttagatatttgtgctatacatgatggaaccaaaagtgagcgtgaggagagatatcatattgccatgaaaaaaattaaactcttttgaaatgcttgccaatgagaatgcaaatgatatgtactcgcgacttaatattattgtaaaagaagtcaatggtttgggactcactcaaatttcacaacca

SEQ ID NO: 21349 - DNA, 387 bp, Zea mays
agcttaggatgagagctggtaaacttcttgtattgtgaatcttgagttcttgattggtatttaccatgttttcatttattgaaactgtcttatcggttagtttgaccacgagcttcttctaaaagtaataatgtaacgtgggagcaaagaacagtctgctaatttttttccaccagccatgttttttactttgccggagcaggataaccacgacactatttcacacaatggatgagaaacacagccgagcattttattaccacaatattttaggatatcatacttgcttttaatactttaatagatctatcgatatgtctatatttctgtttcaaacatacacatagatatgtctctgtaccctacggtgtaataaactttgacagc

SEQ ID NO: 21350 - DNA, 321 bp, Zea mays
  unsure (1)..(321): unsure at all n locations
agctactcctcttnaagaaagctttcttcttatctgcanccctccttgtctctgagacactttctctctttcacaaatgacgacacatgcggtctttttagctcgtacgctcacataagctctgaaaaacctaacgagcgctcagtgagtaacacgctatgaaaatgagaaaataaagcatatggcacaagcagcgcatcaaatgtggctggtgcgagattttatttatacactcaccacgctccaaattgggggggggggcgtccctcatcgactgttgctatttgccacaccggttttagaaggctaaccgaatgctaa

SEQ ID NO: 21351 - DNA, 389 bp, Zea mays
aagtcacctgccgcatgcagcttgccttaccttcagtcttttttcttcttccaacggggtcggggagcgcgccaatgggaaaatcttcacagctgtcaagaagatgctcctcgatgaaaaaaaaggcagatggaccgatttgttaccggaggcattctgggcgctaaacacaactgagtgcagggcgactgggttcactcctttccgccttctatacggatcggaggccatgaccccgcaagaaataaagcatgggtccccgcgacagttccgtcagccgtacccgacgtggaccagcccacttcaaaagatcttattgtcggagaccgggtcttctccttacatgccctaaacaaataccaagcccagaccaaagcatggcgcgacca

SEQ ID NO: 21352 - DNA, 261 bp, Zea mays
  unsure (1)..(261): unsure at all n locations
agctatatcaaatggatgttacnatcgctcntttcaacggaccaatctaagagtatgtgtttgttgagtaaccctcctgctctgaagacagagacatactccaacaattgttatgaactctctaaggcgcattacgggcactagccagcgacaaaagcgtggacattaaggcttatagaattcttataactaatggatctaagtgggaaagggcaatcaacactcttacgcacaacttgaatatgtgtgttggacgccaaa

SEQ ID NO: 21353 - DNA, 379 bp, Zea mays
agctaggaaggttcttcatcccttttgtgctaagcggcgatgccacagtcagcccatgctagtcttagcaattaagcatgcatctagaccggtctcctcttttgcaaaatcaactaaataaagtttgtcatctaatacacccttaaaagctaatgaaccatcacttcttctagagacagacacatctacatttgtgaatagacaattatatcccatattgcataattgactaacagataacaaattatatccaagagactcaactaaaaatacattagatatagtgtgctcagatgaaatagcaattttacctaacccttttaccttgccttgattcccatcaccaatattattgaatcttgggaatccttgtttttga

SEQ ID NO: 21354 - DNA, 408 bp, Zea mays
  unsure (1)..(408): unsure at all n locations
agcttatatcagatatgtttgcctttgataccggngtggctgcggaggaaagcatggtcgctttgcctgataaggggaagaaagtcgtcgatacttctttgggagagaaagaatttgaccttccgtacctgggtggccatgaactgtcctaggcatagatagagtgattgaaggaatatggaatatcttaccgttattagcctggatctttggactttggtggggttgacgaaaaattctgggatgtattcaccaccatattgggcgaaaatatccgactctgtctaaagttttggttcccgagcttgagtctgacttcagtggtaccgatgacacctattgtcggatcctatttattcctattccggtggattttggctaaattttgtcccttcagaggattaaata

SEQ ID NO: 21355 - DNA, 298 bp, Zea mays
  unsure (1)..(298): unsure at all n locations
tatggagattctctggtagtcatcaacccgattaacaaggaatgggattgttcaagtgattcaatgggaaggtactgcgccgncgtccgaaagctagaagataaattccaaggtctggagtttcatcatatagaaagagatcggaacacggcggncgatgtactgtccaaactcggatccggtctgactcaggtcccgccccgtgtcttcgtgcaagaaattctccaaccgagcgtctcgacggatcaaatagaagaatgcaacatcatagatcaacccgagtcagactctgatgact

SEQ ID NO: 21356 - DNA, 449 bp, Zea mays
  unsure (1)..(449): unsure at all n locations
aagcttggcccacctgcggatcgatcctccctgagcggcccttggccactgccggtaccctggatcaggggtaccccctactactgtatcaaggtacagtccccgcgcggctacctcttagccgcgtggcagtagggctgcgtctgtgactaatgcatgcctcagcccaaccaagggcggttactcagggcccacagcggtgcctggcctcaccacctgngagggttcgaggccgccacgtgtccatgataatggaatactccagggcgtctgcagtaggtccggacccccatgggggtgcgtctaagtttgcggacaggactcccatgagaggtccaagacctccaagtatgcatactatgcccctaaggtggaagccagacgccttcacaaggggtccggaccactcacggcggggtccccgtacgccaggacggaaaatgcttaag

SEQ ID NO: 21357 - DNA, 416 bp, Zea mays
  unsure (1)..(416): unsure at all n locations
accccaagcatgcttctcatgttgngactcaataagaaattctgaattttagaattctgaatntcagaccttgagccaaagatcaagcgagttcaccttgatccctaactcaaatcctaatggccccattaacaaaaatgtgcataactaacccctctgtcgcatgccagaagatggcattatgacgcgagccctagacacgacaaaaccctggatttgcctcgggtttgagcaaggagacagaccggatttccgagctccatatctctgcaaccagtaggcaaaatcctatgacccccacacaagatcggtagcttgtatggaggagaagaaggtttgtgcactgaccaaggcgagagcangctccgatgagtgaccacacgcgccagaacttgggcagaacgcacgggcacacg

SEQ ID NO: 21358 - DNA, 469 bp, Zea mays
  unsure (1)..(469): unsure at all n locations
ggcctgaagactcttaagactttctttagtatctatctgtataaacttanggtttctttgcattacttgacaaggaattgtaattgttagttgaacaaaatattgtacanaattgtgaatatcttgtaatataattgtacctttttgctcctgtatgaattgctttgatatgaacgaaaccaacacttgcaatttttgagccgaacgcgagaaacaccttaccttctttacgntcacatcaaagcattttttatcaaagacgaatcaccttcatacgccatgaagttctatctgagatgaagcatctccattatcaacgaagcattgtttcagtgaagacagacatcttctgtcttttcctgttagtactttatgtcatgatgatgatgatcctacgaatggctaatgaatgctcgtatgagatgcatanatgatgtaatgagctatgcanatgcatgccaaaaacaca

SEQ ID NO: 21359 - DNA, 445 bp, Zea mays
  unsure (1)..(445): unsure at all n locations
gcttgccgagctgcctgatccgctggacaatacgtcttatgaggttactattttaaactcattctcacgaagtttactgaacaatctatacatgaccatttgttttttatttgaatggtaaaacatgggtattgcgggtgtttgttttggaacttccattccttgaaatacaaaacctggtgaaaatggctaattgtgagcttttcacacataacacgagtaaaaatcttctctagcctaaattctctgtaagcgcactaatgcaaaaaaatgaaccatcgctttggtacgtttcattagtagtttagtacatgctccctctgtttctaagtatatgacatttatgacaaggtaattangtaaattctttttttactaattactttagctggtctagacgtcatatattttaaaacttagtatatagttcagtagcttaataatt

SEQ ID NO: 21360 - DNA, 421 bp, Zea mays
  unsure (1)..(421): unsure at all n locations
tccactactaatctacaagtgttttcaagttatgcaagtggttccattccactaccggtatcatttacatgccttctctagatnttgattagattatatttcatatcttatgttgcccatgatactataaatgcatatgttgttaaaatatatcttttacatatgtatagggggatctagtctaatcaaatcatatcttatccttctttttctcatgtgcctttcctaagtagagaatctccgacaagggagagtatattctttcaaagggggagaacacccttttatggggagtaatcttttagagctacaagtggtanatctttnttagggcaagtcttatttgcttcctttttggtgttggatatgctnttaatgtcttcctttttggtgtntnngatccaatggggagaagttttag

SEQ ID NO: 21361 - DNA, 98 bp, Zea mays
ggaagctctcatcatgccaaaaatgtgatgacaacatcaaaacccttggagttacttcatatggacctcttccgacccgtcgcctatctgagcattgg

SEQ ID NO: 21362 - DNA, 408 bp, Zea mays
  unsure (1)..(408): unsure at all n locations
ctcgctaaagtcttttcatcttggagctaggtgaagatatcgactatctggttgtgggtgctaacataagcaatttcgatatatcccctttgttggtgatctctcacaaagtgatacctatctatgtgcttagtgcgactgtgttcaacaggattatccaccatgcggattgcactctcattgtcacataggagagggatttgctcaacttgtagccatagtccctaaaggtttgctcatctagagtaatttgcacaacaatgttctgcagcaatatactcggcttcggcggtggatagagctactgaattttgnttctttgaagcccaagacaccagggatctccccagaaactaacaagttcctaatgtacactttctatcaatcttacattcggcataatcagca

SEQ ID NO: 21363 - DNA, 379 bp, Zea mays
attactcgctattctgtggagaagacaacggccataccaccaggatgtgccatgtaccatccagaagcacatagagatatcacaagcagcagcgcaacatagtcagccgaagcagagcatgcctactgcttcgtatcattcgccttatatccagaatatgtggcaaccaccctgcagcttctgttgcttcggcaagccaaccccaagcatcttggcaacagcctccaccgtcaccaccaacgcagcgaggacagcagccagaagggagtcagcacaatcaccctcagagggacttcagagaggagtccgaagctcgcacagtctataacactgggccggagtcgagcacaattactgataaatatcctatctcaacagc

SEQ ID NO: 21364 - DNA, 385 bp, Zea mays
  unsure (1)..(385): unsure at all n locations
aaatgataagcctgatatagtattccatagcttaccagctgtttatgctgtgtggacttaantctcatatcttacgatgttatctttggtgtttcacaggcaatcagcattaagtctgtctctttctctggttaaggaaggataatgtagccttccgcttgagccagtgccacaaagaatcacagtctgctgtccttgtagtaacanattgttgtactgtggatctgtcaccacgtaatttaatcactgcatgatgctgcagctacacatctctatctattttctttttctatgtcaaatgtgccaattggttcaactactttgtttggcttctaaagagaccttgtatttattgtgcactgaagtgcttncattatgtacttga

SEQ ID NO: 21365 - DNA, 389 bp, Zea mays
tgatgaccgcggcgaggctggagtgtttatcggctatgcggaattatccaaagcatatcgtatatatgatccagtatcccagcgcgtgcgtgtcatccgcgatgtggtgttcgacgaaagccgtggctgtgactgtgcatcaccggcaacaggcacatcaaaaacattaagcagcgaatttgttgttgaattcccatgggcggaggaattccctgaagcaggaagatcagcgtcgccttcaccatttcctgcgccacattctgcatcgcctggtttctctccggtgaatgcaagagagcctgcagcataagcagaggagtctgcagcggaggcgtctgcgtcgccagaacacccataccagctccagcaagtcctcaggtagaacatgt

SEQ ID NO: 21366 - DNA, 397 bp, Zea mays
  unsure (1)..(397): unsure at all n locations
agcttaatattagcaagaaaaatggttgtattatttaactaaggttagaaaaatttagagaagttattatctacctactgacctagttaaaaatgttaaacacctctgtccactacattaggatagattttaccccttattccataatatgtttaagattaagaaaaataggaaaggtgacataaataaggaaccagagggcacccctatttttggtgagatacttattcaatgtagttcactggaaaaatatatcataccctattgtagtgtaaaataagaaagctatcttttaattcaataaaacaagaataacttagaaaaaccctacaaaaataaccctaagatgaaacctccccaaaccttaggataactaatgttntgataataagaactt

SEQ ID NO: 21367 - DNA, 454 bp, Zea mays
  unsure (1)..(454): unsure at all n locations
ctggacaacaccattgacatttcacatataaattctgagatcaagtatatttagttcattcctcaacatgcaaaatcgggtcttatcaagtggcttagtgaaaatatctgctaattgatcttccgacctcactccttctaaaatgatatctcctttagcaacatgatctctaaggaagtgatgacggatatcaatgtgcttggtgcgagagtgttgtacaggattattagcaattttaacagcactctcattatcacacaacanaggtactttntctagaactacgccatagtctagaagagtttgtttcatatataaaatctgtgtgcaacaagcacctgcggcaatgtattccgcttcggcagttgacaaggcaacactatnttgcttttggatgtcatgaactagtgattaccaagcagatggatcccccagaagtacttttctatcaatt

SEQ ID NO: 21368 - DNA, 464 bp, Zea mays
  unsure (1)..(464): unsure at all n locations
agcttatctcatttacaaaccttgtattactgattacttcattaacacattnttttacacagttgttgtcattagattcacgtattaaaaaaatcttgcttatgattgtatntttttatctcatgtaaatcaacatatcaacatcaacatagccttttagccccaagcaagttggggtaggttagagttgaaacccaacaagatgtcaccaaaaggggaaagagagaaaggtgagggataaacttttgagagcactaaaaggaaaaaatgcctaaccacggttcgggcacgtagatagcttctttgaaacaaaatacagtatatctgctggtagatagtcgcccgagaaagaagttcagcagatcanatgtgccaatttgagggtgcttgagctattcaagcacctctcattctttntcgatggtttgctgggaacgtgtaatcatcatgacangtttctgtct

SEQ ID NO: 21369 - DNA, 367 bp, Zea mays
  unsure (1)..(367): unsure at all n locations
tgcacacatagctcattngaatactcttgatcatatctctnttatatgctatgactaatgtgttttcaagtctatttcaaaccaagtcataggtatattgaaagggaattggagtcttcggcgaagacaaaggcttccactccgtaactcatacttcgccatcactccgagcaactctctattctttgggggagaaatgagcatcaaagaaaagaacttcatccctggggaagagagtaanagctcanaagcttcgcttttgggataatcttaactcatttaatttatgaccaaaggggaagatagcacttcaagggctctaatgattccgtttttggcgaatcatgccaaanagggggagaaatga

SEQ ID NO: 21370 - DNA, 379 bp, Zea mays
  unsure (1)..(379): unsure at all n locations
ttaagcaagtggctaggtcagctctgttatcattaaaatcgaccaaatatagctgaccatctaacactcccttaaatgctattgaaacatcacttcttctaaagacagcaacaccctacttcattaaatacacaagtgtagcccatctcacataatttggaaacacaaagccaattggaatctaaagaatctacaagataaacattgganaaaggaatgatcaggggatatagctaatttacccagacctttgaccaaaccttgaattccattctccgaatgtgatacctctttggggatctttgcttntctcgtctgaggagaacatacttttctcctctgtcatgtggttatgccccactatcgatatccaactgat

SEQ ID NO: 21371 - DNA, 319 bp, Zea mays
  unsure (1)..(319): unsure at all n locations
tctatagggagaacacgtgataggtttgactaacgtgcaactcgtataagatagaccttgtgcagcttgtcaagcaggtaaacaagtgggaggagcgcatcacagcaagaatgtgatgaccacatcaagacccctggagctgctacatatggacctcttcggacccgtcgcctatctaagcatangaggaagtaagtatggtctagttattgttgatgacttttcccgcttcactcgggtattctttttgcaggataattctgatacccaaggaaccctatagcgcttcctaaggagagctcataatgagtttgagctc

SEQ ID NO: 21372 - DNA, 353 bp, Zea mays
agcttgtaggaagaaggttgatcacgttgctaaggtctaatcttatcttttctgatggttctatgcataattaggagtatgatcttattgttgctcgaactaaattatgttggttgattactatgcttgaccttccattatgtataggtgagacacatgcctatgcggactacattgcccatattcattaccctaggtttaccaaagtttctagactgaccatcactagagatcttggaaagttgtttactgaatgatgtaatgtgctaatcaagtatgtgttgtctgttccttcttgtgttgattaacattagatatgcggcatggccatgcgaaagaagacgataatagtg

SEQ ID NO: 21373 - DNA, 262 bp, Zea mays
gaccgactacatgcgcaccagaccaacatatccaatacaccagaccaagtatgtaacgccttcgtgagcatagccgaaagcacacaacttcatcatacgagccattacatatgtacaagcgagggcatcacactttacatcggctcaaccttcggaataattcccatctccctatagttaaatagcattatcctcagttcctcacccgcaaaaagacttcgcagctccccctcacccgaactcacagcggccgacaaggaca

SEQ ID NO: 21374 - DNA, 458 bp, Zea mays
  unsure (1)..(458): unsure at all n locations
gcttctccgccagtctgagcagttcgaacgagaataacaagatcttattgcanaacttgaagccgaagctcaacaaagttcagatttgagaaaactactgacaagtcttcaagaaaaatgcttggaatttagcaacaactgcattcaacgattaagaaagattttttactcagttggagccagcagtgaaaaattcaccccctcagctgaagatctaccgaaaaccttcgaacatattgagggggagattgacgagctcgacgaagtcatagctgggcatggtgacttctgtgcctgngtggcttctcgaggcactgctgcggctntcctgaaggctggctgtgatcatgggaagatngtcaataggccaaatttcactttatcaccatcaatcctggatgacatccctgatctcgcccgaagtatctcgaatcgatttgtaaaatgatatggacaaa

SEQ ID NO: 21375 - DNA, 403 bp, Zea mays
  unsure (1)..(403): unsure at all n locations
ngcactctagatacattggtccttntcctatccttgaaagatatggaccagtgggataccgactccagttacccgaaaccttgtctgcagtacataatgtgttccacgtgtctcaattgaagaagtgtcttcgggttcccgatcgaactattaaagtaacggatgttgccttagaaccagacttgacatattcagagcaccctattcgagtcttggatcanaaggacagattacccaaagaagaactcttatagtttacaagatacagtggaaccaacacacagaagatgaggctacatgggaaactgaaaactttntagaaaagaatttcccaggatttttagcctcatggtaattgtaaagtgtatacaattgttgtaataaaggaatgagccccatacca

SEQ ID NO: 21376 - DNA, 301 bp, Zea mays
  unsure (1)..(301): unsure at all n locations
ttgtataattccttcagggcctaaaattttctttntctttgtgcatgtagtcatcggcctcacccaacatttaataagatcatcataagaatatccatcatcatcaagatcatcaatatcataatgatcatctatgtcatttaaatcggttataaattttaccttagcaccaccttttgccatgagacaatgaggagataagaaaagtgagggagcctccttgatagcaagtccagcatttagtttggatgaagaatcatcatcatcatcatccgagcttgcatccgaatctcattcaact

SEQ ID NO: 21377 - DNA, 451 bp, Zea mays
tgcaagcttctcacaattctcttttagatcgttgtgagatgtctttagcttctcaaaagacacttggaggtttttatacaattccttcaggtcttaaacttttctttttctttgtgcatgtagttatcggtctcacctaacattctaacaagatcgtcatatgaatagccatcttcatcaccatcatcatttatatcatttatatggatatacttgacatctgtatattataataaattgatagacgtttaattttgggggtacgggtgacccgatgggtgacccatacccacatgggtatggatatgggggtaaatccatacccaccagtgtatatgggtgacccggtggggttatttttgtgtcgtgggtatgggtatggggtagtaatacccggtggggtattaccctcttgcatctctagcccggacgggccgtcatattatataac

SEQ ID NO: 21378 - DNA, 327 bp, Zea mays
taatgcgcctagaagatagtctaatgttgtcatgggcaaagctcccatggttcaggataatgaggattacattctatatcctgctaattatcctgagcacaaaattaggagaattcatgctaaaaaatctcattctgttttccatcatgcttttatgtataagaatgatgcatctagctctaggcattctacacatgtaaaattgcctaaaaagactactgctactgcatcaaataatcataatatttcattcaaaacttttgatgcttcttatgtgctcactaacaaatcaggcaaaatagttgccaaatattgtggggacaaaca

SEQ ID NO: 21379 - DNA, 421 bp, Zea mays
  unsure (1)..(421): unsure at all n locations
agctntatcaaatggacgtgaaaagtgccttcctctatggaccaatcattgaagaggtctatgntgagcaacctctcggctttgaagatagtgagtaccctaaccatgtgtataaactctctaaggcgctttatgggctcaagcaagccccaagagcatggtatgaatgccttanggatcttcttattgcagatggtttcaaagtctgaaaggccgatcctactttattcactaaaactctcgaaaattacttgtttgtatgccaaatttatgctgatgatattatatttgggtctactaacgagtctacatgtgaagagtttagtaggatcatgacacaaaagttcgagatgtctatgatggnggagtttgagtatttcttaggaattcaagtgaagcaactccaagaaggcacctttct

SEQ ID NO: 21380 - DNA, 368 bp, Zea mays
cgactgccagttcgacctctggaagcagtactacgtgaccacatgcgtcgctgtgttcggctagctccgccacagccgccgcttggatgcggtccagagcggctgcaccgcgttgtccatctcaaacagggggacctcatggtcgtcaccaatgccggcgactcttgggttgttctgggcaccgcattcgacaatggtgccgtcgcaccgtccagctcatcatcacctgaagctcaacctgccacgtaagtaactattgaccggccatgagttcttgtgcgctgggacgacgaccgttgctgacattgtgtgagtgtcctcgaacaagatgtatgtagaggagtagcacatccggtggtgcaacgact

SEQ ID NO: 21381 - DNA, 391 bp, Zea mays
  unsure (1)..(391): unsure at all n locations
ctgcacgcatgcaancttgctcgccagtacgttcgtggagactcgggcaacttcgtagcggcgccatttcatctctcgccggcagagctatcacggcaacacgctgggcgcgctggccataggcggcaatgcgtggcggcgcgagccgttcctgccgctgctggtgccggcgcatcatgtgtcgccctgctatgcataccgcgaccagaccgagggcgaaaccgacgcgcaatacgcgcaacggntcgccgatgaactggaggccaagatcgtctagctgggcagcgatactgtggcaggcttctttgccgagaccgtggtcggcgctaccagccgcgcggtgccgccggtggccgactacctgcagtgtatccgcgccgtgtgcaaccgg

SEQ ID NO: 21382 - DNA, 433 bp, Zea mays
  unsure (1)..(433): unsure at all n locations
agcttcgcgagagagggaacgggttctangcctnctgangagtctagngntgcggagtggagctcgatgtttgagtgagtccgtctccgttgtccttgctgcctgtgctctcctatcccccctgagaaggccctgngcatccccttttatagatacaaggggatggtccagctgtacatataggggtgttgctatgtgctaacgtggccggcggaggagtgcttgagccctgtatgaagcgtagctggcggtgcggccctgggtcctgctgacgtttctttgccttcgtagagagctcgagggctatcgacgtcatatacgcacgcggggagccatcattacctgtggccggagtaatctagatgtgactctggtcttgttccttcgtagcctgaggcagctagctagaggtagggtaatgatgtatcccctg

SEQ ID NO: 21383 - DNA, 403 bp, Zea mays
  unsure (1)..(403): unsure at all n locations
agctntgacaatattatgtgtaattggttgtaatcttttttcattnttcctatggcacccttttcctttccaaagagggagaaaggtttttaatgggccatagtttgtaatttttcatttcttatttagctccacgagagcaaatcccccaaaagaatgtaaaatgtaaaatctgagcacgcaccatcgagtgcagaaaaaagagaaaaaaagcagggagaagctcanaagtcgtncctaaggggatgcagagcacgacgaagctacaaaaagtcgttcctaagggagcgcagcgtaagttttctgctcaaaagtcgttcttaagggaatgcagagccaaataccaccgaaatataaggcgaagaagttcanaagacgttcctaaggggatgcagaacttata

SEQ ID NO: 21384 - DNA, 435 bp, Zea mays
  unsure (1)..(435): unsure at all n locations
ntaggtattattaattgctaaataattcctgattgngactaattatcttgtgaactattttattaaatataaggggaatttagaagtctagtaaaattggtcccataattntattatttttttagaattttctataaattttctaagcctggcagaaaaagaaaagggaaaatgatgaacagtgatgggctgaaaccagcccatgctagcccatggacagaaaaacgcgcctgtgcgcacgcgttagacaatttgcgcagagaccctcggngatttatgaaagggaaatagggttaaccttttctcacaatntaatttggtggttgaatgtccaacacaaatatatggactaactagtttctctaaaatacatgttctacaggtgcananaggttcaacacaaaccaatanatattaaagttagggatccaattc

SEQ ID NO: 21385 - DNA, 260 bp, Zea mays
agttcctgtagaatcataccggtggcacgctccacctggccattcgtcatggggtgagctacggcggcccactccacacggatgtggtggtcctcgcacaagttcacgaacttctttccagagaactacgtgccattgtcggtgatgatggagttcgggaccccaaagccatggatgatgtttgtgaagaacgccaacgcctgctcggacctgatgctggttaagggtcggacctcgatccacttggagaatatgtcgat

SEQ ID NO: 21386 - DNA, 397 bp, Zea mays
  unsure (1)..(397): unsure at all n locations
tcggctctatctatattatgaattgtctttgaatctgtccagnttcctttagcctttctggcagcttcctgacttccatgaatagcaataggcccttgatccgaaggtatcttcatgcatagatatgctggatggagaattgcttcaaaagcattgagtgtcccgcgaccaatgaatgcattgtangggtactccatgtcgacaatatcaaacataacttgcttagtccttgtattgttgacanatccgaaggtcactggcatcgtgatcttgccgagtgctacaatctgccttccttcgagccacnaagagggtgtgagcatcatgaatcttatcctctggctcttgcatctgtctgaaggcctagcaaatataatatccgctgcactggctatat

SEQ ID NO: 21387 - DNA, 343 bp, Zea mays
agctttgccttcggcagacctataccagaataagataacacgctatgggagtggagagatggcgagagtagcgtgtacccttcgtggccagaggctggacagaggtgtatctgggctttcgggtggcgtgaacctgatctggtcttaagaaccctggtggcgagttgacatatgcaagggttaagtgctacatatgtcgtgtgattggagatccttagctgagtataatcgattcggattcgcgtaacttcgcggacatgaagacttggtcactgacctgcaacctaagtcaggatgtggacattatgaataaaaatgattgtgtttaatgtgatggtgaaat

SEQ ID NO: 21388 - DNA, 404 bp, Zea mays
  unsure (1)..(404): unsure at all n locations
cgtaatgaacatgcctctactattctcaagttaaataatgatgtttcaaagcttaatgctcaacttatgacttgcaaggataattatgagaaactaanatttgctagggatgcctacaccgttggtagacacccctctattaaggatggacttggtttccaaaaggagaccaagaacttaacaagccaaatgacttccaatctcaacaaggagaaaggaaaggcttctatggctagtagctcttattcnttagttgaccanaagaaccatgcttatctttatgctcatgtcaagaatatttctagtgctgctcatcatgacaaagtgtataatcatgatgtnttatctactcatcatgatgctgaattaattctcataccatgtttgcactagcttttatatac

SEQ ID NO: 21389 - DNA, 239 bp, Zea mays
  unsure (1)..(239): unsure at all n locations
atgggacttcctgatatcataagatgcactctaagtttggacatacatgatctatcaaaccctccttcatatgagaaaacntgaagccgatgaccccaccctgtcattatatacagagaggacgttcanacacaagacactcccagttaagcattgacttccggtaacataaagcggtccatataatgattcaacaagcacgcatagagaaactgatcataggaaatagaactaccata

SEQ ID NO: 21390 - DNA, 433 bp, Zea mays
  unsure (1)..(433): unsure at all n locations
actattacatactcagctnttgtcttgacttaaaggggcccttccacttgagctccagcttttccctggactccattcgagctggtcggacgagtacgatgttccccacgctgaacttccttcggatgactgcgtggtcgcgccatgctttggtctgggcttggtatttgtttaaggcctgtaaggcgaagacccggtcttcgtcaatgagatcttttgaagttggctcgtccacgtcngngacggctgacggaactgtacgcggggacccatgcttttattcttgcggngtcatggcctccgatccgtatagaaggcgganaggagtgaacccagtcgccctgcactcagttgtgtttagcgcccagactgccttcggtaacaattcggtccatctgcctttttttcatcgaggagcatcttcttgacagct

SEQ ID NO: 21391 - DNA, 472 bp, Zea mays
  unsure (1)..(472): unsure at all n locations
agcttgtgaaggttcttcatccncacatgtgctaagcggcgatgccacagccagcccatgctagtcttagctattaagcatgcatctagaccggcctcttcttttgcaaaatcaactaaataaagtttgtcgtctaatacacccttaaaagctaatgaaccatcacttcttctaaagacagacacatctacattngtaaatagacaattataccccatgtngcataattgactaacagatagcanattatatcccaaggactcaactaaaaacacattagaaattgagtgctcatttgagattgcaattttacctaatccttttaccttgccttgattcccatcaccgaatataattgaatcttgggaatccttattcttgacgtaggaggtgaacatcttcttctcccccgtcatatggttggtgcatccgctatcaataatccagcttggaaccccggatgcataaacct

SEQ ID NO: 21392 - DNA, 392 bp, Zea mays
  unsure (1)..(392): unsure at all n locations
agcttgtgaagattcttcatcccaacatgggctagtccgcggtgccagagctaacccatgttagtcttagcaattaagcatgtgtcgagttcagctctatcacaatctactaagtatagctgaccctctaacacacccttaaatgctattgaatcatcacttcttctaaagacagcgacacctatatcagtgaatagacagctgtagcccattntgcataattgagatacagaaagcaaattgtaatctaatgaatctacaagaaaaacattggaaatagaatggtcaggagatatagcaatttacccaacccttgacaaaccttggttcatcccgatgtgatactcgtgggatctggtttttcgaagaagaaacatcttttccctggatat

SEQ ID NO: 21393 - DNA, 177 bp, Zea mays
  unsure (1)..(177): unsure at all n locations
tttctaacaganatattaggtgtattttaaggaccaaggatattcttttatgatccctattagcataggcctggatagacgtagcaaacagagcagcaccattcaaagcttggctggatctgagcatgggacggggccacccaaatcaaagcaaccggctgctcacctgcgccgaac

SEQ ID NO: 21394 - DNA, 409 bp, Zea mays
  unsure (1)..(409): unsure at all n locations
gtctacaatgttaattcagaagtccactttgagcnggtgataactacatacgtaagcatcacatatgatgattnttatgatgtctatcaagaagaaggtgataaaaggaacagtgatgaagttgatgatattgtatttgaagggacaacccttgttgatgaattaatttatcgaccggtcaaaccagtagagttaatggacgaagaaccaggtccttcgaatgcaaaacatcaaaagtcaacaagacttcttgaaagactcattaatgcacgtgttatggaagagggatttgatgctgacaatttnttattactacantttatgtatgtttattactgggcgcttggttggtggaaagggaagaaaaagggtgaaagcttctncaggtccacttgatccaggtcgagta

SEQ ID NO: 21395 - DNA, 320 bp, Zea mays
  unsure (1)..(320): unsure at all n locations
gctttatcggtggaattgcttgagagggttgaaaaagaccctatccttatggacacctcaacagagacgtatgctctttggaaccagactctggtaaattaaactttgtctctctcttagtgagtggtttgcattctgcttgtgaattggtctttcctctctctctctcactctaaggactcttgcttggactttgatttaaatcacttgggttgctctctagntaattatgcattcataagcgtgacaagtgcaagagaactctctcccttctagtctgatttgattctctctcgctctaacatctaatgttgggatct

SEQ ID NO: 21396 - DNA, 429 bp, Zea mays
  unsure (1)..(429): unsure at all n locations
gctctcaatgcatgctggaggtgcgcgatgtgatcaatattatccatgtttgataaatgatgataatggtgatggccatgatatatggtcaatattgtattgatctttttccgagntttatggttgcatgttggttgctggaatggagatatttcatggttcacttggttcatgtgacataattaattaccttatttctgtgctttcttagtagcttttttctgagattttgagttgtaataacacttccctaatcgtngtgtcattataactcaatgacattattaaaatcatatatagaagtctatatatggtactgatggttgcaatgtaatgatgaaatagcttgattaatataaccaaaattatgtatgagtaggatcacatattggattccgaacattttctcataacaatataacacatatg

SEQ ID NO: 21397 - DNA, 345 bp, Zea mays
  unsure (1)..(345): unsure at all n locations
agcttatcatttgctacctccaatgggggacaccatctactaaggccatgtggtgttgcacccactgacctcgcttcagctcacgctccttctgaagtacatgctaccgaggcatcacaaagcatgttgtaaggcacgagtaatcatctatttatttgaatgtggctcagagtagtatattgttaaggtaaattgaaatttaggtttgatgattttgatccactattnttcatatttggataataaatttaaagctaatgtagcaacacacgaacatctggtaccatttgattatgttgcttnttactgtgctataattgtntaaatttactggtaagcttgcaa

SEQ ID NO: 21398 - DNA, 423 bp, Zea mays
  unsure (1)..(423): unsure at all n locations
tccggtgtcttcttngcaaggtgcgtttctcttgagatgggttaagatgagaatggaagcataaggtgaggattaagtctaatttgtgatctatgttttagagaaaacctttcttaaaaagaaagaaaacacacaagctcagcaataataagcacaaacaaatcaaatgttctgaataagggaagaatagagtttttccaaagcacggactactcagattcggnggctaagcataattattattgcttggctcctgaattgagaactatgctaattgcaacttatgagcactaacgttaaagcatcacatatgcactcaaaaggggagaaaacatcaaacgaaatntcatttgaaatgccctangggccacacaattagagttttgcanaacacgagtctacacgaatacctctcatacatgt

SEQ ID NO: 21399 - DNA, 454 bp, Zea mays
  unsure (1)..(454): unsure at all n locations
agcttcctccagcattcttgagcccctcaggcatccgaaggtaacaatatgttccactangggttatgaagctggtcttcggctcatcctccttcttcatccagatttgatgatagtctgaataacaatccaacagactcataagctctgatgaagctgctgcatcaactaaggaatccatcctcggtaatggaaactcgtccttcggacaggccttgntgagatccgtaaaatcgatacacatcctccatttaccattggcctttnttaccatgacagtgttagccagccattctgggtattntacctctctgataactccagcactgagaagtcttttcacttcatttcgagcaccttcagccttgtcatcagacatcttgcgaagcctctactttgtgggtctgaaggatggatcaacattaagcgaatgctcaataacatccctggtaac

SEQ ID NO: 21400 - DNA, 302 bp, Zea mays
  unsure (1)..(302): unsure at all n locations
atgcagatgcaagaatattntcttctgngngtgaatattctatgctgtcattnntagtccacttatatcacttgaagtgcttacatggttggtcacaagaatcatttacaggacttatggatctgctatctggtattcctggagctaatctacctcagacatactatgaagcgaaaaaaatcatccgtgacttaggtctcgattatgagagaatccattcttgccccaaagattgcattctctttcgaagtgattttgccaaacaagattttgttcactgtgtgagagctctcgttggaaag

SEQ ID NO: 21401 - DNA, 469 bp, Zea mays
  unsure (1)..(469): unsure at all n locations
attaggctcttagatactcagcttttgtagcgcacatatccttgatggtggaatccttggtcgatagcagttgtccaagtcgcagaacttcatcttgggatacctgcatctcatggcggtgatgatctaagtcagacatggtgaagcggtggctcctctccaagatggtcaaggagttactggcatcacgtacaaccgtctagattgtcacgagaggcaacaagtgctcgcttctcctcctacaaatagaanacaacatttagtaccaaggcaacaataacatgacagagtcagccaaggaagtttacctcatgcgccatcttttcagagtcaagctgggcattaagagaggagttcagagagcatgcaccgtctagaanagcagaagtctgggccaagtcagcttgactntgagaatacttctcctcaaggtcagagcatcgttgagccatatccgacaacacagctg

SEQ ID NO: 21402 - DNA, 464 bp, Zea mays
  unsure (1)..(464): unsure at all n locations
agctgagcggtgaccggcttcgtttgaaacccttgtanaactagaatcagcatgtccttcagcttctgccatgacgtgattgttcctggccgaagagaggagtaccaggtttgtgcaacattcttgacagccatgacgaaagacttcgccatgactgcagtattgccaccatacgaagatatggttgcttcgtagctcatcaaaaactgcttcgggtctgagtgtccgtcgtacatgggaagctgaggtggcttgtaagatgggggccaaggtgtagcctgcaattctactgacagaggagaagcatcatcaaaagcaaaatttccatgatggaaatcctcataccagtcatcctcgttgaagaagcctctcttgatgaagcttctcctttctgccatcatgctgaagcttccttgcgcacagcttcngctctggntcatccttcattctctttgggttcttca

SEQ ID NO: 21403 - DNA, 464 bp, Zea mays
  unsure (1)..(464): unsure at all n locations
tagtgctttcatatngaacacacaatcatttctatgcttccatatggtccaagctcctaagataactagggaattgagccactnttacgtgtaggattcattgacttaagagttgcctctatgccgaaattgtcggagttgggggagtcagctggtggtggnggagggccacctgagctcgataaccggcgacaagagcgacgtcgacgcggtcgcccaccgccagcactctcaataaaccttccccgctagtgtcacgacacctccgcgatccaatgaccggatcattgaatatctcaacggngctacgcaccgactgactggccgccactacaagcgcctttctaggggtgcatggagcggacagacaacaacacagtggctcgccttgcagcaccggaagcactangtgcgctgacagcaggcgccaactcggtgatctcttgagaacacgtgaacacttc

SEQ ID NO: 21404 - DNA, 476 bp, Zea mays
  unsure (1)..(476): unsure at all n locations
agcttcggcccanaacctctccagtgtgttatactcatcaatcaaagttcttgcaagagtgatcaaggttctattctttctttctttctacaattccattntgttaggtgtatatgttgcagatacttaatgtttgatcccaacttcatcacaatattcatgtatgttggtattgtcaacctctttcccattgtcacttctgatattcttgattntggggtcgaattcattntgtgctntcttggcaaacttctcgaataaagatgcaactttggagttttcttcaagaaagaacacccaaatgtatctagagtaatcatcaacaatgactaaggagtagaggttgccaccaacacttgcatatgttgttggtccaaataaatccatatgaagcagttctagtggccatgatgttgacataaataccattgtatggtgagtattagcaactagctttctagcttgacacacactac

SEQ ID NO: 21405 - DNA, 407 bp, Zea mays
  unsure (1)..(407): unsure at all n locations
tcgataatacaacatatccgaatgtgaatggacgaaccgacttatagatagaatgaccttntagtccataaaggtctgagtcaatgttgtcaactcttatgaggggcatgattgtaattcctcatatgctgtgtcctgtgcctataaatagtgaatagtattcctttactggtcatgcattcctgcaattgcaattgcatcactccgaaattattctttgccaacgcagaggtataaatgtatctaacatttcgatacatcaaagttgtataatatgagaatgatgtttgttatttataaattacttgtcggtaatgcttcatatctcaaattattttatacaatctctgagagttcaattacgaagattcaaccttcgtaattgtaccgtctttaaccttcgtccg

SEQ ID NO: 21406 - DNA, 171 bp, Zea mays
ctcttacactcctttaaatgctattgaatcatcacttcttctaaagacaataacacttgcatctataaatagacagttgcagcccattctgcataagtgagaaacataaagcctattgtaatatagggaatctactagaaaaacattggaaatagaatggtcaggtgatat

SEQ ID NO: 21407 - DNA, 363 bp, Zea mays
  unsure (1)..(363): unsure at all n locations
tgcttcggccgaggagtctnttgtatgttcaacagataaagcagcttcagtttgcgccacagaatttacatgatcgcaacctatcttctccaagacagctgcaattcccctcgcgccagagaaggcacagacgtccncacggccactcanaacttcctcanaagcttcggcttcgctgctgatccattcgattgggcgttgaggatcgcctcttatgaagntgtcctcgctggagtatgcgccaaccatggcgaagctatgttttatttttctcacgcattctatggattnttcataacatctctctttcgaagagcgtagntctacaactggcctctcccaataattcttccagtaatcact

SEQ ID NO: 21408 - DNA, 179 bp, Zea mays
  unsure (1)..(179): unsure at all n locations
agctcctanagtgagagcacattntangattagcagatgttcattctgatacagacaggatttgtagtgcatgccaggcatggaagcacgtcggagtcaatcatccacactaaaacataatgacgaatgacaggccactggagcttctacacatggatctattcgggccgatcgcttac

SEQ ID NO: 21409 - DNA, 388 bp, Zea mays
agcttacgctctgatgtatacaagcatggaagactaaccgatagaggccttgggtgacatagtgtggattctgctagcctagcagagagttattttagataacatgcataccatagtgggagatagtgatgttaaagcacgccgtccggagctcctctaatccacgtagggtcgagtgaacatcgttgcggaagactaacctacatataatcctaaagctaacttacccttactcctaggagttggaagaacgacaagggaaatcgtgagtaatagatctgaatggatcgattgtggtggtataatcggccagcacccttcatgtatagtaaggagaggcatagacccgttaacaaggcgttatccgagtaaacaccatagttctagc

SEQ ID NO: 21410 - DNA, 378 bp, Zea mays
acactatagatactcagcttaagagaaatgctgtgcgcggttatatcataaaggcatatactgcatgtggatcagaacgaatgctgacaagcagaaaataccatgactggcacctcatagtcccaaccatttcaaaactggcaaagatttaagtttcacttctcttgagcctcatcatttctttgacctaaatgagcatgtagtggccctatatctgggacttcttcaatacctacaagcgggttgagggcaaaaaaactcgtgtaaaggattccacggaatctatataacaggtaaacggagagagaatgcatggatatacacatatacctgtagaaattcaagaagcgccatagtaggtaattgatgatcataact

SEQ ID NO: 21411 - DNA, 429 bp, Zea mays
  unsure (1)..(429): unsure at all n locations
agctngaaaggtgtaaaacctgttgaccttgacacagttgtgttatggctccacaccactttaatcaattcatctggccattntcctctaggctggttgaagattaacttcattattcttgtcattataatgccatttgctctttctactagcccatttgattctagatgccttactggtgcaaaatagatttttgtaccaattcggtcacagaaatctttgaatgtttcggcatcaaattgtgttccattgtccacagttattgccttcggcacgccgaagtggcaaacaatgttttgccaaaagaatttctgtactgtggtcgaagttattgtggctaaaggttnttcttcgatccacttagagaaatatttcactgctacaacgacatatntcaaatntccttgtgctggtggaagtggacctaac

SEQ ID NO: 21412 - DNA, 468 bp, Zea mays
  unsure (1)..(468): unsure at all n locations
agctntggcaactatgctcgtatccaatctgcctgatccggaactataagagcttgccagatgcccccgttcctgtcgaccacgaccagcacccaacataagacttccctagttatttagccaagaccagagccatgatagttctcatggtagcactgttttcccgggtggtcactccatgttccaattaatatgcaatgatcttgtttaaccatcgggttaacaatataaagtaaacttaccattttggaacattaatatcacaaaccggagtgactgcataaggttaagttgtagcaatagcatagctactaaggtaaagtataattcccaggtttgatcaaggaataaggttggaaaggttatctaaataggtaatcgtcaagttatgcatatatatccaaaagagtaaactntattaaatgtattgctggtgatcaaacagagtatgcagagggagaagtccac

SEQ ID NO: 21413 - DNA, 276 bp, Zea mays
  unsure (1)..(276): unsure at all n locations
tacagagcttcgacgcgggaatgctccttggacacgatcgagctatgttcttgtgacacaccacgctcatgttgcttgctgccgaagaaccaatggggttctacaacattatgattaggacgtggaactaagtgccatagctcattcctagtgaagataatgagctcctattggctagncgccacccaattctgatctagatgtgcttcctctatcctgcgtggctcagttgatgaaacacaatagtactgctcacaggagtgtgcatcactagat

SEQ ID NO: 21414 - DNA, 443 bp, Zea mays
  unsure (1)..(443): unsure at all n locations
ggtcatcgacccggtgatgctgtcgacgctgggcgacgggagggtattgaggggcctggcggtgctgccgagggaggggcccgccgtgctggtggtgtaccacatgctcctggggttcgagctggggccgatggtgacgggcatcctgagcggcaccggtgtccacgtccggngcctggcgcaccccttcatgttcgacggggccaccgagcggctcatgcncgactcggcgcacttcgaccttgcaccgcgtcatgggggctgtgccggtgacgggcgccaacttctacaggctcctcgcggacaaggagttcgtgctgctgtatccggggggtgcgcgggaagcgcttcacaggaaggtggtggtggtggtgtggttttgcagtacgtgtacggtgtacgtgggtttggttcttctactggggtattgtgtatacaactgg

SEQ ID NO: 21415 - DNA, 221 bp, Zea mays
  unsure (1)..(221): unsure at all n locations
tatgctcctatgtgaggatatagcagagcagaaggtattattgggatctcaattgtccgaggagcaggagaaaaccttgatcaggtttctgttcaacaataaagatgtttttgcttggtcagctaatgatctttgtggagttaacagggatgttattgagcattcgctcaatggtgatccatccttcangcccagaaagcagaggcttcggaaaatgtctg

SEQ ID NO: 21416 - DNA, 350 bp, Zea mays
  unsure (1)..(350): unsure at all n locations
tctanagggagaacacgtgataggtctaactaatgtaactttcgttatagataaaccttgtgcagcttgtcaagcaggtaaacaggtgggaagctctcatcatgccaaaaatgtgatgacaacatcaagacccctggagttacttcatatggacctcttcggacccgtcgcctatctaagcataggaggaagtaagtatggtcttggtataagtgatgattnttcccgcttcacttgggtattctttttgcaggataaatctgaaacccaagggaaccctcagcgcttcctaaggagagcccaaaacgagttngagctcaaagtgaagaagataaggagcgacaatgggt

SEQ ID NO: 21417 - DNA, 499 bp, Zea mays
  unsure (1)..(499): unsure at all n locations
agcttgagaaaggaacaactgcagcaagggntgagttttataaaaagattgttcctaaagatgaagaaatcaacatgagcttggaaaaaggtaaagatttatttaatcatgttgtttgcactgaccttttctctatgtcatcaaagagcaaaaagagaagaggaaaaaggaggtgtttcaagtgcaagaagctaggccaccttatcgcgtcttgtccatacaaagacaaggatgaagggacaaggagttgttttggatgcaacaataaggaccacatgatcacttcttgtccgctattgatgaaccaagcacgtgcactctccaagatgacccccactaaggaaaataacaaacagcaagtgtcatgtcaagttgagcgacgcttctgctacaagtgtggtgagcagggtcatctatccaaggtatgttataaaggtaagaattcctaagcagtgaatttgtgtcaatcttaattcggtaagagacccanatcatacac

SEQ ID NO: 21418 - DNA, 379 bp, Zea mays
  unsure (1)..(379): unsure at all n locations
agtagacttagcttgtaggcaaggattcagtcattacctttaggatttcttccacgtcggcagcagaaggtgttgaaggaacttcttcttctaaatcagctntcggctccggagctggggcctttcttttcttcggcacagccaccttcggctcaagactggattntttcttttttgccaaaatttcatcttcttttatcatcctggcagctggtctttgtataatactgacagcccttttctgtttcggcccttcggcacctttggttaaactttcgtaatctgggtattcaaaattcaaagcgtccattactcgatttaaccttcatttcggccgagtgccgaaagctgctgtcatcacttgatcttctttnttcat

SEQ ID NO: 21419 - DNA, 306 bp, Zea mays
agcttaggatgggcgtatcctcaagcagtaccatcttattatgtgccagtacgctaaagacaaccgatgtaaacacatcgagctatatgctattggtctgctcaactgcaccataggcaagggcatatgtactgcaccatatagatcgccggactgtccgatcctagggcctgaccgtacgcagtccacacagctctaaatatattgtacatattttagttttgctaaaccggttatgtaaagtattcaaatggatagaggaccgtatagagaaactcagagaatccagcagcgtcctctaaattt

SEQ ID NO: 21420 - DNA, 390 bp, Zea mays
ctcagcttcaggcgagacgtgcgctcactcaagaacacagatggagggcctgatcgagcgcctcacaaagatcgtctactacgacgtagattcttctacatcgacgtgttgttcgagcgaacacgacacctatctcagatgcctgaaacaaatcggtgaatctagatcctatcgcattcctttcagttattctgccatttctagacacttgaatgccgagactactttgtattggtctaagcaagcgttctcactatgatggggacgattattattggtgcaggcatagaatgcgtagacatcattgtggtctacccctgtgatgagcggctagtacaaaatggaatgcagatatctgatagtgatgatgatcattctgatgctatagaa

SEQ ID NO: 21421 - DNA, 335 bp, Zea mays
  unsure (1)..(335): unsure at all n locations
agcttcggaaaaccaacactctntgacagagtgctgtttatcttcgccccggtgcggtctcgaatacatcctaaggcttcttcattaattccaccaaagagcacggctcctggctggtagccacaggatgcaacatactcctgcagcttctccttctcggccttggataattcttgaccaactagaatctgaaagctgaagcctttttcttccgaagtgtctttggcaatttttcccctttctcaggcactgcggccatgacttcttctgtagccgcagcagtctcctctgcggccatatccaagagcactntatcaatagcagataacgtactc

SEQ ID NO: 21422 - DNA, 478 bp, Zea mays
  unsure (1)..(478): unsure at all n locations
tctanatggagaacacattntaggactaacaaatgttcattttgagaaatacaaggtttgtagcgcatgtcaagcagggaagcaagttggtgttcaccatccacacaagaacatcatgacaactgacatgccacttgagctactccacatggatctattcaacccgattgcttacataagcatcggcgggagtaagtactggctagttactggggatgactattctcgcttcacttgggtattctttttgtaggataaatctcanacccaagagaccttaaagggattcttgagacaggctcaaaatgagttcggcttaaggatcaaaaagattagaagcaataatgggacggagttcaagaactcgcanattgaaagctttcttgaggacgagggcatcaagcatgagttctcttctccctacacaccacaacanaatggtgtagtggagaggaagaatagaactctactcgacatg

SEQ ID NO: 21423 - DNA, 317 bp, Zea mays
  unsure (1)..(317): unsure at all n locations
gcttatacaagaggaagaagcttagctcgttctatgtcataanagaaggggaattgtataaacatggagnttgtgctccgctgctcaaatgcttatccagaaccgaaggtatagagttaatgaaagaaatacatgcaggcctgtgtggatctcacattggatctatgccgttactcggaaaaattntccgtcaagggttttactggccgaaggcagcttcngatgcagcagaaatggttcacaagtgcgaaggttgtcagaaatgtgcaagagatcaaaaacaaccttcgtccttgacacagctcatacaacccact

SEQ ID NO: 21424 - DNA, 336 bp, Zea mays
tctgatgcgtcctgggtagtaccttcatcctcagaaatgatatgcagtgctctcaaagcttgtttagtagccctgctaccctagtcctgcatattaaattcaaccccagcaccagcaatacttcgacttcgcctaggtgcagctacccgagaagattgtggagataataagtcattcatatcttgcttcggtgccggcagtaattgttcagttgttgtactgatttttctgaagaactcgtccttcttcgttggagggtgattcgtagtcctcaaggccgagtgcaaggtatcaattatctgaaatgagccttcctttgtcccctcattctgactg

SEQ ID NO: 21425 - DNA, 432 bp, Zea mays
  unsure (1)..(432): unsure at all n locations
agctntatcacccttgcattntgtccctaattttctagcaactatcttcctatcctttctacaaatagcaaaggaagcatttaaagcatgataaattgtagagggaccattcataacttttctaggaacatgaacaatattcttcctaggcacatgatgaatatttttcctaggcatatctctaccatgcatataggaagaactggaagcatacatagcataagagtcatangcatgtgaatcaaaagtattacaactcctatgagactgtcttctatcattgtacataaaagcatggttctttntagtactacttgccataggggccttccctttctccttggcggagatgggagccttatggctggttaagttcttggcttccctcttgaagccaagcccatccttaattganggggtgtctaccaatcg

SEQ ID NO: 21426 - DNA, 348 bp, Zea mays
  unsure (1)..(348): unsure at all n locations
tcggccgctctatgtcttctctggtcctcagcacccttgttcagctgcgcatagtcaggatattcgaaacccagtgcatcaagcactcggttcagccttcgcttcggacgggtgccgaatgctgctgtcatcagttgatcttctttnttcgaataatttccaagaatttcattacacatcacctcaactgtatccagccactcttggcagggcttcttaaaatatttcttgaatttgaagtgggaaggaagccggacaagatcctcttacatcttctccccctttaactttggcattatccatcttttcagagtatggaagactgtgaatgctaataattcttgaacc

SEQ ID NO: 21427 - DNA, 175 bp, Zea mays
cactatcatgggatcaccggaagctactttctttgaacgtatagttccaatgaaagacattcataacaatactagatactcctctgagataactcctgaacatagtacacctattgagaagtttgaagcaaccacatgaatttgtcttagaggacgatgacaatgatgcttctaa

SEQ ID NO: 21428 - DNA, 314 bp, Zea mays
  unsure (1)..(314): unsure at all n locations
cgaagccatggtaagtagcatagggtaataatatacgaattgactcaagcctagctacgggtgcataggtttcaccaaaatccaaaccttcgacttgtgaatactctttggccacaagtcgggctttgttccttgtcaccacaccatgctcatcttgcttgttgcggaagacccatttggttcctacaacattttggttaggacgtggaactagatgccatacctcgttcctagtgaagttgntgagctcctcttgcatcgccatcacccaatccgaatcttggagtgcttcctctaccctgtgtggctcaata

SEQ ID NO: 21429 - DNA, 332 bp, Zea mays
  unsure (1)..(332): unsure at all n locations
tgattggaattgaaggaatntcgaatntcatccaaaccgggtgcttctgtgggcacactactgagccctttgtagcaccagcgtgcatttatcctttatctccagcagttccccagcggtccccactcctggctccacactcccacccgagcagcagcagatgctgccggcagcaccttccccgcgctctcccgctgcgctatcgccgncgcatcaacctcccgccgcgtcgtcctctggtaggttggctacctcggttctccctccttctcgctccccagtccccacacgcccccatcgcctcaccattcgagctgccgtcgtgcgcaacg

SEQ ID NO: 21430 - DNA, 357 bp, Zea mays
agcttgtgaagattcttcatcccaacatgggctagtcggcggtgccagagccaacccatgtcagtcttagcaattaagcaagtgtcgagttcagctctatcaaaatctaccaagtatagctgaccctctaacactcccttaaatgctattgaatcatcacttcttctaaagacagtgacacctacatcagtgaatagacagttgtagcccatttgacataattgggaaacggaaagcaagttgtaatctaaggaatcaacaagaaaaacattggaaatggaatggtccggagatatagcaattttacccaaacctttgaccaaaccttgatttccatccccgaatgtgatcgctctt

SEQ ID NO: 21431 - DNA, 440 bp, Zea mays
  unsure (1)..(440): unsure at all n locations
tctaaagggagaacacgtgataggattaactaatgtgcaattcataaaagatagaccttgtgcagcatgtcaagcagggtaacaggtgggaggagcacatcacagcaagaatgtgatgaccacatcaaggcccctggagctgctacatatggacctcttcngacccgtcgcctatctgagcatangaggaagtaagtatggtctagttattggtgatgaactttctcgcttcacttgggtgttctttttgcaggataagtctgaaacccaagggaccctcaagtgcttcctcaggagagctcanaatgagtttgagctcaaggtgaagaagataaggagcgacaacgggtccgaattcaagaatcttcaagtggaggaagttcttgaggaggangggatcaagcacgaagtctncgctccctacacacctcagcanaatg

SEQ ID NO: 21432 - DNA, 317 bp, Zea mays
  unsure (1)..(317): unsure at all n locations
agcttcggtcanattagtgatcggagctagagaatacagcaggaagtcattnttcttcaaaacacccgcaagttggacctgggatctttgggctgattacctctaaattaacccaaagatcggnggcttgtgggggatagatatccctcgggtccactaaaggagttaaagacctcacgaaaggcccaagggcccaataaatcgtaaggtcattctttcgtgggtctggggagaaacaactaacanagcagagcgacgtgagaccggatttgtgcaaacccggacggcccacaacgtcgagcgaagtaatcgcaaca

SEQ ID NO: 21433 - DNA, 340 bp, Zea mays
  unsure (1)..(340): unsure at all n locations
tgtgaaggttcttcatccccacatgtgctaagcggcgatgccacattcagcccatgctagtcttagcaattaagcatgtatctagaccggcctcttctcttgcaaaatcaactaagtaaagtttgccgtctaatacacccttaaaagctagtgaaccatcactccttctaaagacagacacatctacatttgtgaatagacagttatatcccatattgcataattgactaacanataacannatatatccaagagaactcactaanaacacattagatatagagtgctcattngatattgcaattttgcctaagcctttcacctttgcttgattccatca

SEQ ID NO: 21434 - DNA, 302 bp, Zea mays
taatgcgttttttctttaccagacagctgctgcggcggcgccgttgtcatgggacagcgccccaggaattcctggactagtacctgacgcacatctactcagacgggcacatactatgcgcggagcatgacgacttcaccttcagctggtacgacaagcgcgtgaggcacaagagtcctcctctacaaagcgttcctgcatggcatggagggtaagggcaagggccacgcggatgacgacgcgctgcggctctacaaggcgcacaccgacgcctacgtgtgctcgctcgtgccgggcgcctc

SEQ ID NO: 21435 - DNA, 379 bp, Zea mays
  unsure (1)..(379): unsure at all n locations
tgatttgtntgctcatgtangtgaactacaagactgattggagccattgggtaatggacagtgtatgcactcaacatatgactggcaacccacagattgtcacctcactagatgaagatgttgatgaacaagataaaatcacttttggggataattcacaagtaaaagtttaagggcttggtagggggcaatttcaatgatcttcatttcaatggtctcttggtgtcgcattaagcttcaactgctatcagtgggtcaactttgtggtcttggcttccagtgcttattcacttctacagaggntgttgtgtctaaaatggatgatgagacagtgatattcaaaggatttagatacacgcacctacacttagtggatttc

SEQ ID NO: 21436 - DNA, 312 bp, Zea mays
  unsure (1)..(312): unsure at all n locations
tgcaagcttngcgagagagggtgtgaccttgaagcgagccgtctgagttagtctcctctgactctcgtgggaaggccctgagcatacactttatagatacaaggggatggtccagctgtacatataagggtgtagctatgtgctgacgtggcccgcggagaaggtcttgagccctgtagaagcgtatctggcggtgcagcactgggtcccgctgacgtttctttgccttcgtacagagctgataacaatcgacgtcatggacgcatacagagaaccatcgttccatgttgtcggagtaatctagatgtgaca

SEQ ID NO: 21437 - DNA, 391 bp, Zea mays
  unsure (1)..(391): unsure at all n locations
ggataagttctgggaacccaacctatttaccccaacaatagctcgtctaaatcataagttgagtatataatctttcattacatcgctgactaaagcattnttttacgcataatattaaaaagattcagaaaatggtctttaagcggtctatctaagatccattcgtcatcccaaaatctggttgctcgcccatcacctgctcgaaacctccccatctcaagaattcttctttgatattcatgaatcagacanaaaatgtgagtctccataccttctcctaacttgagtaagtgattngaatcctagatattatntttaagaattcgctaccatgtatcttcttcattcagaagcttanagagccacttgccgagtaagaaaatgttcttag

SEQ ID NO: 21438 - DNA, 346 bp, Zea mays
  unsure (1)..(346): unsure at all n locations
tgctgatttagcatatctcttgcatatgcttgcatgctacttgcaatggtagcgcaatatgcagcaaaccagtgagatatttatttgctgcatgatgctccaatgttaacaacatgctacttctaacagtagcactatatgcttttctcatgtgcaaatcttattggctaggtagcatgtaattctgctgatgacatcaatgttcttgtcttacatactgcatgtactttataacctcgtgcaggtgtctggtttctttatcataaagcgatgtcctcacacagttgcaaaatgtcctgctgaanattgcaactacccaaattatggaattggtactactactact

SEQ ID NO: 21439 - DNA, 375 bp, Zea mays
  unsure (1)..(375): unsure at all n locations
ctatccattactcaagctnttagaantattaccatgtttanatgggtcaaacccataatacatcttataattgccacataagtctaaagcatgtattacaaatctcaaagccactgttatttgatataccagggtttcggtggagactattaagttgaacatccacttagaacttagaacnngnggtacactcgtttacaactgaactatggactatgccttgaattcatagttntgcgtgaagtgagtttcaccaaagttctcttttgatgctaggctactacaagcatccccttagtttatagcatattagtaaatagccagtgctaacactatgatcctgggaaaggaaggagtcgatgacgtcgacaacac

SEQ ID NO: 21440 - DNA, 337 bp, Zea mays
  unsure (1)..(337): unsure at all n locations
catgcaagcttgtgcactgtatcatgtgtatagcgagnctatttgtaggacanactagtgctcttacttctcaccgaactcaatgccacatccttgagagtcacatatttgagagcgccatctcttccactgagagcctgtatgccactgcatccatggcatttgctatccattcccgaaccctaacttttttatcaattaacataccaccacatggaaatgagaactcacagagatacgaccttggcttatagcacgcacctggacgaaattctcggacactggagtctttgccatcacctgatgtctgcaagatgtactactgtatgcacctgta

SEQ ID NO: 21441 - DNA, 296 bp, Zea mays
  unsure (1)..(296): unsure at all n locations
atacaatactcaagcttcggctagacacactcagaatggaccgactcatggatgaanaggttatgtttacctccacagagttctatatgttgactatcaagtgctaagggcatcaatagacatctgtacgggctgcataccgtgtctatgaatatgagaacagtactcccgtaccgttcacactgacttggcatacgctcattgcgacacgctagtattgtcaactcattccgacagaaagcacacttgagactcaccaggacctctgattatacttaagaataatcgcacatact

SEQ ID NO: 21442 - DNA, 463 bp, Zea mays
  unsure (1)..(463): unsure at all n locations
agcgtcccgcgcctcatcgaccttggagcgcggtctctatggtcangatgctggtttggattcccctgctcccatggaagtgaccgagggaccctcagccttagaagcggctgttgcagagaactcggcccacaatgacggtgctagcctttacctagcccccgagggtgctgccggagatgatccggctcaaatggatagtgccagctactacccagcccccgagggtgttgccggagatgatccagctcggatgggtagtgcaagccatgatccagcccncgagggtgtccgagcgggttctccctcttgcacctccatggatgttcacgtagggtcctctcctccacactctggttgcgtggtaacagctcaaacctttggcagggggtcgcttagaggcagcgacctaatgacaaggtttgggtctgccatgcactgaatggtcctgctgatattgaag

SEQ ID NO: 21443 - DNA, 437 bp, Zea mays
  unsure (1)..(437): unsure at all n locations
acgtgaaagtgccttcctcaatggaccaatcatggaagaggtctatgttgagcaacctcctggctttgaagacagtgagtatcctaaccatgtttatagactctctaaggcgctntataggctcaagcaagccccaagagcatggaatgaatgcctaagagattntcttattgctaatggattcaaagtcagaaaagccgatcctactntatttactanaacacttgcaaatgattntgttgtatggccaaattatgttgatgatattatatttgggtctactaacgaatctacatgtgaggaatntagtaggatcatgacacaaaaattcgagatgtcgatgatgggggagttgaagtatttcttatgatttcaagtaagcaactccaagagggcaccttcattagccaaacgaagtacatacaagacattctaac

SEQ ID NO: 21444 - DNA, 413 bp, Zea mays
  unsure (1)..(413): unsure at all n locations
agcttgatatatcctccttcatagaaacttactctatataaaactcngctctnttatcttcaactcttctagtctgatatttttggtgtatcaaaagactctgcttagaacaactacaagatgatcaatcttggattgtggaatttgaagcacaactttccagaaggaacccttttgaagctattgaagatgcctcattctctgtcttatccccaccctgtaagaaattntgttatagatctcttggatctattaccattcttcttggtaagtcgataggatagttctagggtatcaagtttttcgaatagatcgacaaggacgatgttatattatattatnttctaatccataatacttgctacataactgtcggggaccataattaggggtaccctcaagactcctaattc

SEQ ID NO: 21445 - DNA, 446 bp, Zea mays
  unsure (1)..(446): unsure at all n locations
tcttgggaaccttcggngcatgatcagctgctggtctagtatctccctctaaaggcagtacatggtatgcaatatagttagacttcagttgtacaaataacattgccgagtacgaagctcttcttttatggcttcggaaactaaaggcaatgggaataagaagggcaatccttaaaactgattcacaagttatttctggccacgtggacaagagtaacaaggcaagagacccgaggcttgaaaagtatttggatgcagtccgaagattggaagcttcttttgagggatnttctgtgaaaaatatcccaaggcgagaaaatgagcatgcagatttgctagctaagtcagcgacacagtggctcccttttgcttcataagtatattttgaaacaatataagcaccctcaatcgagctcatggagagagcagtgctcacaatctcacct

SEQ ID NO: 21446 - DNA, 261 bp, Zea mays
  unsure (1)..(261): unsure at all n locations
gaataaagcacattcatgagaacatagaagctggaaaagccgactgcttccgaaaagatgatcaaggtgttgtatggttcaataaccgcatagttgtgcctaaaaatgaggaagctcatcagcaaattttggatgaagcaccatttaatcgctattctattcgtgccggaagcactaagatgtatcatgatctanaacaacattattggtggacaaaatgaaaaggtgtatccgccgctatgtggcaagatgtgacacttg

SEQ ID NO: 21447 - DNA, 183 bp, Zea mays
  unsure (1)..(183): unsure at all n locations
gaactaagaaactcagcttaccacgtcgctgaagccgcttatatcactggctcgtcgcctgtgagaccgccacggagaaagccactaatcgtttgcgctagtgcccctactnctctacagacaccgcgcgtgtncattcaaatcactagccaccgctcaagcacactataaattgagcacacc

SEQ ID NO: 21448 - DNA, 402 bp, Zea mays
agcttggcatacaactgacaatctcgtagcctcttttgtccttcctcaaatgctcctcatgctcttgctcattctgggaatatataagaatgtcatcaatgaacactactacgaacttgtcgaggtagtccattaacacactgttcatcaagtacatgaagcaagctggtgcattcgtcaaatcgaatgacataaccgtgaactcaaacagtccatacttggtgatgaatgttgtcttcggtatatccgaaggtcggattctaagctggtggtagcctgacctcagatctatcttcgagaacacactggctcctctcaactgatcgaataaatcttcaattctgggcagggggtacttgttcttgatagtgacttcattcaaagatctgtagtcaatgcaca

SEQ ID NO: 21449 - DNA, 366 bp, Zea mays
  unsure (1)..(366): unsure at all n locations
tatcttctatgtangttgattctgtatatgagcctatgccacagtcaaggtttgttctgaagaaagctctagaatttggacatgctgttgntgtagttgtaaacaagatcgacagacctactgctcgtcctgagtttgtggtgaattcaacatttgaactatntattgaattaaatgcaactgatgaacaggtaaacagttatggtatcctactattcatataannttgtttcagtttatcaacacacggcttatcctaatcctcatgttcatgttctgtttcaacatgccagtgtgatttccaaacagtctatgcaagtggaattaaaggaaaggccagtctatctcctgacaatntagctgatg

SEQ ID NO: 21450 - DNA, 337 bp, Zea mays
  unsure (1)..(337): unsure at all n locations
gcttcgtcatctgatacgaagttgccctgaaagtaatataatatttcagttcttccatctttactgtacacacgagagatagtcagaactgctctcttcagtaactccactgaaggtgcctttattgtttccaagaatacatnctaacgtaacggcagcccctgtgctgcagacctggctaaacaaatagcatgctcattttgccctccgaggatattcttaacagagaatacttcgacgaagcttcgatccttcggactgtgtctacgtatttttcaagctatcggtctttagcctttgcactntngtcgatatgacnccgaacaatctgagaatc

SEQ ID NO: 21451 - DNA, 330 bp, Zea mays
  unsure (1)..(330): unsure at all n locations
ntcatccttcttcttcacaaacaatgttggacatccacaagtcgtagtacttgngcgaatganacccttgtctaacaactcttgcaattgtttcttcaattctgccaattcagcgggtggcatccggtaaggcctcttggaaataggtgttgttctcggttgcaactcgatggcgaattcaatatcccggtctggtggcattcctagcaattcatcangaaaaacatctgcatactcatagaacactggaatcttcttcanaggtaactctatcatagcaaaagcacatgatcgagtagagtcttggctgggtatataccaatgcaggtc

SEQ ID NO: 21452 - DNA, 261 bp, Zea mays
aggatgaaagacatggaccgtcatgacattacaacatctgtggaatgcatattagctctgcagatactatgcgagaactatgctatcctcttattgtttcctatagcaaccattctctttcaagaggggagaaaagttactactgaggccataagttgcaattctcatatgatctgcctaggcctgtgcaatacaacgacctcattctcccacatgtgaaatgtcaaatctacgattacaccatcgcgtgtaagaaagtat

SEQ ID NO: 21453 - DNA, 398 bp, Zea mays
  unsure (1)..(398): unsure at all n locations
nttccatatgcatgctcgatctatttatgataagaaatttattaccaagttagtatctaacggtgatgttcataccagccttgaggataagacaggcatggtcgatgagtactatgattatttgttggggcaatgcagcgacagagagttcacaatcaacctcgagcagttggatatccctagctttgacctggcagccttggatgggctcctttttgtagaagtttggaacactatcaaacaacttccttcanacaaggcccttgggccagatgacttcaccggaagattttataaatcatgttgggatattataaaaatggatgtcatagcagcaatttcgacagtggggagtagaaggttcantgaatttcaggtgcttaatactgctctcattc

SEQ ID NO: 21454 - DNA, 423 bp, Zea mays
  unsure (1)..(423): unsure at all n locations
accttgattcctgatnaaccaacatatccttgagagtcttttctttagtcgggtaagtcttgctgagtaattgcgtactcagggttttattccctgttgnttttcaggatgtaattctgttcttgtgtggatggtgctaagtgccggtgggttcggccttcttatataagtatatcccatctttagcttctttattgaggattgtcacttaagctagcatgtattttaaaacctatanatattttatacanntttaaatgtaattcttttgaatcactttcttttgtaatcactccgataattgtataatgtaaacttattgtaacatgtaatcattntgcaataaagaatttatttccgctgcaaatgttggtgtgtgaattgtgttaacttaatcctgcgatcttggcnggtagtcgttta

SEQ ID NO: 21455 - DNA, 429 bp, Zea mays
  unsure (1)..(429): unsure at all n locations
ctcagcttcccacgctngccctagtgatcggctaagcatgtttgaatagctctttgataagtcgctccagctgttttgaggccgaacggcatggaggtatagcagaaagcaccaaatggagtgatgaacgctattttttcctcgtcttctttcgccaggctaatctgatgatacccagagtagcaatccaagaaggacagcacagaacatctagcggtggaatctaccacctgatctatgctanggagcccgaaaggatcctttggacagtgtttgttgaggtccgtatagtcgacgcacatgcgccaatccaccttattctttttgagtacaagaacggngttggctaaccacttgggatgtaacacctctctaataaatccagccgcgaccaagcgagccagctcaacacgaatgacctctctctta

SEQ ID NO: 21456 - DNA, 444 bp, Zea mays
  unsure (1)..(444): unsure at all n locations
agcttctagcaacctagcatttgattattatatcttattcaaatatttctgcctaccatagatatcaaaaggtaagaagagtcacatgcctggctgttttagcagaaactatatatccttttattcttttcatttattacaggtataagagaatttaagggttgaagtctcataaggccacatggtttggagataaaatactggaacttcactggaatccatgctatcgaacaatttgataaactgacctttctgaatgagtgtatatntgaaacaattcttcatcagatgatcttgttcccctaacaacatttatagcaccggntgccatgattcctgtatgtcatttatttgtgtgaaaatactgaaccatcagtgacagaggaagatctggacagtatcatgaaacgataacaaagattatcatataattcataaacatgt

SEQ ID NO: 21457 - DNA, 467 bp, Zea mays
  unsure (1)..(467): unsure at all n locations
gcttctgtgttcttgttcgaagctttctgactgatagagaagcttcatatttagctctgctattttagcttcagcttctgccagtaagccttcggttgtctgaatctcaaactccttcttttcaagagcagctgattggtctttaattttgctttctaaactctcaattataacttcgtgttttttatcttccaaatcttgctgcattgtcaaagctttactcaaaagcatactctgcacacaaacaaccttcgttagaaaacatcttcgttgttgaaacaataaaagttaaagaaaagttgtttaccttgaaattggaatagaataaactaccgatgatgtgctgtcatcggtagcggctaatgtccgtttcgagcttcgggaaaccaatactctntgatagagtaccaataacctttgttccggtatgatcccgggacgcatccaactnttcgtcatcgacacca

SEQ ID NO: 21458 - DNA, 317 bp, Zea mays
  unsure (1)..(317): unsure at all n locations
tgngctactaccatgcaaccagagcgcggagaatacccttgtcttcgtttcgagaccggngggtccctangccgacgagtgaatgtcgccgcgtgccccagcccagatgggtcggcgcgaggccaagcgcgatagggggaagtgaggtggccggagatgggcgtgagagaggtggaaaacccgcagccttcgtgttcgtcccgcgcctangtcgggtgcgcttgcagtanggngttacaagcgtccacgtgggagagggatcgagcggnctcacgcgagcgcctgtctcgtnctcgccccggcgcggccaaccccct

SEQ ID NO: 21459 - DNA, 425 bp, Zea mays
  unsure (1)..(425): unsure at all n locations
tgtcctatcactcctcatgctcctcctcaaccgaggcaggatcctactcgacagtccaacccggtggcaagatggacggccaagtcacaccagcaaccatgtcctccanagaacctgtaaaattgtgccacaagaaggctgagcatactaatactcagctagacttactcggtgtgaggagtctactcctctacctctagacatgcagctgtttggctgtggggtttgggtgccaaaagcactagctgagttctaaatcaagttttagctttgtcaattgtaagtgtgactctcttaaacctaaatatgtactatctactcatacatggtaccaaacatntttagcaatcaacatcttgtatcaactcatcatatntncacttgttactcaatgcagtacaatggatcaagcagtctcattagct

SEQ ID NO: 21460 - DNA, 419 bp, Zea mays
  unsure (1)..(419): unsure at all n locations
actcaagctngagtcggttattcataaaggattattgatgctcagaggattgttattggtatgaagtatctccacgagataatggaagccggcaaagctacttgttntaagaaagatgatcaaggagtgttatggtttaaaaaccgcatagtggtgcctaaggatgctgaactctatcaacaaatcttggatgaagcccatcttagaggtattctatccatcctagaactactannatgtaccaagatttgaaacgacattattggtggactangatgaagatagaaatcgctcgctatgtggcanaatgtgacacttgtagacgagtcaaggcagtggatatgaaaaatgctggacctttgcatcattccctatcccaacatggaaatgggaggacataagcatggattttgttgtgg

SEQ ID NO: 21461 - DNA, 481 bp, Zea mays
  unsure (1)..(481): unsure at all n locations
agcttgaacccggctattccatacgcgaaaagacttctgcgcactgtgtttgggttatggtgggagtagcgtgtaccctcctggctagaggctggatggaggagtactgtgctcccgggtagcgcggaccggttcacgttgtggaggatctgtgggaacggttgacatatgcaagggttacgtgctanatatgtcgtgtggttagagatcctcagctgagtaaatcgatacggatcgccgttatatccccggagagtggagacttgatctccgacctgcaacctaagtcaggatgtgaacctcatgaataataatgatgttgtattgatgagatggtgaaattagactatatgcaaacagagtatattaatatctaatctggcgctacaatattggaagtaggacctactttagtagccatttctgaaaagatctaagtgatcttgctaagctctcctgatctaaatcagatatctgaagt

SEQ ID NO: 21462 - DNA, 382 bp, Zea mays
  unsure (1)..(382): unsure at all n locations
gtgccttcctcaatggaccaatcaatgaggaggtctatgttgagcaacctcccagctttgaatattgtgagtaccctaatcacgtatataaactctctaaagcgctttttgggctcaagcaagccccaagagcatggtatgaatgcctaagagatttccttatcactaatggcttcaaagtcggaaaggtcgatcctacttttattactaaaactcttgacaatgatttgntcgtataccaacattatgttgatgatattatatntgggtctactaacgaatctacatgttgaggaattagtangatcatgacacagaaattcgagatgtctataattggggagttgaagtacttcttgggatttcaagtgaagcaacttca

SEQ ID NO: 21463 - DNA, 466 bp, Zea mays
  unsure (1)..(466): unsure at all n locations
agcttggacattcttcatcagagcactatgtacattgttgtgatgcataanaatctttcttcacgaagcatgaaaagaagggaaggtgttttttcgccgaaggcttaaaaccggtacgtatgtaaagtgtcatgcatcgtaaagaattgaataatgaaaagagacttgtatattacattcaaatgtacacaatattacatagatcacatttcaaatgtttttcctaataacacctagtcttctcttaatactacttcggcagcctcatttagaagctgttcaacaactttatccacgacagtttcggccatttgtttaattntgtcatccccttttgtgtgagggtcagcagacgatccagcaggttctgagggaagagaatattttngcattactatcacaaaccacgatcaaagtttgaaatanaaattacacacgatacanactattaattagtacctaactg

SEQ ID NO: 21464 - DNA, 462 bp, Zea mays
  unsure (1)..(462): unsure at all n locations
agcaccatatcttaacatagattttctatggataaactcatttcatgagatgtcattagtagcacaaggactagtttcttatttagcaaccctttatatgtggaaggcaagcgtgttgctaaaaatagagaaacctcataatatggactaaatttcccttgagcccttatgcacaatatattntgaatgatatggataatatgcatggntgttcaatgaagtctaaagggctgacttaatccatattatggtgagtgtctaataaagaagaatcaaatccaaattaactagatagagaatacgtcacaataatttggattgtcaccatatgataatattcattcatcttccaattagacctttatttcataatcaacaactgatgtatatcctcaagtgcttctttttccttagtggctacacaagtcacaaaaaagataagattgaaaatatatgcacttg

SEQ ID NO: 21465 - DNA, 197 bp, Zea mays
agcttgtcaatagcttgatggtctacgtatgaatgtctagagcggtagctgcatatatcagttttgatgtgatcacaaactgaacatgaatagacctcccaacccttgacataagctccgctttccagccaggcaagagagaggctacccggtcaacaatagcttgaacttggtctctgggtagcttcttaattgag

SEQ ID NO: 21466 - DNA, 456 bp, Zea mays
  unsure (1)..(456): unsure at all n locations
ttgatgtgcactcaaagnntggtttctcatgctcttaaaggtaatcaaatgtgccttgttaatattctaagtgaatcgattttctatatactaatatgtattntggtttacaatatangtgaagataatgtggatgttaatagcttttggtcatgtcttgaagacattgaagaggaaatgaaggaggatccttgtatcgcctcggatgattagtttaaacttaaatttgtggttgttatcctataacttggttgacatttattattgctatgaactgatgtctnggaagttgtaaactatatatgtatggaactatatatgtcttggaagtngtacgttnngtgtatggaactgaaactggaacttgaagtgtaaactatattattgctatgaattgttgtgtttgaattaatacttgttgacatcaagctttgtatctatatttgttgacattgt

SEQ ID NO: 21467 - DNA, 363 bp, Zea mays
  unsure (1)..(363): unsure at all n locations
agcttatgctcatctattaatttcagtattatctttcagctctattcttcgctgtaaatatatagcagaaatattagaatgcatgtgaaggctatattgtactgtatgtacatactcaaatcgctctaaatatttgtgttgcgttaagtctttagactcatgccaaatgattaaattgtatagagggtacccggtcatgctaatcagactatattattaatcggctaagttatgacattggctaaatattggctgcgccctgncaacacgacgcattatttgtgtcgtacgaacttggttgcgtcatgtgattactgtcggcgtttcgacccggngggtccctggaccgacgagtaaattatc

SEQ ID NO: 21468 - DNA, 385 bp, Zea mays
  unsure (1)..(385): unsure at all n locations
ngtgaagccaatcacaagtcaattgtagaatgagactaaattcaattggtctttanagtgtaatgaagctnttgagaaattgaagacattgttaaccactgctccggtattggctcaaccggacattaataagccctttgatgtgtattgtgacgcatcgggcagtggtctcggctgcgtattaatgcaagagggccgagtaattgtgtatgcttcaaggcagttgcgtcggcatgaggagcattatcccactcatgatctatagctagctgcagcggttcatgccctgaagatatgagcgcattatttgcttgagaaagtctgtcatatttatacagaccataagaagttgaaatacatctttacccaatctgagctcaatatg

SEQ ID NO: 21469 - DNA, 190 bp, Zea mays
acactataaaactcaagcttagcttgacagcaaacgagctacgttctggtatgtgtctgtcttaaagcacagatgatagcctgctgagctggatagggacctgcattacttacacttcacggacttaatactacctaggagttgcaaggggctactcaactgttcagatgacttgcgtgcaacttgctgt

SEQ ID NO: 21470 - DNA, 458 bp, Zea mays
  unsure (1)..(458): unsure at all n locations
catgaagttactacccaaatgataaggtgaataaacttctnctacaaaaacaacaagggataaaaccctgagtatgcaattactcagcaagacttacccgactaaggaaaagactctcaaaggtatgctggcttttgggaatcaaggtaaagctcatcatagttcaaggactcattttgcagaacagcttactagaagtgggtccttaagccaagttctatttcaaaagttagtttattacctgaatcttctagcctgaatctagcatttgcctaatctagatcattcacttgacctacactangttgcttttaaaaatccaaatttgtttcgcttcttatctacgatgaaggtcaagattcagtcttcatatccgagaagttcggcgatccgaatcgattaatacccagctggngatctcaaccacacacatatgcttgccttactcttttgacatg

SEQ ID NO: 21471 - DNA, 359 bp, Zea mays
  unsure (1)..(359): unsure at all n locations
tctaaagggagaacacgtgataggtttgactaacgtacaatncgttaaagatagaccttgtgcagctggtcaagcaggtaaacaagtgggaggagcacatcacagcaagaatgtgatgaccacatcaagacccctggagctgctacacatggacctcttcggacccgtcgcctatctgagcataggaggaagtaagtatggcttagttattgttgatgacttttcccgcttcacttgggtgttctttntgcaggataagtctgaaacccaagggaccctcaagcgcttcctcaggagagctcaaaatgagttcgagctcaaggtgaagaaaataaggagcgacaacgggtcagaattca

SEQ ID NO: 21472 - DNA, 372 bp, Zea mays
agctttctcgactaagtcggggacagggcctcatggaccggtgaaagtacgcgtaagccgccaggccgaccgagccgagggattcccacgcctctgggatacggatacctcactcgtgccttacgcgagaagcaacatctcgctcacacaaacatccctgttaccgacagagagtccagatgctccaaacaagaggaaaaaagacgcagcttcgcaagcgctgggagggtgtgtttttctggcctcggcggccgcagaaggcacacgctacaagacgatctgatcctgcaggctcgggtcttcacgctgaaaggagccgtagcaccctcggcatcgacgacgtcttcagcaaagtccgacccagcctcggac

SEQ ID NO: 21473 - DNA, 374 bp, Zea mays
  unsure (1)..(374): unsure at all n locations
tgcattggtganacctgggcagttcttgattgtaggaaacgatatgtcggcataaaggaagttgtggcacagagcagatatccttgatccccatgcatttcaccaaagagagagccctgaacttctggctgcagttgaggaaagcaagaataccaacaagagtaacacggttgcattcctcaagctgtaagttctcaaacacctttgctgattctgtgaaggccttnagggcagcattcgacacatgtccgcacttcctcatgtaaagcttgttcaaacctgggcagaacttggcaatagaagcgagcgcacgatcagtgactacgtagcacgaggtcacactcatgcacctgagactctgcaggccagcatca

SEQ ID NO: 21474 - DNA, 460 bp, Zea mays
  unsure (1)..(460): unsure at all n locations
agctntaactctcgcgagacctttcctcatttctttctaaccaaggtaaattcattatcgtatgtgatattctatgcatatttactttatttgttctcttgtatggtgtactttntgtttcctaatttgaatggatggatgtatgtgtgcttgcaatcgcatagagaacgatccggttgaagagcccgaggaactcgcaggagaagcccctgagcagcagtcggttggtggaggcaagtgtcccttgacctatctctgtcctattcattctttaattcacctcccgcattatacacttatgcctaaggattgactagctntgttatccatgtccttgtttacctanttgggttggattattatggtttagccttatgctattgcttaactctaatcaataaacatgatgagattatctatgatacgctgttttcccttctcttattctngatgtgtactt

SEQ ID NO: 21475 - DNA, 397 bp, Zea mays
  unsure (1)..(397): unsure at all n locations
cttgataatacaacatatccgaatgtgaagggacgaaccgacttatatatagaatgaccttttagtccataaaggtctgagtcaatgttgtaaacttttatgaggggcatgattgtaattcctcacaggctgtgtcctgtgcctataaatagtgaacagtattcctttactattcacacattcctgcaattgcaatcgcatcactcggaaattattctttaccaaggcagaggtataaatgtatctaacatttgaatacatcaagtttgtataatatgaaaatgatgttgtttatttataatntacttgtncgtaatgtttcatatctcgaattattntatacaatctctgagagttcaattacgaagattcaaccttcgtaattgacccgtcttac

SEQ ID NO: 21476 - DNA, 448 bp, Zea mays
  unsure (1)..(448): unsure at all n locations
agcttcctttatcgtataaaatcattatgacttatcttgcattgcataattttatctatgacaataatttacgtgataaggaatgcgagagatatggtgctgatgaagagtacttggtataacagacaagtggcacgacatatacaaagggaggtgagagtgaagatgtggagaataaagatacgatggataccattcataataggatagttgatgctttggttagtgtaagacaggaataattatgatgataaatgacatcattctatggacctttnttgtaaaatggtattgttctatttatataaaccggtagatcgaanacctgtaaaattggtgatggtggaaccgtagaatcagaaacactggtgctttaatatagtagagatagagatagagaaaacttaaaagagactttgattctactatcataaagctntctttccgc

SEQ ID NO: 21477 - DNA, 404 bp, Zea mays
  unsure (1)..(404): unsure at all n locations
tctttgcgagtngtgtggccttgacactcggcanagaagcaaccttttgtgagtgtcttctaacgcactcgacanaggaactcgcanaggggcccgcttgtgctcncgttatcgagagctagtccagctagcactcagcaaagacggagcctttgccgagtgcctcctaatacactcgacaaaggtaatggcaaatgggcccacggngagcttctttgtcgagtgcccgtacagtagacactcggcactcggcaaagtctctgtcgccgtcattcggcgccgtgacgacatcttttcttcgccgagagcgaggtggcactcggcaaagtcttcgtcgaatgcccgacaaanagtacttggcaaacaagtcgttgccaatatacagttcaccgagtgtcacactc

SEQ ID NO: 21478 - DNA, 393 bp, Zea mays
  unsure (1)..(393): unsure at all n locations
ttttactngtacatatagatttacattatatcctcttccaagctcaatntgcttcatgtacctttgctcatttatcatgttactctaaacataatgtgttgcgcatttaattaccaaaacaatatagaaatagcccaatgataaatttccctttcaatctcaccattnttattgattcatgccaacatatcaaaagcaactcaaaatgcactaacatatccaaatgtgagctaaaggtgcanattgatgtcaaattgaagaccgataagattatcataggaattggtatatttggatcattnttgccaccacttggttngttttcgcaaaacanaatcattntcctatctctatgtcaaaaacactttgctttgannaaatcaaatactttca

SEQ ID NO: 21479 - DNA, 405 bp, Zea mays
  unsure (1)..(405): unsure at all n locations
agctgggagatcttcatccaacatgggctagtcggcggggccagatccaacccatgttagtcttagcaattaagcatgtgtcgagttcagctctttcaaaatctactaagtatagctgaccctctaacacacccttaaatgctattgaatcatcacttcttctaaagacagtgacacctacatcagtgaaaagacagttgtagcccattttgcataattgagatacagaaagcanattgtaatctatagagtctacaagaaaaacattggaaatagaatggtcaggtgatatagcaattntacccaatcctttgaccaaaccttgatntccatccccgaatgtgattgctcgttggggaatctggttttctcataggaggagaacattttcttctccccagtcat

SEQ ID NO: 21480 - DNA, 51 bp, Zea mays
agcttgggataagatagagaaccgtggtactcaagttgatcattggatcac

SEQ ID NO: 21481 - DNA, 420 bp, Zea mays
cgtaggactactaagagctcatttctatagtatatggcccgttctcaatcaatctgttttaaagaacatttcgagaatcagagcccgttggctggtcggtcaagtcgtggccggcggagaagaagatcccctggccaggcgtcagaatcgccctcgggtcgtacttgcgcttcagcgcggcgaacctgctccatttctcgccgaaatgccgcctccagccgtccagcgacgcgtggctcggcaggtactgcctgtagcctatgccctcccggtggcagaactcgagaacgggcgcgttctccctctcgagctgctccaggtcggcggcggccaccgcggaccgcagcagcccgacggcgtagaacacgtcctcgtccggcgtggccgtcgtcatcctgtcgtccaccgatccttgtcatg

SEQ ID NO: 21482 - DNA, 482 bp, Zea mays
  unsure (1)..(482): unsure at all n locations
cctgcngcatgcagcttacatgtctcgtatgattcagaatcaaacgtatgttatagcccttcagaatgaagcttcttcatgcgattctcacttatatgacccaaacgacagtgccacatgtaggtaggacttaaatcattaggccgaggccttttagcactaatattacagataggtgcatcatcaagatttaaaatgaataacccattcataatggatgcaaaagccacaaacatgccattcttagagatcacacaaccattgttttcactcgcaaatgaataaccatccttcatcaaacatgaaggagacataatgtttcgactcatactaggaactagataacaattatttcaactccaaataaatcctgatgggaggtggagtngcatcgttccgacggtcaacgcagcaactcttgcattatggcctacccggaaatcaacttctctcttttcacgctctacttttatcatccctga

SEQ ID NO: 21483 - DNA, 389 bp, Zea mays
  unsure (1)..(389): unsure at all n locations
ctcggcttgtctgcaatgatgaaggaccagcttgcagatagccttgcctataacagtctgaaggtgagaatattttaacttgttggaagacagattatttntgtagcttatttcattatcagtaggtgttcatcgtttgtttttgtagggcttaattctgagcaaggctntaaaggcctagaaaaaagcagaagatgaaagctgccagttggctcttggaaatattcgatcagaggttattacactgaggaatgaagctcttgaaaaagacaaaatactgctctccttagtggataggctgaaaaccagcgaagccaagcttaactcacaagccgaagttcataaagccgaggttgaagatttacagaanaaacttgctgaaataaatg

SEQ ID NO: 21484 - DNA, 308 bp, Zea mays
agcagcttggataagctaatcggtaaatctatttgggtgttctactgagtatcctgcaatgtcttagagagagtttattaagatttctagctgaacttattggagtgagatttatttaccctttcgtttctttctagttcttctatgcctctaaggcgggtttgaacatcgagacggcttactaacttccatatattcttcaggatatacagccgctactcactggtgtatgattatctgtctcagaattcggagttataaaagcgaatggatctctcgtgataatattatcgatcattacggtagag

SEQ ID NO: 21485 - DNA, 472 bp, Zea mays
  unsure (1)..(472): unsure at all n locations
gatatgcanaccaacagaaagatgatgacatcatgatttttatgctgatgtagattgttcccccaatgaggcgagtccaaggttaccacagatcctcttactagtggtggcctgcaagcctacaccctcgacttgagaagttgccactcatcatcttactagtggtggcctacaagcctgcaccctccacatgactagtgcttatacaagagatctagtacttgatctagcccaatcacttggcactcaccacaactctcttctactaaagttgctcttcatgatattgtggggcgagcacaacaccctcacaatgtgatctcactctagagcaccacacaaacttcatgcatgctacaacaaaatctacaagctaccaaaccatataggaggtggaaatgtctaagagtaacaaaccctcaagcttgctaactaccccatatagccactagatactatctttctcaagtaa

SEQ ID NO: 21486 - DNA, 446 bp, Zea mays
agcttgtaccgttccctgatggaatgtgaaaaaattatgtccaccgctgctgcttgttggtgttggagaattgtagtctcattcggtctgtcttcacccctgagctccccattagtgtggattttggagccatgacagaaggtggtagaaaaagctagatttggcttgtgcgcattgcatgattgttgtattgtctgataggttgtttggaatggatgataaataatgatcgagtgcattcttcaggtatgtagctggattgcatatttagggcttagttgcatccaggaaattctggtgattggttggatccctactaaaactttgcatgtacacatgtcttgtgaactgaggaatcgtagctgtattacattatccctatcatattgtagcctgcctgctccaatgctgctcaccatgggtaatgttatctttggtgacaatct

SEQ ID NO: 21487 - DNA, 443 bp, Zea mays
  unsure (1)..(443): unsure at all n locations
ggcanaataagctgcttgtcatcattgatcttattgggattctttttgcataccttcaagtgttttcctaatgcagatgtaccattgacttttgcctcacacttgataataatcttgcaatagttgcaccttgcttccttcacaacactagaatctttgtctatgatcttggtgaaactctgccatacctctgatctgggtgccatagcttttcttttcttcacctctttctctgcaggtgcctctgcaatacctttctcgggttcttgagttgagttgtctcgcatcggaacattctcaatcaattctagttgaggcattctttcttcaggttgtgccatctgcaaatgagatgtccttaagcaacattggaacaacattcatatttgaaacatcattcatctaagcaacatttgcgagtttgaacaacattcatatttgca

SEQ ID NO: 21488 - DNA, 401 bp, Zea mays
  unsure (1)..(401): unsure at all n locations
agcttaaagcccacctatcactgtgttctagtgacgtggagatgacaatacaaacttgctggtggagtacttgtcatcatacaatgcaagtgctgcaaggcaggaaagtaaacggtgccatggcagtatggcaccggcggcacacacggcttcctgaaaccgacttgagagactcgcggcgcgctagaagaaacggngacacggcaagcaaggcagagtgagaacacatacagtactagaatttgactatggtggcttcaactctggattagacttgggacggctttcgatctgacggccgatcatcgtttgggtgtctccaatcacaactaccgcgacggaccaagcaacgcatcgttcgggtgacggacgagcacgaccccaaggaattgactatgctc

SEQ ID NO: 21489 - DNA, 382 bp, Zea mays
  unsure (1)..(382): unsure at all n locations
tctanagggagagcacattntaggactaacaaatgttcattntgagaaagacaggagttgtagcgcatgccaagccgggaagcaagttggcacccatcatccacacaagaacatcatgactagtgacaagccactgaagctcctacacatggatttattcggcccgatcgcctacataagcatcggcgggagtaagtattgtctagttattgtgaatgactattctcgcttcacttgggtgttctttttgcaggaaaaatcccatacccaagagaccttaaagggattcttgagacgagctcanaatgagttcggcttaaggatcaagaaaantagaagcgataatgggacgggagtcaagaactcacaaatagaaagcttt

SEQ ID NO: 21490 - DNA, 376 bp, Zea mays
  unsure (1)..(376): unsure at all n locations
cttttataggaacaagggacttaatacaagagcatattgccttcaaggtgtggccgcttgccgagaaatgggaaatgccacaagaaatcgtaaaaaggccgacgaaggtggacttgtcaggtttaagtacacnttttaatttgaagataaatttattgagccagacgatgagtggttgaaaagcattgacaatttaagtgatgagctgcttgggacatactcgaaggccgaagatactgcaatgtcagcagccttctgaggccgaaaaagaaaggctgaatcggtattgatgccatcggttgtaccctgactatgtacccatcgaggcgaanagaaaacatacttgcaaaaaaactgactgtctacgagcgacctg

SEQ ID NO: 21491 - DNA, 387 bp, Zea mays
  unsure (1)..(387): unsure at all n locations
ngaaccgaggacccgcgccaccggtatagcgcaatcgtgctcgttggagtccanaacccgccggcgcacgtggaccgggtaagcctctgcaccatttcccaattcgttgcgcgcatggcctntacatcaccccgtggagctccttgtgcaccttaattgaactataccgtcgtggtttggccggaacaggggtcgccgacgacccccgccgcctgtgctcgtggccagggtagctncgaccacctccgacaccgacccgcacaccgacgtgaccgtcgtgacctcccggacgtcactgaccaccccgccggagctctactggcgctggtaagcctcgccgccgtaatctatgccacgggtactggttaagtcagccagggagcgcgg

SEQ ID NO: 21492 - DNA, 292 bp, Zea mays
aacgaagacttggatgacgcatgatacgaataggacgcaaacaacatcgccgcatgaaagtgaaggttatggcggcataccttggaccagccatgtctaatcatgcacaacatggcatggacttgataatagctgcgcaccactttaataatgttctcgacatggctctgaactatatattatggcgatcgacgatctaacatgtgctctcatctatgtctatatagcgaccactaccttgagatcaagatctttccacagcatggactaggcatggtcttcgactcactga

SEQ ID NO: 21493 - DNA, 400 bp, Zea mays
  unsure (1)..(400): unsure at all n locations
ctctaaagctctctatgggcttaagcaagctccacgcgcttggtatgaaaggcttanggatttcttgctttccaaagacttcanaattgggaaggttgacactactctattcactaaaagaaatggcaaagatttatttgtttgtcaaatctacgttgatgatattatttntggatctactaatgaattattttgtgaggagtntcggaaaatgatgtcaaaggaatttgaaatgtctatgataggagaaatgagcttctttcttggccttcanatcaaacaattgaaagaatggaattttataagtcaatcaaaatatttgagggacatgctcaagaagtttggcttagaaaatgctaagcctatcaagactccaatggccacaaatggtcatctagac

SEQ ID NO: 21494 - DNA, 476 bp, Zea mays
  unsure (1)..(476): unsure at all n locations
agcttcngcataccccattcccttaatgttggaaatactcgggtggccaagtattcttgcaccaagtccctagttccaatattctcagaaacaattctgaattcatgaacagcatctgagcatggtgcccccggcgtcatgttgcactgaggcctagtcaacccgaaggttagcttcagcgggctttgaactagattctccttcttctcatcaattntaacatagaaccattcagtcttccaaccggttggccacttggtgcagtagctgaccaccggtgtcttcatgtctttgcggtatgcaaagttatagcagccaaaattctcatgcaatccatcttctctagccttcgtctgatagtgaagctcgtgcacccggcagaaggcttctgcgagcagctccactccttggcttcaagagcccaataanaacgctgagccaacaatagcgtaggagcagctgatgaaaaaatctca

SEQ ID NO: 21495 - DNA, 223 bp, Zea mays
  unsure (1)..(223): unsure at all n locations
tctatagggagaacacattntatgtgtaacaaatgttcattttgttaaagacaggatttgtagcgcatgtcatgcagggaagcaagttggagctcatcatccacacaagaacatcatgacgaccgacagaccactggagctcctgcacatggatctattcggcccgattgcttacataagcatcggcgggagtaagtactgtctagttattgtggatgaatat

SEQ ID NO: 21496 - DNA, 438 bp, Zea mays
  unsure (1)..(438): unsure at all n locations
agcttctaaagggagaacatgtaataggtctaactaatgttcaattcgaaaaagatagaccttgtgcagcttgtcaaacagggaaacaagtgggaggctctcatcacaccananatgtgatgacgacatcaagaccctnggagatgctgcatatggacctcttcggacccgtcgcctatctgagcataggagggagtaagtatggtctagttattgtagatgatttttcccgcttcacttgggtgttctttntgcaggataagtctgaaacccaagggaccctcaagcgcttcctcaggagggctcanaatgagtttgagctcaaagtgaanaagataaggagcgacaacgggtccgaattcaagaaccttcaagtggaggagtttcttgaagaggaagggatcaagcacgagttctccgctccctacacaccacagc

SEQ ID NO: 21497 - DNA, 461 bp, Zea mays
  unsure (1)..(461): unsure at all n locations
tcgcattaagttcttgctnttcttggtcaaactgttcagattgacagagaagcttcgtatttaattctgctatnttagcttcggcttctgccaataagccttcagttgcctgaagctcgaagttcttcttttcaatagtagatgattgctcttttattttgctctccaaattttcaattataacctcgtgttttttgtcttccagatcctgctgcattttcaaagccttactcaacagcatactctgcacataaacaaccttcgttagaaatgtcttcattattaaaaataataaaagtcaagggaaaagtagttcaccttgaaattggaatagaataaactaccaacgatatgttgtcgtcggtagcggctatatatccgttccagcttcggaaaaccgatgctctttgatagagtaccaataatcttagcttcagtctgatcccggatacaacctaatt

SEQ ID NO: 21498 - DNA, 339 bp, Zea mays
ccattatggaccatatactttatgatacacgtgctccgcatactatgaacacacctaggagctactagctttctatttaccttgtccttgatttaccttgtgggttactatggttagctacatgctagcgctatactttaatcaatgaacatgatgagatacaatgatgatactatgattttattctggatatgatgatatacttgtggcatttaggggactcgggctgtttcccgagtacctctccgtaaggacctgttcgttgagagaccacccgggataacagtgcaaccatgagggtgaaatgggatgcccttagctaattaattagaggaacta

SEQ ID NO: 21499 - DNA, 289 bp, Zea mays
  unsure (1)..(289): unsure at all n locations
nggaatgtnttgntcagatntgctctgactgtcgattatgaaagatacctattattctgatcgactaacctataaatacttaagcacttccaggaatttccaaatgactaatctcttaaattcacaaagcaagtgatccatgctaagtcacataatccaacgcccattgaataataaaccaacagtctagcaccacacataaacctatcaccacaaagtctggagcaagcgccttgaagcccccacatacaacctcacgtgttcgcagcgccttggaaagccccacata

SEQ ID NO: 21500 - DNA, 357 bp, Zea mays
  unsure (1)..(357): unsure at all n locations
nagcgtgtcaagcatatcatggttctcatctctagatatgaccatcaacgttagccaacaaagatctaggaacccagaagttctttgtgtcagtacttggtaaactcattaccttactaacacaagtcgcaatgatgagttgcctaattacatgagaaataattgataagctagaggtgaggtagttaccaatgggacaatccttgcattgatgtcccttctttcggtatatgtagcaaaggcgatcttcaagtcttgaagatttcttctttccttgcttcttgcttgctacatgggtagataatattttcttttctaatactatgcctttttgattacaatgggacaagacttaat

SEQ ID NO: 21501 - DNA, 443 bp, Zea mays
  unsure (1)..(443): unsure at all n locations
ntatataatgggacgtgaaagtgccttcctcaatggaccaatcatagaagaggtctatgttgagcaacctcccggctttgaagatagtgagtaccctaaccatgtttataaactctctaaggcgctntatgggctcaagcaagccccaagagcatggtatgaatgccttaaggatttccttatcactaatggattcaaagtcagaaaggctgatcctactttattcacttaaactcttgacaatgaacttgtttgtatgccaaaattatgtgatgatattatatntgggtctactaacgagtctacatgtgaagaattagtaggatcatgacacaaaaattcgagatgtctatgatggnggagtaaagtacttctangattcaagtgaagcacacaagagcaccttctagccaacaagtcactcagatatctagcagttggat

SEQ ID NO: 21502 - DNA, 251 bp, Zea mays
gcagcttcagcagatcagccgaagcccatgctcttatgtgaggacctagcagagtagaaggtgctggtgggctctcaattattcgaagaacaggagaaaaccttgataagggttttgttcaaccacaaagatgtttttgcatggacaagcaatgagtcttgcggaggtaataaggatggtattgaacactcgctcaatgttgacccatccttcagacctagaaagcagaggcttcggaaaatgtctaatga

SEQ ID NO: 21503 - DNA, 351 bp, Zea mays
  unsure (1)..(351): unsure at all n locations
ngnggaggttcttcatccncacatgtgctaagcggcgatgccacagccagcccatgcaggtcttagcaattaagcatgcatctagaccggcctcttcttttgcaaaatcaaccaaataaagtttgctgtctagtacacccttaaaagctagtgaaccatcacaccttctaaagacagacacatctacatttgtgaatagacaattatatcccatattgcataattgactaacagataacaaattatatccaagagactcaactaanaacacattagatatagagtgctcggatgaaatagcaattntacctaacccctttaccttgcattggntcccatcaccgaatatta

SEQ ID NO: 21504 - DNA, 298 bp, Zea mays
  unsure (1)..(298): unsure at all n locations
catgcaagctacacagancacgggtggaatctttccatgtctgcaaccactgtccgagatatctcttttgcacaaagctaacggaagaaatatctcaactctgaaagcgctatccagacatgctcagggacatagcctcgaaccatcacaggaagaatccgttcaatccatatgtggaagtcatgactcttcatccctaagactcgcatagtagataaggtcacccccctactcatgttagctgcatacccatcaaggaacatcaacatcttgatccaccgatgtacttccttcctct

SEQ ID NO: 21505 - DNA, 188 bp, Zea mays
  unsure (1)..(188): unsure at all n locations
ttgcattcatcattatatagtgtagattgatcttagtctttgcggtagatatagcaacacttagacaaatcctagcttgcatattctagttngattatttgcataggttctgctctagggatttattagtggcctagtttattgacagctttagaagtcctaattcaccccccctcttatgcgttcac

SEQ ID NO: 21506 - DNA, 492 bp, Zea mays
  unsure (1)..(492): unsure at all n locations
tagcttgcccccatcatgagcctgcgtcactcggtgttatgcgtaggtgtacacccggtatggtgtatctgctgcgcactacccgatattngtgtcattgtacaagctctggcgctgagctcctttatgaatatggtcgtccacccctcaaagtagtgggagcacgtctagggccatacttggggaggtgcggtcatgtcgatagcgatcactttgtgtgccctcagactgtcgttcgcgtggctggcctcgacctcgggtgtcatgtcttgtcttagtcggcgtggacttcacgacgtatgacttgtgtttccgcctcacggactttctcgataagaatctgagtagtcgtcctgtctcacggacttgctcaagcggggcctggtccgtcgatcccgctcgaggacgcgctctggtgggacctggtcagtctcgctctgtctcacggacttgctcaactgggacctgatcggtcgctccacctcgcggact

SEQ ID NO: 21507 - DNA, 370 bp, Zea mays
  unsure (1)..(370): unsure at all n locations
tctataggacannacacatttatgactaaccattggttgctntgttaaagatagaccttctagaacatgtcaggcagggaagcaagttgaaacaagtcattacacgaagaacataataactacatcaagactattgagctattgcacatggatttatttggctttgttgcttatcttagcatcagtggaagtaagtatggtctagttattgttgatgactatacttgcttcacttcggtattccttttgtgggacaaaagtgaaacccaaggaactntaaagagaattttaaggagacctcaaaatgagttcaacttgagaatcaagaagattagaagcgataatggaacataattcaagaacacacaag

SEQ ID NO: 21508 - DNA, 471 bp, Zea mays
  unsure (1)..(471): unsure at all n locations
agctngtcaagcatatnttggtactcatcgcttgatatgtccatcaaggttagtcaacaaagatctaggaacccaaaagtcctttgtgtcagtacttggtaaactcattacctttctagcacaagttgcaattttgggttgcctagttacatgagaaataattgataagctagaggtgaggtagttaccaatgggacaatccttgcattgatgtcccttctttcggtatatgtagcaaaggcgatcttcaagtcttgaagatttcttctttccttgtttcttgcttgctacatggatagataatatattcttttctaatactatgcctttgtgtttcatattgtgacaagacttaattaagtgtccctgctttgagcatttaaacaatagttatcatccctgtaataatcaagtcatttgtaatatgaggacataacctaatcgagtgtcccttttaaagcattcactaca

SEQ ID NO: 21509 - DNA, 473 bp, Zea mays
  unsure (1)..(473): unsure at all n locations
tgctaagaagattcaagtcaagctttgtttccgatctatagggtttcttagagaaatgtagccgattccgacgaagtatacttgctaagcaacaagagtntgttgttgttatgtatcatgttttgatgacggattaaggccaaacgagcaggttgatagataaaagtaaggcttaagttgctatatcaaagagcaacaaggttggcaaggggtcaccaagttaaaaaagatccttatacggtgatcaaagacacatttggaaattcatatatactatacatgtttcagggcgatagtcttctatgagcaattaatgaaagatcatttcttaataatattctaactggttggcgataagcctagcatgccttcaagacaatgctcgatgcttgtataatccttaaaacaaatatgggtgatatattatattgtcttagatgctagacaatatgatgaactagaccacaacatta

SEQ ID NO: 21510 - DNA, 392 bp, Zea mays
  unsure (1)..(392): unsure at all n locations
agcttgaactgtctgtgaatgtatgtgaactacaagaccggtgggagccattgngttattgacagtggatgcacacaacatatgacaggcaacccacggatgttcacctcattagatgagaatgttgatggtcaagataaaatcacatttggagacaactcanaaggaaaagtacaaggacttggcaaggtggcaatctcaaatgacttatcaatatcaaatgttctcttagttgcacctttgagcttcaatttattatcagtgggacaactctgtgatcttggacttcaatgcttattcactccatcagaggttattggaacaaanatggatgatgaatcaatggtattcaagggttttagatacaacaacctctacttagtggattcact

SEQ ID NO: 21511 - DNA, 411 bp, Zea mays
tgtctctcacatcaccgagtataatgcgatatgacttaatcgaatgaaccttgttcgagaactctgttacagatgaaacaatggttaataggaatagccaagtttagcaatctaccatctaaaaattctgaaacaaaaaaacctaaatgtcaaataatattatttgataatccatcttacctataaagagctttgcatctttctttgacgaagtccgcgcggcagatcgtcgaccgccttgtcgtctgcgcggccgccgcgaccacgaccacgaccacggcaacgctggggcagcattgtgcgtgggcgacgcgctgcacaaggccaccaaggtgctcgaggaaccggcggaaccgcaacccgtggccaccgtcatgctgctcttcgacacccagcagcagcaacagcagt

SEQ ID NO: 21512 - DNA, 391 bp, Zea mays
  unsure (1)..(391): unsure at all n locations
cttcatccccacatgtgctaagcggcgatgccacagccaggccatgctagtcttagcaatttagcatgcatctagaccggcctcttctttttgcaaatcaactaaatagagcttgccgtctaatacacccttaanagctagtgaaccatcacttcttctaaagacagacacatctacatttgtaaatagacagttatatcccatatgacataattgactaacagatagcagattatatccaagactctccactataaacacattatagatagaatgctcattggagattgcaatttacctagccctttaccttgccttgattccataccaaatataatgaatctggaatcttattctgacganganggaacatcttttctccccgtatatg

SEQ ID NO: 21513 - DNA, 398 bp, Zea mays
  unsure (1)..(398): unsure at all n locations
cgccttcgcttcggtctatcatccgtagtccaacggggtcgtggttcgtgccaatgggaaaatattcacagctgtcaaaaagatgctcctcgatgaanaaaggcagatggaccgatttattaccggaggcagtctgggcgctaaacacaactgagtgcagggcgaccgggttcactcctttccgccttctatacggatcggaggcgatgaccccgcaagaaataaagcatgggtccccgcgtacagttccgtcagccgtccccgacgtggacgagccaacttcanaagatctcattgacggagaccgggtcttcgccctacaggccctaagcanataccaagcccagaccanagcatggcgcgaccgcgcagtcatcccgagggagttcagcgagggg

SEQ ID NO: 21514 - DNA, 441 bp, Zea mays
  unsure (1)..(441): unsure at all n locations
agcttcgtcgtctgaaagaaattaccctgaaggaaagagatgatttcagttctccaatcttcactatagacaggggatatgttgaggaccgctctttcaagaagctcaaccaaaggtgcttttattgtttcaaaaaatacttccgaaggtaaaggcagcccctgtgctgctgacttggccaatagatcagcatattcattttctccacgaggaatacttttaacagagaatccttcanaggaaacctcaatccttcggactgtatctagatatttttcaagctccggatctcttgctttatagctcttgtcaatatgaccagaaataacttgngaatcagttntaagaatggcccttctgattcccattgcctttaactttcgaagacccaagagcagagcttcgtattcagcaatattgttggacaactganatcaagtc

SEQ ID NO: 21515 - DNA, 453 bp, Zea mays
  unsure (1)..(453): unsure at all n locations
ntacaaacagttcgatccgaggacctcagtatactctgcaacgactctctacccgctagcccctcttatgtaaggtaatctcttgctagttttcataattacttagccaagggtgtcccattccacccttgtggtagcactggtatctcaagttaagctccatgttccaattaacaccataatattatcatgaacaataaataatccagtaacaatgattaagcatgagcatatgtcatatagcattacttcccaaaaccaggtagagcatagccaaactacccaatagttcatttgtatgcaaggtgtggngtaaataaaactatggtaacctattaagtcccatcanattaacctgagcatgtcacagtgattaacagtaacattattaggtaaagaagagtgatcaagggcacaacttgcctttttggtgcaacttcaggtactcctcca

SEQ ID NO: 21516 - DNA, 346 bp, Zea mays
  unsure (1)..(346): unsure at all n locations
tctatagggagagcacattntgngactaaccaatgttcattntgttaaagacatggnttgtagcgcatgtcaagcagggaagcaagttggtgttcatcatccacacaagaacatcatgacgaccgacaggccgcttgaactactccacatggacctattcggcctgatcgcttacataagcatcggcgggaagaagtattggcttggaattgtggatgattattctcgcttcacttgggtgttctttttgcaggaaaaatcacaaacccaagagactttaaagggattcttgagacgggctcaaaatgagttcggcttgaggatcaagaanataagaagcgacaac

SEQ ID NO: 21517 - DNA, 435 bp, Zea mays
  unsure (1)..(435): unsure at all n locations
agcttcttacatcctttntagctngacttgaanagttctctagcacttatatgaacatagttagcaactaaatcaattgactaggtactagaaacatacattttccatccatttcctctaggatttgcaatatgccccaaaagtgctttccttattttccacaaacttttggacttgattgcttcaatttgctttttctaaacacatgtgctcgtgctcatatcaagattgttagttcaaggtggtggtgtgggcagttaatcaccaaaacacttagaaatggctcataggcacatttccctttcaaacataccctctctgactagtaggtcaagcctgatggcacgcttggttgattgtctctagcactgagaggtaatggagacacattcagtagagtcgatcgcatcagcagcagatcccttggcttcacgt

SEQ ID NO: 21518 - DNA, 480 bp, Zea mays
  unsure (1)..(480): unsure at all n locations
ncaagctttaggtttcctcaacttggggttaagttttacccctntaatccctatttagggctaagcaccttattccagggtcttatttgcgaaacactaatacaacttgcttgaaattnttacttagggttccaatatttgagcacctataaccttttgctcttttctccaatttgctccacaacataaggaaatctccaaatgggaaaatgttaggctctccaaacccaatcactttgatatatgcactttttccaaaagtatggctaaatctccaaatccacttttggggctcaggtttagggtttagagatactcaaccaccctaagtgcttcaccacttctaatgctcatactgaaaacaaacttatccatcctnctaaagccaagctactctntaaccttaaatccaactgtggtatatagagctcatgtccaaagtgtgcttggttaaggttacttcgctacacactatttcat

SEQ ID NO: 21519 - DNA, 372 bp, Zea mays
  unsure (1)..(372): unsure at all n locations
gcttgtggcatggtttaatgatagacacactcatgcagttggattgcagaatgagggagagagatgggctctcaaacctaagacctttctagagaaggcanaagaataggcaaacacacacactgttgattggtttgacttatagtcagggacatatgaagtatttcttcaagctggtactacttctgacgacgagtcacaagagtcgaggaagcatgtggttgtccttaatgacttgtcatgtacttgtggcgcacccaggtagtaccattttccatgttctcatctaatcgcagctgcccgaactcacaactttgacttagagaggaggatacctcangaagttactattgataaactagtgttgacttg

SEQ ID NO: 21520 - DNA, 389 bp, Zea mays
  unsure (1)..(389): unsure at all n locations
taactgacgctgcagcttatgataactggctgtcttatgctcacttattactatccagaatgattttgataagcttaaatttgcaagggatgcctacacaattggcagacacccctcaatttatgatggacttggctctcagagagaagcttataacttaacaagccataaggcttccatttctcgccaagggaaagaagggaggccccctatggctaataatgagcaaaagaaccatgcttttatgtactatgataggagatattctagaaatgcttntagagggcatgatgtgtttgattcacatgcctatgactcttatgctatgactgcttctagttctcatgtatgcatggagaaatatgtctacgaaaatgctattatcatgt

SEQ ID NO: 21521 - DNA, 464 bp, Zea mays
agcttatgaagattcttcatcccaacatgggctattcggcgatgccatagccaacccatattagtcttagcaactaagcatgtgtcgagctcagctctatcaaaatctactaagtatagctgaccctctaacacacccttaaatgctattgaatcatcacttcttctaaagacagtgacacctatatcagtaaaaagacagttgtagcccatttgacataattgggaaacagaaagcaagttgtaatctaatgaatcaacaagaaaaacattggaaatggaatggtcaggtgaaatagcaattctacccaaacctttgaccaagccttgatttccatccccgaatgtgatagctcgttggggatctttgttttctcatatgaggagagacatcctttctccccggtcatgtgtgttgtgcacccgtgtcgagtatcacttgagcgcccgatgcataacctacaa

SEQ ID NO: 21522 - DNA, 399 bp, Zea mays
  unsure (1)..(399): unsure at all n locations
ggctgcagcttacaagctattggcgaagctaaccgagcggctggcgtggtttggaagtaaccggagtgggctggccacggtggctgaggctcggttggcaatggcgggcggaagagagctcgccggagctaaagaggggcgtctggccagtgaaggtgagcacgaggtgaggtgaggcacgcccgggaaggctntaaaggcacgggtgggcaccgccgatggtgagggcgcgaggcggacttgaccgaacgctggggcgagcacgtgcgaaggttgggcgaacgccggcgtgccgaccagggtcgaacacgtgtgcgcgttcattctgcccaagttctggcacgtgtggtcattcatccgagcctgctcttgccttggtcagtgcacaaaacctcttct

SEQ ID NO: 21523 - DNA, 441 bp, Zea mays
  unsure (1)..(441): unsure at all n locations
agcttcaactcttcnaaccatatccagatatttttcaagctttggatctttaaccctgcaactcttgtcaatatgacccgaaacaacctgngaatcagttttaatatggcccttctgattcccattgcttttagcttccgaagacccaaaagcaaggcttcgtactccgcaatgatatttgtgcaactaacatcaagttttgtcgcatagcaagtattaactttggaaggtgaaaccaacacagcagccgctcccgctccgaaagttccccaagacccatcgcaaaacactgtccatgcttcggcgtctttatttgtttcttactcctgagcccctggcgttcagtcagcaatgaagtctgctaacgcctgtgactgaatcgaagatctttaacatatttcatactaaattcgtcgagctctcgagcccattttccaatcc

SEQ ID NO: 21524 - DNA, 431 bp, Zea mays
agcttgtgagcagtacaagttcagaatggaattagctgcttcggctgatcagccaaaacccatgctcttgtgtgaggatatagcagaccagaaggtgctattgggatctcaattgtccgaagagcaggagaaaaccttgataaggtttttgttcaacaatatagatagttttgcttggtcagctaatgatctttgcggagttaacagggatgttatcgagcactcgctcaatgttgatccatccttcacacccaagaagcagatgcttctgaagatgtctgatgataacgccgaacgtgctcggaatgaaatgaaatgactcctcagtgccggagttattagagaggtaaaatacccagaatggttatctaacactgttatggtaaagaaggccaatggttaatggagaatgtgcatcgatgttactgatc

SEQ ID NO: 21525 - DNA, 465 bp, Zea mays
  unsure (1)..(465): unsure at all n locations
agctngaagccatggtaagtagcataggccaataatatatgaattgactcaagcctagctacgggtgcataggtttcactgaaatccaaaccttcgacttaggagtatcccttggccacaagtcgagctttgttccttgtcactacaccatgctcatcttgcttgttgcggaagacccatttggttcctacaacattttgattaggacgtggaactaaatgccatacctcgttcctagtgaagttgttgagctcctcttgcatcgccaccacccaatccgaatcttgaagtgcttcctctaccctgtgtggctcaatagaggagacaaaagagtaatgctcacaanaatgtgcaacacgagatctagtggatacccacttatggatgtcaccgaggatggtgtcgacggagagatctcattggatagcttggcggactcttgggtgtagcagcctttcgtcttca

SEQ ID NO: 21526 - DNA, 451 bp, Zea mays
  unsure (1)..(451): unsure at all n locations
agcttctaacatgggtagttatctaatcattgtggcaatgtaaatacttggctaggcaaatatgattattctcggcagaagaaaaataacgttatttgactgatacaccgacggatggtcacccaacacaccgagtcttttttttttcttgatggactaagttaatgcccgtgcgtcgcaacgggaacatataatatcatgataacttatatataaatgtgttatattgctatgacaaaagatttataatctattggtgatcctagctatacatataaattctgttatctgtggaccattgattagaaagaataaggctccagtctcgtttgcaacagcacgagcaataagagtctntccagaaccaggnggcccatatagcaatatgccctttggtggtccacaccattagatctgaaagctgatgatgacgtattggaagctcacaagc

SEQ ID NO: 21527 - DNA, 397 bp, Zea mays
  unsure (1)..(397): unsure at all n locations
agactgcattgcatgattaaattacttgtattgctctatggcttgtctaacctagttgagataaccgccaaccaagcgagtgaaaaagcttaactcgggtcaaacttgacaagtcttagttataagcttttagcacttaaattcttacttatttgtgcaattgttggttcttgaaatatgcatgaggtactgcacttaggggagtattcaacactcatatcactcatgaaaatccctagtgcaagccaaaatgcagatatcgccatttgcctattttctccaanaaattatctagcctatggcaaaatattttgaaaagtatatgagggtgccaatacctgtcccaacacgtgttattntgtgtgattataagctcgggatttggtttcggtggaaa

SEQ ID NO: 21528 - DNA, 402 bp, Zea mays
  unsure (1)..(402): unsure at all n locations
agcttgcacacatagctcntttgaatacctttgatcatatctcttttatatgctatgactaatgtgtgttcaagtttatttcacaccaagtcatatgtatattgaaagggaattggagtcttcggcgaagacaaaggcttccactccgtaactcatgcttcgccaacactccgagcaactctctcttctttggggaagaaatgagcatcaaagaanagaacttcatccctgtggaagagagtaaaagctcaaaagcttcgctntttggtataatcttaactcatttattntatgaccaacagggaagatagcacttagagggctctaatgattccgtttntggcgattcatgccaaagagggggagaaatgagcccaaagcanaaggaccgcaccaccatga

SEQ ID NO: 21529 - DNA, 447 bp, Zea mays
  unsure (1)..(447): unsure at all n locations
gcaagctttaccaaatggacgtgaagagtgtctttctcaatggaccaatcaaggaagaggtctatgttgagcaacctcccggctttgaagatagtgagtaccctaaccatgtttataagctctctaaggcgctttatgggctcaagcaagccccaagagcatggtatgaatgccttagagatttccttatcactaatgaattcaaagtcggaaaagccgatcctactttattcactaaaactcttganaatgactcgtttgtatgccacaattatgttgatgatattatatgtgggtctactcacgagtctacatgtgaagaagttagtaggatcatgacacanaaattcgagatgtctatgatggcggagttgaaatatttcttatgatttcaagtgaagcaactccaagaatgcaccttcctaagccagacgaagtacactcaag

SEQ ID NO: 21530 - DNA, 409 bp, Zea mays
agctttgttagagaaatacctatggcgctctttgttctaagaagtcatcctttttcgaagcagaggtctctgagctaagatatgttagcaccggtttggcctgtgtgtagcaatggtaatgtattagagtaaagaaagcaaataatgggaaaatataaaaaataagactaaaagcggttttttcatctaaaatataactatgcacattatacattacatgaggtggtgagctagtcgtcagatttaaaaaaatgaataatcatgcaaagaagagaaacgtaatagtagcaacaatggaggaaaatacaaaaatcagagcacaccattagaaaggcagaaaggaatgtgtaataaaatgaaccttgttggagcagcattttccccccaagcatatatgtagaagttaatg

SEQ ID NO: 21531 - DNA, 499 bp, Zea mays
  unsure (1)..(499): unsure at all n locations
ttagagagaccccccgcatgcaagctngtgtttacaagaatgaaagtgggagcgctgnngtanttctgatcttgcatgnggatgacatattattgattgngaatgacattcctatgctggagtccgtcaaggcttcactgaaaaagagtttttctatgaaggacttatgggaagcagcatatattttgggcataaggatctatagagataggtcgaagaggcttatatgattaagtcaagatacgtacattgacaaggttttgaaacggttcaacatggaacagtccaagaaagggttcatacctatgtcacatggtaaacaccttagccagatgcaatgtcctgcaacggctaatgagcgggagcgcatgagtaaggtaccatacgcctcagcaattggttcaatcatgtatgccatgataagtacacgcccatatgtntcatacgctataagtgctacgagtagataccangctgatccaggtgaagatcactggac

SEQ ID NO: 21532 - DNA, 481 bp, Zea mays
  unsure (1)..(481): unsure at all n locations
agcttctaaagggagaactcattccaggactaaccagggtttcnttntgagaaagacaggattggttgggcatgccaagccgggaagcaagatggcactcatcatccacacaagaacatcatgactagtgacaggccactggagctcctacacatggacctattcggcccgatcgcttacataagcatcggcgggagtaagtactgtctagctatcggggatgactattctcgcttcacttgggtgttcgttatgcaggacaaatctcttacccacgagaccttatagggattcttgagaccggctcaatatgagttcggcttaacgatcaagaaaattacaagcgactatgggacgaagctcaagaactctcacattgaatgcttccttgaggaggagggcataaagcatgagttctcttctcctacacttcacaacacaatggtgtaggggagaggaagaatccaactctattggacat

SEQ ID NO: 21533 - DNA, 402 bp, Zea mays
agcttgaagccatggtaagtagcataggcccattatgtgcttattggactcaaacctagctactggtgcatagggatcatcaaaatccaaaccttctacttgtgaataccccttggccacaaaacgagctttgattctttgtaccacaccatgcttcggttgcttgttgcggaagacaccacttggttctacaacattttgattaagacgtggaactaaatgtcatacctcgctcctagagaagttgttgagctcctcttgcatcgacaccacccaatacgaatctaggagtgcgttctctaccctgtgtggctcaatagaggaaacaaaagagtaatgctcacaaagatgtgcgaaacgagaccgagcggtacccccttatgaatgtccccatgatggcgt

SEQ ID NO: 21534 - DNA, 458 bp, Zea mays
  unsure (1)..(458): unsure at all n locations
agttctgtgttgtatcatacccaggtttaacttttccatttcttgacatagtgtggtgtcagaggcccttgtggtaagacaatgacaagaagctttgcgactcagtgcatctgccaccacattggcttttcctgggtgataatggatttctaagtcataatctttaattagctcaagccatcttctttgcctcatgttcaattctgactgggtaaagatatatttcagacttttatgatcagtatataaatggcaagtatttcccagtagataatgatgccatatcttgagggcattaacaactgcaactaattccaaatcatgagttggatagtgctcctcatgccggcgtagttgtcttgaagcataagctatgactcgaccctcttgtttaggacacatctgagtccactacctgatgtgtcataatacacatcanaagggttttcaatgtctag

SEQ ID NO: 21535 - DNA, 450 bp, Zea mays
  unsure (1)..(450): unsure at all n locations
accttaagncacctgcggcatgcagcttgctcctttcgcttggacaccggaagtcatcttaaggtcggagaggaggttgggagccttccgtgtcttgactacgatgtcatcgacgtaggcctcgactgtgcgaccgatgtgttcgccgaacacatggttcatgcaccgctggtacgtcgcgccggcattcctcaggccgaacggcatggtgacgtagcagtacatgccgaacggcgtgatgaaagaagtcgcgagctggtcggactctttcattcggatctggtgataccctgagtaggcatcgaggaaggacagggtttcgcacccagcagtggaatccacgatttggtcgatgcgaggcagagggtagggaaccttcggacatgctttgttgagaccagtgtagtctacacacatccgccatttcccccctttctttctcacaagcac

SEQ ID NO: 21536 - DNA, 360 bp, Zea mays
atttctcggcgtgtgtttagtacgttcaaacgcttgacacaccgtaccacaccttaatccttattccaatttccggctcgaaaccaccaatccccatggatccgtgtccacagaccatctttcttatgatatgaaaatggataccacccatttctgacctcgcgcgagtgctggaaaaatcactcgacttctaccgagatccctaagtagtaaagcagctactcgacctagcatactagtattcatcacaagggaaaaacctgagttcatgcaactaaggtttcaaaccactcctacacttaagtgcacaatacacacctaccaacaataagtgtagtaaaatatcataatagtagggta

SEQ ID NO: 21537 - DNA, 472 bp, Zea mays
  unsure (1)..(472): unsure at all n locations
cacttcatgcaactgctgtcacagatgatatgtgaactgcgttcctctgtctgacactatcttctatggcgcaccatgaagacatacgatccgagacatatacaattctgccaatactgcactgctgtaactggtcttgacaggtatgaagtgggctgacttggtcagaccgtccactactacccatatggaatcgtaaccggctcgagtgcgaggcaatccgactatgaaatccataccaatttcatcccatttccactgagggatctgcaacggctgcaacaatccagcacgtctctggtgctctgccttaattcttcgacaactatcacacatagccacatgctctgcgatnttccttttcattccgtaccaacagaatttcttttaagatcctgaacatcttctactgccaggaaaatcaatagctgtctatgagcttcttaagaatattcccgatggctgacattgg

SEQ ID NO: 21538 - DNA, 417 bp, Zea mays
  unsure (1)..(417): unsure at all n locations
agcttcgtcatctgagaggagatttccctgaatgtaagagatgatctcagttctccaatcttcgctataaacaggagatatattgaggactgctctttcaagaagttccaccgaaggtgcttttattgtttcgaagaacacatccgaaggtaaaggcagcccctgtgctgctgacttagctagcaaattagcatgttcattttgtcctcgagggatatttgtgacagaaaatccttcgaaggaagcttcaactcttcgaaccatatccagatacttttcaagcttcggatctttagccttgcaacttttgtcaatatgacccgaaacaacttgggagtcagttntaagaatggcccttctgatccccattgcttttagcttccgaagacccagaagcangacttcgtactcngcaat

SEQ ID NO: 21539 - DNA, 471 bp, Zea mays
  unsure (1)..(471): unsure at all n locations
agcttatgaagattcttcatcccaacatgggctagtcggcggtgccagagccaacccatgttagtcttagcaattaagcaagtgtcgagttcagctctatcaaaatctaccaggtatagctgaccctccaacactcccttaaatgctattgaatcatcacttcttctaaagacagtgacacctacatcagtaaaaagacagttgtagcccatttgacataattgagaaacagaaagcaagttgtaatctaatgaatcaacaagaaaaacattggaaatggaatggtcaggtgaaatagcaattntacccaaacctttgaccaacccttgatttccatccccgaatgtgatagctcgttggggatctttgtttntctcatatgaggagaacatccttttctccccggtcaatgtggttgtgcacccgctgtcgagtatccaacttgagcccccggatgcataaacctacaaa

SEQ ID NO: 21540 - DNA, 467 bp, Zea mays
  unsure (1)..(467): unsure at all n locations
agcttatgaaattatattcagcttcttttaccatcctaaagtttaattctggtgataaaattatctaaatcttaagagaacagattctgcatagaattatgagactgaaaaatagctataatcaaactgcaataactttctgatctgatatccgattgaggtgttcttcacggccacagaaagatctacacattatctacgactcataggtagactnttatttttttacgccactaagagaacggaaaactggcatgaacagaaactgtcgaatctgccattctgtagaaactaatttcaagatcaacatctaaccccacatctaatccaacctctaatccttcaatccccgtgatccacaacctccaaaaacacagaattacagggaggaacatggatcttatccttacctaaggtttgcccaagaacatctgcaagaagagatgggatagaacatctccttgatc

SEQ ID NO: 21541 - DNA, 366 bp, Zea mays
  unsure (1)..(366): unsure at all n locations
ttgttaatggtaaggctcccatggctcagtatagcgagggctatattttatatcctgctggttatcccgagcacaaaattaggagaattcattctaggaagtctcactctggctctcatcatgcatttatgtataagagagaggcatcttgttctatgcaatccactcatgttaaattgcctaaaaagaaatctcctattgcatcaaatgagcccattggttcatttaagacttttgatacttcatatgttntaactaacaaatcaggcacactatttgtcaaatatgttggggccaaacacaagggctcaaagacttatgtttgggtacccaaggtgcttggttctaatgtgaaaggacccaaga

SEQ ID NO: 21542 - DNA, 456 bp, Zea mays
agcttcttccccgcctccggccgccagctcgtcgcggtcaaattgagagccaccgctctcggagtctataaattgagcccccctcggcttcgccatgtactctactagctatcgcacccgcttgcatcccaaacctcccaccagagagcttgaatttggaatttcccccaaatccgatccccgccaccgtgaaaccaagtccactatggccagccgattctggtaacgctctgtccggttcaaaccttgtttaaatcttctcatagctcagtgatgctcgccaagccatcaatttgaatgtagatacctccaatcgtcgggaacacgctcatccgtccgcattgctctcggtcaccatggccagagccttgtagtcggtcgttcgtgcaattaggttaggggaaatactccttaggggtttaatcctgtgtatgtcgctcgggagcgccggtcact

SEQ ID NO: 21543 - DNA, 458 bp, Zea mays
agtctggacagtgttctgcgactgttcctggggaaccttctggcatgtgcggctactgtcttagttgcaccttccaaaggcagaacatgctatgcaatatagcttgatttcagctacacaaataatattgttgaatacgaagctttgcttttggagcttcgaaagttaaaggcaatggggataagaagggcggtccttaaaaccgatacccaagttatttctggtcatgttgataagagttgcacggccagagacctgaagtagagaaatatctggatatagttcgaacgttggaggcttctttcgaaggatttttgacagaatattccagaggtgaaaatgtcatgcatatttgctaccaatcggcggtcggggacccttaccttcgaagatatttgaacatacaacccttcgtgactctggaaagcatctactatttcagtccaggaaattgagac

SEQ ID NO: 21544 - DNA, 341 bp, Zea mays
agcttgccaagccctcggacccgaccgggacttacctgttgcccgagatcaaccttagcggagttcggtcttacgtcgacgcgcgaggaccgagctatccagtgagtgtccgtccaattactttcgctcatgtattctctggccttccgcggaccttcctgacccatttgattgaactacctcgccgtgatcaagccggtctactcgccgccgacgagcatccgcagctgcgcgcgtggaccgaccgactgcggacatctacgacagcgttccgtacaccgttgtgatccccgcgacctcgccttgatcctcgaccactatagcggagcaagctcgccgtc

SEQ ID NO: 21545 - DNA, 424 bp, Zea mays
  unsure (1)..(424): unsure at all n locations
agcttaccgactccggctcgggtcatatacgataggaagggaagaagaagaagacgaggcgcatcaaggagatcgtctactacgacgacagtgatgagtctacttctttccaaaaggacgacgaccacaacgactacgagcaaaggaaaccggttaattctaactnttcctttgactactctcgtattccgcaaagctcanattcacatttgctttccattccactcggcaagcccccacactntgatggggaggactacggattntggagccacaaaatgcgtagtcacctattgtctctccatcctagtatatgggagattgtagatagtggaatgcactttaatagttcggatagtcctatattcattaatgagcaaatccataagaatgcacaagctactactgttcttctagcttcatt

SEQ ID NO: 21546 - DNA, 471 bp, Zea mays
  unsure (1)..(471): unsure at all n locations
gccttgtatggcatgagatgtanaacccatctgagttggtcacaagcatgggaaggagagatatttggacctgacttagtaactgaagctgaagaaaaagttagattcattaagaagaacttagaagctgctcaagccagacagaagagctatcatgagaaaagaataatgcctctatagtttgaagtaggagatcatgtgtatctcaaggtctcacccaccaaaattgtacaaagatttggaattaaaggcaagttagccccttgctatatcggaccttatgagatcatagaagcatgtggactagcatcttataagctaaagcttacacctgagatgtctatgatacataatggtntccatgtgtctcaactgaagaaatgtgtctaagtaccaacagaagttctaattgaaccagaaatggagatagaactagacctatcatacaaagagcaccctatcanaatcttg

SEQ ID NO: 21547 - DNA, 495 bp, Zea mays
agcttcacgaagaggaaccttcggctatcttatacatacagcttcagctgagaaccacttcttcccataagaccttcggcgacgaagcataaacccaacactgggagaaaaaggtttgccattttacaagctactcaagaaggtggataagtttcaatggacttcagaagcacaagaagctctagatgcactgaagaaattcttgacaacaccaccagtactaaaaccaccccggcgagctacgtcgactcaaccggccgaagatttgctattgtatatctcttgcacgactcacgtggtaagcaccgcgttggtagtcgagcaagtggaagaaggacatgcctatccagtacaacatcccgtctacttcatcagtgaagttctaggcccctcgaagaaaaagatcctcaagttcagaagctattatacgcagtacttctaactgcccgcaagttgcgtcactactttgacgaccacaaagtcatagtagtcact

SEQ ID NO: 21548 - DNA, 464 bp, Zea mays
  unsure (1)..(464): unsure at all n locations
atcctctgagtcacctgcggcatcaagctnttgtcagatcttgttnttaaaatcaattttgtggaatttcttgttcgttcctctacaaaaatgaatactggatactggagatgggtaactaacctggcattctgggtcaccaaatcttacattgtactcaataagcttaggcagcccagacttcttctcgatcataagcccagcatataatacaccaacaaacttgcaaccttcggttgacattcctttaacagtagggataattatactttccattacagtgcgtttgagctcatctgtcactattggagcaggggagtatgcacccataccaccggtatttgggccaacatcaccatcacacaactctttgtgatcctgtgctgattcaagaggtaaagcatttgtgccatctaccaatgcanagaaagaggcttcttcaccctctagaaattcttcgatga

SEQ ID NO: 21549 - DNA, 470 bp, Zea mays
  unsure (1)..(470): unsure at all n locations
tagcttgacgttgggccggaccactcataatgttgtcggtgaagtagacacaaccatacctagtcgctgacgaagaactccatgacacgatgctgtgcatcgtagtacggcttggcatatgcctgcgcctataggaggcagtcacagacctccgccaggaagagattatgctgacggagcatgtcgtcaacggtctatgtgcaagccgtgcccactacaaatggagcaatcatggacagntcccgaccgtagaccacctgaaacgacgtcacacattgggcggtgtggaaggacatgttgtagcactactccacccatggaagcagtccacacctaggtgcggngtcgatcttttgtgatgaggcgtacgtacatggtgatcagtctgtntgttgcctacaactagccgtcagtatgacggtgaaaggcggtgctcatgcgtatctagacgccagttagcttagacaaat

SEQ ID NO: 21550 - DNA, 399 bp, Zea mays
  unsure (1)..(399): unsure at all n locations
gcttggaataatgccgaagcttcctggttgtcatcaaaacagcatacagtaccttctccaattctgtataatttatctttgattgactaagaacttctgacacanagtatattggggcttgctttttgatttggccttcaagcttctcctgaacaagtgctgcacttaccgctgagtgcgaagctgctacatataacaacaaaggagcccctggcgttggcggagttagtgttgttagatctatcaagtattgcttcagctcttcgaaggctctctgctggactggtccccattgaaaaacttccgctaacttcagcactttgaaaaatggtaaatttctctctgctgatctaaatatgaatctgctgagagatgccagacttgctgtcaatctttgag

SEQ ID NO: 21551 - DNA, 447 bp, Zea mays
  unsure (1)..(447): unsure at all n locations
agcttagcagatcacagtgcacaagagctaaataatgagtgagcaagagtggttggccagaaagcgtgcaaaataagtttacggtatggccgtatttatacgcttgatgcgttgaaagttgaaagaccccacttgtcattgaatgttgctattctagcaaagggaaggtgttttttcggaccttcggcataaagccttcgttcatatcgcaatctgaatttattatttcaaacaaattaatattgcgaggggctactgttgggggccttcgtcctccgaaggtcctcanaaacatgatttgacaatgttttccaagtggattatgtgaacaggtaccttcggactcagaattacgaacatgaagtgcggtcaggacgaagcctgaaccagacgaaggacgggctgattaccaagctccacgaaggatggtgcacagccgaagctgtg

SEQ ID NO: 21552 - DNA, 437 bp, Zea mays
agcttgacttggagcgagatcagcacgacaaatagatattgcatactaacacaagcacaatgaacgaagaatcaaaactgtttttcaagttgatgaaacagcagattttggctcgccgttttggtagtaagcaatctgcatgatactgtacttgagttacctgttagtgagaccattactattcatctcaggttctttgtgcttgttagatacatttctttagagaccattctatttcaattccttcagagaccatacagaaaacaatggatgttgaagatctatgcgctctgttacttgtgtgttccattttctatttcatttccttcagagaccatacagtcagatgattaacttcagagacctttcacttccagaatctgctaataacatagctggtggtctttacatatgttatgttgatgtgatgcctgatg

SEQ ID NO: 21553 - DNA, 402 bp, Zea mays
  unsure (1)..(402): unsure at all n locations
agctntatcaaatggacgtgagaagtgcctttctcaatggaccaatcaaggaggaggtctatgttgagcaacctcctggctttgaagatagtgagtaccctaaccatgtttacaaactctctaaggcgctttatgggctcaagcaagccccaagagcatggtatgaatgcctaagatatctccttatcactaatggtttcaaagtcgaaaaggctgatcctactttatttactaaaactcttgacgatgatttgtttgtatgccaaatttatgttgatgatattatatttgggtctactaatgaatctacatgtgaagaatttagtaggatcatgacacagatattcgagatgtctatgatgggggagttgaaatacttcatatgatttcaagtgaagcaac

SEQ ID NO: 21554 - DNA, 486 bp, Zea mays
  unsure (1)..(486): unsure at all n locations
agcttgtccgccagctctaccggacgacgagcgccctctaaaatttagcggacgttttagcgttcgttgttggagccttacaggacgacgcgaaccggtaaatatagctgacaggagcgtttagcgcgtgctgctggaggcagccttaggctatccgcaactgttacccctaaatttttccccctatatcacttttcccccctattttttcatctcccgcagcggttcccctaaatactccccctataccccactacaactataaaatatcattntctacatcaactataaattttttatctactaacaattactcgtagccccacagcacagtgttgtaggggatgaacagtgatcccctagattgagggggggagagaggaggaccgcacggtagagggctctgcanggggcagcgctgcgcgtangggtggatatcgagccagcttggctcgttatggcttcggctcgtatgggctcgtacta

SEQ ID NO: 21555 - DNA, 450 bp, Zea mays
  unsure (1)..(450): unsure at all n locations
agcttaagacttatacgttaaagtccaagccgttattgaaaagattgtgaaattatctgaagccataaaaacctttcggagatatgcttcagcttcgcgttccgaagctcctcacgactgcgaagaaattttcactcagctggggtagcttccgaagaagccaaatatgcacctgatgatcttcccggagcactagaatgggtggagagagaaatcgatgcctttgacaaagtaatgtaaggtcaaggtgatttatgcgctctagttgcctcttgatgaactgctgccgccttccagaaggctgggtgtactcatttaanatctattaataaacctacctgtgacatctcttctgtcgacctgactagaatgtccatcgaagctataagtgtgggcaacagattctgtacccaaatctcgactaagggtggaagagaaattgatggtgac

SEQ ID NO: 21556 - DNA, 482 bp, Zea mays
  unsure (1)..(482): unsure at all n locations
agcttgtggacccgtagcctatcaagtggaattgccccctcacatgtcagcagttcacaatgtgttccatgtatctcagctgcggaaatgtgttcgtctacccactgaagtgctaccggaaccggacattgagatagaaccagacttatcctaccaagagtaccccgtcaaggtattagatcaaaaagagagatcaactcgggcaaggtcagtcagaatgtataaagttcagtggagtcaccattcagcagaagaagccacatgggagactgaggattttctacgctctcgcttccccgactttctgcccaaaggagtcggtacgtaaccccaggaccccacccccacctgccctttgaattcaattataagaaaaacttagataacaaggatagtctaagttgtggatttaacttaagaaagggcttcttctgaagttgcaaagagaatgacattcgaagagcnagtaataagagaaactg

SEQ ID NO: 21557 - DNA, 482 bp, Zea mays
  unsure (1)..(482): unsure at all n locations
agcttgtggtagtggtatgctatgtaatgtaatggcttgatgtaatgaataaaataactagttaaaaaaatggcatgtgcataatagcgactctcttcccatggcagatggcttcggatagaaccacgcctaccgcctccgggattggagcaagacttcctctangagctgagggagaggctggcggagaagggggtgagacccacctccccgcacctccagaactaccactagacctagcccaaattctggccaatcaaaccagactcattgaagtcctcactcgaagcctggagaaccagcgcccaggcggtggaaggccccaggacaggatgggagaattcctgagactgaagccgcccacgttcgcggggtccagcaatcccctcgatgcagatgactggcttcgcacaatcaagagggaagtggacgccatcgctttgtctgagaatcaacgtattcagctagcagctcatcaactt

SEQ ID NO: 21558 - DNA, 478 bp, Zea mays
  unsure (1)..(478): unsure at all n locations
agcacctgcagctgaagctttaagaaaggtgggccaacatgaccatttatgatcattacacttacataagccgcaatatactacctccgttcacaaatatatggcactatttntttccaaaactttaatcacttgttttaagtccagcacatattatcttaagtaataaaattaatcaccataaaataaattataactcattttttaataacataagtgggcaaagttttggtgtcatatatttatgaactgagggagtaatttcttgagctatctcaaaacatgacaccaattgctcctttattttcatgccgccaagatgtttaacttatcagaaagcatgaataacactatttacgggacaaagagcatcgctcaatatggcaatgaatttatggcaagtgcatatggggctcttacngtggtctacgatgaaatcaatattagcatcaatcagcaaccagtttttaactaaaca

SEQ ID NO: 21559 - DNA, 377 bp, Zea mays
agcttcctcctgcacgccgagactacgcagatctccggtgtcagggcgcaagaagattgctccagcagaagatattagtagctacattcgctatgttccttggcccacatgtcgaggctcagtactcttgtacatgtccccctttaactataaaaggggaggcatacaacgttacaacacaagctcaatctgggaggcttagacccaagtcatccaagacaactcaagcaatacaacacacagtggagtagggtattacgctccgacggcccgaaccactctaaactcttgcgtgttcttgtgtttattcctacatctcgtaacaagcaaaacgcttaggcccctcctcatcttaagaattagggcgggtgcattct

SEQ ID NO: 21560 - DNA, 442 bp, Zea mays
  unsure (1)..(442): unsure at all n locations
gcttgcctcacgtttgcggaagaaaacgcttgtctcagtttatctctttcatagatccaactatctctacccctctgaatttgggtctactcagactgtcttcaacgatccactccatctctcaccccaccatacgtagccacgtaaggggctttagagggaaattacccttcaacagcttctcaaggcttccaatatacggaagagataaaacttctctacatatgaggtgagcattattctttgcctatactttaattacatcatnttttgtgatattaattctatttaagctatataatctgacaacaatgtgtattataataatacaaatagtatatgactctcaaaaaataaaacaaatatatatagatagtatcttttatatacgacaaatatgggagaaaatggtgagtcggtctcttacgactatatatgtatg

SEQ ID NO: 21561 - DNA, 403 bp, Zea mays
  unsure (1)..(403): unsure at all n locations
agcttctccttgtcgtcatcaaccttgacatataaccactccgacttccagcctgctgcccatttacttcggtagctgatcacaggaaactttgtagttttctgataagcaaaattatagcaaccaaaattgtcatgtaatccatcctttctagccttcgtctgatagtgcagctcgtgaactcggcaaaagctgtctgcaaacggctccaccgcttggcttcggagtgcccagatataaacactaagcctaacgatagcgttaggggtcagctggtgaaagtagataccgaacctcttcagtacctctgcaataatcccatgtagggggaatcttaatccagcctttagaaagcttttgaaaataacaatttcatccttctncggctgtggggtagtctctt

SEQ ID NO: 21562 - DNA, 471 bp, Zea mays
  unsure (1)..(471): unsure at all n locations
agcttatgaagattcttcatcccaacatgggctattcggcggggccagagccaacccatgttagtcttagcaattaaacatgtgtcgagctcagctctatcaaaatctactaagtatagctgaccctctaacacacccttaaatgctattgaatcatcacttcttctaaagacagtgacacctatatcagtaaaaagacagttgtagcccatttgacataattgggaaacagaaagcaagttgtaatctaatgaatcaacaagaaaaacatttgaaatggaatggtcaggtgaaatagcaattttacccaaacctttgaccaacccttgatttccatccncgaatgtgatagctcgttggggatctttngttttctcatatgaggagaacatccttttcttcccggtcatgtgggttgtgcacccgctgtcgagtattcaacttgagccctcggatgcatatacctacaaa

SEQ ID NO: 21563 - DNA, 479 bp, Zea mays
  unsure (1)..(479): unsure at all n locations
agctntgttcccgcacanttcgtttcgtggttagtgatttgagctctattcgagtcaaggactcctcgtgttgtcatttgagctcaagtcttctcttgtgtgcgtgggtgcgctacgatttgtgtcttgtgtgtgttgctcatcccaaccttacttcgtgctttcattgtgatctttgttgtaagggcgagagactccaatcttgtggagattcctcacaaacgggaataatcaactaaaggaaaaatcgtggtattcaagttgatcatcggattacttgaaaggggttgagtgcaacactcgtccattgggacgccacaacgtggaagtaggcaagtgttacttggccgaaccacgggataaaatcgtgtgtctcttgtgattgatttctctatgattgttcttatccacaagaactcgctcctcaactacttagttgcactaacacttctatnacctaagtttgtagctatttagtg

SEQ ID NO: 21564 - DNA, 462 bp, Zea mays
  unsure (1)..(462): unsure at all n locations
agctngaaattgcacggtatgtggcgaaatgtgacacttgtagacatgtcaaagccatacacatgaacactgctggtccactgcaatctttgcccatcccgacttggaaatggaaggacattagcatggacttcattgtgggattacccaggtaggcaaaaggatttgattctatctgggttatcattgatcgacttacaaagatcgcccactttcttcttagtaaaagtaaagtatccagtaatcacatatgcggaactttacattgctcgtattcttagtctgcacggngtcccaaaaacaattgtgtcagaccatggaccacaatttgtatccaaattctgggaagaactccacaaatctctgggtactaagttgctccatagtacggcctatcacccncaaacaagtggacagactgagagggtaaatcanatacttgaggacatgctgcgagcatgt

SEQ ID NO: 21565 - DNA, 466 bp, Zea mays
  unsure (1)..(466): unsure at all n locations
tagcttggtgccgatggagaagcanaaatccttgtaatcttggctgtcaaactgcttgccgttgtcaactgttagctcggacggtactccgaagcggcaaacaatgttttgccagaagaatttttgggcagtctttgatgttattgtagaaacagccctcgcttcgatccatttggtgaagtattcgacggctacgaaggcgaacttgaggttcccctgagcggtgggcaggggccctacgatgtccaggccccagcgctggagaggccatgtatggacaatcagctttgtatactgcgaggggctgcctgaccgaggagaatacttctggcaggcttcgcaggaccttgtgacccgatttgcgacgcagatcattggcgggccagtaaatcctngacggatcaccttggcagctatggcccttggtcctgcgtgcgagccgcacgtgccactgtggacttcacgt

SEQ ID NO: 21566 - DNA, 458 bp, Zea mays
  unsure (1)..(458): unsure at all n locations
agcttgctnttgaaaaaatgtaagtttatgtaattctcttccgcatttctttatctccgatgttctgtaatgtctgcaagacgggtgagacattcctggtaaggtaaagaaagatatcgagcttgtcaagtagttcaggggcacctacagggttgtctgaggtccgttggacaaggacaactgtaggtgggcctaattacttgggaggttccgtcacactcaagaattcctaatggaaggtacgtaagcaaaagtatcaaggcaattcgggcagaaaattttcaaataggccccatcaaagaattccctttcggttttctgcaaacataccacatcacaacaagattctcgaattgacatctaatggattccatttggtattggagttaaccctctatattgggcttaatctgaccatttaacagtcattaatgaggtatcatagatatctggaataa

SEQ ID NO: 21567 - DNA, 453 bp, Zea mays
  unsure (1)..(453): unsure at all n locations
agcttctaaagggagagcacattntaggattaacaaatgttcattttgagaaagacaggatttgtagcgcatgccaagcagggaagcaagttggcactcatcatccacataagaacataatgacgaccgacaggccactggagctcctacacatggatttattcggcccgattgcttacataagcatcggctggagtaagtattatctagttattgtggatgattattctcgcttcacttgggtattctttttgcaggaaaaatctcaaacccaagagaccttaaagggattcttgagacgggctcaaaatgagttcggcttaatgatcaagaaaataagaagcgacaacgggacggagttcaagaattctcaaattgaaggcttccttgaggaggagggcatcaagcatgagttctcttctccctacacgccacaacacaatggtgtagtgg

SEQ ID NO: 21568 - DNA, 483 bp, Zea mays
  unsure (1)..(483): unsure at all n locations
agcttcacatctttagactaactcggctgtgtcgttctttgccgttggccagtagaagccagacctgaagaccttcccaaccagagtcctagatgctgcgtgtatcccgcattgtccagcgtggacctcatctagaagttgcttcccagtagccgaaagaatgcatttcatgaggactcctgtcgtgccccttctgtatagtgtttccctaatgagagtgtagtgagctgactgccttgcaatgcgctctgctacatttttctcatccggctcttcctcattatgtatgtatataatgattggttccctccagtcatcagaatctgactctggttggctcataatattgcactcttctgcccgatctaatgagatgctcgggtgcagtacttctnggacgaagactccaggcgggacctgagtacaactggatcctagcgttgacaatgcatcagctgccgcgttgtgatctctcttcacatg

SEQ ID NO: 21569 - DNA, 429 bp, Zea mays
  unsure (1)..(429): unsure at all n locations
agcttcagcgtccttgtttatttcttcttcgtgagcccctagcgtccaatcaacgatgaagtctgctaacgcctgngactgaattgaggatctatgcacatagtcgatggtgaattcattgagttatgcagcctatttcccaatccttccagtagcttctctatttctcataatgtccttcagaggctgtgacgaaggaacaattatgcgatatgcttgaaagtagtgccgaagttttctggaagcaattaacacagcatatatgcaccttctccaattctgtataattttctttgatagacttagaacttcagagacgaagtacactggagcttgctttntgacttggccatctagcttttcttgtacaagtgcggcacttactgcanaatgtgaagctgcaacatataagagcaatggagcccctga

SEQ ID NO: 21570 - DNA, 451 bp, Zea mays
  unsure (1)..(451): unsure at all n locations
agcttgcacacatagctcatttanataccttttatcatatctctcttatatgctatgactaatgtgttttcaagtctatttcaaacgaagtcataggtatattgtaagggaattggagtcttctgcgaatacaaaggcttccactccgtaactcatgcttcgccatcactccgagcaactctctattccttgtggagaaatgagcatccaagaataggaccttatcctcgggggagagagtaaaagctcaaaagcaaaaggaccggacttcatctttggtataatcttaactcgttacttatgaccaaaggggaagagattacttcgagggctctaatgattncgtttntggcgattcatgccacaaaggcggagagatgagcccaaagcataaggaccgcaccatcaccacctaattctaaaacttagtgctttcaagagtcttatattt

SEQ ID NO: 21571 - DNA, 407 bp, Zea mays
  unsure (1)..(407): unsure at all n locations
agcttgcccgagctgggcctcggtgcgagtctagggtgcgcccgttgcttgaggaggccctcgggcgaggcgtgaattcgtctgggacttctgtttccacccgaggctgggctcgggcgaggcgagatcgcgtcccttgagtagacgaagccttaacctgaatcgtgcccatcagtctctgcagcttgcgctgatggtggttaccagcccgtgttatgagtgttgggggtacccctaattacggtacccgacagtagccctcgagcctcaaagggagtgttggtactcgcttggaggctntgtcgcactttntggcaaggggaccggcctttctcggttacactttgttctggtgggtgtgcgcgagcgcacccgctgggtgtagcccccgaggcctcggaggagtg

SEQ ID NO: 21572 - DNA, 411 bp, Zea mays
  unsure (1)..(411): unsure at all n locations
agcttccgtcaagctccagatgggcagtctccgacaacctctccaacgcgggacggtgctccgtttcgggagtcttgagttcatgtccctcgacggcagctacgacatgatactccttccaccgccgcgcgacaacgacaatggcgaccgacagcccgcccgccggcggcggaatcgacgacgtcttccccgcgtggcggaagaacaacattcgagctcgccccgtcctctcccccgccgacggaggaggaggcggngcaaccaaggccaagcaggaggccgcgcctcgtcggctgtccagcgagtcgacgtccctaccgccccaacggggagagcgttgggcgtcgacctcgcgtntgagacgaaggcgagcaccgtctcctcgcgacacgccaatcccgagcaagtgga

SEQ ID NO: 21573 - DNA, 494 bp, Zea mays
  unsure (1)..(494): unsure at all n locations
ttaagtcacctgctgcatcaagctttcttgttgcgtgcaaatacatgcttttgcatgggcagcgcctgcttgcgtagagatacccatctgctgcccctcgttttgtatctattcaacctgtatgtgatgagaaaccaaccaaacgtcacctgctttgagactacgcggctgcaggtgcacggtcgtgtcctccgaccaaacagacaatatacttcttgcacatttccttgntcattaatattaaatttaaatacttgagcaatcgtttcataagtttctctttgttatgaaacgattgcatagaggtttcacactttgagaaacgatctaaccacaaaaattaaattttgtgaaacgattgcacaaaaaacctctatgtatacgatgttcattgagcaattgtttcacactatgaaaaagatgatctgtcacactcgcgtgcactggcacagtggcaaactggcacggcagatagcaccataaccgggacaacc

SEQ ID NO: 21574 - DNA, 387 bp, Zea mays
  unsure (1)..(387): unsure at all n locations
agcctttgaagaatactccatatgaattgctcattggtagaaagccaaatatctcatattntagggtattcggttgcaaatgttatattttgagaaagggaacctggctttctaaatttgagaagaaatgtgatgagggttttcttcttggatattcatcaaatagtaaagcctatagagtcttcaacaaaactcatggtattattgaagaagcatatgatgttgaattcgatgaaacaaatgggtctcaagatgagagtgataatctcgatgatgttgggggaacctcaattaataaatgcaatgataacaatggccatttgttgaattaaaccaaaggaaaatgatgatgaaaatagtgtgggtgtcatttcttcatcctcaact

SEQ ID NO: 21575 - DNA, 456 bp, Zea mays
agcttggtgccaatggagaagcagaaatccttgaagtcttggctgtcaaactgcttgtcgttgtcaactatgagttcagacggtactccgaagcggcaaacaattgtttgccaaaagaatttatgtgcagtctttgatgttactatggaaacagccctcgcctcgatccatttggtaaaatactcgacagcgacgaaggtgaacttgaggttcccctgagccgtgggcaggggcccgacgatgtccaggccccagcgctggagaggccatgtgtgggcgatcagttttgtgaattgcgaagggctgcctgatcgaagagaaaacttctggcaggcttcgcaggaccttgtgacccgatttgcggcacagatcattgtgggccagtagaaaccttggcggatcacctttgcggctagggcccttggcctacgtgagagccgcagtaccactgtggac

SEQ ID NO: 21576 - DNA, 407 bp, Zea mays
  unsure (1)..(407): unsure at all n locations
agcttgttcacctctatatgctgcgcgcaattatcagagtatacaacaaanattagatcatattagccacaaaacacgatggggctgttcaatcgatttcagaaaataaaataaaaaaaatcccatgcgggcggcacaagagaagggcgagaaaccaaagccgtgattcaccttagtgatcttgagcttgttgaacacattctgcaggaccttgtagttctggatcatgtcgtactccgtcttggcgtcgaagttgaccttgtgcatcggcacggcgccgggatgcgccgcgttcatcagttggcacgcaaccgcgcctgacgccgcctgagaccacgaagtctaccactggtttcagggactcgcacagaacccaaccgcttagcccgtccgcacgaacagggaac

SEQ ID NO: 21577 - DNA, 482 bp, Zea mays
  unsure (1)..(482): unsure at all n locations
agctngtactcttgtccgtaattgattcattctaagatgcttctggtaagagtacctataacacttagaaatagacaagaaaacatatattatcttggtgttttgaggaccttcggaagaagagggcccccaacaattgcatacacccagttgttgcaactttgatcgtgatttgagaagcactcaatttgaacttgttctagaanaccccataaataacccaatcaaaacaagatttctgatctgcgcatggatttttgagttgctgatgttcatacttcatgattagacatctttccctctatgcaaacttgtggtaaaagttgaggcgatattgcctcatttttagtgcccggcattngccgccatgtgtgtggcactaccgcaccctgcactaccggactttagttcagcactaccgcgcccactgctctgtgtctntgcttgatctttacaaatagaggngttgttctctctagtgt

SEQ ID NO: 21578 - DNA, 346 bp, Zea mays
gcttatcaagttagctttctaacgcaatcagttccactttatttggagattcctagaataaggtattatcaaaatactgaaggctgcacagaactcaaacagccacacggaattcagttctgcagatctcccgaagaggctccttcacattagcacgtgaaattacttttgtttcgtgtttatacctcgctaaggctggttgttactagtataaataccccctatgtctatgatgtaaggcagcttatgataatctaaaacagaacccctttgttcagctgtgtgctaacaaatattgagagtgatctctacccctctgctcttgtgaattccttcgcgggattgc

SEQ ID NO: 21579 - DNA, 428 bp, Zea mays
  unsure (1)..(428): unsure at all n locations
agcttgngcgactctatgcattccgtggcggcatcatggtggcgcagctacaaaagaagtgaggggctgcgctcggcaatgaggaggccacattcttcggcaggagggtggcgcgtgatattggcggtgtcaggcgtgattagagacgactgtgcttggcagtggttgcgcacgtgctgtcaatacagcgttggcctgtcggttatggtctgtgcacaggggaggtggctcgtgatggcccgggctggcgctcggaggtggcgacaacagctgagtgttcggcgacaactggctttggtgactccgggtgccaaggtcgacagcgacaacttggatcggctctggtgcatgacagtgtgatgcacgcgaccaggtgttgtccagttccgtgtgcctaaccggagggggtggcgtacgacgcaactatg

SEQ ID NO: 21580 - DNA, 480 bp, Zea mays
  unsure (1)..(480): unsure at all n locations
agcttcngcatctttacttgcttcttctttctgagcccctggcgtccagntagcaatgaagtctgctaacgcctgggactgaatcgaagatctatgcacataatcaatgcagaactcattgagttccgcaacccatattccaacccttccagtagcttctctatttctcataatatccttcaatggttgtgaggaagggacaattatattgtatgcttgaaaataatgccgaagcttcctggcagccatcaaaacagcatacagcaccttctccaattctgtataatttttctttgataaactaaaaacttcggagacgaagtatattggggcttgctttttgacttgcccttcaagcttctcttggacaagtgccgcacttaccgctgagtgcgaagctgccacatataacaacagaggagctcctggcgttggtggagttaatgtcgntaggtctatccaatactgctncagctcgtc

SEQ ID NO: 21581 - DNA, 392 bp, Zea mays
  unsure (1)..(392): unsure at all n locations
agcttgttctcaaaatagaatttctggaggtttgctgactccagttgccggagcacaggaacatacgaggagttgagaaanttgtaatcctcatatgctttgacctcatagtgtgcaccttctaagtccattcggcgtattatcacctgcaaaaacatgtcatacactcttaaattcactcgcagcagaaactagtaatgcaagatgtgaatcaaattcactttggtaaaagaaaaggaagtacttaggcaaataggagccagtatatttcggtgattagcacaatagtactcaaatggggttgatcttcactcgccatctcttaaggaaaataaaaccttgaggcctttttcggctgcatggggattagagacgattganggagataaata

SEQ ID NO: 21582 - DNA, 397 bp, Zea mays
  unsure (1)..(397): unsure at all n locations
agcttatgaagcagaccttcantcttgtaaccttctatagcatattgagcataaattgggaatatatagcgaagtaagcgaatgactaccttcctggtgtacgagtcaagtaaagggtgcttaacacctttgaagcttgccttacaaatatccgtgatcaacttgtattcaatggaatgcatgcaaccaattctgatagtattcaccatagctgaccctatcggatgcataactgaggggggtcgatattggaatatgttcaatagaaagattgctatgatactgcccagcaattggcttccctttaaccaatttggaatgtaccctaataaatttggaaacatgtaacaccctgcaagtataatacacttggcatatatgcacattaatgtgccaa

SEQ ID NO: 21583 - DNA, 335 bp, Zea mays
agcttcacggggtgctaacgaatctacttctgctttgttatctaaaaagactcaccgtggagctcggtctacgtacgccggcgatctggtgaaatccgacgacgttgatccggtgtctctggcgaggtagagcttgatttctggctctgggagcttcaccgatgcacgtagaggctctctctagggtctgacggtgcatggaatggctatggtggtcggttctctggcggccactggcacaccgtgcgcaaagcaatcgtcggagaacttgcgctccgacgaggttgatagtgagcggcggcgtacggtcgaggcctctgtcggctttataggcg

SEQ ID NO: 21584 - DNA, 470 bp, Zea mays
  unsure (1)..(470): unsure at all n locations
tatctcgttaaaatccgggataaatctgctgttataaccatcctgtccaaggaaacttcggacttgatgtacagttggntgtgcggatccactctaaaatattcttgaccttgctgggatcaacagctatccccttggtagacaatacgtgccccataaattagatctcttctagccaaaacacgtactttctgaatttagcatatatgtgatgttcccttatgtgcgtgaatacgattcgcagatgccgagcatgctcctcttcattcttggaataaatcaagatatcattaatgaagaccactatatatttgaccaacttgggcatgaataccgatgtcatcagatatgtgacgtgagcatgagcatttgttaatcccaaagacatactctgacattctaatatatcataccgcgtatgagatgccgatctgggtatattatctggtcggatacggatctgttatatc

SEQ ID NO: 21585 - DNA, 203 bp, Zea mays
agcctttgtggaactgggagaggatctgatctcttgggtgtgtctggtattgaatgcctagctcttgtaagtggttggaagttggaaaacttggatgacttgaatgtggggtggttggtgtatcaatatgccctaccaccaaaccttccagtaggtgtaggctgttgtctcatggcctttcctatccatttagaatttccttc

SEQ ID NO: 21586 - DNA, 362 bp, Zea mays
  unsure (1)..(362): unsure at all n locations
agcttccactgcatccncatcggtatcaaatatttcttaccaactcatgtacttacattcatgtctntcttgtagaaggcctcagatttctttgtttttggcgcttaataccaaagggggagaaattaataggctaaagcaaaaggaccccaccattttcccgttttctgaaaactttttatcttccaaattggtactattgcatttgtgaaaaccctcttgacagctaagaggagaataactatntatgccataagggagaacttattcagggggagtttttacttggccaaaggaaacatttgaaaaaggtgggaatctttcaaacttaanaatgctttcgaaaatcctattcttacacc

SEQ ID NO: 21587 - DNA, 414 bp, Zea mays
  unsure (1)..(414): unsure at all n locations
agctgctntagttatctggcatatgtttgtttaacagattaagtattggcctagttcagagcatgagaaatagaagtcctaattcacccccactcttaggcgtcatcgtttcctacaactggtatttgatccaggtttagctctttaggaacctttttggcttaaccaccattaagctgacgctattaagaggaaatggatgaatacccataggccaccaacttcgatggcactaacttcccatattatagtgctagaatggcttgctacctagaagttgttgatctaggtgtttggagagtcactcgtgactttatgataccacctcataatctcgagaagctcatcgcgagagaagaaaaagaaattcatttaatgctagagccaaaaagtgcttgtaataatctcttacca

SEQ ID NO: 21588 - DNA, 423 bp, Zea mays
  unsure (1)..(423): unsure at all n locations
agctnggaggcgtcgatggggagcctacttgacgtagactcttctttcttctcctccgtcgctttgaatgcgacgggttgcacctcgggtgtggaggtggtgcctcgctcgatgatatgtttggagcctttgatcatcaattcaaagctcacaaactttcctattacctcctcgggagacattagcttgtatctaggatcaccacgaattaattgaacttgtgtatgattaagaataacaagtgatcttagaataaccttgaccatttcatggtcatcccattttgtgcttcggaggttgcacacttgattcaccaagggcttgagccggttgtacatggcttggggctcctcctctaggatgagcatgaatcgaccgagctctccctcaatcgtttgccgcttggtgagcttggtcacctca

SEQ ID NO: 21589 - DNA, 454 bp, Zea mays
  unsure (1)..(454): unsure at all n locations
agctttgactgtcttatgcggntagcanatataaatctaatttctaaattcaacttggtcaagaagtctaagtgccatgtgtgtgttgaatcacaacaaccccgcaagcctcacaaggctgctgaggcgaggagattggcacctctagaacttgttcattctgatctatgcgagatgaatggaatcttgaccaaaggtggtaaaagatactttctcacttttatagatgactccactagattttgctatgtgtatctcttaaaaacaaaagatgaagcgttcaattattntaaggcctataaagctgaagttgagaaccaacttgagaggaaaataaaacaagtaatgtctgatcgaggtggagaatatctctctaatgtgttcgatgagttcttgcgggaacattggattattcatgagaggacaccgncattctcaccacaatccaatggga

SEQ ID NO: 21590 - DNA, 484 bp, Zea mays
  unsure (1)..(484): unsure at all n locations
catcaggcttcagaccttggcttctcacggcccacacgaagatattcagccttatgattgcctcggcggtaagatggtgaagatagacttcgaagattttcagcacctccacgacgaacctgctcaagggaaatcgcagcccagctttcaaaaagcttcggtacactacgacttcattctcttcagggtgtggacaagtcttctccccttcgtcggccctcacaacggacaaatcccggaaataccttcctctcatgttgacaagatgattctctttgatagttgatttaccataaactgaatggcttggtcgccagggacgatcttcggagtcttcaccaccactgtccacatcataacggtcactgtcaccagtatcttcagacaaaccttccacaatctccttggtgatattttcttgatttgtcttcgacatcgctataagaaaccccatgttnttctcttcgcgagactcagcttcatc

SEQ ID NO: 21591 - DNA, 490 bp, Zea mays
  unsure (1)..(490): unsure at all n locations
agcttcaaagatgtacctcactttgtataatatgtttccaacttgtttcagctcttcacacacgagntttctcgtttccaccgttgttcgcgggtttcaggtgttttttggggttctgaagctattgagcgctagacatcgttaaagaaccattaagaaaactaggatgtatcatggttgagataaaaatctctagcgagtttttcttccaaacaaagagttctttgtgtctactatgatcatcaacacaaatgatcatgggtttaggctatgattgcaaagttaattaattggcctagcacatcaaatatgtctatctgatcactcgactcatatttagggtctggttggttcaactggtaattactaaaaatccgactctgaccataagttctgagaaagttgaagcgagttgacaatagtaagtaattagttaacacaactgttgaatatgatagcttactaaacatgaatgataaaatttgagtat

SEQ ID NO: 21592 - DNA, 358 bp, Zea mays
ggcctttgaatctggttcttggcctcttttgattgaaggcatgaagaaactgggttttacgccaatttggagagctttgatatgtgggctactggctacctcctctacacaagattctattgaatgggtttccaggttggcatattaagcatcggaggggacttcgtcaaggagaccccctttcacccatgttggttattttaagtatgggatgccttatcttcatgtttacaaaggtagagaatgaatggttgcttcaacaactttctagtagagagagctccatcgagtttctatgtacgctgatgacgtggttctttcattggtgtccacaccaaccgacatagatcttactctt

SEQ ID NO: 21593 - DNA, 456 bp, Zea mays
  unsure (1)..(456): unsure at all n locations
atcttctaaagggagagcacatattgggacttaccaatgttcagtttgagaaanaataggatttgtagtgcatgtcaagcaggaaagctagtttgtacccaccattcacacaagaacatcatgacgatcgacaggccgcttgagctactctacatggatttattcggcccgatagcttacataatcatcggcgggagtaagtattgtattcgaattgtggatgactattctcgcttacatgggtattcttgtgcacgaaaatctcaaacccaagaaaccttgataggattcttgagacgggctcaaaatgatgttggattaacaaccaaaaatattataagcgacaatgggatggagttaagaactctcagattgatgcttccttgaagaggagggcatcangcatgagttttcttcttcctacacgccacaacataatggtgtagtggagaggaa

SEQ ID NO: 21594 - DNA, 393 bp, Zea mays
  unsure (1)..(393): unsure at all n locations
agcttgtcactacgacgggtccattctacccctacgtcctctntatcgggggaagagtggaatcaaccctcatctccaacgatgaaccaaccgcgccgggagaagaacctcttcagcgggaatctcgccgacggaggaatcgacgccgaaatattcggcgacatcacaaagccggagagcgggacccagcgcagcctgtatcacgagatgagatctcagagatgggagaaaccctagaagaacgggtcttcagggaaagaaggaattcccgacgacgtgatcgtcggcaagctcaagagcaggccgaacaggaggcgagacaacgccgagagaaccctcttcttggacgaaacctgaaccccgacttcgcctgagccatgaacacaccgagtg

SEQ ID NO: 21595 - DNA, 457 bp, Zea mays
  unsure (1)..(457): unsure at all n locations
agcttgaaaatgagctcacacactttcatgatgatcacaacanaattgcaaaggaacgccaatcttcatggttagcctaccaaattctttgattttttatggtgtagcttcaagtcctttggcccaagttttcctccactatcaatatgtttttaattctcaatacacttattaacaagttttgtgcagatctgaataccaaatgctgaagcagagattggatgaaatagaaacacaactacgggagcttaaagctgacaaacatgaaagtgagcgtgatgctcggttaaaagaaaccgttggacgtctaaagcggctattccctggagtccatggccgcatgcttgaactttgcaggccctcgcagaagaaatataaccttgctgttactggtgccatgggaaagatcatggatgcagntgtagtggaagagagaacactggacaggaatgcatta

SEQ ID NO: 21596 - DNA, 424 bp, Zea mays
  unsure (1)..(424): unsure at all n locations
agctttgaacgtactaagcacatgccgngataaatggtaaccggtaaacctagtacctgagtgaagctgggcacggactntatccctcatgcgacctgagactgggtctcccatgctagctatggtgggtacaagtgcggtcactgcacggcggcagccggggtcagtggagcattgtatgcaaaggcggtgaggcctggacgcgaacggtgaatcgatggggacggttgtcatgtgtggggtcggagtaccctgacatgccgtgtgtttaggtttaccttgcaaggttaaactcgatttgaatcgtctgcttctcgcagctaatgagactgcttgaccccttgtactgcatcgagtaagaagtgaaatgacggtacatgagacaatattgtgatngaactaaatgcttgtcaccatgtatgct

SEQ ID NO: 21597 - DNA, 384 bp, Zea mays
  unsure (1)..(384): unsure at all n locations
ggacctcaagtcacctgggctgcagcttgtaaggttcttcatccacacatgtgcttagctgcgatgccacagccagcccatgctagtcttagctattaagcatgcatctagaccggcctcttcttttgcaaaatcaactaaataaagtttgccggctaatacacccttaaaagctagtgaaccatcacttcttctaaagacagacacatctacatttgtaaatagacagttatatcccatatgacataattgactaacagatagcaaattatatccaagactctccactaaaaacacattagagatagaatgctcattggagattgcaattttacctagcccttntaccttgccttgattcccatcaccgaatataattgaatc

SEQ ID NO: 21598 - DNA, 468 bp, Zea mays
  unsure (1)..(468): unsure at all n locations
agcttaatttaagattccgttatgctaattgatttatgtatttaatcgngtatctcgcgcgatgttgaacaacttaaagtgattaggtttccattagtgcatataacagaattcttttgttaagaaccaattgtaattgatcgttagtgcataagatttaaccccctgcgagaccctttcccgtttctttctaaccataacaaatgcgatatcgaatgtcatacttgatgcatattcgctttatttgttcccttgtatggtgtactgttcttttgtattaaatgtggatggatgtatgtatgtctgccatcgcatagagaacgattcggtcgaagagccctaggaacccgcatgagaagcccctgagcagcagtcgtttggggaggcangtgtcctttgcctatctatgtcctaacattattaatcacctccgcatacacattatgcctacgatgactagttttgtat

SEQ ID NO: 21599 - DNA, 394 bp, Zea mays
  unsure (1)..(394): unsure at all n locations
agcttangaatgaactcaatatcctagattcttggaactctgattgacatcttgcacacattactcattatatacctttgatcatgacatgtctctttcatttggtacaaatgcatattgcttattcttcttgtgctacacgtaagactaatgtgtttccaagaatacttctatgcttagtcttatattgaaagggaaatggggtaatcagcaaaggcgaggctttcactatgactctgtcggtatcatttatcctttgccctactcatgaacttactttcatatctttcttataataggcctctggctttcttagacttttgtgcttaatgccaaagggggagaaagtttatgccaaatcaaaagaccgcaccaccaccctatttctaaaacc

SEQ ID NO: 21600 - DNA, 461 bp, Zea mays
agcttgtgaacagtacaagtacagaagagagaatgctgcttctgctgatcagccgaaacccatgcttcaggagaaaactttgataaggtttttattcaacaacaaagatgtttttgcttggtcgaccaatgatctctgtggtgtcaacagagacatcattgaacattcattcaatgtcgacccatccttcacgcctagaaagcaaaggctttggaaaatgtctgatgataaagccgaagtgctcggaatgaagtaaaaagacttctcggtgctggtgttatcagagaggtaaaatatccagagtggctagccaatactgttatggtgaagaaggccaatggcaaatggagaatgtgtattgacttcacggatctcaacaaggtctgtccaaaggacgaatttccattaccaagaatagaatctcttgtagatgcagcagcttcttcagaacttatgagtct

SEQ ID NO: 21601 - DNA, 466 bp, Zea mays
  unsure (1)..(466): unsure at all n locations
aagtcacctgcggcatgcaagctggtgaaggttcttcatccccacatgtgctattcggcgatggcacagccagcccatgctagtcttagcaattaagcatgcatctagaccggcctcttcttttgcaaaatcaactaagtaaagctttccgtctaatacacctttaaaagctaatgaaccatcacttcttctaaagacagacacatctatgtttgtgaataaacagttatatcccatattacacaattgactaacagatagtaaattatatcccagagactcaactaagaacacattagaaattgagtgttcatttgagattgcaattttacctaacccttttaccttgccttggtttccatcaccgaatattattgaatcttgggaatccttgttcttgacgtaggaggtgaacatcttcttctctcccgtcatatggttggtgcatncgctgtcgataatccag

SEQ ID NO: 21602 - DNA, 477 bp, Zea mays
  unsure (1)..(477): unsure at all n locations
agcttgtgtttacaagaaggaaagtgggagcgctgttgtatttctgatcttatatgtggatgacatattattgattgggaatgacattcctatgctggagtccgtcaaggcttcactgaaaaagagtttttctatgaaggacttatgggaagcagcatatattttgggcataaggatctatagagataggtcgaagaggcttataggattaagtcaagatacgtacattgacaaggttttgaaacggttcaacatggaacagtccaagaaagggttcatacctatgtcacatggtaaacaccttagccagatgcaatgtcctgcgacggctaatgagcgggagcgcatgtgtaaggtaccatacgcctcaagcaattggtcaatcatgtatgccatgataagtacatgcccagatgtttcatacgttgtatgtgctacgagtangtaccangctgatccaggtgatgaccactggac

SEQ ID NO: 21603 - DNA, 404 bp, Zea mays
  unsure (1)..(404): unsure at all n locations
accacacagtccctgcccacaccatatgttgcacctgccgactgtcccgccaacaaagcccgacgggtcgcactataattcacggactgtgccgagagcaaccctttctggtcatgactgccgaccgtccggccccaaggccccgacggtccgcaatacatatgaacaggacctgtctgaagtgaacaaacctctgacctcactggaagatcgcggacagtccgnccgcaaggcctggacagtccgcctacatgcccggacggttcgcacatcccataacttggcacttctcaacaagcttttgaaaggattnttaactcatgagatttgaagtgtgttgtcctcatgcaatgcaccactaatgcttatgaggactaactttcacagatcaagcattgcccctc

SEQ ID NO: 21604 - DNA, 428 bp, Zea mays
  unsure (1)..(428): unsure at all n locations
agcttgtagacttcaacacaagtgttcaagtgtgatggtccaaaggctgagttgatcatggttgtggacataacaagtaaaggagaacattgtttgtgtgagacttgttgtgcatatcttgaagacaactgatcaaaccaaggatggaggcaagaagagcttcgaggtaccgagtgcatgggagaaggtcaaagaggtcgaggaacccaaagccagaggtatagaagaagacttgcanagtcaaggttgatcgagttgagaagagctatggtgcatcgaggatcactaccttaggacatgacttacaaccaatgaggtaacatctatggttatgtggtgtaagtcataagcctcaagatcaagctcaagaaatgaacaaggtcactagaaggagtagtggtcatgtgcttggatatgaacaaggtcac

SEQ ID NO: 21605 - DNA, 198 bp, Zea mays
  unsure (1)..(198): unsure at all n locations
tagcttaaagccatggtcagaagcntatgcctattatttgccaattgtctcaagcctggctacgggcgcataggtgtcaccgaagaccaaaccttcgacttgggagtatctcctggccacaagtgtagctttgatccctgcactacaccatagctgatttcggttgttgctcaagacctctgtagtacctacaacatt

SEQ ID NO: 21606 - DNA, 154 bp, Zea mays
  unsure (1)..(154): unsure at all n locations
tattattaagcttttggtcaaaactataattaaatcagagctttaagggtctctatagtacatatgggggtttatattnttcttaagtangttacattatttagagtctgacaaaattagtttgaccaaatttggatgaattaaacagaagtta

SEQ ID NO: 21607 - DNA, 139 bp, Zea mays
  unsure (1)..(139): unsure at all n locations
cacgtgatatgttaactaacgtgcaattcgaanaagatagaccttgtgcagcatgtcaagcanggaaacaggtgggaggcactcatcacaccaaaaatgtgatgacaacatcaagacccctggagctggtacatatgga

SEQ ID NO: 21608 - DNA, 233 bp, Zea mays
  unsure (1)..(233): unsure at all n locations
tgacgagcaccagcgcctgcacctgaccgacctgctcgatgtacagatagggctggttatggatcacgatccacatgcctcttcacaaaaaattaaggcccttaaataatattagttcacaaatgaataanaatatggcccgaccctaatccgattcgatccttaaaatttgcagtgtaaaagttatagcccattaccacctctatgtacagaccagcgggttaaaaattaaa

SEQ ID NO: 21609 - DNA, 150 bp, Zea mays
gcttcttggcgagtgtgaagcgctctaaagattcctcatcgaaatcttgtgtccatcgtaactgcgtgctcaaggatagatatgacaggcgattctttcaaggctttaatttatgagctcatgcctaatgggaacctggataaatggata

SEQ ID NO: 21610 - DNA, 211 bp, Zea mays
tgccttcatagtttccatgacagcgtctagcacgctggccattctcctcctcttcggaggtgtggcgggatcctttgtcacctttggcagttctgcctctatcggtggactcagaatttctagcagcactattggtctttccaattctggctttttggccgcaccatctttggcttcggctgacccgactatatgcacctttggcactaca

SEQ ID NO: 21611 - DNA, 488 bp, Zea mays
  unsure (1)..(488): unsure at all n locations
actcagcctatagaaatgataagctcgatatagagctctggacaagactctaagaattcttgttttacctttctaaagaatattgtgagtttagaattagattttactctgcagactctgtccataccttggaatatatatttacctttccatcaacgtatgaagtgcttcgatgtgaacaacacttgtacttgcattggtttgctctgctgtggacgaaactagcattntttgagctgaaagcgaaaaacacacttccttcttttcgtacacaacgaagcataagaactggctccttttctcttttttggcaaagccttattttagaaggcgagcatcacgctgtgtctgatgtaatatgatgatatcctatgtatgctaatgaatgttatgaatgaaatgtatgatgtaatgtgtcgtgaaatgaatgtcaacacacatacaagcacaacatggcttcatcccctgggatgaccgagctctttgcg

SEQ ID NO: 21612 - DNA, 447 bp, Zea mays
  unsure (1)..(447): unsure at all n locations
agagatcaatgagtggcaccagcaggcctacggggtgccttttatgtctgcagacgatgaagatgaagaagtctatgttgatgatcgcgaggagtttgccccgccttcctaccatggggatccgggtcaatcattctctcaccctttcgcttcttacccgggtccgggacccattcctggtgaccctatgccatccggctctggttaccaccaccacccttcacctttctctgatcatcgtacatcttcggcatctgtttttctgcggctgatgagcacctcgggactcacttttgggaggacgcgngaggactttttccctgatacacttcatatctcatcgatcctncgtcatatcctctctgcggtactgatcttgctcctgctctcttcgttttgacctgtgccaaagggggacatcactttagtatgtctttcgtttttctt

SEQ ID NO: 21613 - DNA, 304 bp, Zea mays
tcacaatttcatggcgcaactagccctgccctcaatttataggctccgagagcggtggtcctcaatttgaccgcgatgcgccgtcggccggagaggaggaagaagcactggctcgcgggtacgtggccaacgacgtggcattaactccggtgagccacggagggttcagagaagatcatggcgacacggtgaaagtgtagagccacgcggcactcggtcgagaggcggcggtcgacggcgagcgctctaccgcgggcggtgagctataggagatgtaccgtggccgagcggtgtgacttccaac

SEQ ID NO: 21614 - DNA, 379 bp, Zea mays
  unsure (1)..(379): unsure at all n locations
gattaatatgatgtcatatgttttggtgtgtgcatcctcatgttatactttgtgcatagggaaactctatggtggtatctgtgggtgaccttgagcgtaactcaataacacacaagtcataggtacatacgttaaaatcgccacaaaggtacaagaaacgagcagccgtgtctggatgtgtggatngatatattcaagccagtctgtcacagtcacaagtaggcacagaaagatcaggagaaacaggagtatccttactagatacatncagatataacttacgaggacgacactctttctgcacaatgactctaatacatgtctttcattaaacgatatatttaacacactattagaaatacatgatagattcactata

SEQ ID NO: 21615 - DNA, 417 bp, Zea mays
  unsure (1)..(417): unsure at all n locations
nggatggctntgaatggtggtggtggcgggtatttatagcctccaattacttcctatttgttggctgactntgctgttgatgggcatatcggacagtctggtggtgcaccggatactgcactgttcattntccggtgtgtgccacgtcagccgaccgttgaggtttggagctgttgaccgttgaagtcttctgtcttattgcggcaccggacagtccggtggcacaggtgctgcagtcagcgcagtcgaccgttgggcgaagttgactgttgcttcgttgtcgcaccgaacagttcggtggctcatctgacagtcccggtaaattttaatggaatgactttgagaaaacctgagaagcggcagtatgcgaagggatgcagcctggccactggttgactaattctcgtatgctccaaa

SEQ ID NO: 21616 - DNA, 198 bp, Zea mays
cgtagtcatggaacaccgaatcctctctaataaccaacgctggcgttcgccgtctcatgacgatacactgctctgaagcagtggtctatgccgtctaccgccacctcgtcgccgatgtggcgggcgctctccccgaagcactgaatctgccggagtaacatgtcgatctcgtcgtccatactactctcaaacgtcgcg

SEQ ID NO: 21617 - DNA, 290 bp, Zea mays
  unsure (1)..(290): unsure at all n locations
cttaaaaatctggtgtgaatctgcggttatatctagccactcccatgagacttctgtcctgatgaacagtggtgcggggtgtccactccanaatgtgcttgactctgctgtgagctaccgcaatccccctggcagaagaacatgtgccacaaattgaattttctccagcccaaatgcgcatttactggacttggcatataactgatgttctctcaagcgcgttaacacaatccataagtgttgggcatgctcctcttcattcttggaatatattaaaatatctgctatta

SEQ ID NO: 21618 - DNA, 195 bp, Zea mays
attctctggtgatggtggaacttggtctatgaagctctataatggcaatgtgaacactagtggcaaggggagagagctatggtggctatgatcttgaagcgaggtgaccacagtatgctggggttgggatttatacgatcattccatagattggagggagacaacaccaatggaatctatggaggagcgaggggg

SEQ ID NO: 21619 - DNA, 259 bp, Zea mays
  unsure (1)..(259): unsure at all n locations
acctatctccatcaagaaaagaagttcctatagcttctctagaaacaagtaaagaacatgggcaagggattaatgtaacaattcaagtgttcatgttgattgtgctaacaatgtctccatttccttcaagaatagaanaaggagaggaaacaagatatgttataaatgcaagaagaaaggccacatgattgcttcatgtccccacatggagaaccaaagccttgcatcaccaaatatgaccaacatcaagaaagagaat

SEQ ID NO: 21620 - DNA, 204 bp, Zea mays
tcatctggcacttgtgtacactgaaacaaagcttgcgtagtgacaggcttggattgaaaaccctggaagcaggtaaagagcatttctttaagcttcgaccatgaattaacagtccttggtcgaagtgacaagtaccaagtttgggccacacttcggaccgccatgacgaaagactttgtcatgactggtgagtaccaccatatg

SEQ ID NO: 21621 - DNA, 208 bp, Zea mays
caactaagcaagtgtcgagctcagctctatcaaaatctactaagtatagctgaccctctaacacacccttaaatgctattgaatcatcacttcttctaaagacagtgacacctatatcagtaaagagacaggtgtagcccatttgacataattgggaaacagaaagcaagttgtaatctaatgaatcaacaagagaaacattggaaat

SEQ ID NO: 21622 - DNA, 439 bp, Zea mays
  unsure (1)..(439): unsure at all n locations
ttatcatctgtatttggccgaatcaagactgtcttgccctcgaagtcaatcatgttcatcggaaagggctctgtatccacctgcatttcctgaaatttcaatcgtccttcattaatggccgattgaatctgtcgccgaaatacattacaatcattagtggcatgagaaaatgagttatgccacttgcaatatgcacgaacgtttatctcgtcagcggatggaacaatgtgatctatattaatggtgccattcttaagtaattcatcacatattctatcacacttaccaacattaaatgtaaacttaacctcctcttgccgttcttttgaacccgctgtaggaggcacaagccgaagaatttggctgctntggcaaaccatttagcagctacacctctgtgattcgcttctgagctacttgtcgattctatacatgatgt

SEQ ID NO: 21623 - DNA, 459 bp, Zea mays
  unsure (1)..(459): unsure at all n locations
tattactagactcggcctgtccattggcctgagcataatatggagacgaattaagcagcttaattctgtataattcagcaaattcacgtacctcctttgacataaaagaagtaccttgatctgtagtcaaggtctggggaatgccgaatctatgaataatatgctcagttatgaactcaattacctccttgtgcgtcatgttctntagagcaacggcttcagtccatttggtgaaatagtcagtggcaactaacacanaccgatgctcctttgatgatgaacgatgnaattctccaataaagtctaatccccatcctctgaatggcaaggcttgagataggatgtaatcggctgcacgaccaactgtncgtcgccgaatttgaacacttgcaccncttgagtacttgaacaatcagctgtcatactatgcaataagaccagacttcgcacaccacttat

SEQ ID NO: 21624 - DNA, 290 bp, Zea mays
gcttaactccattctatattatggatgccttggaatcagtccagcttccttcggcccttctggcagcttcctgactcccatgaatagcaataggcccttggtccgaaggtatcttcatgcagagataagctgggtgaagaattgcttcaaaagcatttatggtaccacgaccaatgatggcgttgtatgggtattccatgtcaacaatatcaaacacaatttgctcagtccttgtgttattaacaaatccgaaggttaccggcatggtaatcttcccgagtgccacaatc

SEQ ID NO: 21625 - DNA, 350 bp, Zea mays
  unsure (1)..(350): unsure at all n locations
cacagtatacaacaccttctccattctgataatttttctttgataaacttaaaacttccgagacgaagtacgctggagcctgctttntgatttggcatctagcttctcttgtacaagagccgcactaactgcagagtgcgaagctgccacatataagagtaatggagcccctggcgaaggtggagttagtgttggtagatcgatcaagtattgcttcaactcttcgaaagctttntgctgagccggaccccactgaanaacttcggctgacttcagtatttcaaagaatggcagaattctttctgctgatctggatatgaatctgttcaatgatgttagtctttctgtca

SEQ ID NO: 21626 - DNA, 369 bp, Zea mays
  unsure (1)..(369): unsure at all n locations
taggaactactgatggagtatagtggagaaacgtgtggaaaanagactagctagctggataataaacatctttcaattgaaggtagactaacactaattaactccgtgttcagcagcctccctatgtacatgatgtcctttttcgctattcctaaaggtattcttaacaaactgaattacttccgctctcgattcttttggcaaggggatgagagcaagagaaaataccgccttgctagatggaatatcctatgccaacccaaagatcaagggggccttgtgatccatgacctaagtatcaagaacacaactctnctaagtaaatggctattcaagcttctaacatcagatgacatttggaacagcttt

SEQ ID NO: 21627 - DNA, 319 bp, Zea mays
  unsure (1)..(319): unsure at all n locations
ngtatgtttctagtgatggccatgatagcttanggttggtctaatatgcttagcttcttgtgaactagctagaatgattgggtgaagttgggcttgagattatggtttaatcttttgcaagaaacttagaanagcccaattcacccccctcttgggcatcatgatcctttcatggtgggtcacaattcagccttaagaactaagctgattgttgtgttacatgatagtgcattangggtcattctataatgatggctacctgttagagggttaaaatagaattctactagaaatgtcttatagggggatgtgacaagta

SEQ ID NO: 21628 - DNA, 346 bp, Zea mays
  unsure (1)..(346): unsure at all n locations
tccgtgctgaaactgtttncttcactgcaattngatatggctcctgcagcctgaagccgctccggaaggcataccacactgattcataccaaactgaggcatgcttgtgtgagtcacaatccaatgcanaagggaacgatcgacaacacatcttacatcacactggcgatcgagttacctttttaaagggaatattaacacgctgctattttacacgttacaggtatggatgataatagatcacgctctaaatgtttttcacaatttcttatagtcctaaataaaaattaattaaaaatgaatagaaacacgacccaatcataatccgaaccttatatattatact

SEQ ID NO: 21629 - DNA, 125 bp, Zea mays
  unsure (1)..(125): unsure at all n locations
actctgaagcgactaacaatatttttgccagaaaatttctagacagtgaccgaagttattgtggctaaaggctnttgctcaatccacttggaaaaatattctaccgccaccacaacatattttaa

SEQ ID NO: 21630 - DNA, 354 bp, Zea mays
caattaagcatgcatctagaccagcctcttcttttgcaaaatcaactaagtaaagcttgccatctaatacaccctttaaggctagtgaaccatcacttcttctaaagacagacacatctacatttggaaaagacaatattccaattgctattgacaacagatacaattggaccagaactcactaaaccatggaataaggtcataaatgcattactaccttactgctgatcatatgaatatgaactggatctatctgcgagaggacatttttcccgctatggtggctcgtgcatatcactgacccgatctaactgcagaatagctggctagaccacttgtggctcagtaggaaat

SEQ ID NO: 21631 - DNA, 225 bp, Zea mays
  unsure (1)..(225): unsure at all n locations
gaagatagtgagtaccctaaccatgtgtataaactatctaaggcgctttatgggcttaagcaagccccaagagcatgatatgaatgcctaagagattntcttatcactaatggcttcaaagtcggaaaggccgatcctactttatttactaaaactcttgacaatgattngtttgtatgccaaatttatgttgatgatattatatttgggtctactaacgaatct

SEQ ID NO: 21632 - DNA, 210 bp, Zea mays
  unsure (1)..(210): unsure at all n locations
atgatgcagatttctcagatggtgagcgtgcaataataagaagccaacttgagacttatattcttcatgtgagaagacattctgccttttctagttgcatggatattggaagcttggcagtaaagatgggtgaaactgaaaagcatatgggtntttctttagtaaacaagcttattgagttgtcattaaatactgccacgttcaacaaca

SEQ ID NO: 21633 - DNA, 232 bp, Zea mays
gtcattcccaagggaatgcatagttgaagtaccatctaagtaaaaggcggagagaatccaaagtcattcctaatgggatgcagagtctgggtatgcgattgtgtgagtttttttaccttcaacatacatttgcacacttcattacatcatcttttgcattcatatagacatacattaagcatccgtagattcatcatcatgacataaagcacaaagcattaacaggaaaaga

SEQ ID NO: 21634 - DNA, 434 bp, Zea mays
  unsure (1)..(434): unsure at all n locations
gcttctcggagttcagtgaaccatgcagacagctcactatctcaacaagctccttctttgttttatctacaccctgaacatcgccaaagtcatgaatggcagccaagcacttatactccacacccatgtcctggcaaacatcatttacttggctctcaccaacctgaaagaactgaaatggaatcagaacctcatactcctncatgtagccctcactgagaaacaatactctcttgcttgatactggcacagagccaccaagatttttgacatacagactgatgaattcaggatgaaaatcagaggacacagcagtgacaagattgcattgagcaacacattctgtcatgatatcaagctcttcacacttagccgcagtaccggcagatggtatatcaaccataacctcaagcaagcttgatggcatctccacc

SEQ ID NO: 21635 - DNA, 313 bp, Zea mays
  unsure (1)..(313): unsure at all n locations
gaaaagaatgaacttgtntgactgccctatcattntaagttctataaacacttcaaagaaccctgccaagaatggttggatatgatngaagctatgtgcaatgaaatcttgggcaattatacaaagaaagaagatcaattgatgacggcagccttcggcacccgaccgaaacgaaggctgaaccgagtaatggacgctctgaaatttgaatacccatactatgaacggttaagcaaaggtgccgaagggccaaaacgaaatagagatgtcagtgttatgcaaagacaagcttgccagaatgataaagaagatg

SEQ ID NO: 21636 - DNA, 499 bp, Zea mays
  unsure (1)..(499): unsure at all n locations
tctgccatgacgtgacagtctctggccgaagagaagaataccatgtttgggctacattctgaactgccatgacgaaagacttcgccatgactgcggtattgccctccatacgaagatatagttgcttcgtagctcatcagaaactgctttggatctgagtgcccatcatacatgggaagctggggtggcttgtatgacgtangccatggngtagcctgctgttctgctgctaagggaaaagcatcgtcaaaagtcaaggtatcatgattaaaaccatcataccatgcatcttcgttgaataagccttcttgacgaagctccctgtgttggggcctttcgatcttgtcatctngagcaagatgacgcacttattcagtagcttcatcgatctttctttgaagatcagccagccacaccatcttctccttcttcctttgtacttgctgatgaatgatatnncatgtcctgatctctttggccaactcctcctcctggagtg

SEQ ID NO: 21637 - DNA, 316 bp, Zea mays
  unsure (1)..(316): unsure at all n locations
gctaaaactaagccaaaggtgggtgcaggtaaaataggcactctatatcttatgcacggagtgtgncaaatgaatccgcgatgtgctcttatctatatgccgagtacctcgaatactgaacggtcccgcttggcactggctgctgttattccatcaaagggaacgcgttttctccgaccttaggctccgggccttcggcatatccaatctgatttatattctaacacataataatgcaggggctctgttggggcctcngctttcaaggtcctcaaaacatgatttacaatgttntggagacaatggtgacaggtat

SEQ ID NO: 21638 - DNA, 248 bp, Zea mays
ctcagctggtgctggagtcacctctaaacagtctacgtggccatgcctgttttatacaactccgccaccaccgttggacacgtcaagcgtgccctgcttcatcgcaacagggactatggcttgcaacacagcactcaggtgtttgacacctatcgacataggcatatgtgccaatacatcactaagtcaacctgcaataagtgctctgacggcataatctatgcctagacactcgtgtgacttggtga

SEQ ID NO: 21639 - DNA, 57 bp, Zea mays
catatcatcattatataatctagaatagacatcactagtgttacattacattaatac

SEQ ID NO: 21640 - DNA, 326 bp, Zea mays
  unsure (1)..(326): unsure at all n locations
tctaactgaaactatcttgttctcactgagagtctgaaaccaaaatgttactcttgtactatgtgttctngaaacattngtgtctgtcagataagtcatattcatgttgccctagagaatggcttgcacttgtaactataggtcccgttgccctataaaatacaactatgagttacatgctcatttaaatggctcacatttgatgaattntacaatacacaacattatatttttgtccttaaattatattattattaatatacatttcagttccactgctatgactagagcttctactatgtcttctgctatggctcggagcttta

SEQ ID NO: 21641 - DNA, 281 bp, Zea mays
ctcagcttatgaatgataccttcggcatcacgtgcgggcagcttcagccgaagctgtctctttctgcaggaccttcggcgacgaagcatggccccaacagatgatgaatcaatggtgttcaaaggttttatgtacaacaacctctacttagtggatttcacttcagaagatgcagacttaagaacttgcctcttcaccaaagcttcacttggatggctctggcatatgaggcttgtacatgttgggatgagcacactcaagaaggtattaaagaaagatat

SEQ ID NO: 21642 - DNA, 149 bp, Zea mays
tctaaggggagaacacgtgatatgtgtgactaacgtacaattcgaaaaagatagaccttgtgcatcttgtcaagcacgtaaacacgtgggaggagcgcatcacagcaagaatgtgatgaccacttcaagacccctggagctgctgcata

SEQ ID NO: 21643 - DNA, 484 bp, Zea mays
  unsure (1)..(484): unsure at all n locations
ttcttctttacagacattgagatgacgtctcagattanttgctttattatntcaccgnaccaatcagttaactctctaccttcctcggcacatggcaaccccaaaatgagatgaaccgtatctcttgttatcttaagttctttgccagcccctgtgcgtatggtcatgtcatttggatctaatattgccatcaaccacctgataagtgatctgctcttcaatgcatcagntcgcaaatcaaatatgctagaagaatccaacctagcgaccgcatcacgctggcgatcgctcattatccatgatgatacaataacatccaagggaatgcatcggatattcaatctctcgaagcataaatgactattcattaatacagaangtatatatataggtagaactaatgatactactattattacacgcttgtaaataactagtataagacactaaaaagaagtagacaccatatatgctgataataata

SEQ ID NO: 21644 - DNA, 414 bp, Zea mays
  unsure (1)..(414): unsure at all n locations
ctcagcttcttggagcacgcagatccctgatggtggaatccttggttgaaacatctgtcctagtcacagaacctcgtcttgggatacttgtatcttgcgacgatgatgatccaggtccgacatcgtgaagtggtggctcctctccaatatggtcaaggagttactagcgtcacggtatagcctgtccagattntcgcgagaggctgcgagtggctcgttctcctcctacgaacaagaagcaacgttcagtacccaatcaacaataacatggcatagtcaaccaaggggagttacctcatgcgccattctttcagagtcaagctgggcattganggaggaattcanagagcgtgcaccgtccaaagaagcagaggtctcggccaagttggcttggaattgagaatatttctcctc

SEQ ID NO: 21645 - DNA, 425 bp, Zea mays
  unsure (1)..(425): unsure at all n locations
gaagatagtgagtaccctaaccatgtatataaactctctaaagcgctntatgggctcaagcaagccccaagagcatggtatgaatgccttagagatttccttatcactaatgtgttcaaagtcggaaaggtcgatcctactttattcactacaactcttgacaatgatttgtttgtatgccanatttatgttgatgatattatatttgggtctactaacgaatctacatgtgaagaattagtaggatcatgacacacaanatcgagatgtctattatggnggagtngaagtacttcttgcgaattcaagtgaagcaactccaagagggcaccttcattagccaaacgaagcatattcaagacattctacacaagttcgggatgaacgatgacanacncatcangaacccatgggaaccaatggca

SEQ ID NO: 21646 - DNA, 426 bp, Zea mays
  unsure (1)..(426): unsure at all n locations
tctagctgactttcatgtctactttgattctgtaatgaaatgctctacattatggttccagtacaagacatttgctgtgcacgttgcctcttgctnggtcttctatgtacaggaatntgccaggttgaacatgataccgtgttgccaggttgccagtttctctatgtactggcaaactcttgggtttctagctttgccggtttgacatgatccgtttcttcatgccttgcctgtgcaaatagactttcttcttagcaccagctacaagtatgtctcttactgtacttttgttcacgacaggataactatctaatctctgtgaaactacttgtctagtgaaatctaaattgatcagcatgacaatgcccacattacgcgcaataatcattaattcatgaatgctatagtgttattaaagaagtaatt

SEQ ID NO: 21647 - DNA, 439 bp, Zea mays
  unsure (1)..(439): unsure at all n locations
tgtctcgcgacacgatatcagtaggggttataatagaccacaatccanatataccttttactataaagttagagcctctaaataatcttagttcanaaataaataggaatagtgcttaaatcaaagtttgtagcgtaaaattcagagtccattaacatccctagttatcaggcacatgagatttgcgcgacacgaacacgggttaagttaggtcggtagttgtttgagcgagtcaagtgaccaccccaccacccctccatcggacaagaacaccctttctttcacactgactccagagtcagactaacggtggccggccccatctctatttactttactattagcagcgcgcgccggcgggccggagcaccagtcgcctacnggacgcagcgcaacatagcagcgtgcacagctagcagacgcatacaaaaacaaaatc

SEQ ID NO: 21648 - DNA, 282 bp, Zea mays
tgtgaacagtacacattcagaagggagaaagcagcttcagcagatcagccgaagcccatgctcttatgtggggacatagcagagcagaaggtgctgttatgctctcaactatccgaagagcaggagaaaaccttgataaagtttttgttcaataacaaagatgtgtttgcatggtcacgcaatgatctatgcggagataatagggatgttattgagcactcgctcaatgtcgatccatccttcagacccagaaagcaaaggcttcggaaaatgtcagatgat

SEQ ID NO: 21649 - DNA, 352 bp, Zea mays
tatctacatgggcagaaatgacttgagaatcatttttcagaatagcccttcttattcccattgcccttaacttccgaagccttaacaagagtgcttcgtactcggcaatattatttgtacaactaaaatctagcttggctgcataatatgttctgactttcaaaggtgctactagaacaacagttgctcctgtgtcgaaggttccccaagaaccatcgtagaacattgtccaagcttcagcatctttatttatctctccttcctgagcccctggcgtccagtcagcaatgaagtctgctaacgctgtggactgaatgagatctatgacataatcaatggtgaatcattaatc

SEQ ID NO: 21650 - DNA, 521 bp, Zea mays
  unsure (1)..(521): unsure at all n locations
tatatacgaatcgattcaagcctagctaccggtgcatatgtttcatcgaaatccaaaccttcgacttgtgaatatcccttggccacaagtcgggctttgttccttgtcaccacaccatgctcatcttgcttgttgcggaagacccacttggttcctacaacattntggttaggacgtggaactaaatgccataccttattcctagtgaagttgttgagctcctcttgcatcgccaccacccaatccgaatcttgaagtgcttcctctaccctgtgtggctcaatagaggatacaacagagtaatgttcacaacaatgagcaacacgagatctagtagttacccncttttgaatatcgccgaggatggtgtcacggngtgatctncgtggatgggttggtggactctggggtgtggcggtcttggacttcgttcgtcttcctcatcttgatcatgggcatcntccncttgatcattggctctctcttgaggtgggctatcttcttgatcttctcattcatca

SEQ ID NO: 21651 - DNA, 343 bp, Zea mays
  unsure (1)..(343): unsure at all n locations
tgggcttcagtctctcaaccagcgcaacacacgactgtcgaacagcttcgcagctagtttcagaagtggtgcttccaccggtgaaaccctcctggatcatgctcaatgtatcggcctggatgacccggaccttgttcaggaggctttcgccgccgtcagggcacagctgttccaatccgaatgccgtcatctgcttcactnttgtccacaacccttgtgctatctcaaccccttcgacctcaacaacgatgggaccatcattcatgatagacaccttgcctggagttgcgcgaagatngacctcatatgtaattggacacaagaaatgcacgcttcttcactt

SEQ ID NO: 21652 - DNA, 263 bp, Zea mays
  unsure (1)..(263): unsure at all n locations
tggcgcgcggagtacgtgtctcatagcgtggcagtaattccggtgagccactgtgtgtctctatgaggtcaccgcgacacggtgaaagggttgagccacgcggcgcgatgcccggaaacggcggtcaccggcgaggtaattcactctgccgcaaggaagaagagagagccaccgaggtcaccggagtgattgccagcgcacgggccgtgaagatcttttaacgccgcanagttattcacatacncgagcacgaatcgtgacgc

SEQ ID NO: 21653 - DNA, 302 bp, Zea mays
ctaagctatgagatcttattccacatgggctattcggcggtgccagagccaacctttgttagtcttatcaaccaagcaagtgtcgagttcagctctatcaaaatctaccaagtatagctgaccctctaacactcccttaaatgctattgaatcatcatttcttctaaagacagtaacacctacatcagtaaatagacagttgtagcccatttgacataattgggatacggaaagcaaattgtaatctaaagaatctacaagaaaaacattggaaatagtatggtcaggtgatatagcaattt

SEQ ID NO: 21654 - DNA, 341 bp, Zea mays
  unsure (1)..(341): unsure at all n locations
ccgagaagccaaatcgcgctcaccggagtttaatatctcttctgcgcacgtggaccgggtaaaacccttcaccatttcccgattcgttgcgcgcatggcctctgtgtcaccccgtgaagctcctcgtgcccattaattgaactctcccgccgtgggttggccggagcaggcgccgccgtcgatccccgccgcctgtgttcgtggccaggggagctncgaccacctctgacgccgacccgcacatcgacgtgaccgtcgcgaccttctgaacatcggcgaccacctcgccggacctccttcgccgcggaagccgnccaccctttctttccgcgctactgttc

SEQ ID NO: 21655 - DNA, 362 bp, Zea mays
  unsure (1)..(362): unsure at all n locations
gtgatgagtttctcctatcaaccacttgtgaagaagattctggagcatcaacatcttcggcttgtgcctctgcttgttcatgagagacacatgtatcttcatttgcatgtctctcatctttttcatcatcttgtgggacatttgatgaagaangcatgtcaatgttntgcacctcttcttcatcttctttttggttgatagctccaattggcatgttcttcattgcttccctaagtggctcatcacctacatcatcaagattttcaagtgctccttgggagccattagtctcatcacattctacatcatatgtttcttctaccatgccaagcggcatggtgaatactcgatatgctttggac

SEQ ID NO: 21656 - DNA, 134 bp, Zea mays
  unsure (1)..(134): unsure at all n locations
tgagtcttgatgaagagaagaacctatggtttcttatagcgatgtcgaagtccaacacagaanagattaccaaggaaattctggaggggctgtctgaagatactggtgacagtgaaagttatgatatggacagc

SEQ ID NO: 21657 - DNA, 295 bp, Zea mays
  unsure (1)..(295): unsure at all n locations
ctcagcttnngcacctctgattactcggctgcgtcactcttcgctggtgggcaatagaatcctgttctgaataccttnccaactagtgtcttgtacgctgtgtgtattccacattgcccaacatggacctcgttcagaagtcgctttccagtagatgagagaatgcacttcatgaggacgcctgatgcacnccgtctgtataatgtcttcccaatgagtgtgtaatgagcccactgtctggcgatacgctcggctgcatttttgtcatctgggtcctcttcattctttgatacct

SEQ ID NO: 21658 - DNA, 138 bp, Zea mays
gtagcatatgcaagtatatgcgaatggactcaagcctagctactggtgcatatgtttcatcgaaatccagaccttcgacttgtgaatattccttgtgcacaagtcggactttgtttcttgtcaccacaccatgctcgt

SEQ ID NO: 21659 - DNA, 499 bp, Zea mays
  unsure (1)..(499): unsure at all n locations
ttaccacatggacgtgtaaagtgccttcctcagtggaccaatcaaggaagatgtcttgttttcaacctcncagctntgaagataatgagtaccctaaccatgtgtataaactctctaaggcgctttatgggcttaagcaagccccacgagcatggtatgaatgccttaaggatctccttatcactaatggattcaaagtcggaaaggtcgatcctactttattcactaaaactcttgaaaatgacttgtttgtatgccaaatctatgttgatgatattatatttgggtctactaacgagtctacatgtgaagaatttagtaggatcatgacacanaaattctagatgtctatgatgggggagttgaagtatttcttacgaattcaagtgaagcaactccaagatggcaccttcctaaccanacgaagtatactcaagatattctaagcaagttggtatgaaggatgccaacccatcaaacacccatggaaccaatggca

SEQ ID NO: 21660 - DNA, 517 bp, Zea mays
  unsure (1)..(517): unsure at all n locations
gggaagcgtcgattgggtgtctactcggtgcagactcctncttcttctncttcgtcttcttatatgcgnatggntgtgcttcagacgtggagggaccgtcaagctcgttgatcttccttgagcctttgatcataaactcaaagctcacaaaattcccgattacttcctcgggagtcattagtgtatatctaggattgtcacgaattaattgtacttgagtangggtaacgaaaataagtgatcttagaataaccttaaccacctcatggtcattccatttnttacttccgagggtgcgcacttgattcaccaaaggtttgagccagttgtacatgtcttgtggcttcctcccttgacgaagacggaagcgaccgagctcccctcgatcgtttccgctggtgacttggtagtcataccctcgtcgcggcttgacacgtccaacttcttgcgctttatccttgcccttgtgactctccctactaagaacagagatggtgggttggagtgagtgctcatg

SEQ ID NO: 21661 - DNA, 318 bp, Zea mays
  unsure (1)..(318): unsure at all n locations
ctcagctcgaagatcttgtacccactcagaactanacatgaagtagaggagatggattgttcttattatngattatgaattggaaattcactatcacctatgcaaggccaatgtagcggcagatgcactaagtcgcaaggcttcctatcattgtcttaccatgaagacttctgacattacattatgccaagaaatggagaagttgaacctgcgaatgattcaacatggaaccttgaatcacttgaagcttgagttgtgtcttctgcaaaggataattgatgcacaaagaagcgatgagggtatcaaacacattcatga

SEQ ID NO: 21662 - DNA, 292 bp, Zea mays
  unsure (1)..(292): unsure at all n locations
ctaagnttaactcactatttatggattgccttggaatcagtccagcttccttcngtccttctgtgatntttctgactcccatgaatagcaataggcccttggtccgaaggtatcttcatgcagagataagctgggtgaataattgcttcaaaagcatttatggtaccacgacccatgatggcgttgtangggtattccatgtcaacaatatcaaacacaatttgctcagtccttgtgttatttacaaatccgaaggttaccggcatggtaatcttctcgagtgccacaatct

SEQ ID NO: 21663 - DNA, 245 bp, Zea mays
gatgctccatgcactgcagaatgatgaacctgacgtgtcacgaccaaggttcaccaaagaaaatcgtacagtaaaaacaacattttgagctggtctttttcttgaacatttggatacttattgcatgtgactggtagaagatgaaattctatgaaagtttcagcgaaacattaatatgatggagattgaaccggtatatgacactctactggcatggtacctggtctggactcttaatgtggact

SEQ ID NO: 21664 - DNA, 310 bp, Zea mays
  unsure (1)..(310): unsure at all n locations
actcaagcgttcttgcntgtagcttcggcgctgcgntaaccatcgtatagacatgctcttctcatcgtgtgattctgatccgagacagaatgcgcctattcacatattacacctccgaanacattgntaaattatgtttctgaggactntccgaagatgtatgccccaacactctctatttaccttgtccatgaataccttttaggctattatggttaatgctagcgctctactttaatcaatgaacatgatgagatacatttacgatactatgattctactctggatatgatgaagaacctatgatact

SEQ ID NO: 21665 - DNA, 290 bp, Zea mays
  unsure (1)..(290): unsure at all n locations
tgaccatgcttntgtatacccgcaacctgattccgaagatatctgcttttatacttataaaacattggcaaatcacagttttgaggaccttcggaagccgaaggcccccaacagtagcccctcgcaatattaatttgctgtaatgataaattcatattgcgatatggacgaatgccttaagccgaaggtccgaaaaaacaccttctctttgctagaatagcaacagtctttgacaagcaagaccctccagtttcaacgctctangcgtataaataagagctcattccgag

SEQ ID NO: 21666 - DNA, 186 bp, Zea mays
  unsure (1)..(186): unsure at all n locations
ctacaaacaaagaaatgacaccgataatgaatgcatcaatcacttggtagattntatctaatcaagaaattatttatatttttatatcaccatttcatttgttgaaaacataaatatttccctttttactagaaattaataatataaactaagttatttntaattgacggatttatggtgttacat

SEQ ID NO: 21667 - DNA, 298 bp, Zea mays
  unsure (1)..(298): unsure at all n locations
agcttatctgtgccacatactataacttgttctaagattggtgtctgagcaacaacataattgttttattaangactacgcacaagngtggaggagctccctacagaataaactttcaacatggaaagtacaccacaacatggctaatgtaccaaaggaagtattgatctttatcgtatatgtatcttaattntcctccaatgcttgtggcgcatatgtttaatgtgtaagggggaagaatgttagtgtggtggattttaactgcttaataccctgctgtcccttgacatcatactat

SEQ ID NO: 21668 - DNA, 253 bp, Zea mays
acgatcaaggtgaggtctacagcaacgcttggaacattcgacagctacctcacttttacccttaagatgttttcaagtcgctcatatacctcgatttctatacatacacaggataagtctaaccgtcaaggaagggtcagccttggctctgcatagcccgaccctccctcagcggctagaatggagggaccctctctgcgcaaaattttctcataaaagtctttctgcagacgttttcgcgctttcgactgct

SEQ ID NO: 21669 - DNA, 246 bp, Zea mays
gtgctgcgtgctccccgggcgatgcctgattctggcggagcagtttgttttgaacatgcatgtgtcctttacggccgtcgaggcctgaacacttgcgcatgtacaactgattctttctctgtcgagattgactgtcctatacaaatgcttatcatagatattttcggcgtacaggagatcgatccaagcgagagccttgtcgcggcttgcgtactccttatctttcgggtcgtctgatagcgaaac

SEQ ID NO: 21670 - DNA, 320 bp, Zea mays
  unsure (1)..(320): unsure at all n locations
tatttggcagcgaaacagtgcaatagcaatgaatgctgtggtaacttcacacctacccgtctgtttatatagtgccgcangtgggaaggtgaatcgtcaaggtctcttgcaccgaacaaacagtcacccacactcactgaacggtgggccacggtgtcagagaaagtgaatcgtcagggcgcgcgtaattgctgcaagatggngccacctcgcgcacggattaatttaatcgtttctcgccaacgagctcanggaanggtgttttcggatcttctgcataacgaagcctagaagactttttcacggatcaagctcgttac

SEQ ID NO: 21671 - DNA, 290 bp, Zea mays
ctcagcttctaagggagaacacgtgatacgggtgactcacgttcaattcgaaatagatagattctgtgcagcttgtcaagcacgtgaacaggtgggaggagcgcatcacagcacgaatgtgatgaccacttcaagacccttggagctgctgcatatggacctcttcggacccgtcgcctatctgagcatatggggaagtaagtatggtctagttattggtgatgacttttaccgcttcacttgggtgttctttttgcaggataagtctgaaacccaatggaccctcaagc

SEQ ID NO: 21672 - DNA, 277 bp, Zea mays
  unsure (1)..(277): unsure at all n locations
acacctcaatggggacgtataatttggaatcgaacatcggtaaataaatagggtatcttcttgtgttctttactttntggtgngagttggtcttctctcccccctaagttntcttggttttagttctcattctaagtcacttcagttgctctctaaattaattatgcatctataagagcaacaagcacaagagaaccattttctctcacttcggttatattctctctcgctttaaccgctaattgggatcatgntgtngttaagttttaaaattttc

SEQ ID NO: 21673 - DNA, 186 bp, Zea mays
  unsure (1)..(186): unsure at all n locations
atcttgcccaaattcgcgaagatntgctctcaatctgtgcttgaacaggggcagaggcaacgggaacacgtgttcgaccgcggctgacacccncggttcacgcccgttcgcgcaccgcgccttnccagtgcacgcccgcgcgcactcgccggtccacgaccgcccgtgcaccgcgccgtgcctata

SEQ ID NO: 21674 - DNA, 210 bp, Zea mays
  unsure (1)..(210): unsure at all n locations
tattttccttgtggcgaacaacgaaactattacatgtatgattaaaaatgtcctttattacacagaanataaaactgaatgaagaagactgctatcaaggtaggatatttgtcaatagatgtgcttcgactctggcacagtgctcgtgactgtgcgagcttcngactgttctctgaagtccctttggtgtggagtatattggctcccttc

SEQ ID NO: 21675 - DNA, 167 bp, Zea mays
tcaacacatcacagaaacactaatctggatatgtttcagaatgcatgataaaaccatcgcttacgtgggcgaatctctaaggaggcagatgtttcattcgatgatgtgtatgagcactggtggaaaggagaggctggatgtaaaacatgtcggcgcacagtatggct

SEQ ID NO: 21676 - DNA, 280 bp, Zea mays
ctcagcttgcatttcaaagctttgactcggttccgggccttcttctcaggtctttattttcttggtttggccagaactggtgtgatataataagtgggcttggagctacctcttctaccaggattttactaaatggtctggcacgggaatggattgggcatcaacgccggctgaggcacggtgatccactatcgcctatgttatttattcttgtaatggatgtcttgaatctgctcgtgcagcgagcttctgaggaagggcttcttcaacctctctctac

SEQ ID NO: 21677 - DNA, 532 bp, Zea mays
  unsure (1)..(532): unsure at all n locations
tctctaantcagcccaagtaacctggtgatctagaagntgtatggcaacatatttggtctcaccaagtactggcagctccgcgaaggtgntctacagcanataaagactnttgtacctcagtgcattgaatgaggccaaacttctgctcaatcacctgcagccactcaattgtgtcaagtggctcttctcctttagcgaacactggcggtcgagtctccataaattccatatatgttgcattcctttgctgattctggcgaatacgacgcccacccttgatgttttatggtgagcaatctcatgcaaaaccctagcattatcaagagtggcttttactatggcagcaatggcatctgccaatgtangtggaactggtggtgacgattaatatcagcttctgaccaccacgcgatgtgccagcccatccgaccacgagacgcatagcatctgagtaaaacttgtaataacatcataacctgaatatatacatanacaggactcgtgtttgtcattcgatatcaattgacatac

SEQ ID NO: 21678 - DNA, 269 bp, Zea mays
  unsure (1)..(269): unsure at all n locations
ctcaagcttctatcagggacatgtctcaagacgaangggtgaaccgacctanagatgatatgacttatagacccatgatattccgtgtcagtattatagatcattgtgaagggtataaatgttattatatacaggctgtgaactgtgcatataaataggtgaacagtacccctatactggtcacgcgctctcctgtcatcgcgcatagagcactttgttttgcttcacactgcgatctttgctttccttcgagccgaacgtacattttt

SEQ ID NO: 21679 - DNA, 142 bp, Zea mays
ctacttgtcgttgtcaactggtagctcggacggtactccgaagcggcaaacgatgttctgccagaagaatattgggcagtctttgatgtgattgtggaaacagccctcgcttcaatccatttggtgaagtattccacggcta

SEQ ID NO: 21680 - DNA, 539 bp, Zea mays
  unsure (1)..(539): unsure at all n locations
taggacctatgaaactcaagcttcagtcccagaaacgagaaatagttctttgctatgaagaaacanatacactgngacttataagttcaacgactgtatgagtgacgcgtaaggtatgtagaacatcatcatgttcatggcctcaatactatattacactgacatgcaaaaatgtactgatataccatgcacgtacggaaaccatgtttgtgcttgttgagcttagatgagaaataacaactaattaatagaatcttatagaaataaaatacaaactttagtgggtttacatatataaggtgtatcttgcactntntataaccactgtcaatcatctnctttattacaaagtgtcttgatagataaatagtgtgtcctcatttcagcanatgattctattgacatacacaaactcacctatctggatggacaatgcacaagagacaggatcgagatgaccataatagtagtgtaaaccttaaaccactattacagcctggagatcttataaaatatgaatctaacactttaaattatat

SEQ ID NO: 21681 - DNA, 413 bp, Zea mays
  unsure (1)..(413): unsure at all n locations
agcttaaacatttatgagggatcgtcctacttataacatcgcacgcaaggacatatatgcaatataaacaagtagaacaataagaatggcattcacacaacagttgtgattcggtatggcttgctgtcacatggtgatccccatctccaataatctgtccatcacgatgatctccatctccatgatataggtatgccatcctccggtgatgagtccttcaagacctatctaacgtatgctggtaaacaaattacatatacgctttggatcatcacatgttgacacgcaggtcattacattaaatttggacaatacatgtggctccagccgtattgccctggtcacgacacgcangtcatgaataatttattaacatgcatcatatacacaatagccataccgatcacaagatg

SEQ ID NO: 21682 - DNA, 485 bp, Zea mays
atgcaggtgattctggtcagagaatggaccgctcactactgccttctgctcgcctattgcccgattacatcggtgtgacatataacagtgcaacaacttgacatgatgtaatatctaagtttggtgcatgcataaaatacgcatagacataatctctcaataaaatagttcacttgattcagcgtacaccaatctctgactagattagttatggcatgctctattacctcgctgtcctgagttggaatagatccgatgacactattttcagttgagatatattacctacaatggaggccactctatggtgctttcattactgtaaccgatgataagtatttcttaataatatcaaatacactcgtgctgttgtgtcctcaagtgagatcaatattattcttatccgaagaatgggaatgaatgcatcaatctttctccgcagaattaaaacgaatcttccatattatctactttgtcgtagaact

SEQ ID NO: 21683 - DNA, 330 bp, Zea mays
agcttgcgaagattcttcatcccaacatgtgctagtcggcgatgccagagccagcccatgttagtcttagcaattaagcaagtgtcgaggtcagctctatcaaaatctaccaagtatagctgaccctctaacactcccttaaatgctattgaatcatcacttcttctaaagacagtgacacctatatcagtgaaaagacagttgtagcccattttgcataattgagatacagaaagcaaattgtaatctaatgaatctacaagaaaaacattggaaatagaatggtcaggagatatagctattttaccaagacctttgaccaaaccttga

SEQ ID NO: 21684 - DNA, 444 bp, Zea mays
taagctccgtcagatatggccctaatggactcagcttgacaggcaaggattcagtcattaccttcaaaatttcttccacatcggtcgtagagggtgatgcaacagttatatcttcttcgtcaattgcttttgcttggagtcaagctctctctttttgaaacacccgttttggttaggttcagcttttcttctttggtgtcttcatcgcttattcagacatcaccactctcttcttttttgccttcggccccttgtctaccgctcgtataggatattaaagccagtgcatcatactcggttaacttccttttacgggtgccaagctgcagcataaccgactttatttaagtattgcaagatttattgtcattacttcattggtcagccttctggcaagacttttaatgtttttgattgtatggacgcatgacaactccttctttt

SEQ ID NO: 21685 - DNA, 378 bp, Zea mays
agcttatcaaatcggccctcaatggccggctcaagggatagctctgatatttctccaagcaacatcatagagccgacttgggaaaccttgccggctgacgagcaactccagtttgaggagcacaaggagcggatgatccaagaggcgagagcaaagttcttggccaactttaaagtggacaagaacaataaagtcgtgcgacatcgggcgacggatccggcttcgctccaacccacgccagatattcccaatggtagtaataccaacgatctgcaatctcttagaaattatgtagaagatcagcgtgaacaaatgcagaacatcatatggggtatgcaaagcgatcttaagagactagtacgtgcatttgataaatct

SEQ ID NO: 21686 - DNA, 481 bp, Zea mays
  unsure (1)..(481): unsure at all n locations
agtgggagcgcctgtgtatttctgatcttgtatgtggatgacatattattgattgngaatgacattcctatgctagagtccgtcaaggcttcactgaaaaagagtttttctatgaaggacttangggaagcagcatatattttgggcataaggatctatagagataggtcgaagaggcttataggattaagtcaagatacgtacattgacaaggttttgaaacggttcaacatggaacagtccaagaaagggttcatacctatgtcacatggtaaacaccttatccagatgcaatgtcctgcgacggctaatgagcgggagcgcatgagtaaggaaccatacgcctcagcaattggatcaatcatgtatgccatgataagtacacgcccagatgtttcatacgctataagtgctacgagtaggtaccaggctgatccaggtgangatcactggacaacggtaaaaggcattcttaagtact

SEQ ID NO: 21687 - DNA, 385 bp, Zea mays
tcaagctttagaatttctcaacttgggttaagttttacccctttaaccactatttagggttaagcctaataaccagggttctatttgcaaaaacattaaaacaatacaacttgtttgaaatttttgcctagtgaatgcactctatgtgtgtcacacatatgcagtgccaatgcttatgatgccatgctcaagttttagttatagtaacaccaggggtgttacacatatttttcctaagttctcattaataaaacattaattatcccaagggtggggtgtttttaccttggggttatttttgtaggggttttctaagttatccttattttattaaaataaaaggtatcctacttatcttatactaaaccagggtatgatagatttt

SEQ ID NO: 21688 - DNA, 429 bp, Zea mays
  unsure (1)..(429): unsure at all n locations
ctaagcttgacgaaggcaagtccatccttcctttgatgcataatttacctattctctctaccactacctaagccaggattaagggatggaataattgcattatgagcagagagatagcccgcattaacaaacatcttttgagcacaaagtttgggatgggaaaaagggcagtggttttgaccaaatgatgctttcaaaaagtgtgcgatgaagggtattcaccctcatcaccttgtgagtgggatgatcagggactccgtggtttaggggagggcctaaggtgatggctcagctggtttaggtgtgagcagaaagattgcccctcatataaggaccagttngttatccttcactacctgtactcatgaaaagtacaaccactcgagactgtatgggcagtcactcaatctgaactcgtacggtccaacc

SEQ ID NO: 21689 - DNA, 426 bp, Zea mays
  unsure (1)..(426): unsure at all n locations
agcttcaccatgcacctgagagagagagagagatggttgatagaatggcttccgcctgtgaaaccgaagggatgttgccgttcanggccatgttttaatccgggatgctccgctgcgtcgcatggaagatgtgagggcgcctcccgacagaatttgttgttgggaacaacgatatttactatgcgttggtagtggatcatcacaggctcatgggttgtcgtggccgggaaatcatggcgcattatcactgggtaggctactttcaatgtgctatattggacccttctgcgaaatgagcttgtgatgaacactgctgtgatatataacacgagtgtgattggatacaatgctngtgtgcacaagagagctattactcaatacaagccagatcagactcacaagcctatcagatgctatcactgttgc

SEQ ID NO: 21690 - DNA, 442 bp, Zea mays
  unsure (1)..(442): unsure at all n locations
agacanaagttctccgatggaaggcaaaggatcaactgggcggagtgtttaatagcggagaatgaagatgttggcctgagtaagtggaagcatcatgggatctcttttatgggattacagaatttgaaatgttggattaataaataaattgagtcctaagctccgagccgagtctatagactcatgggccgctagaatgagtcaaggactcggtcaaggatgtgattacatggtcattctagaagattcataagagtctcattttcctgaatcaatgaatgagctaaatggtactcatggatcactatcaataatatgtaccaagtcaagctgcatgaagaatagcctgagcagaagggctcatgggctcagccatgagcctaagggattaacaatatgatcatatatagatagcaccacggactcctcaaacatttatatg

SEQ ID NO: 21691 - DNA, 384 bp, Zea mays
agctattgtgcatcagcacaggtattctctgtctacagctccaaggggcagaggtgccaggggcttctgaggaagatttggggatcaaccaacgaaaatttattgcttattctgtggtgatgacaagggccacaccaccaggatgtgccatgtcaccatccagaaacaaaaagaaatagcagaagctgcagcccaacagacccagccgaagcaagtcatgcatactgcttcgtaccactcgccttatatcccagagtatgtgggtaaccaccctgcagcttctggtgcttcggcaagccaatctcaggcatctaggcaacagtcttcaccttcaccaccaatgcaacgaggccagcagccagaagggagttaacatactcaaca

SEQ ID NO: 21692 - DNA, 444 bp, Zea mays
  unsure (1)..(444): unsure at all n locations
taaaccactaaaagccacgtatgaccaagaaaccgtaagttactaactaacttagttnttcttcctttagcataatggtgttaaatcctacataatcatgacatacatattcattgcattcgatagactgcaacctcgctgacggagagtacgtactcgtgccggagcaaggagctgctcatgaggtagccccgaattcagcaccagagcctgcaccagaggatctgcctgccacagctntggaaggcaagccccggtttatgcantaaccgttatatatactattttactgcacttaatgtttgtaggcttgtactgtgcacttaagtgtaggagttgtttgaaaccctagttacatgatatcaggaatcctattgagatgaatactagtatgctaggtcgagtagctgctttataattacgatctcggtagaagtcgagtga

SEQ ID NO: 21693 - DNA, 406 bp, Zea mays
  unsure (1)..(406): unsure at all n locations
agcttatgatttaagaaacatgaaagggcctctagctgagttggttaggtagtttgaatagcacttctcaggtcccccatgtgagcgaattttatgttggggttaaaaaatccccttgtctgtcccacaccaaaggacgtccggtctcggtcatggttattctcacataggctacggcgctgctgtgtatgggactatgggtaaagtaggggtttggaggttttctcgacttgtcttctcttaatacaatgcctaccccccctcccccataggttgactttntttatgatttaagaaacaaaaaagttttgatattgtgagctttcagtctatttctcctttttggatgagatcttttattgaagagatgcangctttatgtagtatttgtctcatgcacgtgcct

SEQ ID NO: 21694 - DNA, 439 bp, Zea mays
  unsure (1)..(439): unsure at all n locations
tctaaagggacaacacgtgataggtttgactaacgtgcaattctaaaaagatagaccttgtgcagcttgtcaagcatgtaaacaagtgggaggagcacatcacagcaagaatgtgatgaccacttcaagacccctggagctgctgcatatggacctcttcggacccgtcgcctatctgagcatatgagggagtaagtatggtctagttattggtgatgactattcccgcttcacttgggtgttctttttgcaggataagtctgaaacccaagggaccctcaagcgcttcctcaggagagctcanaatgagtntgagctcaaggtgaagaagataaggagcgacaacgggtccgagttcaagaaccttcaagtggaggagttccttgagganngagggatcaagcatgagttctccgcctcctacacaccacagcaaaat

SEQ ID NO: 21695 - DNA, 426 bp, Zea mays
agcttgatgtttagaatgacatcagcctctcccaaatctttcatctcgaaattgctcgatagaagatttttaacttcctcaatcacattgagatttgatccaaagatcaaaatgtcatcaacataaaggcacagcataacagactcacccccaccatatcgatagtatacacacgtgtcagattcatttacaacaaagccagctgttgtaagagtattatcaaacttttcatgccattgcttgggtgcttgttttaggccatacaatgattttatcaacctgcacaccttgttctcttgaccatccgcaatgaacccttctggctgatccatatagatctcctcatccaactctccatttaggaaagatgtcttaacatccatctgatgaatgataagatcataagaaggctgcacagctattaat

SEQ ID NO: 21696 - DNA, 509 bp, Zea mays
  unsure (1)..(509): unsure at all n locations
actaagcttaattctatgtctcttagcnnttgggtctccttcatgtgacattttaagaatactccaaatgtcacgggcatcttctcttccttgaactttccagtattctttcggacaaagacttccttttattatgctcaccgcttgagcattgcggtgaacctcttgcatcatttccggagtcatctcttctccttgggcgggtttatacatacctacattgacaatctcccaaagactaggatgtacaccgattaaatgcgacttcatcttatcggcccactcgtcatagttcaactcactaagagttggtaactntccaagtggtgcggaagagaagttggggatataaattctaaagtaatcaaattgaactttactggaattgttatctntactcttagtggatgatccttcngtggtgatacttacctttgctcaacaccttgacaccaaaagatctaccaagtcatcattggattcaaagtttcccttacctttatcttctt

SEQ ID NO: 21697 - DNA, 394 bp, Zea mays
  unsure (1)..(394): unsure at all n locations
agcntttgaacgtactaagcacatgccgggaaatatggtaaccggtaaacctattacctgagtgaagccgggtgcggactttatccctcatgcgacctgagactgggtctcccatgctagctatggtgggtacaagtgcggtcacagcacggcggcagccggggtcagtggagcattgtatgccaaggcggtgagtcctggaagcgaacggggaatcgatggggaccgttgtcatgtgtggggtcggagtaccctgacatgccgtgtgtttaggtttaccttgcgaggttaaaactcaattcgaatcgtctgcttctcgcaactaatgagaactgattgacccttgtactacatcgagaaaaaagtgaatgagggtacatgagaccatttggtg

SEQ ID NO: 21698 - DNA, 444 bp, Zea mays
  unsure (1)..(444): unsure at all n locations
gggatatcagttgttacaggcaccaacatatcatatggtgtttgtcntattccaactttaaagtaagtactatcttttaagttacccctgatgtgtatgcattagcttaaatattctaagtgtggacctgcttttacagagtttactactgagcaaagctttaaagatgcaacaagacgacgaagacaggaaaaatgaaatcattatcaagggcttagaggataaggtcaaagaactccaagactctntgaaggagaaatacaaaatgctatgtgcagccgaagggtcccttgtcgaagcacaagctcagaacaagaagttaagcaaagacctgtcagacgcttaagcacttttgaaggaaactttaataagttcaaacaggaaaacgaagctctgaaagcaagacttaagaatgaatctgagaaaaatacgaagcttagtgag

SEQ ID NO: 21699 - DNA, 425 bp, Zea mays
  unsure (1)..(425): unsure at all n locations
agctngatgtagcaacctcatgtgatgatttgattcaagaagagcaaactagtctacatgctgaattgactgaaaaagttgaagtcctgactttagacaaccaaaaattgaagaattatttgactgatgcaactactagaggaaaagttgctattgagaacaatgatttcaacaatgagttggcagtggataatcaaaggcttaagaatgaggtcaagaaactaaaaagtgaaaatgaacatcttgcaacaagtgtgcaaaagttcaacaagggtcaatacctccaaaatgagctgcttatgaacactgttatgaaaaataacaagagtggtattggatacaatgcttttgtgcaaaagaaagctatcactcaatacaagccanagcagactcacaagcctatcaaatgctttgagtgtggaaat

SEQ ID NO: 21700 - DNA, 324 bp, Zea mays
tcttcctccctgccgcactctctctccagcgcttgttccctgctcctatggcggccgagctctccggtgccgcgggagtgtgcccctggctctcttcgaactcgccccagcgctgctgcttcctgttctctgcacgcgcctctcctgtaccagcgcgccgcttcacctgctcggcctccatggcgccgaggagcttggccgcctcaagcgatcctagtcctttgagctccggagtggcgccaacgtggttacagcagggataaaattgacttttaccttatctaatggaaagaacagagcgcggtgaataactgttcctatctg

SEQ ID NO: 21701 - DNA, 212 bp, Zea mays
  unsure (1)..(212): unsure at all n locations
agctntgngcactcacttgaaattcagtttagcttaccacccgcagacagatggtcagactgagagaaccaaccagattcttgaagatatgttgagagcttgtgctttgcaagacaagttaggttgggacaagaggctaccatatgcagaattcttctacaacaacagctatcaagccagtctgaagatgtcaccatttgaagcgatgtatg

SEQ ID NO: 21702 - DNA, 326 bp, Zea mays
agcttctcctggacaagtgctgcacttaccgctgagtgcgaagctgccacatataataacaacggagcccctagcgctggtggagttaatgttgttaaatctatcaaatattgcttcaggtcctcgaaggctttttgttggcttggtccccattgaaagacttcggctgatttcagtacttcgaagaatggtaaatttgtttctgctgatctggatataaatctattaagaaatgccagcctccctgtcaatctttgggcacccttttttgtagttggtggctccattcgaagtatagcttcaattttacttggattagcttcaat

SEQ ID NO: 21703 - DNA, 429 bp, Zea mays
  unsure (1)..(429): unsure at all n locations
ggacatgaggagatggcgctcgtcatcaagagttttcgtcaaatcctcaaacaaaggagggggaaagactacaagtcccgctccaagaaggtttgctacaagtgtggtaagcccggtcactttattgctaaatgtccattatcaagtgatagtgacaggggcgacgacaagaaggggagaagaaaggagaagaagagatactacaagaagaagggcggcgatgcccatgtttgtcgggagtgggactccgacgaaagctctagcgactcctccgacgacgaggacgccgtcaacatcgccgtcaccaagggactcctcttccccaacatcggccacaagtgcctcatggcaaaggacggcaaacggaagaaggtaanactaactcctncactaaatatgaatcttctagtgatgaatatggtagtgatg

SEQ ID NO: 21704 - DNA, 363 bp, Zea mays
  unsure (1)..(363): unsure at all n locations
cacgctgcttctgtgcacttgctgacacaattactgccagtccgcctccggtcacgccaactatcacgcttgtgcccgcggctgactgacccgtggtctccgcacttgatggttntgctgggccacgcgcggtgtgcctcaataccgctgcattggttttgaaagttcaccttttatgttctttgcgacggccctaagggggcgcagtactggcgcgagcggcggttcgacttctctgcacctaggggccggcgcccaaggaggatgactcgtgggcccgggccccccgtgtcagagactgtgctgttggtttagtggaggtgtggaggcgcactaccacaggcggtggcttgctcctcacgt

SEQ ID NO: 21705 - DNA, 400 bp, Zea mays
agcttgcatgcatatttaaatttcttatattgcatctagggcttttctaacctagttgagataaccgccaacaaagcgagtgaaaaagcttaactcgggctcaaacttgacaagtcttagtttttaagcttttagtacttaaattcttacttactatgcaattgttggttcttgagatatgcatgaggcactacacttatggggagtattcaaaactcaaatctttcatgaaaacccctagtgcaacgccaaaatgcaaatctcaccatttgcctattttctctaaacattatctagcctatggcaaaatattttgaaaattatgagaaaatatatgagggtgccaatacctgtcacaacaagtgttattttgtgtgattataagttgcgatttagtttg

SEQ ID NO: 21706 - DNA, 450 bp, Zea mays
  unsure (1)..(450): unsure at all n locations
tgctcatggagcccactgcccncatattccttgggtacccatcttcccacatagggtatcaatatcactgtcttcatgtattgatctctcatcatggcacaccatcatttcttgtcattntgtgctcgatgagatgttgttaccttgctccactaactctgcaggaccatctacctaagattcgcttgatttcctcatcaatgacagtgatgtggttgtcttgcctttaaagatctacacccactcaacctcatggcgtgtctcatgctcccactggctcccccattggtgtcttccgtagatggccctatggtaatcacctgtggtcctnccactgaacctatgccaccgatatcactcgtgctgagttacttcggttgcatctatgtacgcgacaaccggcatagtccctaccattattgtactccatgggcatgccttcactaacta

SEQ ID NO: 21707 - DNA, 399 bp, Zea mays
agcttcgacctcttcgccaatccattggataacccctttgggatcaccacagataaatttttgctctgatgaatatgctcccacctttacgaagctattcttcagtttcttcgcgcattccatggatacttcgtagcatttttctttagaatcccgaagttcttcaatattcttctacaccctggctctttccatttcacttatttcttgcttagctttcgcaacttcgaaattttcatttatttcagcaagttttttctgtaaatcgtcaacctcggctctatgagcttcggcttgtgcgttaagcttggcttcgctggttttcagcccatccactaaggagagcaatattttgtctttttcaagagcttcattcctcagtgtaataacctctgatcg

SEQ ID NO: 21708 - DNA, 469 bp, Zea mays
  unsure (1)..(469): unsure at all n locations
actaagctttcttgaattatntcttgactntnntccatgtttcccttttgtttcttggacttgatgtgaccatgaggctgaaactgtgtgcacgtaatagtccattcatcaatgtaacactcatgtgtttcttcttggggctgggcatccttgtgatgtttcctttntggaatactttgcaattcatcaactcacagtgcattaggtatgggagaatctactattagttgttcttgaggagacatttgtctttntatgccaganaataaaatttggttcttctgttntgcagtttcactttcatttgcattgattngcgacaaggaattccatagtactcacaacaacatgttccaaggtcacttgtctgttggtttagttgtgcatccttttgggtcttgaatgtatgttcatcagctggtttatttatagtggtgttttgacttgccaacacaccacattctttgca

SEQ ID NO: 21709 - DNA, 449 bp, Zea mays
  unsure (1)..(449): unsure at all n locations
agcttcgacagtgtaaaccgacttaaagatagaatgactttttattccatgaaggtctgagtcaatgttgtaagcttttataaggggcatacttgtaattcctcacaggctgcgtcccgtgcctataaataggtgaacagtacccccgtactgttcacgctgacttggcatttgcttttgcgtcacacttgtattttcatctccttccaagccgaaggtacatttgtaattcgatattggctctatttttctatgatgatataaaaaagctaaattgatgatgttatatgattattcatgctatcttttatgtttcgtatgattncgctttcattaatgtatactgtgatgatgaaggttcgtccttcatgaccttcgtctgaagaatcgtatatcctaagggaaataatgcttccaaggacgaaagacnnttatcattaacactctct

SEQ ID NO: 21710 - DNA, 466 bp, Zea mays
  unsure (1)..(466): unsure at all n locations
gctccatctatgttatggatgctnttgagtcagtccaattgccttctttccttcttgcagcttcttgacttccatggatagcaatgggtccctgatccgaaggtatcttcatgcaaagataggcacgatgaaggattgcttcaaaggcattgagggtgccacgaccaataattgcattgtaagggtattccatgtcaacaatgtcaaacacaacttgctcagttctagtgttgttgatgaacccgaaggtcactgacatggtgatcttgcccaatgctacaatctgtcttcctccgaagccacagagaggatgtgtagcatcatgaatcttatcttctggctcttgcatttgtctgaaggccttagcaaatatgatgtcagctgcactgcctgtgtcaaccaagacattgtggaccagatatccttngataacacaagagataaccatggcatcgttgtgtgggta

SEQ ID NO: 21711 - DNA, 438 bp, Zea mays
  unsure (1)..(438): unsure at all n locations
agcttctaaagggagaacacattntaggattaacaaatgttcattttgagaaagacaggatttgtagcgcatgccaagcagggaagcaagttggcactcatcatccgcataagaacatcatgtcgaccgacaggccgcttgagctactccacatggatctattcggcccgattgcttacataagcatcggcgggagtaagtactgtctagttattgtggatgattattctcgcttcacttgggtattctttttacaggaaaaatctcaaacccaagagaccttaaagggattcttgagacgggctcaaaatgagttcggcttaaggatcaagaaaataagaagcgacaatgggacggagttcaagaactctcaaattgaaggctttcttgaggaggagggcatcaagcatgagttctcttcttcctacacccctcaac

SEQ ID NO: 21712 - DNA, 399 bp, Zea mays
  unsure (1)..(399): unsure at all n locations
ttcgganaccgatacctcttgatagagtaccgataaccttcgctccggtttgatctcggacgcagcctaacttttcatcgtcaacaccaccaaagagtggtgcccctggttgatatccgcaggatatggcatattcttttaattcttctttttcagccttcgttaagtcttgtccaactaagttttgaaagttgaaaatttcctcttccaaagcatcttcagctattttcttccccttctcaggtactgtagccacggcttcttcagtggctgcgacaacttcttctgtggccatgtccagaagtatcttatcaatgttagagaatgtgctttctaaatgtacatcttcagttgtggcagcttctgcagctgcagcttcagcaggtgcaatttcggtca

SEQ ID NO: 21713 - DNA, 417 bp, Zea mays
  unsure (1)..(417): unsure at all n locations
agcttgtgaaggttcttcatccncacatgtgctaagcggcgatgtcacagccagcccatgctagtcttagcaattaagcatgcatctagaccggcctcctcttttgcaaaatcaactaaataaagtttgtcgtctagtacacccttaaaagctagtgaaccatcacatcttctaaaaacagacacatctacatttgtaaatagacaattatatcccatattacataattgactgacagatagtaaattatatccaagagactcaactaaaaacacattagagatagagtgctcatttgatattgcaatcttgcctaaacctttcaccttgccttggttcccatcaccgaatatgattgaatcttgggaattcctattcttgacgtaggaggtgaacatcttcttttccccgtcatat

SEQ ID NO: 21714 - DNA, 397 bp, Zea mays
  unsure (1)..(397): unsure at all n locations
acatgtgctaagcggcgatgccacagccagcccatgctagtcttagcaattaagcatgcatctagaccgacctcctcttttgcaaaatcaactaagtaaagtttgtcgtctaatacacccttaaaagctagtgaaccatcacttcttctaaagacagacacatctacatttatgaatagacaattatatgccatattgcataattgactaacagataacaaattatatccaagagactcaactaanaacacattagatatagagtgctcggatgaaatagcaattntacctaacccttttaccttgccttgattcccatcaccgaatattattgaatcttgtgagtccttggttttgacgtatgaggtgaacatcttcttctcccctggtcatatgg

SEQ ID NO: 21715 - DNA, 421 bp, Zea mays
  unsure (1)..(421): unsure at all n locations
agcttcacgagagagggaacgagtcctatgtcttctgaggagtctagtgttgcggagtggagctcgatgcttgagtgtgtccgtctccatcgtccttgctgcccgtcccttccccccttgtgatggccctgggcatccccttttatagatacaaggggatggtccagctgtacatatgggggtgttgctatgtgctaatgtggcctgcggagaagtgcttgagccctgtagaagcgtagctggcggtgcggtcctgggtcctgctgacgtttctttgccttcatagagagcttgaggactattgacgtcatggatgcatgcggngaaccatcattacctgttgccggagtaatctagatgcgactccgatcttgttccttcgtagcctaaggccgctagctagaggtagggtaatgatgta

SEQ ID NO: 21716 - DNA, 404 bp, Zea mays
  unsure (1)..(404): unsure at all n locations
actcagcttataaatggacgtgaagagtgccttcctcaatggaccaatcaaggaggaggtctatgttgagtaacctaccggctntgaagatagtgagtaccctaatcatgtttacaaactctctaacgtgctttatgggctcaagcaagccccaagagcatggtatgaatgcctaggagagtttcttatcgctaatggcttcaaagtcagaaaagccgatcctactctctttactaaaactattgcaaatgatttgtttgtatgccaaatttatgttgatgatatcatatttgggtctactaacaaatctacttgtgaagagtttagtaggataatggttcanaaattcgagatgtctatgatgggggagttgaagtatttcttaggatttcaagtcaagcaac

SEQ ID NO: 21717 - DNA, 435 bp, Zea mays
  unsure (1)..(435): unsure at all n locations
agctngacaatgaggaaacgtcgctcatcattaatagcttccgccaaatcctcaaacaaaggaggggaaggactacaaaccccgctccaagaaagtatgctacaaatgtggtaagcccggtcattttattgctaaacgtccattatctagtgatagtgacaggggcgacgacaagaagggaaggaggaaggaaaagaagaagtactacaagaagaagggcggcgatgcccatgtgtgtcaggaatgggactccgatgagagctccaccgactcctccgacgaggacgcgaccaacatcgccgtcaccaaaggcctcctcttccccaatgtcagccacaagtgcctcatggcaaaggatgacaaanagaagaaggtaaaatctanagcctncactaaatatacaacatctagtgatgagggagctctagtgatgat

SEQ ID NO: 21718 - DNA, 437 bp, Zea mays
  unsure (1)..(437): unsure at all n locations
ctcagcttagcaacttcacactctntttggaattgngcttgaagacttaattgtctccaagacgtctagtacatttaccattcttttcctttttggggtcactgatggccccttttgtgtttttgctgtttcaatatttactgcaggactcaaaacttctaatgttttttccttagtcggctttttcgcttcttccattttttctgtggatggtgcttcggccatctctgcagtttctggcagcaaggatggctgttcagcttctgtggccgaagaagcttctccggtgaactcangcaccgaagcttggtcaatataacgcggccgatgcgtaagaacctttatctttttccttttcggttctggctcgctaggagcagctgcagcttcttcttttgcagagattttgtgttttctcttcttgcttcgaatgggat

SEQ ID NO: 21719 - DNA, 323 bp, Zea mays
agcttgcataggtttctatcctcctaaagtgtcttatattacttatcaaccctgagtagtggaagcgacaccggatacgggtgaagggggcatcgcggaggtagtcacattggagctggtcctaactcctcaggaacctcttttccctcgcttccggtctcattggcctccatctccaagtgatgcatgtccaggtggtcattagcttcttcaagttcccgctgcacatcatggagctggttctctaagacatcaatagtgttgtctcggatctccacctgctgctcaaagtggtgatgtgctggctcaacctttccacctgt

SEQ ID NO: 21720 - DNA, 402 bp, Zea mays
  unsure (1)..(402): unsure at all n locations
tcctccagcattcttgagcccctcatgcatccgaaggtaacaatatgttccactaggggttatgaagctggttntcggctcatcctccttcttcatccaaatttgatgatagcctgaataacaatccagcagactcataagctctgatgaagctgctgcatcgactagagaatctatccttggcaatggaaactcgtccttcggacaagccttgttgagatcagtaaaatcaatacacattctccatttaccattgtgcctttttaccataacagtgttagccagccactctgggtaatttacctctctgataactccggcactaagggagccttttacttcattccgagcaccttcggccttgtcatcagacatcttctgaagcctctgctttctgggtct

SEQ ID NO: 21721 - DNA, 427 bp, Zea mays
  unsure (1)..(427): unsure at all n locations
agcttgagctatcatgaaaaggtgggcaattcacttatacactntaacacccccactgacattcagcaagaaagaaaggcacaaacgtaaaagtgaaggagcggaggcacaaatgaagtctctgctatgattcaaactctagacctctggctatgataccatgataccatattagagtggatgtactaaccagtcaacccagaaacttatgttgtgaaaagagggtagacaatccacttatacacttcaacattagccacaacgagaaattacataaccttatcatgtaatattattaccaagaagcaaccaaggctggcattcacaccaagggagaaaaataacagtgtgcacaccaccagagctaacgaacttaacaaaatagcgaagacaacaaggagcaatactggacatattggatcacatg

SEQ ID NO: 21722 - DNA, 355 bp, Zea mays
tctaaagggagaacacattgtacgactaacaaatgttcattttgagaaagacaggatatgttacgcaagccacgcagggaaacaagatggcactcatcatccgcattagaacataatgacaaccgacaggccactggagcttctacacatggatctattctggccgattgcttacataagcatcggcgggagtaagtactggctagttattgtggatgaatattctcgcttcacttgggtattctttttacaggaaaaatcttgaacccaagagaccttacaatgattcttgagaccgactcaaaatgagttcggcttaaggatcaagaaaataagaagcgacaaccggaccgag

SEQ ID NO: 21723 - DNA, 353 bp, Zea mays
agcttatcaagtctactttcatatggatccggaattatagtcatatctgttctgaggccgccgtaatcattgttttcttaccgagacatttcctgccttttctgcccatggtgctgcgtcaccctattttggcccaatgggtcgtgtatcaagttaggtccattaaggacgcatcctatggttgcagcacgaccccaatacccttgtggtcgtcctcccatgtttataaaccccctagccgccaccaagaacagcgggttttgtttagatcaagtttagctctcgctacttgcttgcaagcgcgcgtgctatttcagccgcccgtcttcttgtcttcggaaccccaccatatt

SEQ ID NO: 21724 - DNA, 105 bp, Zea mays
aaccttttggtaaacattaaggcgaaaaagttttacttgaattaaagaaaactcccccaatgctgcgccgagcggttatgtcctctcaagctttggaaccatact

SEQ ID NO: 21725 - DNA, 326 bp, Zea mays
agcttcaccggcccgattccgactactcgacatcgtcgtaggcttcgaatccaccacggcggcacccgctctctctctctctctctttgctttcccctctttgtcgccggtggtgctcggctttcttgttgcgcaggcagatcaaaggaggtgaggcgatagtcgaagggggtcgcgagatctgtttatatggtcgaaaccccagacccggccaggggatcggcggagtttgttggagtccaccatgtttgggagctaggaggagatccgcacgtgatgtcacaatcggcaaatggctgagccccacttgccagtgacgtaaacac

SEQ ID NO: 21726 - DNA, 436 bp, Zea mays
  unsure (1)..(436): unsure at all n locations
taaggatatgctggtaacaagtttccagggcttttagtactaaccagttacagctcaagctntgtttcaatgcacgcaagaccacgaggagtatctccaagcatatgtccgaaggttcttgcgcctgagagcacaagcgcctacagtgcccaatgaaattgtcattgaggccatgatcaaggggcttcgtccaggacctactgcccagtatattgctagaaagcctccacagactttggagaagctactccaaaagatggatgaatacatccgtgctgacaatgatttttgcaaagaagggaagaagcctacaggttctctgagatgactaggggctttggagttagaattcacccaaggcatgtcaggtcgattcactccatacagagtcatgacagaggaggtcaacaacagaggccacaatacttctcacaag

SEQ ID NO: 21727 - DNA, 438 bp, Zea mays
  unsure (1)..(438): unsure at all n locations
agcttgtcaattcctgacattntggntgcgagttttgcagcttcngcagcagctttggcttcggcacttgcagcagttatcgttttgccttctgaggctgaaggcggtgctcgctcaatggcttgcatcacgttgactattcttcgtttcttttgcccttcagctttctcctttgcagccgacgattgttccttcttctgtaaaaatttcgttagtttcagcaccagaggacttagcagcttgatgggcagggagtcagtcattacctttaaaatttatgctactttggcagcagagggtgttgaaggagcttcgtctgtttcacccaccttcggcttagcagagtaaggggtaacgagcctccgtattttaaaaggtgtcgccttcggctcaggaagctgtttcgctttctttgaaattntntcatctttttttatc

SEQ ID NO: 21728 - DNA, 423 bp, Zea mays
  unsure (1)..(423): unsure at all n locations
cttcattccaacgtgggctagtcggcgatgccagagccaacccatgttagtcttagcaattaagcaagtgtcgagttcagctctattgaaatcaactaagtataactgaccctctaacactcccttaaaagctactgaatcatcacttcttctaaagacagtaacacctacatccgtaaaaagacaattgtagcccattctgcataattgagaaacaganagcaaattgtaatctaatgaatctacaagaaaaatattggaaatagaatggtcaggtgactatagcaatttacccaatcctttgaccaaaccatgatttccatccccgaatgtgatagctctttggggatcatggtatatctcgtaggaggagaacattcttttcttcccggtcatgtggtttgtgcacccgctatcaatgat

SEQ ID NO: 21729 - DNA, 393 bp, Zea mays
  unsure (1)..(393): unsure at all n locations
attctgaagcccgggacatacaagctagcccacgatcaaagcgagatctacagcaatgcttggaacatcaaacagctacgtcgcttcttcccttaaaatggttcaagtcgntcatgttcctcattttctttacatacctaaataaagtctaactgtcaaggaaggatcagccttgcctcggcaaagcccgaccctccctcgggggctagaaggggggaaccccctctgcgtcaaaaatttccaagaaaagtttctaccgaacaactccgtgcttcggatatatcgaaacggaaccctgaaacgagcgggaaagaccttagcggaaggccgaccgagccganggactcctacagcctccggatacggatacctcactcgtcaccttccgcgaaa

SEQ ID NO: 21730 - DNA, 429 bp, Zea mays
  unsure (1)..(429): unsure at all n locations
ctaagctcacgccctttgccttgagacatcagaatgtcgcttcaaggtcggaaagcaggtcggaggccttcctcgtcttgactacgttgtcatcgacgtaggcctcgaccgttcggccgatgtgttcgccaaacacatggtacatgcatcgctggtacgtcgcccccgcattcctcanaccaaacgacattgtaacatagcagtacatgccgaagggtgtgatgaatgaagtcgcgagctggtcggacttcttcatcctgatcttgtgataccctgagtaggcatcgaggaaagacagggtttcgcacccagcagtggaatccacaatctgatcgatgcgaggcagagggtagggaaccttcggacatgctntgtttagaccaatgtagtctacacacatccaccattttcccctttcttctcacaagc

SEQ ID NO: 21731 - DNA, 324 bp, Zea mays
  unsure (1)..(324): unsure at all n locations
agctngtgaaggttcttcatccccacatgtgctaagcggcgatgccacaaccagcccatgctagtcttaacaattaagcatgcatctagaccggcctcttcttttgcaaaatcaactaaataaagcttgccgtctaatacacccttaaaggctagtgaaccatcacttcttctaaagacaggcacatctacatttgtaaaaagacaattatatcccatattgcataagtgactaacagatagcaaattgtaaccaagagactcaactaaaaacacattggagatagagtgctcattagaaattgcaattntacctaaccctttt

SEQ ID NO: 21732 - DNA, 445 bp, Zea mays
ctaagctttggccgcattgaacttagctcggttatacccgcgacttactgcagactgtaagaacaatcagatcctagaagatatgttgagagcttgtgcgttgcaagacaagtcatgatgggacaaaaggttaccttacgcaaaattctcctacaacaatagttaccaagccagcttgaagatgtcaccgtttcaggcgctctatggacggagttgtaggactccgctgcattgtgaccagcctggagagagacaggtgtttggccccgacactttgctcaaagccgaagagaatattaaaatggttcgggagaatctgaagatagcacaatcaaggcagcgaagctatgctgacaaaaggagaagagaacttgattttgaagtgtgggattacgtctatctgaacgtgttccctatcacgggagtcagaacgtttggagtcaag

SEQ ID NO: 21733 - DNA, 381 bp, Zea mays
  unsure (1)..(381): unsure at all n locations
agctngaagccatggtaagtagcataggccaataatatacgtaatgactcaagcctagctacgggtgcataagtttcaccgaaatccaacccttcgacttgggaacaccccttggccacaagtcgagctttgttccttgtcaccaccccatgctcatcttgcttggtgcggaagacccatttggttcctacaacattttgattaggacatggaactaaatgccataccttattcctagtgaagttgttgagctcctcttgcatcgccaccacccaatccgaatcttgtagtgcttcctctaccctgtgtggctcaatagaggaaacaaaagagtaatgctcacaaaaatgtgccacacgagatctagtagttaccccctta

SEQ ID NO: 21734 - DNA, 484 bp, Zea mays
  unsure (1)..(484): unsure at all n locations
ctaagctntctaaagctctntatgggcttaagcaagctccacgcgcgtggtatgaatggcttatggatttcttgctttccaaagacttcaaaattgggaaggttgacactactctattcactaaaagaattggcaaagacttatttgtttgtcaaatctatgttgatgatattatttttggatctactaatgaattattttgtgaggaattcggaaaaatgatgtcaaaagaatttgaaatgtctatgataggagaattgagcttctttcttggccttcaaattaaacaattgaaagatggaatttttataagtcaatcaaaatatttgaaggacatgctcaagaagtttggtttagagaatgcatagcctatcaagactccaatggcaacaaatgctcatctagacttagatgaaggangtactatggttgatcaaaaactttatcgttcaataattggtagtttgcttatattaccgcatct

SEQ ID NO: 21735 - DNA, 362 bp, Zea mays
tagcatatgccaataatatgcgaattgactcaagcctaactacgggtgcatagggttcaccgaaatccaaaccttcgacttgggagtatcctttggccacaagtcgagctttgttccttgtcaccacaccatgctcatcttgcttgttgcagaagacccatttgggtcctacaacattttgattaagacgcggaacttaatggcatacctcattgctagtgaaggtgttgagctcctctttgattgccaccacccaatccgaatcttggagtgcttcctctaccctgtgtggcttaatagaggaaacaaaagagtaatgttcacaaaaaagtgcaacccgagatcgagtagttaccccctta

SEQ ID NO: 21736 - DNA, 501 bp, Zea mays
  unsure (1)..(501): unsure at all n locations
actcagcttatctgngggtntaggacactacactcaccaacattaccaaaacatgcgacactcctatccttagaagcaaagcctaacctcggcccaccagttcccctcttgaactgactgaccatcatgcccagccggggctcactgaacgacacctagctcaagattgatcaaaggtatgtgttctcttccttgatctgagtcttgtcgtgtatgcaagactcaagagcagactgcaatccctcacatagtgcacactatgaagggtgtagatgcactcactgagctagccttctcaattgaggctatactagcattcttctccgctagctcaatctacaagccaggaaaagtttgacatgcacccaacaagctagacatagattgaagatcatcacactcatctataagggtggcgtactatgtctgcanagtggcaatgttcgacatgtgaagagcacacccatcacattcagtctcgtcggacactacaactaaagc

SEQ ID NO: 21737 - DNA, 224 bp, Zea mays
agcttattttgctcacacgcccacatgcgcttatataccgcattcaatggtctaatgataccggcgacgatcaagccacacgattccgcacgcgtgcgtgatactcatagccttatattccgattatgcggattgtgatgttgctcctacggacgcatgctttatcttgatgggtcaaacgctcgaatatgataatgatgcacgcaccatggccgcacgtatac

SEQ ID NO: 21738 - DNA, 448 bp, Zea mays
  unsure (1)..(448): unsure at all n locations
agcttgtcagcaatataagcacaaaagagagaatgctgcttcngcagagcaaccgaagcctatgctcctgtgtgaagatatagcagaccaaaaggtgttgctgtgatctcagttatctgatgaacaagaaaggaccctgctaagatttttattcaacaacaaagatgtcttcgcttggacaactaacaatctctatggtgttaacagagatgtcattgagcattcactcaatgtggatccatcttttaggccaagaaagcaaagacttccgaaaatgtctgaggataaagccgaaggtgctcggaatgaagtaaagagacttctcagtgctggtgttatcagagaagtaacatatccagagtggctagccaacactgttatggtgaagaacgctaatgggaaatggagaatgtgtattgatttcatagatctcaacaaggcatgtccg

SEQ ID NO: 21739 - DNA, 444 bp, Zea mays
  unsure (1)..(444): unsure at all n locations
cgagtcaatcagtttgcanaggataattgatgctcaaaaggataatctgggtatgaagcacatacgagagaagataagggctggagtagccaaatgtttcaaggaagacgatcaaggtgtgatatggtttaaaaaccgcatagtagtgccaaagaacgaagagctccgccagcaaattcttgatgaagcacatcttagtcgttattctattcatcccggaagcactaagatgtaccaagacttaaagcaacattactggtggacaaagatgaagatcaaaattgcacgctatgtggctaagtgtgacacttgcagacgtgtcaaggccatacacatganaactgctggtccattacagtcgctaccaataccaacatggaaatgggaagacatcagtatggactttattgtgggattgccaggaccgcaaaggatatgactcta

SEQ ID NO: 21740 - DNA, 345 bp, Zea mays
  unsure (1)..(345): unsure at all n locations
agcttctttaccatgtggtcacggttatcttgagaagttgagcaatgcacttcccttttagttgtgtcaagctcatcttcagcctctcattttcttccttgagcttttgatatgaatcatcgcttgttcctgcaaaatctagctcaaaggaagatttgcttgtcgacggacaacaagcattagcacatggtaatataatattaatttgaatacatgtgcatgagtgagggtgttgggattntaaattttctatcacaacctcatgagcaatggttaatatgatatgatcatctctaagaatttcatgagagcatangagcatatcatnatttttcttgaaaagct

SEQ ID NO: 21741 - DNA, 465 bp, Zea mays
  unsure (1)..(465): unsure at all n locations
tgttcacttccgcagtggtgttatcctgtggaggtcagatttgtttggctatgccttttatgttgtacaaagcctttgtaaggtgagccacctcttgctttaattgctcattctccagtgcaacctcatttgaacatgtttctacagcaatattctcaacaagaacttggttgcaggggttagaatcatcgattaaatcaaaacaagaagtagaagcatctttcttaataatttcaagaatttcaactaaagatgctcctgnggtgctaccaatgttttctagcttagtagttagctcataattgtgtatgctaagaatttccattttccctagcanaatnttagtagcttcttgagagctagctaacttagccttaagttnttcattatntntaataacgccatcattggtagatgtggatgaggcgctagactctaattgctcaattttagttgatagctcac

SEQ ID NO: 21742 - DNA, 356 bp, Zea mays
ctgcagcccagagatgctcggaatagtggcctatttctcaaataagtttcttctgcagattctctttccgtttctttatcaatttcccagaattccctcttggtaagctctgagagcccaggttcagtttccgcttgacttttggcagcttccgctttcaattagtgtctttggagcttcacaactatcttcgaagtagagcctgaagattttatcggttcagtacatctacacgtaaccatttttccttttggaagtgttgaaaggcttttgtgcccctcgccttattgttgcaccttcacttttgctgaaagactaaaaatttcgatggctttggtccttcagcccctgggtct

SEQ ID NO: 21743 - DNA, 489 bp, Zea mays
  unsure (1)..(489): unsure at all n locations
cgagaagtgtgcattgtccataananatatgcaacaaccaagagacaaccagttgctgaacatcangaacgtcagttagaacatgacatcgatgcaacacttgaggtggactcactgccgagccctgaggccatatctcanagggaaatattggaaaaacattntggaatcgaatacgatagcgaccagtcttggggctgttgatgcggattctggagtttgacaaataactatatatagaactaccagtcgtttaggtcgtgaacaatctattatgtagtcatgtcgaagggtgtatgttgtagtcaaactgctangtactattgtgtgtctatatgtttgcatttgtggaactatgtctgaactcccggtagtagtatccagtgttgctgcatagcctcttattactatcacttcagtaccacttcagtactaaatggtatantgttgctgggttgtntcacgcagtcgtaaaatggagcagtatac

SEQ ID NO: 21744 - DNA, 385 bp, Zea mays
agcttggaggcgtctattgggtgtcgacttggggtagactcctccttcttttcttctgtcgccttgaatgcgacgggttgagcctcggatgtagatggatcatcaagctcgttgatcttcctcgagccttcgatcatgcactcaaaacttacaaaatgcccgattactttctcgggggtcattttagtatatctaggattaccacgaattaattgaacttgagtagggttaaggaaaataagagatcttagaataaccttaaccatctcatggtcatcccactttacgcttccgagggtgcgcacttggttcaccaaggtcttgagccggttgtacatgtgttgtggctcttcccctttgcgaagccggaatcgatcgagctccc

SEQ ID NO: 21745 - DNA, 406 bp, Zea mays
agctgctaattcttatcaaaacaacagcatttaccagcacaacagctgcagaccatccctataacatggctatttgcatgctgggggctagacatgatcgaacccttcaagagagcttatggaggctatactcacgtgctggttgccattaacaagttcaccaaatagatagagtacaagtccatttcctctttaacctcagccaaggtagtggagttcatacaagacataatatttaggtttgggataccaaatagcatcataactgacctgagatccaactttaccagctctgaattctttgatttctgcgaacaacggagtatccagatcaagtatgcatcagtagcgcattcaagagccaatggccaggtggaaagagccaatggaatgatactggaagcgc

SEQ ID NO: 21746 - DNA, 369 bp, Zea mays
  unsure (1)..(369): unsure at all n locations
agcttcagtcttagcgntagtctcggtcttagttagtcttagttagacagggtagtttgctatatcctgtgcattgatgtttgtcatgatgaactatgtttggtttggatctttgtaatgattgtcaccagagtgtgggtatcccctgcattttggtttacctattatgttaataaagttagttatatagttgggaaaccctttattctactttcctctttatctgagaagctgtgtggtctgtgttggagatcagtgaagatgctcatctgttcagtgctgttgaagaattctatactcttttcttatgctgcaaaatntgccagatcagttctgatgtgtggttgcattctgcagatgtcagagaat

SEQ ID NO: 21747 - DNA, 433 bp, Zea mays
  unsure (1)..(433): unsure at all n locations
tcagaagatgcttcgggaataggtggtggcgatttcccagataaagtttcttctgcagattctttttccgtttctttttcaatttccaagaattctctcttggtaggctctaanagtccagtttcagtttccgcttgacttttggcaccttcggcctcagtttgtgtctttggagcttcggcagctatcttcgaagtagagcttgaagattttattgtttccagtacatctagcacgttgaccattcttttcctcttgggagttgttgtaagggctttttgtgccctcggcattggtgctggcacctcaacttttgatgaaggacttanaaattccgatgtctctgcctcctcagtccttggttcttctattttctccatctccggtattatggccggctcttcaatattcagcatgggagtcagctctttag

SEQ ID NO: 21748 - DNA, 409 bp, Zea mays
  unsure (1)..(409): unsure at all n locations
agcttgtttgggcagtcccgaatcatgtgcccaaaccctctgcaacgatggcactaaatatcccgtgtacgtcctatggaagaaacggcgcctttggcaaggggcgccgctggcttggtcgtccctgtgcgcggtgtagtgctaggcgtanaaggtgcangtgtggaaggagttgggctgtgtgtcgaaccccggcctgcaaaagagttagtatatgtctttgatcgtcgtccctgcacttcacgttcagctntgcaagcatattcaaataatgtggttatatcaaaataatccttataatcaagtatatcctanatttccctgttcaaaccaccacgaaaacgcgccatagcagcgccatccgactcaaccaaaccacaacaaagcatacccttttgtaactcctggg

SEQ ID NO: 21749 - DNA, 440 bp, Zea mays
  unsure (1)..(440): unsure at all n locations
tcatgaacggcacccttcggcatcacgtacagacagtttcagccgaagctggttcttcctgcaggaccttcggcgacgaagcatggtcccaacagtattaatcgattcggatcgccgttacttctcggacactaagacttggtcactgacttacacgtagcattccagtgaacaagaagggttgataaaaagatggctagtttatgccaagtgcttgaactacggtagaaagaactctagattcaggtaatgacttaacttgctaataaaactagattttttaaggatccactatttagtaagcattttgcagacaaagtcttgattcttgattaagccttaccttgactccctcaagccaacatatccttgagagtcttttattntgatgggtaagacttacgaaagtacacttcgtactcagggtttttgaacccatg

SEQ ID NO: 21750 - DNA, 414 bp, Zea mays
  unsure (1)..(414): unsure at all n locations
agctttacctctgttcttaactgtaagntgatttggcttgtttagggatatagcttttgctatgcatctatattacactatctctagatacatagtaaacctatggatctagaaaagctaattccacttataatttggatgagagagggtattaattagcaccgaaactcacaggaaatattttcgccttaagttaataaacactccatccttgctacctggaagtatcactttgacttgggatatttgaagcaaactacatgcctccaaacattgtgcgtgtcatgtactaaattggtttttagcattgtttagtgccatgctcagctaattagataatacaaaggaaatacaagatcatgacagggtcaagtgcccatcattcatcctatcacnaattgcaagctacatgtc

SEQ ID NO: 21751 - DNA, 454 bp, Zea mays
  unsure (1)..(454): unsure at all n locations
tctaagggagaacacgtgataggtctgactaacgttcaattcgtaaaagatagaccttgtgcagcttgtcaagcatgtaaacaagtgggaggagcgcatcacagcaagaatgtgatgaccacttcaagacccctggagctgctgcatatggacctcttcggacccgtcgcctatctgagcataggagggagtaagtatggtctagttattgttgatgacttttcccgcttcacttgggtgttctttctgcaggataagtctgaaacccaagggaccctcgagcgcttcctcaggagagctcaaaatgagtttgagctcanagtgaagaagataaggagcgacaacgggtccgagttcaagaaccttcaagtggaggagttccttgaagaggaagggatcaaacacgagttctnctgtccctacacaccacagcaaaatggtgtggtacagacga

SEQ ID NO: 21752 - DNA, 452 bp, Zea mays
  unsure (1)..(452): unsure at all n locations
agcttcatgagtggtagcttcggcatcacgtatagatagtttntgccgaagctgnttctccctgcaggaccttcggcgacgaagcatggtcccaacaaaatccatactgatttcttcccatttccattccggtaccttgagaggttgtagtaatcgtgctggtctttggtgttcggctttaactcgctgacacacgtcacataatgcaacatgagtagcaacatctcttttcaatccgtaccaccaatacttttccttaagatcctggtacatctttgtacttccagggtgaatagagtaagctgaatcatgagcttctctcaaaataagttggcgcaggtgttctatttttggtacacagattctcttcttaaaccatactgtgccttggtcatctttcgtgaaatctggggctttacccatcccaatcaaagttttaatttccttaattt

SEQ ID NO: 21753 - DNA, 475 bp, Zea mays
atgttatcttgtacccatcaaacacattctccacgatcctcatgtatgtcctaaccttcatatttggttccgactgcagtattcccataagtcgcttcccaatgagggttgatgtcaattggcgatgtgtcatcgttaactcatgttcagcacatgtgtgtggccccactactattgttatcttccactttgcggtgatcttttgtatcctagcacaaaccctccatgaacagttatccttgtcgcatacaaccgtgtaacgacgtttctcgtacgaatgaagtactctataccgcctcttacgtaagactgcataatgctgcaaccacctcttcaaggcagttaggttcttgaagaccctacccttttcaatcatcatgctatgaccggcctcaggagcgtcaagcagctcatcatccctgccctctgcatttgcctgatgagaaagactaagatcgctgaactcatgcactct

SEQ ID NO: 21754 - DNA, 346 bp, Zea mays
  unsure (1)..(346): unsure at all n locations
agctttaaccctaaatagggattaaaggggtaaaacttaacccaagttgagaaaacctaaaagctttatggtaaaaggcataaatgaccctcaagataaagttgaattacatttatacccctgtgataccacaaaccctaattggaacactggaaaaccctaaaaccaaaccctcagggcttatgtgcaaaattagtccacttttgggctaaagtgcaaaaaccaagctaaataagtattttaagtcatttggttcacaaatatgtggacttgaaagccaaaccctaagttntggacttaaatgcaaaatggacctcattttgagtctatactaagtctgaaattc

SEQ ID NO: 21755 - DNA, 423 bp, Zea mays
  unsure (1)..(423): unsure at all n locations
tcggcagtacaaaccgacttaaagatagaatgaccttntagtccataaaggtctgagtcgatgttgtaagtttttataaggggcatagttgtaattcctcacaggctgcgtcctgtgcctataaatagtgaacagtattcctttactgttcacgcattctggtaatcgcaatcgcatatcctggaattcaacctttgccaaggcagaggtattattgtattcactgattcaacatattaagtaaatataatacaattcatctatgatttatttaccccttttttgtacctcttattttatgtctcttgaaatttcattacgaagaattaagcttcgtaatgatactctcatcaaccttcgttcaaggcccattatcctcaagggaataatgtttcatgaacgaaggacgttaacatttaatat

SEQ ID NO: 21756 - DNA, 275 bp, Zea mays
agctttgccagatcagttctgatgtgtgggtgcgttctgtttatgtcagagaacaggcgtagaggaggaaggcgtgctcaacatgagcgagccgctccgcaggatgaggtgccccagcagcagcacctgccgcccccgcccccgatggttattgagcagatgtttctgatgcagactcaagcagtttaagctatcggtcaaactttggccgccattcaacagcagcagcagcagcagcagcaggccccccccagcctcagatgcctcagatgcct

SEQ ID NO: 21757 - DNA, 386 bp, Zea mays
aactagcttctgctcacacttcgtctgataaccttgataatccggttactcaacccgactgtcgagatcctgtccacattgactcaaaacactgtaatctgttttgaggacttggatgccaagtcccacagtaccctccaatattatttgttataataacaattcgattgcactgacgaagcttatgccaagtccaaaaaacaccttcctttgtaaatacaacattactgacagtgggttttaactttaacgcctggcgtataaatagatatccacaactcttttggacgccacttgcatctgccctgttactaatttatctttgccgcaaaattactgactttagtttgaacttcgattgaaatagtttacatttcgaaatgttg

SEQ ID NO: 21758 - DNA, 408 bp, Zea mays
agcttgagagtctgagtgaacttgtgttgtaacgtcgcatgtctccccttttatagctgaaggggggcatgcacaaaggtactgagccccgacatgtgggcccagggacaaaatgtatatagcacttggagctactaatgttcgctacaggggcaatcttctcgtgccctgacacccgagatctgcgtatccttggcgtgtcggggaagcttcttgtacaagggacgatatccacagtgcgctgcatagcacgggcgcactgtttggtaacagacctgacagacgtgccgcctgcaaggttaccctaacgtcgtctgccagcgaagtggacaggacgcattaaatgctgagagggcacatcgtctgtcagcgtgatggcaggcggtgcgtcctctctgtattaaatga

SEQ ID NO: 21759 - DNA, 318 bp, Zea mays
  unsure (1)..(318): unsure at all n locations
tctaaaggagaacacgtgatagggttgactaacgtgcaattcgaataagatagaccttgtgcagcttgtcaagcaggtaaacaagtgggaggagcgcatcacagcaagaatgtgatgaccacttcaagacccctggagctgctgcatatggacctcttcggacctggtgcctatctgagcatangagggagtaagtatggtctagttattgttgatgactnttcccgcttcacttgggtgttctttttgcacgataagtctgaaacccaagggaccctcaagcgcttcctcatgagagctcaaaatgagtttgagctc

SEQ ID NO: 21760 - DNA, 442 bp, Zea mays
agcttctctctgttctcctttgagggctaatgtgccataagagcagcttgacaggcctttatctcatttgcttcttttttccttgtaatctgtgtccattttttcgtggatgaggtggacaacggggttctccgggtaaacgaattctctactcctggcttgcaggaggtagtcttcgcccggggcgctggaggttgcgctttttcaagctccgtttcggctttttcgaagattttcgaggaaggcttcttctccggtggatcagctatacgatgcacaattccttctttgtctgccacgaatgagatggtttcgaagcagaacatggatccaggtcgaagggcaatcttgtgttgaaaacgatggccattgagctagcttggatcagcgacacaccctctacctggcgcgccagctgtcgggttttggacctgaccgcaca

SEQ ID NO: 21761 - DNA, 361 bp, Zea mays
  unsure (1)..(361): unsure at all n locations
tggcagagcgagccgcatacaccgagcaccattgactgtacgattgctaagcgaactacaccccggatcctctaattattcagctaagggcaccccattccaccctcatggttgcactgatatcccgggcggtcatccaacgaacaggtccttaccgagaggcactccataaaccgctcgagcccccttgatggacacaattataacatcataataaaagaggggagaacaacgtatcattgataattctcatcatgttcattgataagagttgagcattagcatanaactagacaatattaatccaacccaaataggttaacaaggacatggataacaaaagctagtcaatccttaggta

SEQ ID NO: 21762 - DNA, 443 bp, Zea mays
  unsure (1)..(443): unsure at all n locations
agcttctaaagggagaacacattntaggactaaccaatgtttattntgagaaagacaggatttgtagcgcatgccaagccgggaagcaagttggcactcatcatccccacaagaacatcatgactagtgacaggccactggagctcctacacatggacctattcggcccaatcgcttacataagcatcggcgggagtaagtactgtctagttattgtggatgattattctcgcttcacttgggtattctttttacaggaaaaatctcaaacccaagagaccttaaagggattcttgagacgggctcaaaatgagttcggcttaaggatcaagaaaataagaagcgacaacgggacggagttcaagaactctcaaatcgaaggttttcttgaggaagagggcatcaagcatgagttctcttctccctacacacctcaacaaaat

SEQ ID NO: 21763 - DNA, 502 bp, Zea mays
  unsure (1)..(502): unsure at all n locations
ggacattgtctctnctttggaagccaatgccatccttaatgccggtgcgtctcccactataaagcatactacgagcaaatttaaatttttcatttcctaactcatgcctcggcaatttagcatctaattntgctatatgatcatnttgttgtttaatcatagcaatgtgatcatgaatagcatcaatgttaatatctctacatctagtgcaaatagaaacatgctcaacggtagatgtagagggtttgcaatcatttaattcaacaatcttagcatgtaaaatggcattctcatctctaagattagaaatagaaatattgcanacatctagttccttangccttagcaatcaattttctttttcaaacttaaggctagcaagagagggcattcaattttcaatcttagcaatcaaattagcattatcatttctagattggtaattgaatcatcacaaatattagacttctcaaccttagcaatcaaattagcattctcaatt

SEQ ID NO: 21764 - DNA, 356 bp, Zea mays
  unsure (1)..(356): unsure at all n locations
agcttgtgaagccaatcacaagnttgttgaagaatgacattaagttcaattggtcttctaagtgcaatgaagcctttgagcaactgaagacactattgaccactgctccggtattagctcaaccggacatcactaaaccttttgacgtatattgtgatgcatctggcagtgggctcggctgtgtactgatgcaagagggccgagtgattgcgtatgcttcaaggcagttgcgccgacatgaggagcactatccaactcatgatctggagttagctgctgtggttcatgtcctaaagatttggcgtcactatctgctgggaaatatctgtcacatatataccgatcataaaaggttg

SEQ ID NO: 21765 - DNA, 464 bp, Zea mays
  unsure (1)..(464): unsure at all n locations
acattgtctcccctgtggaagctaatgtcatccttaatgccatggcgtctcccactataaatcatgctacgagcaaatttaaatttctcattttctagttcatgcctcggcaatttagcatctaattttgctatatgatcattttgttgtttaatcatagcaaggtgatcatggatagcatctacattaatatctctacatctagtgcaaatagtaacatgttcaacggtagatgtagagggtttgcaagtgtttaactcaacaatcctagcatgtaaaatagcattctcatctctaagattggaaatagaaacattgcaaacatttaaatctttagccttagcnaatcaattttcattctcaattntaaggctagagagagatgcattncaattgtcaatcttagcaattaaactagcattatcatttctaagaataacaattgaatcatcacagacatttga

SEQ ID NO: 21766 - DNA, 372 bp, Zea mays
  unsure (1)..(372): unsure at all n locations
agctttntgtatggacggacaggatgacgttacattacacagaaaatgtgcccgtagaaaacacgccactgaattttgcatctgatactgtctgcagcggaggactctctgcctaccctcccctattcatcgtggctacaatcgactactgctccctcaacgcagatccctacctgataacgctatccgcaaccgatacctttaaattgtttcccctatatcactttttccctctatttttctgcctatgttttcatctcccgcagcggttccccctaaatactgcccctataccccactacaactataaaatatcattttctatatctactaccaaatttttatctactaacattactcgtggcccacaca

SEQ ID NO: 21767 - DNA, 440 bp, Zea mays
  unsure (1)..(440): unsure at all n locations
cttgtgaggagattagttgcgacatanacgactctataatatcaattcagggtttgttgtcccatattacatatggaacagttgtccgacggttgatctccattacctcagaagatgattgggtgatatatttaagaattgtgaagacgatggttccaccatgtttggatgtggttgttcaaaagttacctgttagtcattgcgatggtccagtcgggttgtatccacaaatgccaaatgcatctcgtattgaagctcctttggtagagcttcatgaagaagtggttgttgtgcccgatgctcaatcnggtccgcacgagtatgggatttctcgtcctcttcctggcgtttgtggggcttctaatccagtggtaccccccaagagatcccattgacccaggatccagttcacgatcattcctagtagtgtctttgacaca

SEQ ID NO: 21768 - DNA, 418 bp, Zea mays
  unsure (1)..(418): unsure at all n locations
agcttgtgaaggttcttcatccccacatgtgctaagcggcgattccacaaccagcccatgttagtcttagcaattaagcatgcatctagactggcctcctcttttgcaaaatcaactaagtaaagtttgtcgtctaatacacccttaaaagctagtgaaccatcacttcttctaaagacagacacatctacatttgtgaatagacaattatatcccatattgcataattgactaacagataacaaattatatccaagagactcaactaaaaacacattagatatagagtgctcggatgaaatagcaattttacctaacccttttaccttgccttgattcccatcaccgaatattattgaatcttgggaatccttggttttgacgtangaggtgaacgtcttcttctcccccgtcatat

SEQ ID NO: 21769 - DNA, 292 bp, Zea mays
tgtgaagattcttcatctcaacatgggttagtcggcgatgccagagcccacctatattagtcttagcaattaagcaagtatcgagttcagctctattaacatcaacttagtatagctgaccatctaatacttccttaaatgctactggatcatcacttattctaaagatagttacacctatatccgtaaagagacaagtggagcccattttatattattgagaaacagaaagccaattgttatctaaagaatctacaagaaaaaccattggaatagaatggtcacgtgatat

SEQ ID NO: 21770 - DNA, 441 bp, Zea mays
  unsure (1)..(441): unsure at all n locations
agcttagcaagtgcgagttctggatcagtgaagtcctattcttgggtcacattatgaaccgagaaggattggttgtagattcgaagaaggtaacaactatcttggactggaaagcaccaaaagatgtccgaggaatcaagagtttcatcggaatggccggttattatcgatgtttcattgaaggtttctccaagattgccagaccaatgacagccttgttggcaaagaaggttgagttcaaatggaccccagcatgccagaagtcctttgagacattgaaagagaagttgacaacggcaccagtgctgattttgccagatgttcacaagccattttcagtgtattgtgatgcttcgtataccggactangatgtgtgttgatgcangaagggagagtagtggcatactcgtcccaacagttgaagattcatgagaagaata

SEQ ID NO: 21771 - DNA, 456 bp, Zea mays
  unsure (1)..(456): unsure at all n locations
ntaactctcgcgagaccttttcccatntctttctaaccatggtgagttcattatcgtatgtgatattctatgcatgttcactnntattgttcccttgtatggtgtactgtttgtttcctaatttgaatggatgaatgtatgtatgcttgcaatcacatagagaacgatccggttgaagagcccgaggaactcgcaggagaagcccctgagcagcagtcggttggtggaggcaagtgtcccttgacctatctctgtcctattcattctttaattcacctcccgctttacacatttatgcctaaggattgactagcttttgttatccatatccttgtttacctatttgggttggattattattgtctagctttatgctattgctcanactctaatcaatgaacatgatgagaatatctatgatacgtctgtttcccttctcttattatgatgttgtac

SEQ ID NO: 21772 - DNA, 352 bp, Zea mays
agcttaacagatgctccgaaagacttttctgcataagagtcttgtcggggaccataattaggggtaccctcaagactcctaattctcagctggtaaccccatcagcataaagctgctaaggcctgatgggtgcgattaagtcaaggatcagtccgttcgagcgactcgatcacgcctcgcccgagcctagcctcggacaagggcagccgaccccagaggatttccatctcgcccgaggccccccttccgacggcgaacatatctccggctcgcccgaggccctgccttcgctaagaagcaaccctgactaaatcgccgcaccgaccgaccaaatcgcaggagcatttaacgc

SEQ ID NO: 21773 - DNA, 489 bp, Zea mays
tatattcataacttggaaaaaacttggaaagtggtggtatatcatattccaaactaaatatgtcaggaatcaacagaagaatccagaccaggtcgcttctttagtgaaagaactagttggtgccattatgggttagttggggcctgttgggctcagtgttgtgtttaacctcagtaggcgtttgagtttttgcccttctgctctcttttttctccctctttgtcttcgtgtgagtgtcttgtaaatgtttctcctctctaatatattggagcggcaaatcttttgcccctctcattcaaaaaaaaaagaattccaattctctaaaatgaagggatccaaacgctccgttagattaatttatggatgatttcttgtgcgtttctgatagtcgcctagagggggggtgaatagggcgaaactgaaatttacaaaaataatcacaactacaagccggcgttagcgttagtaataataaatgagtccgcaaga

SEQ ID NO: 21774 - DNA, 434 bp, Zea mays
  unsure (1)..(434): unsure at all n locations
agcttccatcgatattgccgtagactgttgaagactagctgtaaatctttaatgaaattntctgaattctctgtcttgatcaccacatcatccacataagcttccacacgcttgccccagtggtcggccaagcatgtctcaatagctctctgataagtcgttccagcgtttttgaggccgaacgacatggtggtatagcagaaggcttcgaacggggtgatgaatgttgttttttcctcgacttcttttgcctaactaatctgatgatacacagagtagcaatccaagaaagacaacacagaacatctggcggttgaatccaccacctagtctatcctaggaagcccgaagggatcctttggacagtgtttgttgagatccgtatagtcgacgcacatgcgccaatccactntattctttttgagtacaagaac

SEQ ID NO: 21775 - DNA, 483 bp, Zea mays
  unsure (1)..(483): unsure at all n locations
tatanaactcatgcacttcatctagtgtagcctgttctgaggccattgttggatactctctactaatatcagccaccaagtcatccatccgatcctcctcatcatcatcaattctttctgactctatgatatgctgctctacttctccatgtgagcgccacacaagatagttaggcataaacccattcttgcaaaggtaatgctccagttcttcgatctttctcacatacttaaaattccgacacttggtacacggacacttcaccacacgaggtccaccggaaaatgcgagatccactgaatggtttgcaaccctaacccattcctttgagtgacctagagtcacgctattgaatccatcatacatcgcccttcttctattgtcatccatttctaaatctacataacccaatgtataaaaaatgtgtagataaacatcattaagcatataaacgttaaatcagactgtgtataataacccct

SEQ ID NO: 21776 - DNA, 451 bp, Zea mays
  unsure (1)..(451): unsure at all n locations
agcttgcacacatagctcatttgaataccttngatcatatctcttctatatgctatgactaatgtgttttcaagtctacttcaaaccaagtcataggtatattgaaagggaattggagtcttcggcgaagaaaaaggcttccactcagtaactcatacttcgccatcactccgagcaactctctattccttggggagaaataagcatcaaagaaaaggacttcatccttcgaggagagagtaaaagctcaaaagcaaaaggaccggatttcgtctttggtataatcttaactcatttacttatgaccaaaggggaggaacttacttcaagggctctaatgattccgtttttggcgattcatgccaaanagggggagaaatgagcccaaagcaaaaggaccgcaccaccaccaccaaattcaaaaacttagtgcttccaaaagttttatcat

SEQ ID NO: 21777 - DNA, 474 bp, Zea mays
  unsure (1)..(474): unsure at all n locations
tactaagctttagtgagggtggtttccacatactaaaaattagtcacctttatgtagcgactattatgcaatgaggctttatatgcaaacgtgtaaataaatcttctgatccatttgatcgtgggtatatcacatttagggtatgtttgtttccttcttaattatatactagttaggtgcccgtgcgttgcaacggcacatagaaacagactttcgaatgtaattatcgcttccttctttgttagaccaatacaaacaaagtctatggctagataccaagtatgaaaaacaaagcatggtggtgatatcgaattctaagctgttagcattgttcagagtgcgagggcgaatccctcgcanaatagtatacgaatatacactcaatctcaaatccatctcanattaacaggcgaacagatagatagacattngaagcatgatcttgtttctcctgcagcagctgcacagtatcac

SEQ ID NO: 21778 - DNA, 256 bp, Zea mays
agcttgttcttgggtttgtgaggggaatgaaaggaggtatgcccggtggatgggaagcaagatgtgagatatggggctgcggaaagggagctatcttttcttaccaccgagcacgcaccactagagacgatagcattccttcatagactgtcatgataaacttacgggacttgggtatgtgtaccttatgaaacactaggctgaatccctagagaagaccatagagtatcatattgaagggcagatgagagagaga

SEQ ID NO: 21779 - DNA, 354 bp, Zea mays
atatacgaatggactcaagcctagctacgggtgcataggtttcaccgaaatccaaaccttcgacttgggagtattccttggccacaagtcgagctatgttccttgtcaccacaccatgctcgtcttgcttgttgcggaaaacccactcggttcctacaacaatttgattatgacgtggaaccaaatgccatacctcgttcctagtgaagatgttgagctcctcttgcatcgccaccacccaatccgaatcttgaagagcttcctccaccctgtgtggctcaatagaagaaacaaaagagtaatgctcacaaatattgtcaacacgagatctagtggttacccacttatgaatgt

SEQ ID NO: 21780 - DNA, 306 bp, Zea mays
  unsure (1)..(306): unsure at all n locations
agcttcctgaatcgttattggtgcttattgaatatacttctatgtttataattggcccaagccatgattgtaaatacttcatgcccttttccccattgtcttgaattttgttcagagggctcaattatggtttctattggggttgcaacaatattgcctttgtgaacnacgatttcgactttgtcatgacactttttaatataagagtagtgggtcctttattcttaagtcaatttgatgttcatgctcaattttggttcacataagatgatggttcatgcaatacctcctatatgagctgcttat

SEQ ID NO: 21781 - DNA, 58 bp, Zea mays
caaaaaaactatgtccgcatcgcctgaaaaacagactctttgaaagccatacaaccta

SEQ ID NO: 21782 - DNA, 376 bp, Zea mays
tttttcatgtttgaaactgaaccccacatgtggattaagggcgctactatgcagactgagggtgttgctgctcgatggcttcaatctatcaagccacggtaggcatacctatcatggcgtccgatttgccatgcaatccaagatctgtttatacgtgaacaacatgagctcgctattaagaaaatatgtcctatctaaaagaattcttcggtccacgaatatagagaacgcttctgtgaatcgattgatcttcttaagacctactagcacaataccaaccctctctatcatactatgaaattcatgacgcgttaattgcggccggactcgccgtattatacctactaaatgacgcaagtcacgccttataggcacg

SEQ ID NO: 21783 - DNA, 410 bp, Zea mays
gctcgcggggtaatttttggcagcacacaggcatgcttatagtcgggtacttcacactacatgttatcatatatgctgcagtgggaaggaatcgtaagctctgcaccgctgacagtacccgactcgtgacggggaccatacacccaaatgctgaataccaaatacgcgtacccattgatagtgggaccacccttactcggaaattaaatcgttcttacacgagctagggaggtgttttcggactttgtattcgaacctgagagattttcacggtcttctggtacaaaatgatctttgactgaagggcacggcggggtcgatagtgtcaagtcctaaaagagtacttaagagtgttaagcgagtttacttaaatttcagtcgtgttaatccctctaaaccacgcccccccc

SEQ ID NO: 21784 - DNA, 407 bp, Zea mays
agcttgtcaagcgtatattggcacccatctcttgatgggtccatcaaagttaggcaacaaagatctacgaacccaaacgtctttgtgttcgcactatgtgaactcattacctttctagcacaagttgctattctgggttgcctagctacatgagaattaattgacaaccttggagtgcggttgctaccaatgggacaatctttgcattgatgtcccttttttcggcatatgtagtataggcgatcattcagccttgaagaattcttcccttcttggttcttgcgtgctacagcaataagggataaattctttctgacataaagccctcttgcttcaatatggacagaactaataagttccctttttgacatctaaacaaagtcatattctggtataatcggtttttt

SEQ ID NO: 21785 - DNA, 426 bp, Zea mays
tgtcatccatcgtgccgaagtcatcacatatcttctggcatgattgtccagatggcaagactgatcgtcagaagctactctagcagaaaggctgtgttgtctggattacaggccttagtggttcacgatatcaaaccttgctttctcagtttatctcgaactggtttgttgtgtgcttcttgcactatcaatgcaattgttaagttttttaatctaatgctatgtcaactgcagtcggtgactctttatgcatcatatatattgtatcccctttgtttgcccttgttggcattgttgttgtagataatgaattcggctatgagatctatactgactgttttgttgagtattgagtctccaaagtatttgacccaatgtttcactattgtctattatttagagtcatagaaaagactttatgcttac

SEQ ID NO: 21786 - DNA, 353 bp, Zea mays
tagcttgtgaaggttcttcatccccacatgtgcttagcggcgatgccacaaccagcccatgctagtcttagcaattaagcatgcatctagaccggcctcttcttttgcaaaatcaactaaatagagtttgtcgtccaatacacccttaaaagctaatgaaccatcacttcttctaaagacagacacatctacatttgggaatagaccattatatcccatattacataattgacttacggataacacattatatcccatcgactcaactaagaatacattagaaatagagggctcatttgagaatgcaatcttgcctaagcccttaaacttgccttggatcccgtcaccgaata

SEQ ID NO: 21787 - DNA, 484 bp, Zea mays
  unsure (1)..(484): unsure at all n locations
ctaccttgaattatatcagaaagtattttagttcaagatgatngttattcctgggatacaatgtannacaatgttagctcatacacttttccaagtggagttgacgatgaccagtcctgttctgtattaaatatatttgatgtcaactactcatcttaaaatgttgtgaactgcgatgcacttgcaagatagtcccagtactcagccctcccgtagaaggccctaagagtaaaccagatctattcttcttccctctctctactaacaccctgcccctccttatagagaggtaatcctaacttaatagctaagcaacataacaaactctatctggacggcgctgttcacgcgctacagtaaccgcacgtgaacagtgggcgcggctaacctaaccataatgacatagctaatgggcttaaggcccatacatagaaacactgatcttttagttgtcctttataatacatggatgctcttaattatg

SEQ ID NO: 21788 - DNA, 307 bp, Zea mays
agcttgcttacttggtaagatgaccaaggcgctcttcactggtttaccggagaggacgttagatttattggaactcatacatactgatgtgtgcggaccaatgagtacgacaactaggggaggattccaatacttcataacctagcactgaccatattagcggggagaagaagatgtttcactctacacaagtctgaatccttagaatagttcaaagagtttcagaatgaagaacaaaatcagcgtggcaagaaaaataaagcactgcgatcagatcgcggggtgaatattgagtcatgatttagca

SEQ ID NO: 21789 - DNA, 231 bp, Zea mays
gtgcagcttgtcaaacaagtaaacaagtgggaggagcgcatcacagcaagaatgggatgaccacttcaagacctctggagctgctgcatatggacctcttctgacccgtcgcctatctaagcataggaggagagtagtatgggttaaatatcgttgatgactcttcccgcttcacttgggtgttctttttgcaggataagtctgaaacccaaagaaccctcaagcgctttc

SEQ ID NO: 21790 - DNA, 369 bp, Zea mays
  unsure (1)..(369): unsure at all n locations
tcttgtagctgctgccaaaaatgagaggtgaactgcgttcctctatctgacactatcttcttcggcacaccatgaaggcagactatccgtgacatgtataactcagctaacgttgctccggtgtatgttgtcttcacaggtatgaaatgggccacctttgttaagcggtccacaaccacccagatggaatcataaccggcccgggtgcgaagtaggccaactataaaatccatcccgatctcattccacttncactgaggaatccgcaatggctgcaacaatccggcaggcctctggtgctccgctttggttctctgacagctatcacagatggcgacatattccgtgatcttccttttcatgccatac

SEQ ID NO: 21791 - DNA, 435 bp, Zea mays
  unsure (1)..(435): unsure at all n locations
agcttctaaagggagaacacgtgatacatttgactaatgtgcatttagaaaaagatagaccttgtgcagcttgtcaagcaggtaaacaagtgggaggagcacatcacagcaagaatgtgatgaccacttcaagacctctggagctgctacatatggacctcttcggacccgtcgcctatctgagcataggaggaagtaagtatggtttagttattgttgatgacttttcccgcttcacttgggtattctttttgcaggataaatctgaaacccaagggaccctcaagcgcttcctaaggagagctcaaaatgagtttgagctcaaggtaaagaagataaggagcgacaacgggtccgagttcaagaaccttcaagtggaggagtntcttgaggaggangggatcaagcacgagttctccgcttcctacacaccac

SEQ ID NO: 21792 - DNA, 409 bp, Zea mays
  unsure (1)..(409): unsure at all n locations
cgagtcaccccttgtacactcttatggtattatgcanatgtcacagtaacatanaccctcccttgattagataaactntatgcttaacaaattctaagcctaacggtagatattaattgtaaggtgctgaanaagttcgccttgatgcgacaacccccaatcaaacggtgttaaacctcagcgaatcagaagaagacaagctattgtgctgcttatactgcaacaaggatgtattcatattaatggtctagtctggacctcatcgacatcagtcgcttgatcataaaacatagtctaagcaccgacccaacaatacgccccaaaagcaaaaaattacgcaaanatattctatgagaagatgaaagcaacaaggcagaagtcaccgtctgttggaacaaagttatcgagc

SEQ ID NO: 21793 - DNA, 356 bp, Zea mays
agcttgcatttgggtccctaaggaaattgtgactaaccttgtaggacccaacaagagttgggtacctaagacccaagcctaaatttgccttgcaggtttatgcatccgggggctcaagttggattatcgacagcggatgcacaaaccatatgacgggggagaagaaaatgttcacctcctacgtcaagaataaggattcccaagattcaatcatattcggtgatgggaaccaaggcaaggtgaaaggtttgggcaagattgcaatatcaaatgagcactctatctctaatgtgtttttagttgagtctcttgggatataattactatctgtcagtcaattatgtaatatgggatat

SEQ ID NO: 21794 - DNA, 437 bp, Zea mays
tccgaggctgctatcgaggatctccccgcagcctcagctattgaaggcaagccccggtttatatgcataaccgtattattatatgctactttactacacttaatgcttgtaggaatgtaatgtgcacttaagtgtaagagttgcttgaaacctctagttgcatgaacttaggattccttttttgagatgaatactagtatgctaggtcgagtaactgcttgctaatcaggatcttggtagaagttgagtgaattttctagcactcgcgcgaggtcaggaattgattgtattcatcttgataacgggatctatgttagtctatggacttggatccagggaggatgccttgtccatgagacgggaaaaaggaattaaggattaatgtgtggatacctgagtcaagcttttgaacgtactaagcacatgccgggaaaaat

SEQ ID NO: 21795 - DNA, 407 bp, Zea mays
  unsure (1)..(407): unsure at all n locations
agctnggtgccaatggaaaaacagaaatccttgaaatcttgattgtcaaactgcttgccgttgtcaactgttagctcggacggtactccgaagcggcaaacaatgttctgccaaaagaatttttgggcagtctttgatgtgattgtggacacagccctcgcttcaatccacttggtgaagtattcgacggctacgaaggcgaacttgaggttcccctgagcggtgggcaagggcccgacgatgtccaggccccagcgctgaagaggccatgtatgggcgaccagctttgtgtattgcgaggggttgcctgaccgaggagagaacttctggcaggcttcgcaggaccttgcgactcgatttgcggcgcagatcattgcaggccagtaaaacccttgtcggatcacctt

SEQ ID NO: 21796 - DNA, 473 bp, Zea mays
  unsure (1)..(473): unsure at all n locations
tcagcttacgggctactggcggagctagccgaagcactggttgggctgtttggtggctggagtgggctggccactgcggccgtagctctggcggcaatggctggcggaaatgagctcgccggagctaaggaacggtggctggccggtgagggtgagtgcggtgcgaatagaggtgcgcccggcgaggctttatatgcgcgggcgggcacagtcganggcgtgggcgcgcggcggacttgaccggacgccggggcgagcgcgcgcgcgggttgngcgagctctggcgtgccgaccagggtcgaacacgtgtgcccgtgcgttctgcccaagctctggcgcgtgtggtcgctcatccgagcctgctctcgccttggcagtgcacaaacctcttttctcctacaactaccattctgtgtggggtatacgtttgcctctgttgcaaatatgacaaggaattgtctgctcctgcccac

SEQ ID NO: 21797 - DNA, 442 bp, Zea mays
  unsure (1)..(442): unsure at all n locations
agctngcttttgaaataaatgtaagattatgtaattcgcttccgcatttcttcatctccgatgttctgtaatgtctacaagatgggtgagacgttcctggtgaggtaaggaaagataccgaacttgtcaagtagttcaggggcacctacagggttgtctgatgtccgttggacaaagacaactgtaggtgggcctaattacttgggaggttccgtcacaaccacgaattaattgaacttgtgtgggattaagaaaaacaagtgatcttagaataaccttgaccatttcatggtcatcccattntgtgctcccgaggttgcgcacttgattcaccaaggtcttgagtcggttgtacatggcttggggctcctncccttggttaagcatgaatcgatcgagctccccctcgatcttttcccgcttggtgatctttgtcacctca

SEQ ID NO: 21798 - DNA, 439 bp, Zea mays
tagaaaaatctggtatgaatctgcgataatacccagctagtccaagaaaactccgggactggtgaacagttgttgggggtttccactccagaatatctttgaccttgctaggatctaccgcaattcctttagctgataacacgtgccccaagaatggaatttcttccagccagaacgcgcacttactgaacttggcatataactggtgttccctcaggcgcgtcaatacaatccgtaaatgctgagcatggtcctcttcattcttagaatatatcaagatatcgtcgatgaagactaccacgaacttgtccaactcgggcatgaacaccgagttcatcaaataggtgaaatgggcaggagcattggtgagcccaaaagacattaccaagtattcaaacaatccatatcgcgtagtaaacgcggtcttcggtatatcctc

SEQ ID NO: 21799 - DNA, 347 bp, Zea mays
  unsure (1)..(347): unsure at all n locations
agcttacccctccctgngaagggccattcatcatcggcaaaantttgaagcccgggacatacaagctggtcaacgatcaaagcgaggtctacaacaacgcttggaacatctaacagctacatcgcttttaccattaaaatgtttcaagtcgtttatgtacctcggtccctttacatgtacaaaagtctagctgtcaagggaggatcggccttgcctcagcaaaaaccgaccctccctctaaagctagaaggggggaaccccctctgcgtcaaatttttctcggaaaagtcttttacccaaaacgtctttcgtgccttccgactatgtcgatagcggaattcccaaaa

SEQ ID NO: 21800 - DNA, 72 bp, Zea mays
tctaccccgaaacagctgccatcactcgtgtgatacgacccttttatatttggttacatgatacacggtcta

SEQ ID NO: 21801 - DNA, 357 bp, Zea mays
agcttgtccaacttgagatagtttggacatgtccaacagatatcgccagaggcgtcagtgcatagtgggaagtgggaacctaagacgcgatagcaatgagaaaatagtaagaccgaagttgacatgagaagagatagttagatgagacttgaaaggataagatatacctaaagatttagcattgaataggagtgcatggaaaacaactatttatgtgtcccttggttacatataccttttaaagatgttgctcaggtatgtaattgtgtaggagatatgttcactgaagaacaaaatgagctcgtagaatcagctgcagagatgctttatggtctgatacatgcacgatacattctg

SEQ ID NO: 21802 - DNA, 398 bp, Zea mays
  unsure (1)..(398): unsure at all n locations
tctactgacctggagaaggctgacgctcacatctgtgtctatgttcacagtgcgctcaatgctgcattgaccggntaattggtgtcatcttanaatgtctgtcttttagattgagtttaactttgcaaatcctaaataaattatagtccatctaaaacatggacatatgtttcttgttacctgaatcctgcatggatttatttttgtactcgtgaatattttaactctggagctcaaaacccggagttgctttctttttccgttgagttgcggccttggatcagatgaaatcgatgttcctccatagctccagtaaatggttaaatattgttaagtctattctaagagaaatataaaccacatttgattactgcatgagatgtttnggatcttgtgtc

SEQ ID NO: 21803 - DNA, 126 bp, Zea mays
attgtgatgaccacttcaagaactatatatcatgtgtgataggttatcttcggacccgtcgcctatctccgcttaatatgacttaagtatgggttagttaccgatcgagacatgttcccgcatcac

SEQ ID NO: 21804 - DNA, 494 bp, Zea mays
  unsure (1)..(494): unsure at all n locations
tctaaagggagaacactatttacgactaacaaatgttcattttgtgaaagacaggatttgtatcgcatgccacgcagggaagcaagatggcactcatcatccgcataagaacataatgacaaccgacaggccactgcagcttctacacatggatctattcggcccgattgcttacataagcatcggcgggagtaagtactgtctagttattgtggatgaatattctcgcttcacttgggtattctttatacatgagagatctcgnaccgcagagaccttacaaggattctcgagacggactcaaaatgagtttggcttaaggatcaagacaataagaagcgacaactggacggatatcaagaactctcagattgaaggcttccttgaggaggatggcatcaagcatgagtgctcttctgcctacacgccacaacaaaatggtgtattggataggaagaattgaactctattggacatggcacggaccatgcttg

SEQ ID NO: 21805 - DNA, 425 bp, Zea mays
  unsure (1)..(425): unsure at all n locations
cgcgagatcctctctcgtttctttctaaccataatgaatgcgatattggatgtcatacttgatgcatattcactctatttgttcccttgtatgatgtactgtttgcttcccaatttgaatggatgtatgtatgaatgcttgcaatcgcatagagaacgatccggtcgaagagcccgaggaactcgcatgagaagtccctgagcagcaatcggttggtggaggcaagtgtcctttgacctatctctgtcctattcattacttaattcacctcccgcattacacctttatacctaaggatngactagnttttgttatccatgtccttgntacctatttgggttggattattactgtttagctttatgctattgctcaactcttatcaatgaacatgatgagattatctatgatacgctgttttcccc

SEQ ID NO: 21806 - DNA, 428 bp, Zea mays
  unsure (1)..(428): unsure at all n locations
gacagggtttgtagcgcatgtcanggcagggaagcagttggtgttcatcatccacacaagaacatcatgacaactgacagaccactcgagctcctacacatggacctattcggcccgatagcttacataagcatcggcaggagtaagtactgtctagttattgtggatgattattctcgcttcacttgggtgttctttttgcaggaaanatctcatacccaagaaaccttgaaagggatctngagacgagctcaanatgagttcgggttaaggatcaagaaaaatagaagcgataacgggacgagagtcaagaactcacaaatagaagggcttcttgaggagganggcatcaagcatgagttctcttctccctacacaccacaacanaatggtgtagtggagaggaagaattgaactctattagacat

SEQ ID NO: 21807 - DNA, 422 bp, Zea mays
  unsure (1)..(422): unsure at all n locations
agcttccnctgcgcaccgagacaacgcagatctcgggtgtcagggcgtacgaagattacacgggcatggcaagcaatagttccatccttccatttgtccctgggcccacgtgtcggggctcagaacccttgtacatgccccccttgaactataaaaggggaggcatgcgacgtgaacacaaagaagagaaaaaagactcaagtcattcaggcttacacacagtacaagcttcctcaacaattcaacacacagtggagtagggtattacgctccggtggcccggaccactctaaatcctcgcgtgttcatgtgtttgatgatcgcttagcaagacaggcaaaacgcttaagccccctcctcatcttaggatttagggcgagtgcactctgccacccggccagagaattccctctccaaaattt

SEQ ID NO: 21808 - DNA, 346 bp, Zea mays
  unsure (1)..(346): unsure at all n locations
tcgcctctgcgccgcaggcctagcacacacttcttcgcctattgcgcccggtagcctcgccggtgacttcaccgtcacgggcacccgccacctcgtcgtggactggccatcccgagcgtccaccggccaaattgaccccacctccgtaatcccctacctatgctcatgccttgccaccattccgtcgacgcagaactagaccaccggcaaagaaccgccgcggaacttcaccggcgaccggttctcaccgccgcgaaccgcctccactatcntnatatatttaattttaatttataccatctttacactttaattattgacactgaattcttcaattatgtaaatg

SEQ ID NO: 21809 - DNA, 379 bp, Zea mays
  unsure (1)..(379): unsure at all n locations
agctntaccaaatggacgtgaagagtgccttcctcaatggaccaatcaaggaagaggtctacgttgagcaaccttccggctttgaagatagtgagtaccctaaccatgtctataggctctctaaggcgctttatgggctcaagcaagccccaagagcatggtatgaatgccttagagatttccttattgctaatggtttcaaagtcggcaaggccgatcctactttatttactaaaactcttgacaatgatttgtttgtatgccaaatttatgttgatgatatcatatttgggtctactaacgaatctacatgtgaagaatttagtaggatcatgacacaaaaattcgagatgtcgatgatgggggagttgaagtattt

SEQ ID NO: 21810 - DNA, 364 bp, Zea mays
  unsure (1)..(364): unsure at all n locations
ctctcttctttggcgganatcattgtcagcccggatgtactcatccattttctgaagcagcttctccagagtctggggggtttcctaacgaaatattgagccgtaagccttggtcgaaggcccttgatcatggcctcaatgacgatttcattatgcactgtgggtgcttgtgctttgagacgtaagaaccttcggacatatgcctgaaggtactcctcatggtcttgtgtacactggaacaaggcctgagcagtgacttgcttcgtctgaaacccttgaaaactggtgaccagcatgtncttaagcttctgccatgatgtgattgtctctggccggagagaagagtaccatgtctgggccacac

SEQ ID NO: 21811 - DNA, 340 bp, Zea mays
agcttccattatgagaatagtatcatctgcatattgtataatagggaaatcaggaccacaattgctcagcagggagagccgtaagatgccacagtcacaagccttgttgacaattgactgcagaagattagctgctagaacataaagagagtgggacacaggatctccttggccgactccgcgagtggagtgaaaccgtttctggaggacgcctattcgtagaacttctaaagtgccggagtccataatcatagaaacccagtgaattcatttgtcaccgaaccccttgtggctcaaaaccataataatagttgcatgttccaatttgtctaaaaccttt

SEQ ID NO: 21812 - DNA, 442 bp, Zea mays
  unsure (1)..(442): unsure at all n locations
actaagctggtggtgccctggggaccattnacctcttggagaagcttttggatggagctggtactggatagaattaaaggaatgaaacggcgttaacgtacgtacatttaattacgagaagagaataatagacgatgctataagctagttttgagtacgtacgtaccgctttcctagcgtaagcaacgcggtacttctcgtgcgcttccagctcatcctcaaactctgcgaagttccttatcacctccaggaagaacttctgtatgcactcaggtagaagagaaatatcatcactctcatcccatctgccaaaaaaaanaaccatctttttaatttctcccttccccaaccaaacaccaccagcttgtgatcgttatgtcaaggtcaagcaaaaaaaaagctagtaaaaacctttctatagccttggtgagcttccgacact

SEQ ID NO: 21813 - DNA, 363 bp, Zea mays
  unsure (1)..(363): unsure at all n locations
agctattgattatattntacgacatgcttcggtgaaagatttgactgcaaaagataagcaagaggctcagttttatgcccaaaaactaaaatatccaaagggggcgctgatattcaatggcaggggagaagaagacttcttgtattgtctccctgacagcaaggagatttttgtctgtcgggagatgggcaagagcttcggattcccaacattataagacaggctctcggtgttgtctaaagacaaactggccgacagcttggcgtgcaatagcttaaaggtgcaaaacatgaggtctttgtattatttcttgaaaccaaaatttttcatttgcttaaacttattgacacacacacatgtttt

SEQ ID NO: 21814 - DNA, 455 bp, Zea mays
  unsure (1)..(455): unsure at all n locations
ttaaccctcgcgagacctttccccgcctctttctaaccatggtaaattcattatcgcatgtgatattctatgcatatctacctatttggtctcttgtatggggtactggtttgtttctaatttgaatggatggatgtatgtatgctcgcaatcgcatatagaatgagccggttgaagagcccgaggaactctcatgagaagcccctgagcatcagtcggttggtggaggcaagagtcccttgacctatctctgtcctattcattctttaattcaccttcccgtttacacatttatgcctanaggagtgactagtttgttatccatgtacttggttacctatttgggttggattattattggttagctttatgctattactcacactcttatcaatgaacatgatgagaatatctatgatacgctgttttcccttctctattatgatgtatacttg

SEQ ID NO: 21815 - DNA, 428 bp, Zea mays
  unsure (1)..(428): unsure at all n locations
agcttgcacgccgtgacctaccagtagtgaccatgccggtcagtttggccatctcgccgtggcgaggacaactcagcaaggtacacaatcatgctatgtttgttctgtgatcaccttgtcgtggccaggtaatcacaagcgattccccaactgtatagtgcatgttttgtgttcactgtagaccagtagggctcacgtcgtttggttcttggactctaccgaggtgtgtgatctagaacggagtcacgtcatcgtggaactggcgccgcgggcagcctcaccgtggaccgatcgactggaggcatccccggtcaatctcgcgcacgcaccgagactntggaaggtcagtgaagctcgctacgccattaatttgaactcgaccaccagattangatagtcagagcaactgtccgccaccgctgacaata

SEQ ID NO: 21816 - DNA, 196 bp, Zea mays
  unsure (1)..(196): unsure at all n locations
tactcctctctgtgaagggtcgatcatcatcgtcaatatcttgaagcccgagacatacaagctggccaatgatcaaggcaaggtctacagcaacgcttggaacatccaacaactacgtcgcttctacccttaagatgtttcanattgttcatatacctcattctctctacatacacaaataaagtctaaccgtcaa

SEQ ID NO: 21817 - DNA, 419 bp, Zea mays
  unsure (1)..(419): unsure at all n locations
agcttcggtagatcacgacttcattctcttcgggagtaggagcagtcttatctccgacgtcagccctcacaatagacatatctcgaaaatatcttcccctcatattatcaagatgactctgtttgatagtcgattttccgaagactgcgtgacttggtcgccagggccgatcttcggagtcttcgcccccgctttctggatcataactatcgctgtcatcagtatcttcagataagccttccagaatttcttttgtaatcttttctgtatttgtctttgcaattgactcaatgaatctagcagtcttttcctcaagaagtttctcctcttcggttagcttcgcttcagcaattgctttcttgtcttgagacatcttatcttcggaactgancgaaatatggcttanatccgaagctcgg

SEQ ID NO: 21818 - DNA, 427 bp, Zea mays
  unsure (1)..(427): unsure at all n locations
tctaaagggagaacacattntatgactaacatatgttncatttgagaaagacaggatntgtagcgcatgccaagcacgaaagcaagttggtgcccatcatccacacaaaaacatcatgacgaccgacaggccgcttgagctactccacatggatctattcggcccgattgcttacataagcatcggcgggagtaagtattgtcttgtaatagtggatgattattctcgcttcacttgggtattctttttgcaggaaaaatctcaaacccaagagatcttaaagggattnttgagacggggctcaaacgagttcggcttaaggatcaagaaaattagaagcgacaacgggacggagttcaagaactctcaaatcgaaggctttcttgaggaggagggcatcaagcatgagttctcttctccctacacc

SEQ ID NO: 21819 - DNA, 452 bp, Zea mays
agcttggcccatgcacatggcctcccgctcgataggtgaagctcctggcgccggcgttctgggcgcccgtcctcattcgtctcaaccccagcaccaagctcacattgccagcaacgtcgcgttccagtccacgacgccaactcttgatcctcagtttctcgccgccctgaacaacctctccatcagcaccccctcaaccagtggcaactgattcctggacactggtgcctcctcccacatgtcgtcggcctcgggtaatcttcagttctctaccccctttcaatcaaattctcgcattgtcgttggtgacggttcttcaattcccattacacacactggccacaccacttcttccacacacaccgatcctcttcttctcaataatgttcttgtttcacctactcttattaagaatctcgtgtctgttcgtgctcttagtcacgtacgacaat

SEQ ID NO: 21820 - DNA, 445 bp, Zea mays
  unsure (1)..(445): unsure at all n locations
tattattaactagggttggcatgtattacttggaatcgggtggatctagggggttaaagttgggatgttcatgttgttgccaggtgcagtttcagaacctaaaatgtgatgctattgtgctgaattttcagaatgattgtgtaatcctcttgaccttggaaccatttaattcttcatccttggactttagggggataatcattatataaaacttaaagatccattgtaggaagacatttcttctgaagaaggatatcccagtctctattttaaatttggagaanaggttatcccaagtcgcttggttagataggggtgtgctgaacttaatttatatgcagtggacaggttagattgggtctgtatatatctaaagagtntttattttcttccattntccctacctacgtgttctaggctgtagtggataagagagccgatggtt

SEQ ID NO: 21821 - DNA, 386 bp, Zea mays
agcttaaagccatggtaagtagcataggccaataatatgctaattgactcaagcctagctacgggtgcataggtttcaccgaaatccaaaccttcgacttgggaatatcccttggccacaagtcgtgctttgttccttgtcaccacaccatgctcatcttgcttgttgcggaagacccatttggttcctacaacattttgattaagacgtggaactaagtgccatacctcatttctagtgaagttgttgagctcctcttgcatcgccaccacccaatccgaatcttgaagtgcttcctctaccctgtgtggctcaatagaggaaacaaaagagtaatgttcacaaaaatgtgcaacacgagatcgagtggttacccccttatgaat

SEQ ID NO: 21822 - DNA, 488 bp, Zea mays
  unsure (1)..(488): unsure at all n locations
tactaagctgcatgatgttaaatntcttgtattgcatctanggctngtctaacctagttgagataaccgccaacaaagcgagtgagaaagcttaactcggatcaaacttgacaagtcctagttttaagcttttagcacttaaattcttacttcttatgcaattgttggttcttgaaatatgcatgaggtactgcacttagggggagtattcaaaactcaaatcactcatgaaaacccctagtgcaagccaaaatgcaaatttcaccatttgcctattttctctaaaaattatctaagcctatggcaaaatatttgaanagtatatgagggtgccaatacctgtcccaacaagtgttattttgtgtgattataagttgggatatggtttggttggaagttagatagaaaaattcaaaattttccaatcttccctctgtctgggctcaccagacagtccggtgtgcaccggacactgcactgtgcaatgt

SEQ ID NO: 21823 - DNA, 289 bp, Zea mays
gcttcacgggtattggtttcttcgacttcagctattgataggctctcttgaagggacgccttttcccctgaaagttccctgactttttgctccaggctttccacccaagaagttaaggaagggcattggcaggtgaagacatcataacggttatcgagggagcgaatgtatccagccatgtatacgatcgtgggaggatgctcaataggatctcctcctgacagggcctgaagtcttttccttcaggtgggggtattcttggagctgggtggaaagcaacggacgggtt

SEQ ID NO: 21824 - DNA, 463 bp, Zea mays
  unsure (1)..(463): unsure at all n locations
cacatgttcacattcaatactagagcaaaggcaaacactccattatcacaatcaaagcattcaatcccctccatgttccaaaatcaactcaattgcttagtgacttgagagagggtcatttgtgtttcttttgttgctcttgttgcttggattgctctcttcttctcactctaattcttctaagtgctttgtaaagctagcaagagacacctatttatgtggtgatcctagcggngtcttagtgacccaggtgattaagaagaagcactcaaccggtctaagtgacagaatgagagagggaaagggttggaatatacccgacctttgtggcctcctcaacggngactaggtcctttggaatcgagcctcagtaaacaaatcgtcgtgttcaacttgtgttgatattcactcgatttgtttctcccctcttctctctctaaagntccctttgctcatattaatt

SEQ ID NO: 21825 - DNA, 434 bp, Zea mays
agcttcagaggaaattctgggtaaaaggcttctttgatttttactaggttggtcataaatttgctttattaatttctcgatatatatatatatatataggctgcactcgaagctacagtggtagctgaagttgaggaatttcttttatggaatccgaagaggcaaagatcggagaagctaataccttgatagcacaaaaagttacacctttggagtcactcttagagagcaaagaagaggaagaggaggagcgaatagctccagtaataagttcatttttttgatattatctaagatgaatctgtggaaaaggatactgctgataccatatttgcgctgaagggtgctgctctacctgttgcagatatgaataaaccaagtagtccaaagtttaaatagatggctccaacggtgacaccttcagcgatcgtagt

SEQ ID NO: 21826 - DNA, 378 bp, Zea mays
gcatcaccggaatagcgaaaccgtgctcgccggagttcatcaccccgccgacgcacgtggaccgggtaattcactgcgccatttttcgatccaatgcacagatagcctctacaccgccccgggaagctcaccgtgccgttggattggactaagtcgccgaggtttggccggcacacccaccgccgacgaggacccccgcctgcgcacgtcgaccgagcgattccggccatccccgccgtcgagacgtacatcgctgtgaccgccagagccttcccgagctaaccctacccctcgcctgacctatctcgccgccggtaagccacgccacccctttcttctctgcggttactggttacacttgggaacgaccgcggggga

SEQ ID NO: 21827 - DNA, 309 bp, Zea mays
agcttgtagcttgtactacctacacgaccgtgtctaccgacaggattagtgggttggatagacacaccgcatttactatgggtgaagccctctgtcgaggtgaaagaagatctccaacccccacgctgagggttgagacacacttactcacgcactggaggccacagtcttcacacaatctggccagacacggcaaccaatatgtgacaccaatggctagcgaacacacttgaggtagactccctgatcactatactcatgcgcgaaccagcacttatacattccacataagacaggtggtcgatttgt

SEQ ID NO: 21828 - DNA, 223 bp, Zea mays
agtgacacttagaaactaagcttgacagaaggcgcacaagatacctatgatatcttgtcccgttgtcacatcactttccacataagaccattgtggcatacacactccgtgccatctcttttcagaggttggcaccggacatgctgtcccacatcgataaacatgattgtagcaacctacgttattgtgagcctggtccataccccaaggttttgtcacgtat

SEQ ID NO: 21829 - DNA, 287 bp, Zea mays
  unsure (1)..(287): unsure at all n locations
agctnggaggcgtcgatatgggtgatagttggtgtatacaactactgcgttatgtgcgagcgcttgaatgtaactacctgcgcgcttgatgtagagggagcatcaagctcgaataacttactcaagccttcggacatgcaccctaaacttacagaacgcccgactacttactcgggggtccttatagtacacacaggattaccacgatataattgaacatgagtgggatataggagagagagagatctaaaaataaccttaaccatttcgaggtcgtccgacttgac

SEQ ID NO: 21830 - DNA, 314 bp, Zea mays
tatgtgccaacacaaactctgtactactataagccatgtctatctggtggtggctgtatcatatatcactgtcgccagtattctctgactctatgggatcgaaccgcataccagcatcaatcttggttgttgaactccatcgcctcacccttatcgtctattgacatcagatgccaatgataggacccgagacgatacttaggattacctaccctctcatccgtatgcatggtatgactatcatgagccaggttaaccttctaccttgccatccagcttcgatactaaatctcgctaactcaactcgatggtgt

SEQ ID NO: 21831 - DNA, 426 bp, Zea mays
  unsure (1)..(426): unsure at all n locations
agctnttgaacgtactaagcacatgccgggaaatatggtaaccggtaaacctagtacctgagtgaagccgggcgcgaactttatccctcatgcgacctgagactgggtctcccatgctagctatggtgggtacaagtgcggtcactgtacggcggcatccggggtcagtggagcattgtatgccaaggcggtgaggcctaaacgcgaacagggaatcaatgtggacggttgtcatgtgtggggtcggagtaccctgacatgccgtgtgtttaggtttaccttgcaaggttaaaaactcgattcgaatcgtctgcttctcgcagctaatgagactgcttgaccccttgtactgcatcgagtaagaagtgaaatgaggttacatgagataacttgttgattgaactanatgctcgtcaccatgtatgc

SEQ ID NO: 21832 - DNA, 435 bp, Zea mays
agcttctaaagggagaacacgtgatatgtttgactaacgtgcaattcgaaaaagatagaccttgtgcagcttgtcaagcaggtaaacaagtgggaggagcacatcacagcaagaatgtgatgaccacttcaagacctctggagctgctgcatatggacctcttcggacccgtcgcctatctgagcataggaggaagtaagtatggtctagttattgttgatgacttttcccgcttcacttgggtgttctttttgtaggataagtctgaaacccaagggaccctcaagcgcttcctaaggagagctcaaaatgagtttgagctcaaggtgaagaagataagaagcgacaacgggtccgaattcaagaatcttcaagtggaggagttccttgaggaggaggggatcaagcacgagttctccgctccctacacacctc

SEQ ID NO: 21833 - DNA, 385 bp, Zea mays
actaagctgctcacgcctttttctttttctcatagcaggaaccttactggaacactaccccacttaaaaagaatgagggtagatctcttgaatcttgtggatttgaactccttgaagtacctcataacaagggtgttacggtgccttcttctgctgttgctgcttgagcacgctgcggagaaatgacttacacagggttgattctgggacaaccttcttctcatcttctcttcactatcttcttttcactgaccctatctttctctttgctcttcccactggaggattctatcgatgagtattaccatcatacagaggaggaaaccaaagactatgaaccatgtgcaacagtcttcaacccaagaatcaccgagcattgtgatct

SEQ ID NO: 21834 - DNA, 375 bp, Zea mays
agcttgtgaaggttcttcatccccacatgtgctaagcggcgatgccacagccagcccatgcaagtcttagccattaagcatgcatctagaccggcctcttcttttgcaaaatcaactaaataaagtttgccgtctaatacacccttaaaagctagtgaaccattacttcttctaaagacagacacatctacatttgtaaatagacagttatatcccatattgcataattgactaacagatagcaaattatatccaagactctccactaaaaacacattagagatagaatgctcattggagattgcaattttacctaacccttttaccttgccttgattcccatcaccgaatataattgaatcttgggaatcctta

SEQ ID NO: 21835 - DNA, 417 bp, Zea mays
tcgtcatctcatagaacatggccctagagacaagacatgatctcagttctccaatcttcgctataaacaggagatatattgagcactgctctttcaagaagatcaaccgaaggtgcttttatcgtttcaaagaaaacttccgaatgtaaaggcagaccctgtgctgttgacttggctagtagatcagcgtgctcattttctcctcgtggaatattcttaacagaaaacccttcaaaggaagcttcaagtcttcgaattgtatccaaatattgttcaagcttcggatctcttgcattgcaactttggtcaacatggtcagaaataacttgagaatcagctttaaggaccgcccttcttattcccattgctttcaacttccgaagacccaaaagcaaagcttcgtattcaacaatatta

SEQ ID NO: 21836 - DNA, 339 bp, Zea mays
  unsure (1)..(339): unsure at all n locations
agcnttggctatggtcaaattntntggcagcacaacgatgcaatagcagtaaatgctgtggtaacttcacacctacccgtctgtttatatagtgctgcaggtgggaaggtgaatcgtcaagcctctcgcacccgttgaatagtcacccacactcgctgaacggtggaccatagtgcccaagaagctgaatccccagatcgtgcgtacccgttgcatggtgggaccatccttcactcggaatattttaatcgtttctcggcaacgagctcacggaagggtgttttcggaccttcggcattccgaagcctgagataatttttcacgggtcgagcttgtcac

SEQ ID NO: 21837 - DNA, 388 bp, Zea mays
tctccaaagtttgaggaggcttcctggcgaagtactgagctgacggacctagccgaagccccttgatcatggcctcgatgacaatttcattgggcaccgttggtgcctgtgcccttaaacgcaagaaccttcggacatatgcctgaaggtattcttcgtgatcctgagtgcactggaacagagcctgagcagtgaccggcttcgtctgaaatccttgaaagctggttaacaacaaatccttcagcttctgccatgaagtgatcgttcctggtcgaagggaggaataccaggtttgagcaacacttctgacagccataacgaaagatttggccatgactgaagcattgccaccatacgaagaacactgtgcttcgtagcttatcaaaaa

SEQ ID NO: 21838 - DNA, 437 bp, Zea mays
  unsure (1)..(437): unsure at all n locations
agctnttgaatgaactttntaacttacgaaatgagaagcgctgttagtcctcatgcaaatgcaactacttgatgctctatgaggcactaagttttacacaggtctaagtcattgacccctcttaatagtacggctatctagcctactaatccggtcaggtatcttctctaaactcctcaagaccggcaaaagtaaaacctatattatacctttgccttcatctgatccacaaccaatgcgtatgactcttcaacatttcatttctatgtggtccaaccctgcattcttattactccaagaatcgttagtccacaagtagttgtcattaattaccaaaacattatcaaaggggcctagatgactcacagctatcctacccgaggcctctcggcactggatgatctcccccagggggaaggatgacaccacagtcatcg

SEQ ID NO: 21839 - DNA, 446 bp, Zea mays
  unsure (1)..(446): unsure at all n locations
actcaagctttatgctngtaagttggaacgaccaggatggatataggcccgtagccacccgagccatggcccaggctccaatctagattattgtctgtataggcccgtagccacccgagccacatgagccaaaattttgttaactcctttcaaaataccaaaaaaatctcatgattaatctacctcgccctaatgatattttattgtctgtattgtaaatattgatttacattatctttattacatgtttcaagtatttaatatatgtttttattcttgtattagattatatatctaacattgaaataattgataaagaagactaaagatattgctntataatgctaatgttatctatatttacatcatgttgacctggtagctttgaactaatttttttccagcgtgcttttgtcatatgtcgactcagaactttatatagtcct

SEQ ID NO: 21840 - DNA, 406 bp, Zea mays
  unsure (1)..(406): unsure at all n locations
agctntgatacattgattaaacatcgccatatcactgggcgtcaagagactgatggtatatggagattctctagtagtcatcagccagataaacaaggaatgggattgttcaagtgattcaatgggaaaatactgcgccgccgtccgaaaactggaagataaattcgagggtctggagtttcatcatatagaaagagatcggaacacggcggccgatgtactgtccaagctcggatctggtcggactcangtcccgcccggggtcttcgtgcaagaaattctccagccgagtatctcgacggatcaaatagaagagtgcaacatcatagatcaacccaagtcagactctgacgattggagacagccgattattttgtatataaagaatgaagaagaaccagatgac

SEQ ID NO: 21841 - DNA, 421 bp, Zea mays
  unsure (1)..(421): unsure at all n locations
ggatgtagcaacctcatgtgatgacttgattcaagaagagcaaactagtctacatgctgaattgactgaaaaagttgaagtcctgactttagacaaccaanaattgaagaattacttgactgatgcaactactagaggaaaagttgctattgagaacaatgatttcaacaatgagttggcagtggataatcaaaggcttaagaatgaggtcaataaactaaaaagtgaaaatgaacatcttgcaacaagtgtgcaaaagttcaacaagggtcaatacctccaaaatgagctgcttatgaacactgttatgaaaaataacaagagtggtattggatacaatgcttttgtgcaaaagaaagctacactcaatacaagccanagcagactcacaagccaatcaaatgctttgagtgtggaaatg

SEQ ID NO: 21842 - DNA, 415 bp, Zea mays
agctcacctcgaacggctccctcgaccgctactatgtccgttgggttcttccgggcttcacacaacgccctggagtggactatgacgagaccttcagtcctggtcgcaaggtcgccactgttcgcaccatcctctccctcaccctctatcgggactgggcgatccatcagctcgacgtcaagaatgccttcctccacggcactctgacggagactgtctactgcagccagcccaccggcttcgtcgacaaagcctgtcctgatctggtctgtcggctgaaccactccctctacggtctcaagcaggcgccgcgggcctgtgacagtcgcttctccttctacttggccttcgtcgaagccaagtcggaaacgtcccacttcatctaccggcgcgacgactacactggcttcattct

SEQ ID NO: 21843 - DNA, 448 bp, Zea mays
  unsure (1)..(448): unsure at all n locations
agcttacccccagtcatctttatcaatccagttggagcagcataaggtgtttcaagtctatagtcaaaaactgatatgcgaaagaaacaaagctcattcttggcatatccactcatggctgcagttggtttctccatcttgagcaaaggacatttggctgcaatatgtatattcttcttattgcatacataacaatctaaatctgctttgcatgcttcaactagatgtctgttgcacttacagcgatagcagtgtggtggccttggtttcttggccttgaaatctcggttctcccgtttctgagtcgcatcgggcacaccttcagcaacatggtttccacccactatctcatgttgatttcccatcctttgaattcccacatgtgcatgctgctgggatgaggcaacangtgcatactccccgctgaggtggtcacaaagaccgggtc

SEQ ID NO: 21844 - DNA, 428 bp, Zea mays
aagcttcttgcctcgctgttgcagacgacgccgttcttccaacacagttggatcaatggatcaggcgacaagatcgctcgttcgctgcgacgctacccagttgccgatcaagcggacgacgacagacgccggcgtcgttgtgtgccgtaacctgacggccgatcgcagaagcgcagatcgcaccaggaaaaaacagaacaggcgaaccatgcagatcgcataatggcggctgggaaaacctgttaacataacgacagatgggaacacattaataaaaggatagtttctttatatacacgaacaagtctgtagtctgggtggtagcaacgattaacgcaagccgcaggtccctggttcgaagctccgcgggcgcaccttttttttgccaaatatctaactgtcgcttcgtactgggccgggtccgcgtc

SEQ ID NO: 21845 - DNA, 282 bp, Zea mays
tcaagctttgaagagatcctcagtgatcgcggagacatttgtgccttctacgacgctcgtagggttgcagcatttctggagaagggtggttgggaccatgtataagctgcatgccataccgaatgcgtctattgcactgaccataccagatatcctatgaccgaagctactttagtgggcggaagattttactctcatgtttgggtgaacggtgtgcgagaattggccggcggagtcataatgaaaaatgaaaaagacacccacgatgctcaataagaagct

SEQ ID NO: 21846 - DNA, 435 bp, Zea mays
agcttattcttgtcgtcatcaaccttgacgtagaaccattccgattttctcctgccggccacttgcttcgatagctgatgacaggaaattttgtggttattctatatgcaaagctgtaacaaccaaaattttcatgtagcccatcctttctggcctttgtttggtagtgtagctcgtgtactctgcagaaaccttcggcaaatggcttcactgattggtttcggagagcccatatataaacgctaagcctaacaatggcgttaggagtcagatggtggaaatataatccacacttttgagcacatcagcaatcatcctattcgaaggaaatctcaagccagctataagaaaactcttgaagatcactatctcatccttctctggcttctgtgtagtttcctctccaccgaagcgaatcacgtttttctcatcttc

SEQ ID NO: 21847 - DNA, 377 bp, Zea mays
tgtaccaagcccgctggaattaatcttcggagaaacccgacctcgctgcaatatgacacccgaaggtccaacacaacaagcaatgagtgaattcagaattattgcagagcatatcagcacaatggacctggttcaagagtttttagcattcaaagtttttcccagtttgagagaatgggaaatgccgaagctacagggggaaaagaaagaaggtgaactcgtacgtttaccttactatttcaagtttaaaaagtactttatagcaccttgccaagagtggctagatacgattgaagcaatgtgtaatgaaatacttggcaattattccaaaaaagaagatcaattgatgaccgcagccttcggcactcgttcgaaac

SEQ ID NO: 21848 - DNA, 439 bp, Zea mays
  unsure (1)..(439): unsure at all n locations
agcttcgggtttaagacgaatgcgtgcatggtatgaaaaagcatgatctgaaagaaggatagaccaactccgaagttgtggctggagaagctttggctcagcacaaggatgatgatggaggatgaaaccgacttaaaaggaaaagattgctcagtcctcaacagattaccttttggctaatagtaaatgtcagggacatcaatgtaattntacccaggctgcgtcctctacctataaatagatgaacagtaacaccatactgttcacgctgacttgcaatcgctcgcacgtcactttcggatttttaccttctgtcaagccgaaggtacaaatgtaatttaatatcattaatgtctgttcatgattatataatgacaatatgaataatctaatgaattaatataattattcatgctctttctacggttatatgtccctg

SEQ ID NO: 21849 - DNA, 409 bp, Zea mays
  unsure (1)..(409): unsure at all n locations
gttagaagaagccaattcagctagttcatctatagagcatgttggtatttgcaatatgtgcaaagaatttaacattgatgcttgtanagaacatgcctctaccattcttaagttaaacaatgatgtttgcagtcttaatgcttaacttaagacttgcaaggataattttgagaaactaaaatttgctagggatgcctacaccactggtagacaccccttcaataaggatggacttgtgttccaaaggagacccagaacttgacaagccatataacttncaatctcaacaaggagaaaaggaaggctctatggtagtattctcaaagaaccattctatcttttgatagaaattactagcatgctcatatgatagggtgtataagatggtctatgttatatgaaccgagta

SEQ ID NO: 21850 - DNA, 419 bp, Zea mays
agcttcaattattctaacactgttgtggattgagagtttataccgagaaaggtcgagggctcttttgaaagaagtgcacggccgaagggtatcttaacctctgggccgcgagatcggatggcgacggtccatattagatctgcacctcatcgaactggtacctattggtgaccacatgatccaaaatcagcggcgacgatcgaaatctctaagatctaatcctacgcattcaccaaacatcccacggtttggatcaaacgtggcccgaaggatgcggcgaaaagatctcgatcgtcggtgccccgatctacgactcgtgtctggttaccctattattgaatccagagcgtaccacatggatccaacggccgaagggacttcttcccaacctgcccaaaccatggcgggacacaaattga

SEQ ID NO: 21851 - DNA, 476 bp, Zea mays
  unsure (1)..(476): unsure at all n locations
aagaataaattgacacacttgctcataagaagtgtatgagattgtatatctttcatattaatattttaaagtatagatgactagaatttccttactccaaattcctttatgctttgatggggtatgtggttaacgacttaatgcttgatatgatatgttactactatttaatattggtttcttgatgtggttgttattgaagctattatgcaagtgaagctactaatgtacttgttntatatacatatcatcatgacanttttttcgatgcaatgttttgaattctttgaactattactatcatatatntctatatgcttgactgtggatgtttttttcaaaagggatcttttgtgttatagtacttgtatgaccgaatggttattgagcttgtgtatagagggtctaatccgacttggtgtgggtgaaacactatatatgtagnttatggcgtcgtgagtttgatgactgtgggt

SEQ ID NO: 21852 - DNA, 306 bp, Zea mays
  unsure (1)..(306): unsure at all n locations
agctngatgacatctacngaacgtgatcttctcatattaggtctgctattcctacaagacatactatgtacatgatacctaagagtgaaatgcccatttgtttttggaaccatgagacatgaacattcatcgttatgcgggcatagatgtgaaatgactattgtatctcttgaagacaattagggtatctttaggtaactttacaatggatgtccagttctagactaagctcttctcttgaccacaatgctctgatgacccttctgtggcacccgggtttatgggcaccactcctcggcacgaaca

SEQ ID NO: 21853 - DNA, 198 bp, Zea mays
gttcacgacgctgccatgcatacatgcatacgtccaaagatacgtagctgagcctcgagaaggtaccatagcgcataattcggtgtgcttcacctataacatagtgagcggtgtcagcatctgctattgtatgttcaaacgatggaggcggatggtcaacttaacgtgtaaatggcgaatagctatctttgacacact

SEQ ID NO: 21854 - DNA, 394 bp, Zea mays
agcttaaccttgtaacgaggataagctgcctttgtttcaaaggtggatggtccttaagtctctttgaaatccttaagggtaaatgcttgaaatatttataacatgctttcataagtgcatcaattgtcatgagcatcacacttatactatgacacaatgcacttcacattctctatgatatagacatgatctcataaacctaatgatagtcgcctagagggggggtgaatagggtgaaactgaaattctcaataataatcacaactacaagccgagttagcgctagaaatataatcgagtccgagagagagggtgcaaaacaaatctgcaggaaataagaagtgtgacacgcggatttgttctaccgagggttggttcttgcaaacctactccc

SEQ ID NO: 21855 - DNA, 396 bp, Zea mays
  unsure (1)..(396): unsure at all n locations
atataatgctcccnctgaatatatgcttacattaaaatctcaactttggccttatatgccaaaatgcacatacttatgctaattcgaagcataactataccttatcaccagtgggatgcattgtgtcaataattaaaccttgatacgtataacacacagatgcacagaatcagagttaaacaccatttaaatggatataccataggaatatcaacataccactattcacctattaagataccaatttaaagcaccagaagcacatgaatatctattatatgacaaacacaatagataccaattgattcatgtcatcggaagtactaattatgcattatcaccatataatacaacaagaagcatatgataagtattatcaataaaactaacacattc

SEQ ID NO: 21856 - DNA, 445 bp, Zea mays
agcttatcattatattgcttatatatataaattggacccaaatttcaataacgcaagatctgaaaaaaatggttaaccagatagattaaaattttaagctgtatgttaccagacaaaagataaaaatagaacttataaaaaaaaacacgtagcatatagaaaaggccatgcagataaaaagttcatttatgaaacagaaaataatagcctagactcctagagaaagataccttctcggttaatgaaacagaaaataataacctagagaaagataccttctcgatagctgaatgcaaaacttcgaccttttctgccgtgtcctttgctactgatgatatatcagaattcatctttcttgacccatcttttagaatttgaacctatttcataaatcataactccataagataaaaagttgaaacagcttctagaaagggaacccaat

SEQ ID NO: 21857 - DNA, 363 bp, Zea mays
tgtggcatggtttaatgatagacacacccatgcagttggattgcataatgagggagagagatgggctccaaagcctaagtgaaagggaaatgtgcccttgggccatttctaagtattttggtgattgagtgcaaacacaagggcctaaatgtgaatttatgtacatggatgaacaaagtgaaaatcatgaagtaaaagtatgtttctaagccttagtacattggttttaagtactaatatatttgtctaagtgttagaaacagaaagaagaagaatagagaaaaggagaagggacttggctgtgtgctgtcaagacccatctcggtctggagcaccggactgtaccgtgtgcaccggacagtg

SEQ ID NO: 21858 - DNA, 413 bp, Zea mays
agcttggcatacaactggcaatctcgtatcctctgaagtaccttcctcaaatgttcctcatgctcttgctcattcttggaatatacaagaatatcatcaatgaacaccactacgaacttgtcgaggtagtccatgaacacactgttcatcaggtacatgaagtaagctgacgcattcatcaatccgaatgacataaccatgaactcatatagtccatacttggtgatgaatgctgccttcggtatgtctacgggtcggattctgagctgatggtaacctgacctcagatctctctttgagaacacactggctcctctcagctgatcaaataagtcttcaatttggggcagggggtacttattcttgacagtgacttcattcaaggctctgtaatcaatgcacatcctcttcgg

SEQ ID NO: 21859 - DNA, 420 bp, Zea mays
  unsure (1)..(420): unsure at all n locations
tgacattgcttccctgatagaaaccaatgccatccttaatgccagggcgtctnccattatagagcatgcttctagcaaattcgaacttttcattttcaagttcatgctcattaaatttcgtagttaatttagctatgtgatcattttgttggttaatcatagcaaggtgatcatcaatagcttctacattaatatctctacatctagtgcaaatagaaacatgatcaatagtagatgtagagggtttgcaaacatttaattcctctatcttagcacttaatctagcgttctcatctctaagacaggaaacagaatcattgcaaacatttaaatctttaaccttagaaactaagctagcattttcaattctaagggtagaaattgaattatgacaaatgctaagctcttttgtaacaaccc

SEQ ID NO: 21860 - DNA, 397 bp, Zea mays
  unsure (1)..(397): unsure at all n locations
agctcgcacgctccaccgctctaggacgggtaccctagtatttggaactatagtcctgtgggtgcggcaacctaaggtccggttctagagaacggacacacatcccgctgggtggtccgaagctgtgtagccgcttagcttggtctcgtaccctaagcctacacactctaccactctacgacgggtgccctcatatttggagctgtgatccacggtgtctggacacacggattggcttcctggtctaaatcctgcaggtcctattgcgtgaatcaaaggatggctgataccagacgatgggtcctatgggtgtgctactaacacttcctagccgaagctgtgtacaggtccaggttccagtcgaggctaccttctggngggcgggtcaccaactctt

SEQ ID NO: 21861 - DNA, 280 bp, Zea mays
  unsure (1)..(280): unsure at all n locations
tcttagagtgcgacccttcgctgaagaagtgcgtactttggttgattcgctcggcgagatacctgatgatgaacggcagatttattatgaagtgcccctgaaccctagtgatgcagacataaatgacatgcttgatctgctagctgaggattcatctgatgctgctcctgatggtacattggcagtggtgccccttccagaggttgatgcaaccttggatgtnccgaaacctatcagtactcgcccgaggcgccctagccgaaccagttcagccgagcct

SEQ ID NO: 21862 - DNA, 396 bp, Zea mays
  unsure (1)..(396): unsure at all n locations
agcttattttcggggtcgtgcccgggcctcagttttcggcccgtgcgccatgggcgaacccctcattttcggcccagacgcaaggccgaacagccatgccgcccgtcgccttgcgcctccgtgccgttttccctccgttccgccatgcccttcacccaagacatacatattaccttcggtgtctttccacacgcttggacttagcttatttccggggccatgcccgaacctcggttttccgcccctgcgccatgggcgaacccctcgttttcggcccaaacgcaaggccgaacaggcatgccgccccgtcgtcatcctgcccttcaaccaaggcatacgtccgagctttcgtgtccttgcacacgcttggacttggcgtttttnttgggcgtgcac

SEQ ID NO: 21863 - DNA, 323 bp, Zea mays
ccagttatggcagggatcatctgcagggccctggtgttttttataggatctagtatatggagaaagaaataacgatgcagtgcagatatccgtgtcgattctacttgtaagctgaaaaaagtaacagtgcaatctcaatctgggagacaaatggttactgttctggtacagcagtctccatcgcatgatatgggcagcagtacactgatgcggacgctgttaggtccaccttgatctgacagtatccctaaatagagacgtgctaatcctagtataaacacccaagggcttagtcctttcaaatcagtagaggttattctgat

SEQ ID NO: 21864 - DNA, 247 bp, Zea mays
agagagtcaattcaattcttggtaactcaagctatcaatcttcaatgatctatatccatgattgacccaagggtatttttcaaattactatgtcttaaactcatatcatctcgggggaagtattgatgttgtaagaaataaagaattatcttgtgcggaaacaacaaggtctaccacgtggaggaaagcccaaggatggtaacatctatgtttttaagtgccagtatcttaaaatactatttctcat

SEQ ID NO: 21865 - DNA, 371 bp, Zea mays
ttcttcttacacggaaaatctcatacccaagagactttgaaaggattcttgagacgggctcaaaatgagtttggcttgaggataaagaaaataagaagcgccaatgggacggagttcaagaactcacaaatagaaggatttcttgaggaggaaggcatcaagcatgagttctcttctccctacacgccacaacaaaatggtgtagtggaaaggaagaatagtgaatagaactgtattggacatggcaaggaccatgcttgatgaatacaagacttctgatcggttttaggctgaggcggtcaacaccgcttgctacgccatcaaccggttatatctacaccgaatcctcaagaagacatcatactgaactc

SEQ ID NO: 21866 - DNA, 374 bp, Zea mays
acatgtgctagacggcggtgccttattttattcttgttagtcttagcaattaagcatgtgtgaagatcagctctatcacaatctactaagtataggtgaccctctaacacaccctctaatgctattgaatcatcacttcttctaaagacagtgacacctacatcagtaaagagacaggtgtagcccattttgcataattgtgaaacggaaagcaaattgtgatccagagaatctacaagaaaaaccttggaaatggaatgatcacgggatatagcaattttacccaaaccttgatttccatcctccgaatgtgatagctcgttggggatcttgatatttctcatatgaggagaacatcttcttcttccctgtat

SEQ ID NO: 21867 - DNA, 72 bp, Zea mays
tatttatctgtgtgttacacaaccataccagtttatttcttatagctactatacgagaatcacaatagtagt

SEQ ID NO: 21868 - DNA, 411 bp, Zea mays
  unsure (1)..(411): unsure at all n locations
attaattactttntaaaattccagaagtatggggtttggctattttaaatatcccaaaattccctattggaactaanaatcaagaaactatttttatcaaatactatagaagaatagaagcctaacaaaattggtttggtatttntagcatttttctataattttctaggaattattcagtctggggagaaaaaagacaagaagaaagactctacagtattgggcttatttcaatccgagacggcccagcaaagacaaaattnngccgcgcgcgcgcccgcgcgcgcgcccgngcggtcagttttgtgtatggaaccctggcggnttgaaatttctataaagaatcatttccattggtcctctgtctncgctgacacttgcaaaacaccctcgcgcctttatctctttata

SEQ ID NO: 21869 - DNA, 520 bp, Zea mays
  unsure (1)..(520): unsure at all n locations
tcatgatcggaatgaataacaaactcttttggccataagtagtgctgccatgtttcaagcgctcggaccaaagcatacaattcattgtcatacacagaataatttaattgagcaccttccaatttttcactaaaatatgatataggttttccttggtgcattaaaactcctcctatcccaatcccactagcatcacattctacttcaaaagttttagtgaaatcagaaagaataagtacaggtgcttcagtcaaacgtttcttcaattcttgaaaagcatctttttgtgagtttccccatttaaattcaacacctttctttgtcaattcatttaaagaggaagcgatagtactgaaatcttgcacaaatcttctataanaaccagcaagaccatgaaaacttcttacttgacttacattcgtnggagctggccaatccttgatggctttcaccttggattcatncacctctattnctttngctgaaacaacaaagccaagaaacacaacatggtctatgc

SEQ ID NO: 21870 - DNA, 408 bp, Zea mays
tactcagcttatgtgtgacctagtgcatatgatttgatcacatctgttatacttttgatcattgaatatcttcaattgatacttagtgggcttagtgcttcatgtactatcaatttctggctctcatgtatatgcactaaggtaaaaggagagtttatgataaatttatgcaatttgtgaactacttgatgtgtgataataatgatttatttagagaaaaggatcactagctggagaattctctcttgtgccaaaataattctatacattgtcttgagcatatgacttaaataacccagactaaggacaaagcacaatgaatagagcctctctatgtgaaggtacaaaaggggtaactactctccatcatttacacatttacctagagtatcctcttatacgtatatt

SEQ ID NO: 21871 - DNA, 403 bp, Zea mays
  unsure (1)..(403): unsure at all n locations
tgatgcctaagggggagaagtttanggaccaaagcaatgaaaactatatcaaacaccaaacaccacaaatttaaaattttatatctacaaatggcttttcaagtggttttggttatttggtccaaaaataagaagtaagtgaattatggagttagggggaggcttaagtccataatatcaaattgtggggacaatcatgcatcttagcacgtagattgcatatntatattcaaatactngtattantttgcttgcttttggtgtgttgtcatcaatcaccaaagagggggagattgtaggaaaatagaccccggccattggctaagtaagtttggtgttgatgataacacaatctgtaactaacaagttcctagtgttatgtttgtagtacaggatcaagact

SEQ ID NO: 21872 - DNA, 523 bp, Zea mays
  unsure (1)..(523): unsure at all n locations
tcttgtagctgctacannaaatgagaggtgaaatgtgttcctcgacctgacactatcttcttcggcacaccatgcaaacagacaatctgggacatgtataactcatctagcattgctccggtgtatgttgtcttcactggtatgaaatgggccacctttgttaagcggtccacaatcactttgatggaatcatagctgacccgagtacgaggtaggccaactatgaaatccatctcgatctcatcccatttccactaaggaattngcaacaactgcaaaagtccagatgggttgtgatgctctgctttgggtctttgacaactatcatagatggcaacatgttctgcaatctctcttatcataatgtaccaacaaaatctccttttagatcctgatacatctcgcttccgnggtgatagaatagaatgctcatgagcttcttaaggatcgactccnaatggacttgatgtnggaacacacaatcggtatttaaccatatcacgccttctacatcttctcgaaa

SEQ ID NO: 21873 - DNA, 439 bp, Zea mays
  unsure (1)..(439): unsure at all n locations
ggtgcatgctgcagaagcacttcgcgctnggctctagcccttggctctagcttcggnggtgaattgatgaaggaaaatcangtatatcttcagcacttcaaccacaaacttgcttaaagggaaccgaaggccagccttcaaaaagcttcagtagattacaactttattctcttcaggagcaaggatgatgttgtcttctccaacccttacgatagacatgtcacgaaagtaccttcctctcatattgtcaatatgactaatgttaatagttgatttgccgaagacngcatggctcgatcgctanggccgatcttcagaatcttcatctccactcttcgcatcataactatcactatcatcagtatcttcagacaaaacctncactatctctntagtaatcttctctgtggttcgtnttgacatagactcaaaaaatctg

SEQ ID NO: 21874 - DNA, 315 bp, Zea mays
  unsure (1)..(315): unsure at all n locations
gacctatgacactaagctnggaagattcttcattccaacgtgggctagtcggcgatgccagagccaacccatgttggtcttagcaatcaagcaagcgtcgagttcagctctattgaaatcaactaagtatagctgaccctctaacactcccttaaaggctactaaatcatcacttcttctaaagacagtaacacctacatccgttaaaagacagttgtaacccattttacataattgtgaaactgaaagcaagttgtaatctaaagaatctacaagaaaaacattggaaatagaatggtcaggtgatatagcaat

SEQ ID NO: 21875 - DNA, 412 bp, Zea mays
gatactcaagcttaaagtcatgggtagtagcatacgctaataatatgccacttgactctatcctagcctccggtgcataggtttcaccgaaaaccaaaccttcgacttgagagtattccttggccacgagtcgggctttgatccttgtcaccacaccatgctcatcctgcttgttgcggaagacccatatggtttctacaacattatggttaagacgtggaactaaatgccatacctcattcctagtgaaagtgttgagctcctcttgcatcggcaccacccaatccgaatcttgaagtgctatctctatcctgtgtggctcaacagaggaaacaaaagagtaatgctcacaaaaatgcgcaacacgagatctactagttacccccttatgaatgtcgtcgaagatggtgtc

SEQ ID NO: 21876 - DNA, 436 bp, Zea mays
  unsure (1)..(436): unsure at all n locations
agtgaaggttcttcatccncacatgtgctaagcggcgatgccacatccagtccatgctagtcttagctattaagcatgcatctagaccggcctcttcttttgcaaaatcaactaaataaagtttgccgtctaatacacccttaatagctagtgaaccatcacttcttctaaagaccgacacatctacatttgtaaaaagacaattatatcccatattgcataattgacttacagataataaattatatcccaaagactcaactaaaaacacattagaaattgagtgctcattagaannatgcaatttacctaacccttttaccttgccttgagtcccatcaccgaatatgattgaatcttgggaatctttattcttgacgtatgaggtgaacatcttcttctcctccgtcatatgggtggtgcatccgctatcaat

SEQ ID NO: 21877 - DNA, 433 bp, Zea mays
  unsure (1)..(433): unsure at all n locations
nggtggcgccctcggtgtcctgccgcagccgaagtaccaagtctccacctggaagcctcggggccgaacccctcggcatggtagcgtcgcagagactgctgatatcgcgccgagtgtagtaaggccacgtcctgagcctcttcgagctggtccagagagtcttctccgctggtctggttgcttcggtcgtcgtacgcctttgtcgtcggggaaccgcattctatagtctgtgggtaagatagcctcggccccatagactataaagaatggcgagaaacacctggctcggcttggcgtcgtcctcagactccagaccaccgagggtagctctttcatctaccgcttgccaaacttgttgaggtcattgtagatcctcggtttaagtncctgcagaatcataccgttggcacgctccacctgcccatatgtcatg

SEQ ID NO: 21878 - DNA, 248 bp, Zea mays
  unsure (1)..(248): unsure at all n locations
aaaaagaaaaagaagcagntntatgcttcgctgtgtacgaaaagaatggaatgtgttttcgccttccgctcaaaaatgctaatttcgttcacacaaaagcattntatacattgatggaaaggtaagaatatattacaaggtatggacaaagtccacaaagtcaaatttaattacatcattctttacacaagttattacaagagtttttagagttttttctacagacatctattcaagcttcatcagta

SEQ ID NO: 21879 - DNA, 230 bp, Zea mays
  unsure (1)..(230): unsure at all n locations
gcgcgcgctcgcccgcgagcgcggtcatgctctttgccgcgccgaggagctcggagagcangcaagccagcgctcttcgaactgttcactccacctgtagagtgttgtaatttttggtttggctctgaatgcttccggtgtttgcagcccccggagaggcatgtgccccggactatcgataacacaagggagccctatgagactgtgtgctatgccgatgagactgtgtg

SEQ ID NO: 21880 - DNA, 469 bp, Zea mays
  unsure (1)..(469): unsure at all n locations
tcgggagcanggagttgcaactctttcagacgaaattgctctgtagccttttcttctgttgccttgtcttcaatttcggcaggctttatctcagcgggctctgaagacccagctttgggtttagtttgaattattgtagctttgatttctgcctgtttcgtttcagcttccggttgcgccttagaagcttccgcaatttttctggcagtagcaggattcaagggtttttgccgttctaatacaacatctagcacatttaccatccttcttctcttangacttatggcagaactcttttgtgtcttcagtggtgttgcttcttgaaagtcgcctagaggggggtgaatagggcgaatctgaaatttataaacttaaacacaactaccagctgggttagcgttagaaatataaatgagtccgagagagagggcgcnaacanatcatgagcaaataagagcgagacatgatg

SEQ ID NO: 21881 - DNA, 288 bp, Zea mays
  unsure (1)..(288): unsure at all n locations
cgtctttgtagcctanagcacgcgttagaagcctccacgatatgccttttaaaacaaacttaaaacaataaatatggtcacatgaggacgtttagcaaagccttcttcccaacccatgactctctctctctacttaagttgggactaaaggtttcccactttgcaaacatgaatgagctttttatatttntttctagaattttggagtttaattcttatatgggcagggctaaatccatatatcctaacatttatattcatgcatagtaaaacctatcaaataaaaca

SEQ ID NO: 21882 - DNA, 504 bp, Zea mays
  unsure (1)..(504): unsure at all n locations
tggaccaacttcatcaagaatagaacgtggtgcaagaggagctcaaatgtttggcattgatatgcacgggaggctattcttaggaacctgcaactatttactggtgtaaggtcttgcacattaatcatacatctactacagatttgttattgcatgatctgctattatttgtggtattcttcctttattgctgtgctccatctaatactgcaggatcgaaatatcttcagatgtacagtcttatgcaagatattacaatcattatgaatgtgcaaggtactccagagactngcactctcagatgcatatgtggatatatgcatgcagataatggaatactggcaaacattactctgtagagttcagagtgagagatcatacatattgaaagaagtggtacaagacatactcacatccagcatgtgagtttactgcacatgtcagggatggagtggctggacacttaaagatggtgnngacagaaacagagcacttctcaacaat

SEQ ID NO: 21883 - DNA, 454 bp, Zea mays
  unsure (1)..(454): unsure at all n locations
taagcttcgcacctcgtgactaacctcgctgcgtcacctatcactggtggccaatataatcctgacctgaagacctttccgactagcgtcttggatgctgcgtgtattccacattgcccggcgtggacctcatctagaagttgcttcccagtagatgagagaatgcacttcatgaggacgcctgatgcaccccttctgtataatgtctccccaatgagtgtgtagtgagctgactgtctagcgatgcagctcggctgcattttgtcatctggntcctcttcanttcttatatatctgatgatcggccttctctagtcatccgagtctgattctggttgattcacgatattacactcttctgcatgatccattgagatgctnggttgtggtatttcttgtacanaggctccaggtgggacctgagttcgactggantctagcttggacagtacat

SEQ ID NO: 21884 - DNA, 277 bp, Zea mays
tgaagcaagtctcaagactgaggtcgagaagaattcaaatttgctaaaattattgaaggatctccaagagaaatgcctaaatttcgacagccgatgcgtgcagcggctgaaggacgttatccgagccagttctgaaaaattttcaccttcagccgaaaacctgcccaacaccttggaacatattgaaggccaagttgatgctcttgacgaagttattggtgggcatgccgatttctgcgccctggtagcttctcgaggcacagctgccgctttcctg

SEQ ID NO: 21885 - DNA, 396 bp, Zea mays
tcagcagaatgacagcgaaggttctccattctcagatatgcagaaatgtgctaacctatgttgatgatattatagtaaaaatgatagagttggagtgcccgatctttcggtgagtggagataattccgatttggtggaagtagaccctcacgatctgactacgacgagcgatcccgaagcgccaatgcaatcgctgaaccaacttccaatgtgtaccgaccttgctgatgcgagatcggcctgatcacgaagatcgttttctgtgcgcaatctaagaacgaacaagaaaaatatgcgagcaatctttatatcactcgaggtggagttctgaatcacagaggacagcacgtatttgtgagtggtctaggtttgctaaagctagatgtaaaacaaaac

SEQ ID NO: 21886 - DNA, 453 bp, Zea mays
  unsure (1)..(453): unsure at all n locations
ggcacacatagcactnntgaatacctttgatcatatctcctttacatgctatgactaatgtngtttcaagtcgatttcaaaccaagtcataggtatattgaaaggaaattggagtcttcggcgaagacaaaggcttccactccgtaactcatacttcgccaccactccgagcaactctctcttctttgggggagaaatgagcatcaaggaataggacttcatccttgggggagagagtaaaaaaactcacaagcaaaaggaccggatttcgcctttggtataatcttaactcatttacttatgaccaaaggggaagaacttacttagagggctctaatgattccgtttctggcgattcatgccananaggcggagaaatgagcccaaagcanaaggaccgcaccaccaccaccanattcaaaaacttagtgctctccaaaagtctttatcatt

SEQ ID NO: 21887 - DNA, 406 bp, Zea mays
  unsure (1)..(406): unsure at all n locations
tgctcaacttaagactagcaagaatgagttttattagctaaaatttgcaagggatgcctacacgattggtagacacccctcaattaaggatggacttggtttcaagagggaagccaagaactttacaagccataaggctcccatctccgccaaggagaaagggaaggcccctatggcaagtattactaaaaggaaccatgcttttatgtatcatgataggagacaaactataaatgcttataggaattataatgcttacgataatttttctcatgctatgtttgcttctagntcttcatatgtgcatgatagaaatagtggtagaaggaatgttgtcataatatgcctagaagagatagtgtaatactcctaangatagtaatgagccttctacaatatatcatgc

SEQ ID NO: 21888 - DNA, 528 bp, Zea mays
  unsure (1)..(528): unsure at all n locations
taatntattctatagggaagttaacatatgaaanaataattattttttcctgaaattaagggcatgtttggntntttgcctaacttgccacactntgcctaacttttctgcctaaggttagttcttcaatttgaacgactaatcttaggcaaagtgtggcgtagttagccacgaaccaaacaggccctaaacgagcttgtgtgtgttgcattgcttgcttgtttgtgtgtgcttttggtgtttcttgagtgtataaaagtttcaaaatgtgtttatctatcaaataggttctcccgagaatntactagaatttttcatacaatgattcccatttntctagatctatttagatgaaatttttaatgggctctgaannatttgtcagattcctcacgtacaagtagacctctagggtatnntcaatttcataacattcgaagtactttccacttgtcggngtcgcctatacctagagtcttggaaccgtccatggatctctatgcatgcaccgtcgaatctcgacgaacg

SEQ ID NO: 21889 - DNA, 521 bp, Zea mays
  unsure (1)..(521): unsure at all n locations
ntaactctcgcgagaccttntctcatttctttctaaccatggtaaactcattattgtatgtgatattntatgcatgtctaatctactgattctcttgtatggtgtaatgttggnttcctaatttcaatggatggatatatgtatgcttgcaatcgcttagagaacgatccgattggagagcccgaagaactcgcatgagaagcccctgagcagcagtcggttggtggaggcaagtgtcctttgacctatccctgtcctattcattcttntaattcacctccgcattacacatttatacttaaggattgactagctntgttatcccatgtccttgttacctatttgggtcggattattatttattagctctatgctattgctcaaactctaatcaatgaacatgatgagaatgtatatgataccgctgtntcccttctcttattatgatgtngtacttgtggtcttcaagggggctcgagccggttctcgagtgcctcttcgtanggacctattctatggat

SEQ ID NO: 21890 - DNA, 148 bp, Zea mays
  unsure (1)..(148): unsure at all n locations
gcttncggaaatacaacttcattntcttcgggagcaggaacagccctgtcttcgtcagtcctcacaatagacatatctcgaaaataccttcctctcatgttatcaagatgactctgtttgattggtgattttccaaagactgcataac

SEQ ID NO: 21891 - DNA, 494 bp, Zea mays
  unsure (1)..(494): unsure at all n locations
ggagaagcagaatcgccctctgcagactttaatcgcccacagctgcgcgtagaccgagcaattcggtgagccattctcaaattcctcgcgcacatgtcttcgatgacctctggtgaagctctctgacccgttcaattgaactataccaccttggttaggccggagcctatggggttttctgcagagtcataaactcaggtgaatagtaaaccgaggacctgcctgtaatacacttaaaacctttcgccagggacccagatgcaaaaccattttcctttaatccatttctggttattcttggtaagttaagcagagaacttaggaaatttgtatcttaagaaatgttcaaccaaatttagtcaaaccaaatgtactggattcaaaatattatgaactatcaaataanaatactgaaccctgtgctttctgttttgaatttagagtttggaataaatanggaaactgcccnaccttattaaatagagaaaatagta

SEQ ID NO: 21892 - DNA, 438 bp, Zea mays
  unsure (1)..(438): unsure at all n locations
ctaagcttcctgcgccagcttcgngattaccttgtctttcgncataatcacctttcgtgtcgctcaggcttcgtcctgaccatgctctgtatgctcatgaaccgaatccgaanatacctggtcacatatttcacttggaaaacattgtcaaattatgtttttgaggaccttcggaagccgaaggcccccaacagtagcccctcgcagtattaatttgttagagtgataaattcagattgcgacatggacgaaggccttaagccgaaggtccgaanaaacaccttccctttgctagaatagcaacagtcattgacaagcgggacccttccagtttcaacgcactaggcgtataaataagagctcaccacgggttcatttggcacgctntcttgccatctgctcttgctcacccaacttttagctcttgcgcaccaacac

SEQ ID NO: 21893 - DNA, 359 bp, Zea mays
  unsure (1)..(359): unsure at all n locations
gctagatgcatgcttaatggctaagacttgcatgggctggctgtggcattgccgcttagcacatgtggggatgaagaaccttcacaagcttttaaagggagaacatgtgatagggttaaccaatgttcatttcgaanaagatagaccttgtgcagcttgtccagcagggaaacaagtgggaggctctcatcacaccaaaaatgtgatgacaacatcaagacccctggagctgctacatatggacctcttcggacccgtcgcctatctgagcatangaagaagtaagtatgggctagttattggtgatgacttttcccgcttcacttgggtgttctttttgcaggataagtctaaaaccc

SEQ ID NO: 21894 - DNA, 502 bp, Zea mays
  unsure (1)..(502): unsure at all n locations
taaagccatggtaagtagcataggcaagtaatatacgaatggactcaagcctagctacgggtgcataggtttcaccgaaatccaaaccttcgacttgtgaatatgccttggccacaagtcgggctttgttccttgtcaccacaccatgctcatcttgcttggtgcggaagacccatttggttcctacaacattntggttaggacgtggaactaaataccatacctcattcctcgtgaagttgttgagctcctcttgcattgccaccacccaatccgaatcttgaagtgcttcctctaccctgtgtggctcaatagaggaaacaaaagagtaatgttcacaaaaatgagcaacacgagatcgagtggtacccncttatgtatatcgccgaggatggtgttcacggggtgatctcgttggattgcttggtggactctngngtgtggtggtcttggaccctcatcatcttccttggcttgctcattagcgtctcccncttgatca

SEQ ID NO: 21895 - DNA, 430 bp, Zea mays
  unsure (1)..(430): unsure at all n locations
actaagcttatctagcaaccttctgaatgtgctctgggctatcaaccttctgcaccgctattctacagacaaacaatggtgtaaggtgaaagttattataagaatcaaggcgagccacatgtataagttccatactggtttaaacaggcttctggctttgtccccagccaactcttgcccacccttaacccaaatctgagtgatgaatctatttccgatgctcccggcttcactangaatatcaatcaaatctaatggcgacatgctgaagggtggtctcgttactgtcttcgcatgcgtgcatccggccttcaagaatgcagcagttgtgtcgcgagaagctagtagatcacagaagtcaccatgcccagctatcacttcatcgagtgcatcaacttcattttcaatatgcttgacngtatcttatatg

SEQ ID NO: 21896 - DNA, 437 bp, Zea mays
  unsure (1)..(437): unsure at all n locations
ctcagctngacagtcacaacactgtgcctgagtcgaagcatatttactgaaaaggtctacagtggcttagccaagggaattgatgatctgatgtatcttaacattttctgtatttttcattttcttgaaaggaaaacaacacaagaaggatgaattttcaacttgatataatgatattgtctttacaccatcgagtgtgacaacatcatgttccgaagctccaaagccgttcctaagggagcacagagtaagttccaaagctacaaagccgttcctaagggagcgcagagtaaattccgaagctcaaaagtcattcctaagggaatgcagagccaaaataccacctaaatcaaacgtgaagaagctccaaagtcgttcctaaggggatgcagagcttanataccacctaaatcagaggtgaagaagctccaaagtcg

SEQ ID NO: 21897 - DNA, 478 bp, Zea mays
  unsure (1)..(478): unsure at all n locations
ggtngaggcaatccagctganagtacatgtgtaccaactacgatcaattcttatatatatgattaattggcgtgacttgctactatttaaaaactttgatagtgacagcattatcatcacccatttaccttttccactttctttactttattggttagatctgttggaaataatagcatcagataataataataatacaaaaaacaacagcattcttcgtatatgtattactcactagcagttaacgctggtgacagaataaatatgcgtataaacatccttacagtggggttgtcggcggtagaacaccgcangagtagacgtagcagagcgacgagaaccacgacgtctgtatagaagagcagtcgcgactgtgacggaacctcccaagtaattaggcccacctacnagtgtccttgtccaacggacatcagacaaccctgtagatgtcctgaatcacttgacagttggtatcttc

SEQ ID NO: 21898 - DNA, 373 bp, Zea mays
  unsure (1)..(373): unsure at all n locations
ttcnatttacaagatgcttaaagcctgtgatatcttnatctaaacagtcttgattttctcatgtatcctcatcatcagaatgctggttccgacttgatagtatctctttggataatcctgtactgttgaaccangactcgaatcaggtgcttacagtatgtcaagtccgtgtcaatgacaacatctgttactacaatggttcgatcgagaacccgtaaacacttcttcattttgacacgtggtacacaccttttatatgcatacatacgttctgggagctgtggtcgatacatcactggtccacattgctcatgtactataaatggacctatgtacctatgtgtatgctttccttaacccggagacgtgatac

SEQ ID NO: 21899 - DNA, 450 bp, Zea mays
acctataaaactcaagctcgaattgctgagaatgtagtgaactacaagaccggtgggagctattgtgttattgacagaggatgcacacaacatatgagaggctacccatggatgttcacctcactagatgaaaatgttgatggtgaagataaaatcacatttggagacaattcaaaaggataagtgcatggacttggcaaggtgacaatctcaaatgatctatcaatatcaaatgttctcttagctgcacctttgagcttcaacttattatcagtgggtcaactttctgaacttggacttcaatgcttattcactcctacagatgttattgaacacagatggatgatgaatcactggtattcaacggatttagatacatcaacctctacttagtggatttcaattcacaagatgctgacttaagaacttgcctgttcaccatagcttctc

SEQ ID NO: 21900 - DNA, 245 bp, Zea mays
  unsure (1)..(245): unsure at all n locations
actaagcttctaagggagaacacgtgataggtctaaccaatgttcaattcgaanaagatagatcttgtgcagcttgtcaagcatggaaacaggtgggaggagcgcatcacagcaagaatgtgatgaccacttcaagacccctggagctgctgcatatggacctcttctgacccgtcggctatctaagcatatggggaagtaagtatggtctaattattggagatgaattttcccgcttcacttgg

SEQ ID NO: 21901 - DNA, 416 bp, Zea mays
  unsure (1)..(416): unsure at all n locations
ttttatttcagcattgtaacatgccatttgttatactacttacctatatagaggtattttatttcagcatcatggtggcggctttatggaactgaaacaccagctctacagaagatggctaccaagatcctatctttaacagcaagttcttctggttgtgaaagaaattggagtgggtttgatggggtaagtactaccttatcctgtatcaaaatacaacagcattacaataaaattgcagaactaanagtgctcttattntaaatttataggtgcacactaagaagagaaataggcttactacagaccacctcaacaagttggtctacattcagttcaacaacaggctaattaataatagagcaaatatcaagtccangaaaattactgatgttctcttatctagtggtacaact

SEQ ID NO: 21902 - DNA, 472 bp, Zea mays
  unsure (1)..(472): unsure at all n locations
tctanagggagaacacatgataggtctaactaacgtacatttctaataagatagaccttgtgcagctggtcaagcanggaaacaggtgggaggctctcatcacaccaaaaatgtgatgaccacatcaagacccttggagatgcttcatatggacctcttcggacccgtcgcctatctaagtataggaggaagtaagtatggtcttgttatagttgatgaattttcccgcttcacttgggtattctntntgcaggataaatctganacccaagggaccctcaagcgcttcctcaggagagctcanaatgagtttgagctcaaagtgaagaagataaggagcgacaacgggtccgagttcaagaaccttcaagtggaggagttccttgaggaggaagggatcaagcacgaagtctccgctccctacacaccacaacaaaatggtgtggagaaaggaaaacaggacactcatcga

SEQ ID NO: 21903 - DNA, 380 bp, Zea mays
  unsure (1)..(380): unsure at all n locations
tactcagcttcgcatctgaagggaatttccctgaaggtaagagatgatctcagttctccaatcttcgctataaacaggagatatattgaggactgctctttcaagaagttccaccaaaggtgcttttattgtttcgaagaacacatccgaaggtaaaggcagcccctgtgctgctgacttagctagcaaatcagcatgctcattntgtcctcgagggatattnttgacagaaaatccttcgaatgaagcttcaactcttcgaaccatatccagatattnttcaagcttcggatctttagccttgcaactcttgtcaatatgacccgaaacaacctgngaatcagttttaagtatggcccttctgattcccattgctttta

SEQ ID NO: 21904 - DNA, 367 bp, Zea mays
  unsure (1)..(367): unsure at all n locations
ctgagtnttgagagccctatattgcataagaccagtgactctctcatataatgactttgtcacccagattagtctaggtctactcttatttggtggacctaggaatgtaaccttaatctttccatttgcaacctttcttagaacatagtgagcattgaaagcaaatggtcttgagtgcttaagcaagggagttggtggtttaactttgcagttgtgggcaaaatgaccttcatttccacactcaaagcatttgataggctcgtgagtctgctttggcttgtattgagtgatagctntctttngcacaaaagcattgtattcaataccactcttgttatttntcataacagtgttcataagcagctca

SEQ ID NO: 21905 - DNA, 244 bp, Zea mays
  unsure (1)..(244): unsure at all n locations
tcgcgagagagggaacgaatcccagatctctcgagaggtctattgttgtggagaggaggttggccctgaggtggtttttgttgatgttgggtgagtcgtctgggtgagctttcgaagcttgccttgggaaggccctgngcatctccttttataggtataaggaggtgacccagctgtacatatgggggtgtagctatgcgctaacgtggacgacggagaagtgcttgagccctgttgaagcgtg

SEQ ID NO: 21906 - DNA, 260 bp, Zea mays
caaactatatcggattatcttggttatgttttcagaaactttcgaaacgtttcttcgagtattaaatattaatttcaggtttctaatattaattaaatacctaaaatgtggtagttgcgaaaactataaaattttggaatttcgattatatatatatattcctctcgtcgaacctgttccagatctagtgccctttttcgcgagatcactgaaccgtgtcttctcgctttgcgatcctcgtctatccccgcctacccctt

SEQ ID NO: 21907 - DNA, 309 bp, Zea mays
  unsure (1)..(309): unsure at all n locations
cacaacgattcttaaaaaaccaattctcttttttgccgaagcaaccactctggtacataaatgctatgaatgaatgcttatgtatgcaaatgccatgatgtaatgtaatgtgcaaatgaatgtccgaagcgtatatccgaagccacactcatccatcattttcttatgagcaaaacacacgtcagctctgcattcccttatgaacgactttggagcatctttgccttttacttangcagtatcagcgttgacttttcgctgtaagctctgcatccccctatggacgtctttggagcttcttcgtctttt

SEQ ID NO: 21908 - DNA, 455 bp, Zea mays
agagaattgcttgtgttctttcaagctcctgcgctaggtttgtttcttcgttctttgactctccattgcgatcaaacacacctgtcgttgaggcaagagacaccaatcttgtggtggtccttgaagaacgttgcgtgcaagcgattgagaacagaaagctcactcggtccggtggaccgtttgagagagggttatggttgacagagacccggtctttgtggcctcctctacggcgagtatcgttgcgagaacccgactctctggaaaactaaaccacgtgtctcactctttattctgttgcgatctgtttgcaccctctcttacggactatattatatgtctaacgctgacccggttatagttggattatttctagaatttagattcgcctattaccccctctagcgctttatctgtatatagccgggctcttaagctaccgtctagtgagctga

SEQ ID NO: 21909 - DNA, 239 bp, Zea mays
  unsure (1)..(239): unsure at all n locations
tgtgccctngngccatttctataatggtttggtgattaagtgtccaacacataataagtgagttgctatgtgccaaacaagcgagaagtgcaaatcanagaanaaggtacgtttctagacttagtacattgttttgagtactaacatattttgtctaagtgctataaacagggagaaaagaattggaaaaagacttggctctgagcagccaactccagctcggcttggcacaccggact

SEQ ID NO: 21910 - DNA, 399 bp, Zea mays
  unsure (1)..(399): unsure at all n locations
tctgccttcggaggccgaatgttgaaatgaatgaagctgccgaagaatgtcatatagccttcgacgctgtctgctcttttattggaacgagagatctagtacaagagcatattgccttcaaggtatggccgctcgcggagaaatgggaaatgccgcaagaaaccataaaagaggccgaggaaggtggacttatcangctgaagtacactcttaagttcggagataaattctgtgagccagatgatgactggttaaatagcattgaaaatctaagtgatgaactgctcgtggcttatactaagaccgaagatactgcactgtcatcagctcttcggaggccgaataaagaagagactgaatctggtgtttgatgcaatctggttcgtctaccctgactat

SEQ ID NO: 21911 - DNA, 317 bp, Zea mays
caatgagaggagtctaaagatttcaagcaaaaggaaagctagctctgcgattcgtcagcccctatcctatcatcgatagaatagggcccgcaacttaccgccttcaattgccagagtccatgtcagatatcaacaaagtatttcacatatctcagctccgcagatgctcgaaagtactggaaagtcacatcgcagaagagtcagctcagatttagaacgatctgcagtaccgagaatagccagtgaagattttaattcagctattcaaaagactcgaaactcagaagtaacgctctataaagtccagtggagtatag

SEQ ID NO: 21912 - DNA, 396 bp, Zea mays
  unsure (1)..(396): unsure at all n locations
cattttgagaaatacacgatttgtagcgcatgccaagccgggaagcaagttggcacccatcatccacaccagaacattatgacaagtgacaggccactggagctccttcacatggatttattcggcccgattgcttacataagcatcagcgggagtaagtactgtctagatattgtggatgagtattctcgcttcacttgtgtgttcttttgcaggaaaaatctcatacccaagagaccttatagggattcttgagacgggctcacaatgagttcggcttaatgatcaagaactatagaagcaacaacgggacggagttcaagaactctcanatngaaggcttccttgacgaggagggcatcaagcatgagttctcttctccatacaccccacaac

SEQ ID NO: 21913 - DNA, 444 bp, Zea mays
  unsure (1)..(444): unsure at all n locations
ctctcgcgagaccttntcccatttctttctaaccatggtgagttcattatcgtatgtgctattctatgcatatatactttatttggtctcctgtatggggtactggttggttcctaatttgaatggatgggtgtgtgtatgcttgcaatcgcatagagaacgatccggttgaagagcccgaggaactctcaggagaagcccctgagcagcagtcggttggtggaggcaagtgtcccttgacctatctctgtcctattcattctttaattcaccttccgcattacacatttatgcctaaggatcgactatactttgtatccatatccttngttaccaatttgggttggattatttatagttagctttatgctattgctcaaactctaatcaatgaacatgatgagattatctatngatacgctgtttcccttctcttattatgat

SEQ ID NO: 21914 - DNA, 529 bp, Zea mays
ctcaagcttctacagggagagcacatcttatgattaacaaacgttcattttgtgaattatatgatatgtagcgcatgccacgcacggaagcaagttggagtccatcatccacacaagaacatcatgacgactgacaggccgcttgagctactccacatggatctattcggcccgattgcttacataagcatcggcgggagtaagtattgtcttgtaatagaggaggattattctcgcttcacttgggtattctttttacaggagaaatctcatacccaagaaaccttatagggattcttgagaccggctcacaatgagttcgccttattgatcaagagaataagacacgacaacggaacggagttcaagaactctcatattgagagcgttcttgaggaggagggcatccagcatgagttctcttctccatacacacctcaacacaatggtgtagtggagaggaagaatcgaactctattggacatggcacgaaccatgcttgatgagtacaagacacctgaccgggttt

SEQ ID NO: 21915 - DNA, 318 bp, Zea mays
ctacttggcgtaaactcttctttcttctcttctggtgctctgaatgcaacgggttgcacctctggtgtggaggtggcgccttgatccaagttgacaatgtgtttggagtctgtgatcataaattcaaagctcacaaacttgtcaattacctcactcggagacatctgtttgtatctcggatctccacagattagttgcacttgagtgggattatgataaacaagagatctaagaataaccttgatcatttcatggtcatcccacttagtgctctcggagtgcgcacttggctgaccataaatatgagcctattgtaca

SEQ ID NO: 21916 - DNA, 413 bp, Zea mays
atctcttgcccttgctctcttatccatgtggtctgatatacttgcgaatcagtttgaagattgccttttattccattcctttagtttcgaagccccacagaaaggcttcctactccgccatggtattcataccactggactctaactttattggataacatgttataactttagagggtgcaactaggacagcaactggtcctgcccgaatgtccccaagatccgtacaaaataccgtccaggcttctgatcttttgcacttcttgacctgagcccctggcgtccattagcgatgaagtctgcttacgcctgagataaattgaggatctgtgcacataatcaatggtgaattcatataagtctgcgacccattttccgatccttcatgtagctactctattcctcattatgtc

SEQ ID NO: 21917 - DNA, 518 bp, Zea mays
  unsure (1)..(518): unsure at all n locations
tgtatgggacttgcggcagggggaattttgttttaagaagcgaagatcattgtctcttgaagcttcagtcttctcatctcccaatctactggtactacttacaccttcatctaaacgcacttggtgtttctggaacgctaagaaattcatgtaacaaatcatgtggaagttgatagattagttagcttataataccaataacctagtagtgcattggtgcagatactagctatggcatatctgcaatgagaaaaaaaagttggttttttaacacacgtcaaaacgtgtcatttttctattaagaagagcacgtgaagtggttcattggggcctccaattagtaattaacaccaatattngtctcatgctaaatactgaactaaatgttaattntatgntctttgcagttttaactgggctcaaacattgcctagttcccatttaacaactatgaactctanggtaaatactacacaatactanngaaacatgtattgtattggatatatccaattata

SEQ ID NO: 21918 - DNA, 189 bp, Zea mays
cttttactttcttatttcctgggtttgggcggatcagtctatctgagtacattctattacttagggttctattcccaatggtggtgcacatggccagatgttttatgcatactgtgagcactggttatacccggctaccggagattactaagccatgggcatggcttctccattcttatctcatgcttt

SEQ ID NO: 21919 - DNA, 341 bp, Zea mays
  unsure (1)..(341): unsure at all n locations
ctcgtggaattgagagaggatctgatcacttgcgtgtgtcttagattgaatgcctaactcttgtaagtggctagaacgtggaaaacttggatgatttgaatgtggggtggctggcggtatttataacccctaccactccactatcctatagatacaagctgctttcacatcgctcgntctatttatgactntgcgtccaagaatattatgatgttccttcatgaagaaatgatacacacgttanttattgctaaaacctggcttcactaataattaatacctgaccaactaaaagccactgcttgagcctaaccacacataaagctagtccactttaacca

SEQ ID NO: 21920 - DNA, 321 bp, Zea mays
  unsure (1)..(321): unsure at all n locations
ttggccccacctacaggctcgcatcctctcctaagggtggccccggggccactgtctgtaccctgaaactagggtaccccttactactgtataaagacgcagtacccacgcgggtatttntagtcgcgtggtaaaagagctgtatgtgggaccaggccatgacttgctctagcctcaggcaaatactctatgccagcaacagcacctgaccccactacatgggcaggtccagtgccgccatgtgtctagagaaagtgacatactctgagatatcaccagtgagtccggacccccatgggaaggtgcagacccctgatatac

SEQ ID NO: 21921 - DNA, 218 bp, Zea mays
gcataattatacctttgatatcttctcgtgttttcagatcatatttcacataaaaccattctgtcatccagtcgccgggccatctcttccgaaagggtggcacgggacagcttgacccacaccgagaaacaaaattgtagcagccaaagatattgtgatactgttccttaccccaacggtttgtctcgtatgataattcccgtatgttgcagaaactt

SEQ ID NO: 21922 - DNA, 473 bp, Zea mays
  unsure (1)..(473): unsure at all n locations
ctttcgtcattacgttcaagcagcttcagccgaagctgttttctttccgcaggaccttccgcgacgaagcatggtcccaacagtagccccttcgcggtgctagatcggtnttcgtaacgagcttgatccgtgaaaaaagtctcttaggcttcacgaagccgaaggtccaaaaaacaccttccctgagctcgttgtcgagaaacgatacagttttcgagcgcatagcggtcccaccatgcaggttcactatnnttggttttgcagccaccgtgcagcgggtgcgagcaactgtttgcctggtgaaaaatcctgaaattcaccttttacctgagcactatataaacagacgggagggtgtaagtccacagattattgtatacactggttgctacaaaatttaccatagcgaagctgacttgattaacaagctcagtagtttgttctcaaaaaagctcgagaaagtgtattcaaca

SEQ ID NO: 21923 - DNA, 271 bp, Zea mays
attgcatcactcatatgaatatcataattgtttatgtgcaaacagaacagatgatgtccctagctcccgaatcggtatcattgaaggcatttatgcactgagtgagaagttaccgccaccgatagacttgcctgtatctgtcactggtggtgttcattttgaccttacccagagggttttaatggatatacaacgagctggtcatgagcctgtagaaataattcgtcagatatcttaaacggtaagctgaattatccaacatggctataca

SEQ ID NO: 21924 - DNA, 399 bp, Zea mays
  unsure (1)..(399): unsure at all n locations
cagctctatcaaaatctaccaagtattgctgaccctctaacactcctttaaatgctattgaatcaccacttcttctaaagacagtgacacctacatcagtgaatagacagttgtagcccattntgcataattgagatacagaaaagcaattgtaatctaaagaatctacaagataaacattgaaaatagaatggtcaggagatatagctattttaccaagaccttngaccaaaccttgatttccatccccgaatgtgatagctctttgtggattcttaggttttctcataagaggagaacaatctacttctccctgtcatgtggttcgtgcacccgctgncgatgatccaacttgagcccccggatgcataaactctacaaacaagagtagtcttgctt

SEQ ID NO: 21925 - DNA, 348 bp, Zea mays
  unsure (1)..(348): unsure at all n locations
atatacgaatggactcaagcctatctactggtgcataggtttcaccgaaatccaaaccttcgacttgggagtatcccttggccacaagtcgagctttgttccttgtcaccacaccatgctcatcttgcttggtgcggaagacccatttggttcctacaacattntgattatgacgtggaactaaatgccatacctcattcctagtgaagttgttgagcttctcttgcattcgcaccacccaatccgaatcttgaagtgcttcctctatcctgtgtggctcaatagaggaaacaaacgagtaatgttcacaaaaatgtgcaacacgagatctaagtggtacccccttat

SEQ ID NO: 21926 - DNA, 521 bp, Zea mays
  unsure (1)..(521): unsure at all n locations
ctaagcttatactcggctgcattgttggagggccggaatagcaacgggagggcgtacttgatatgttcgcctccaggcgcagtgaagagaatccctgctcctgctccctgcagcttcagtgagccatcaaaatacattcgccatacttctgcagtctccgggttgtccggtacttgttgttcggtccactctgatacgaaatcaaccagtgcttgagttttgatggcagtgcgaggtcggaactcgatgtcatgagatcccagctcgcaagcccacttggctattcgaccgatggcttccttgttgtgaagaatatcccctattggaaagcttgtaactactatgactntgtggctgtcaaagtagtgacgcagctttgcgggcagtagaagtactgcgtataatagcttctgaactagaggatacttgttctttgacgtgcctangacttcactaatgaagtaaacaggatgtcgtactggatanngcatgtcttcttctactcgctcgactaccaacgt

SEQ ID NO: 21927 - DNA, 493 bp, Zea mays
  unsure (1)..(493): unsure at all n locations
ctaagcttctaagggagaacacgtgatatgtttgactcacgtacaattcgaataatatagaccttgtgcagcttgtcacgcaggtaaacaggtgggaggagcgcatcacagcaagaatgtgatgaccacatcaagacccctggagctgctacatatggacctcttcggacccgtcgcctatttaagcataggaggaagtaagtatggtttagttattgttgatgactattcccgcttcacttgagtgttctttatgcaggataagtctgaaacccaagggaccctcaagcgctttctcatgagagctcaaaatgagtttgagctcaatgtgaagaagataaggagcgacaacgggttcgagttcaagaaccttcaagtggaggatgtccttgaggaggaanggatcaagcactgagtctccgctccctacacaccacaacataatggtgtggagagaggaagacatgacgctatcgatatggtaggatgatgc

SEQ ID NO: 21928 - DNA, 505 bp, Zea mays
  unsure (1)..(505): unsure at all n locations
ntgagagatctggtatgaatctgcgataatacccagctagtccaagataactcctgacttggtgaacagttgttcggggtttccattccagaatatctttgaccttgctaggatctaccgcaattcctttagctgataacacgtgccccaaaaattgaatttcttccagccagaacgcgcacttgctgaacttggcatatagctgatgttccctgaggcgcgtcaatacaatccgtagatgctgagcatggtcttcttcattcttggaatatatcaagatatcgtcgatgaagactaccacgaacttgtccaactcgggcatgaacaccgagttcatcanataagtgaaatgggcaggagccattgtgagctccgaagacattaccaagtattcaaacaatccatatcgcgtagtaaacgcggtcttctgtatatcctcaggccgaatacgganttgatgatagcccgacctgagaatcaatttggaaaataccctcgccccagt

SEQ ID NO: 21929 - DNA, 184 bp, Zea mays
  unsure (1)..(184): unsure at all n locations
ataaaactacatctatattagntcatattcaatcataaaaaaatagattgtgcagacagtgagtgaaactattctatttaaacagagaataattctatgaacattttgcaatttgaatcactaaatttggagttcatatgcgcaagttatgaaataaacaagtttgggaattccaaatatgaaa

SEQ ID NO: 21930 - DNA, 424 bp, Zea mays
  unsure (1)..(424): unsure at all n locations
cgtaactcatactgtatgccttagcattcttttatgctatcttttctcttacgcattaaagggaaaaacgttacttcggtttacacaaatgatagctcgaagatacttcgaaggataagacaaacgaagcttaaggcccttcaaaaggtactttatgcatggtacttttcacctatttataagcatggttgataaatatcacaggggcatcatcaactttctattcttatttcttgcccctcaagtcttggacctcttcaccttcgtccgtttacacacgaagctnttcttatgctgaggctggctttgcacctttgtagcttgcaccttcgtgcatacaaccgaagcttctttgtatgctacattgtctgaagtccatctgtgttcatcctttgcttatatgcctaanacacattngcttaca

SEQ ID NO: 21931 - DNA, 526 bp, Zea mays
  unsure (1)..(526): unsure at all n locations
tgtatgctgtgtctgtgagagagggaggagagaggtgaggtgagaatttaaaaaatgtgagtgacaaatagatcataaattaaaagtgaacagttaattgctatatagatgagctgaaagaataaatggtaaaacgattacaaccagcaacagatccaggtccatagctgaggggtcgagctggcggccttccatggtcccaaaatattgggtctctcaagtatacacttaagtatattacttagttatttaatttatcaaacaatgttcgtttggttcactcaacagtctcatgctaagcagtccagcctctgctatcttcctcatgtaacataagttagcagcaactgttggcctgctcacnngtagccagttctaagttaggacttagaacacataattctagtcacggtgcttgcaccacgtcgccaaaggactggacatgactacaaacgccanaggactggacatgactacanacgtcnggacacatcgtcgacgatcgaccttcgtacgtgtataccat

SEQ ID NO: 21932 - DNA, 450 bp, Zea mays
tgatctttggaatctctgagagggcttgatgcaacacttgttctagtgtaacaccacattgtggagactggccttggccataccacggtatacaaaatcgtcgtgtctcttgagctatttactttactgcaatatttcctcttcctaagttctctattctcatcttgaatactgctctaagtttaatttgaatcttactagagcaaccaagtgaagggaacctctctctttttctctgctctctaacatcggttaagtcacactactctaacttttagaccaacgttgtgtgtattagcatatttttaaggatcacctattcgcccactctagggctctcacttagaaagatatatgctatatggtagtagctaaccttaggtccatggaatactacaccattctggtataacatgaccttaatacaatgacatggaactgactacaaaa

SEQ ID NO: 21933 - DNA, 424 bp, Zea mays
  unsure (1)..(424): unsure at all n locations
ataggaagtgccctggaggtggctccacttgttatgtggtggacgcctactttgctctcttatatagtagtaaagattatcaagaaggttgcgacatttatatgtgaccaaagaattgagatagcacgttccatttgacaagaataagataccacatcactgccgcactactcataggaaacacggatctgtagatacataaaccacatatggaatagaactggacaaagaattttctattcaagagatatatacagacgctntacagcanaccatgagaactatatgaactataagacctatatcatctaaagtgtatcagaatttcatctctggaggcattctaacatctaagctatgaccaaaagggccacattctcgngtctaatatattatagtgataaaaaatgaacaatacctacta

SEQ ID NO: 21934 - DNA, 298 bp, Zea mays
  unsure (1)..(298): unsure at all n locations
ngcatgacacacacgtgaatgccatagatctgactcatcacacaaatggacagagttcaccagattattacacacatcatgcagtgataagcggaacaagcctctgcagtcatattctntaccaacaaaagtaccatgtttcgacacaacacatttattagactcgagaacaactgtatatccatctcgacatagcatcgaagcactaacgagattcttcttgatagacggcacatgctgcacgctcttcaatgagactgtcttttccgaagtaaacttcagaatgaccgctccaaca

SEQ ID NO: 21935 - DNA, 319 bp, Zea mays
  unsure (1)..(319): unsure at all n locations
agtcttagcaactaagcaagtgtcgagttcagctctttcataatctaccaagtatagctgaccctctaacactcccttaaaagctattgaatcatcacttcttcttaagacagtaacaccagtatcagtaaaaagacagatgtagcccattttacataattgggatacggaaagcaacatggtatctaaagaatctacaagaaaaacattggagatagtatggtcgggtgagatagcgagtntacccaaacctctgaccaaaccttgatttccatccncgaatgtgatagctcgttggggagtcttggttttctcatat

SEQ ID NO: 21936 - DNA, 386 bp, Zea mays
  unsure (1)..(386): unsure at all n locations
tgaagccatgggtagtagcatatgcaacgtaaatgcgaattgattctatcctatctaccggtgcatatgtgtcaccgaaatacacaccttcgacttgtgaatataccttggccacaagtcatgctttggtccttgtcaccacaccatgctcatcttgtttgttgcggaagacccacttggttcctacaacattttggttaggacgtggaactaaatgtcatacctcattcctagtgaagttgttgagctcctcttgcatcgccaccacccaatccgaatcttgaagtgcttcctctaccctgtgtggctcaatagaggaaacanaagagtaatggtcacnaaaatgagcaacacgagatcgagtagttacccnctctttatatcac

SEQ ID NO: 21937 - DNA, 381 bp, Zea mays
cttgcctttttggtagccaaagctttcgtgtcttcctaccaaacaccaacacgggaaccgtgatgggcgtaatggtggcgtggcatggagtataccaaaatccaaacactggttttaaaaagaaccattcgtgttctcagaccttgtgtttggttacctgttttcacgcacaagttgcactcggggatccttaaagcagcatttggttgagtcattgcaacacacaattttgtactatattgttgtaggtacgtaactaaaaaaagtttaaaataacaataattatttttacacattaatgtaatttgtcatagtgcttctacatctgattgcatcttactagtacatgctgactccgtagcaacgcacgggcatacacct

SEQ ID NO: 21938 - DNA, 438 bp, Zea mays
  unsure (1)..(438): unsure at all n locations
gagcttgtgaagagtgttgtggcctttgctgctggctccctcgatcatcagttngagcagagttatggattgacctaacatgcctcgggtgaaatcttcctccgaagcccctggtcatttcagagaacccgaatgcttactcccttctttggcggaagtcaatgtcagctcgaatgtattcgatcatcttctggagcagcttctccaacgtttgtggtggctttctggcaaagtactgcgctgacgggcccggccgaagccccttaatcatggcctcaatgacaatttcattgggcactgtcggcgcttgtgccctcaagcgcagaaaccttcggacatacgcctgaaggtactcttcatgggcctgggtacactggaagaagcctgagcggtgactggcttcgtctgaaacccttggaagctagtatcacatattct

SEQ ID NO: 21939 - DNA, 457 bp, Zea mays
  unsure (1)..(457): unsure at all n locations
agcttcgtgatgttctgaatttatgaaaaaatatagtcttcttaaaccaatagacggagcaagtaagaacattttattatggaattctgccaggtttcatgtcagaagcggggccagacatttgagattgggtattcaaaaattcaaaagattaaagaaattagtgctctaacgttattttgtgtaatacattatcgacaaattactatagatcacaaaaacttgggtatccaatgaatacccatgaaaccccctgngcccgccactgtttcatgtggaaattggaaatcttttttgtgtgctattgcaaaacgaccttgggttttcatttacagtctacaggtgtcgggtcaaagactcanagatgttggtgctcttggcttagctaaacaaggagcctcttagagcaagcataatgatttagatacgggtctactcacataactcacataaatca

SEQ ID NO: 21940 - DNA, 477 bp, Zea mays
  unsure (1)..(477): unsure at all n locations
taaagcaccattaatctcatgaatatctattccagaataaacattatagatgccaattgattcatagcaacggaagcactagtccatatgatgcaacacatataatactgtaagaagcatatgataagaattatcaataacacaataacacattagcaaagctcaaactaacacatcaccccttaggataagctttcctctcaggttgagataagctttaatgcacaaattctccccctttgacatcaaacaccaaaaaccatactcaagcaagaacataggatgatgtcaagggacagcaaggtgttaaggaggaaaaacacactatcaaaactcccccttactatatgcactaccaacatttgagtaagatacatatacgcaaaanaagctcaatacttccttttgtacctttaccatgttgtggtgtacttcccatcttgaaagtattaatctctcgggagcttctccacactt

SEQ ID NO: 21941 - DNA, 398 bp, Zea mays
  unsure (1)..(398): unsure at all n locations
agcttgctctcagagtccccanaatagcccggttntttcatcatagtcatgtcatcttctgttacagtaaagttttcaaattcaagatgactaggctntgccgggtttagaatgttgtagtcctcttcgctctcattatcactctcaccctcaaccatagtttgtccagcttcaacattggaagcaccttcgtcagtaacttcccctggcacaactagacctgatcgcttcattacttctgatatggacactgtttcggtagctttgccctcgtctccctcacgagacaccccagcggtggatcaaactctggccatttgtgttaatgctttttctaagacaaagctaatcaccagtgacgaagcgttntgctcgaaaatgcaatacagagagcttta

SEQ ID NO: 21942 - DNA, 329 bp, Zea mays
tgccaagccctcggacccggccggacttcaccggaggcccgagatcgacctcaccggacttcggtcttccgccaccgcgcgtggaccgagctatccagtgagtctccgccaaattccttgtgctcatatcttctctggcatcccgtgaacctccctgacccatccaattgaactatctcgccgtgaccaggccggactcctcgccgccgacgagcatccccgcctgcgcgcgtggaccgaccgactccggccatctccgacggcgacccgcacaccgttgtgatccctgagaacctcccttcgtcctcgaccacttcgccggaacaatc

SEQ ID NO: 21943 - DNA, 391 bp, Zea mays
  unsure (1)..(391): unsure at all n locations
agcttctaaagggagaacacgtgatatgtttgactaacgtgcaattcgaaaaagatagaccttgcgcagcttgtcaagcaggtaaacaagttggaggagcgcatcacagcaagaatgtgatgaccacatcaagacccttggagctgctacatatggacctcttcggacccgtcgtctatctaagcataggaggaagtaagtatggtctagttattggtgatgactnttcccgcttcacttgggtgttctttttgcaggataagtctgaaacccaagggaccctcaagcgcttcctaaggagagctcaaaatgagtttgagctcaaggtaaagaagataaggagcgacaacgggtccgagttcaagaaccttcaagtggaggagtttcttga

SEQ ID NO: 21944 - DNA, 437 bp, Zea mays
  unsure (1)..(437): unsure at all n locations
gacatagggaagacccactagttnttcaataaactagcaaaggaatagtccaaacttttgtacggaagagaccctgccgagcaagaacatctgtcattatactgactctaacagatcctttaaagggccctctaccttaaatttagaggatacaacgcactctatccactccagcaagagactgtaaatgagcctctaaaatttagagtgtagtcttcagccgctaaatgtgaagatgcactgtagatccggtatcctgcgcgagatgcttctttcgactgctagtgtacttggggtatgtcctttttattatcttttatttcttgtcgaccaatgatgtanagagagagagagagagtngagattaaaaaagatgagatatagaggatgaaatttagaggactnntgtggagacgctgaagatgtagagaacaaac

SEQ ID NO: 21945 - DNA, 458 bp, Zea mays
  unsure (1)..(458): unsure at all n locations
gtatgtcattgcatgatgcatatgcaagtaggatacagatggcttcaagtcaagcaaccagtgcaaaggtctctccaaaatctaagccttcaacttgagagaatccctttacaacaagtcttgcctttgtccgcacaatcacacctagatcatcttgtttgtttctaaacacccattttggtccaataatccttgcatcttgtggatgcttctccaaggtccaaacttggntacgagtgaagttgtttaattcttcatgcatgacattcacccagtccggatcctgtagcgcctcatctatancagtaggttcaacacaagagacaaaagagtgatgttcaataaatgaagcatgtttatgagaacgagtgataacctcttgtgaaggactcccaatgatttgatcttgtgggtgtgcttgaagcagtgatgagtntctcttctcaaccacttgggaa

SEQ ID NO: 21946 - DNA, 378 bp, Zea mays
agcttctaaagggagaacacgtgataggttggactaacgtgcaattcgaaaaagatagaccttgtgcagcttgtcaagcaggtaaacaagtgggaggagcgcatcacagcaagaatgtgatgaccactttaagacccctggagctactacatatggacctcttcagacccgtcgcctatctaagtataggaggaagtaagtatggtctagttattgttgatgacttttcccgcttcaattgggtatactttctgcaggataaatctgaaacccaagggaccctcaagcgcttcctcaggagagctcaaaatgagtttgagctcaaagtgaagaagataaggagcgacaacgggtccgagttcaagaaccttcaagtag

SEQ ID NO: 21947 - DNA, 428 bp, Zea mays
  unsure (1)..(428): unsure at all n locations
tgctttgtgccttagcacattttcaatcaatcgaaatatttctcaagatttgcttcgtattcaatctttctattgatgcgatatgatgtatgatgtgatgctatgctaaatgatgctatgataggatgaaatatgatgatgctttaacacccacacgtacgcccacactggtacacggaagactctgcatccccttgggaacgtcttttgagactaagctctgcatccccttatgaacgacttttgagcttcttcaccttttatttcggtggtataaggtttgcatcccctcaggaacgacttttgaacttcttcgccttatatttcagccagattttgctctgcattccctttgaatgacctttgagcagaaaacttacattgtgctccattangaacgacttttgagcttcttcggcttatatttc

SEQ ID NO: 21948 - DNA, 410 bp, Zea mays
  unsure (1)..(410): unsure at all n locations
agcttgtgaagattcttcattccaacatgtgctagtcggcgatgccagagctagcccatgttagtcttagcgattaagcaaatgtcgagttcagctctatcaaaatttactaagtatagcttaccctctaacactcccttaaatgctatataatcatcacatcttctaaagacagtaacacctacatctgttaaaagacagatgtagcccattttacataattgcgaaactgaaagcaagttgtaatctaaagaatctacaagaaaaacattggaaatggaatggtcaggagatatagcaattntacccaatcctttgaccaaaccttgatttccatccccgaatgtgatagctcgttggggatcttggtttgtctcgtaagaggagaacatcttcttctcccctgtcat

SEQ ID NO: 21949 - DNA, 431 bp, Zea mays
tgccttcgcctcagtatatcacccgcagtccaacagagttgttgaacgtgccaatggaaaaattttcacagctgtcaagaagatgttcctcgacgaaaaaagggcaggtgggccgatttgttacctgaagcggtctgggcactaaacacgactgagtgcagggcgaccgggttcacccctttctgccttctatatggttcggaggccatgaccccacaagaaataaaacatgggtccccgcgaatagtttcgtcagctgtccccgacgtggacgaacccacttcaaaggatcttatcgatggagaccgcgtcttcgctctacaggctctaaataaataccaagcccagacaaaagcatggcgcgaccacgcagtcatcccgagggaattcagcgaaggggacctcgtactcgtccgaacagctcggacaga

SEQ ID NO: 21950 - DNA, 391 bp, Zea mays
  unsure (1)..(391): unsure at all n locations
agcttgaggtgccgcgccgcanaggggcggctgaagaacgccatcagtcccgcgccctggtgatggacggcgccgaagcccgtaccggaggcgtcgcagtagcagtccatggcgaaggtcttctcgaagtccagcatctgaaggaccggacctgtggtcaaggctgtctttagctgctggaaggcaacctatgtgtcgtcgtcccaagcgaaggcatcgcgccgcagaaagcgcgtgagaggtgccgcgatcacatcgaagtcacggatgaacttcctgtagtagccagcgaggcccaagaagccccgcaagccacgagcgaaacgcggtaccgaccacgaggagacggcctctaccttggtcgcatccatggccaccctagcggcggata

SEQ ID NO: 21951 - DNA, 477 bp, Zea mays
  unsure (1)..(477): unsure at all n locations
tcggaagataacgacttcatcatcttcgggagttggcacagttctttctccggcatctactctcacaatggacatatctcgaaagtatctccccttcatgttntcaagatgactttgcccaatagttgattttccgaagactgaatggcttggtcaccatggccgatcttcggaatcttcacccccactgtctgcatcaaagctgtcactatcaccagtatcttcagataaaccttctaaaatctcccttgtaatcttctccgtattcgtctttgccattgactcaagaaaactcagatgcatctcttcagaaaggctcagcttcatttcggcagcaaccttcttcttctcagacattccttcggagttcttgcctctcgcttccgaagcttaaaactagggaggcaaccaaatatttgaggcacaaagctatttgagcangtaaaacagatggcaagagagcgtgccanataaatt

SEQ ID NO: 21952 - DNA, 417 bp, Zea mays
agcttatgaatgttcttcattccaacatgtgctagacgacgatgccagagctagcccaagttagtcttagcaattaaacatgcatctagatcggcattccctttagtaaaatcaactaaataaaacttgccatccaatacacctttaaaagctaatgaaccatcacttcttctaaagacagatacatcaatatttgtaaataagcaattatagcccatatgacataattgacttatagaaagaaaattataaccaagtgattccactaagaatacattagatattgaatgctcggtggtgatggctatttacccaaacctttgaccttgccatgatttccatctccaaagataattgtgtcttgggaatccttgttcttgacgtaggaggtgaacatcttcttcttccccgtcatat

SEQ ID NO: 21953 - DNA, 445 bp, Zea mays
  unsure (1)..(445): unsure at all n locations
tggacagtacatcagccgccgtgttccgatctctttctatatgatgaaactccagaccttcgaatttatcttctagctttcggacggcggcgcagtatcttcccattgaatcacttgaacaatcccattccttgtttatctgactgatgactaccagagaatctccgtacaccatcagtctcttgacacccagtgatatagcgatgtttaatccgtgtatcaaagcttcatactcggctgcattgttagaggccgggaatagcaattggagagcatacttgaggtgctcgcctccaggtgcagtgaagagaattcctgctcctgctccctgcagcttcagcgagccatcaaaatacattcgccatacttctgcggtttctggattatccngcactttgctgtccgtccactccgatacgaaatcgaccagtgcttgagttttgat

SEQ ID NO: 21954 - DNA, 314 bp, Zea mays
agctttatcaaaaggacgtgaatagtgccttcctcaaccgaccaatcaaggaagaggtctatgttgagcaacctcccgggtttgaagatagtgaggaccataaccatgtttataaactctctaaagcgctttatgggctcaagcaagccccaagagcatggcatgaatgcctaagagaattcttatcactaatggatgtaaaggcggaaaggacgatcctacactctttaccaaaacacttgaaaatgatttgtttgtatgccaaatatatggagatgatgttatatttgggtctactaacaaatctacatgtg

SEQ ID NO: 21955 - DNA, 471 bp, Zea mays
  unsure (1)..(471): unsure at all n locations
tgtatcaaatggacgcgaaaagtgccttcctcaatggaccaatctatgaagaggtctatgctgagccaccttccggctatgaagatagtgagtaccctaaccatgtttataaactctctaaggcgctttatgggctcaagcaagccccaagagcatggtatgaatgccttagagattttcttattgcaaatggcttcaaagtctgaaaggccgatcctacgctctttaccaaaacacttgagaatgatttgcttgcatgccaaagttatgtagatgatattatattcgggtctactaacgaatctacatgtgaagagtttagtatgatcatgacacataaattcgagatgtctatgatggcggagttgaagtacttcttgggatttcaagtgaagcaactacaatagggcaccttcattagccngacacaagatactcaagacattctaaacaagtttgggatgattgatg

SEQ ID NO: 21956 - DNA, 428 bp, Zea mays
  unsure (1)..(428): unsure at all n locations
tcgaatcccttgccttgctgcttatgtctacatggccagaaattacttgggaatcagatttaaggattgcccttcttattcccattgcctttagcttccaaagccctaacagaagagcttcgtattcgtcaatattatttgtacaactaangtccagctttactatgttgcatgtcctaactttagagggcactactagaacagcagccgctcctgcgccgaaggttccccaagaaccatcatagaatatcatctaggctgcgacatcttttggtgaatcttcttcttgagcccctggcgtccaatcagcaataaaatctgctaaatcctgagattgaattgacgatctatggacataatcaatggtcaattcaattaatttcgcaggccattttcaattcttcatgagcttctctgttctcatatat

SEQ ID NO: 21957 - DNA, 385 bp, Zea mays
agcttatcgctgacgctatcgttgagaagcgaactgtctaagagcgcaggaggaaggtgaagaacgaccctatagcaagagcaggtattttttgttgcatataggataatattattgtttgcaagcacccaccatacaagttgcaatttgcccacacacattaatatgtgtttacaatcattttttaaatttgtttgcaggagcaggaactagttcaattgcaccggaggaccaatctagaggaggtgatggtgaagaaattatacggagtcccgttgcaattgaccctagagctggagcaggtattttttattgcatacagtataatattattgttgcaaccacccaccatacaagttgcaattttacccatatacatcacttt

SEQ ID NO: 21958 - DNA, 468 bp, Zea mays
  unsure (1)..(468): unsure at all n locations
tcttggcacagcctnncgcncaccttcggtgaacaaggccatcagccagaaaggagccagtatgctccacaccagagggacttcagagagcagtccgaagctcgtacagtcaatagcactgtgccagagtcaaagcacatctattgacaaatatcctaccttaatagcaatctttttcattcaggtttatcttctgtaataaaggacattggctagatntcatgtaattagtttcgntgaatcctacaaggacaatatattntcttcacaggcttatgataacaaaggggaccttcgaactatcgaaaattcttagaagcaacaaaaagtcgttctaaggaacgcagagtaagtttgctgaagtcacaaaaagtcgttccanagggagcgcagtgtaagttttctgctccaaagtcgttccanagggaatgcagagcatacagcgaaaagtcaacgcttgataccgct

SEQ ID NO: 21959 - DNA, 459 bp, Zea mays
  unsure (1)..(459): unsure at all n locations
agctntatcaaatggacgtgaagagtgccttcctcaatggaccaaacaaggacgaggtctatgttgagcaacctcccagctttgaagatagtgagtaccctaatcatgtttacaaactctctaaagcgctttatgggctcaagcaagccccaagagcatggtatgaatgcttaagagatttccttatcactaatggcttcaaagtcggcaaagccgatcctactctctttactaaaactattgcaaatgattttgttgtatgccaaatttatgttgatgatatcatatttgggtctactaacaaatctacttgtgaagagtttagtaggattacgattcataaattcgagatgtctatgatgggggaattgaagtatttctaaaggattcaagtgaagcaacttcaagagagcaccttcatcagccaaactagtacattcaagacatactcaccaagtt

SEQ ID NO: 21960 - DNA, 465 bp, Zea mays
  unsure (1)..(465): unsure at all n locations
tcggcataccccacttnctcaacggtgggaatactctggtagctaagtattcctggaccagatccctagttccaatatgttcagatacaattcttaattcatatacaacattttggcatggatcccccggtggcatgtggcactgaagcctaatcagcccgaagattaacttcagtgggctctgaactagcttctccttttcctcatcaattttaacataaaaccattcagacttccaaccggtcggccacttagtgcgatagctgaccaccggtgtcttcatatccttccgataagcaaaattataacaaccaaaggtctcatgcaatccatcttctctagccttcgtctgataatttagttcatgtactcggcagaatgcatcggcgagcggctctaccccttggcttcggagggcccagatgtacacgatgagcctaacaatggcgttaggggtcaactgat

SEQ ID NO: 21961 - DNA, 386 bp, Zea mays
  unsure (1)..(386): unsure at all n locations
agcttagagaaatctggtatgaatctgcgataatacccagctagtccaagaaaactccggacctggtgaacagttgttgggggtttccactccagaatatctttgaccttgctaggatctaccgcaattcctttagctgataatacgtgccccaaaaattgaatttcttccagccagaacgcgcacttactgaacttagcatatagctgatgttccctgaggcgcgtcaatacaatccgcanatgctgagcatggtcttcttcattcttggaatatatcaagatatcgtcgatgaagactaccacgaacttgtccaattcaggcatgaacaccgagttcatcaaataagtgaaatgggcaggagcatttgtgagcccgaacgacat

SEQ ID NO: 21962 - DNA, 465 bp, Zea mays
  unsure (1)..(465): unsure at all n locations
tcaacagtattgggctcaaactagcctaagcggcccaagtccacgcagaagcgtgcgcgcgcccgcgcccgcgctggcggttttgcaaaacggcccttgcgtttttgtccaacagcgaacgagttctttcactggttctatgtatcactgacagttcgcagataagcccttaagcttctattccttcgcagaccgaggtccacgacggcgctccgcacggcagagctctggcgaagcccgagaccggccggaggaggtcaagactggtgctccgcttcgacctaaaccaaattcattacctaacaaacgtttcccctaatttaatttgaagaatggtgccctattctatcctgcccacgagaaccgcgaggccatgagcatttgatcgcgttccagacgaataacgagggtctagcctaatnggacgggtcagcgatcatccagagcaagtgagaatgctgaaac

SEQ ID NO: 21963 - DNA, 424 bp, Zea mays
  unsure (1)..(424): unsure at all n locations
agcttcggagcgccgaaggtctcananaacaccttccctgagctcgttgtcgagaaacgattcgatttccctgcgcgcagcggccccaccttgcagagttactgttcgttcactgcggtccaccgtacagcgagtgcgagcgggtgtccgcctggtgtaaaactcctggcacttcgccttcttacctgcggcactatataaacagacgagtaggtgtgaagttaccacagcatttactgctatttgcactgttttgctgccaaaatttttaaccattgccgaagcttgtttgtcagaattgaacgaagctccatcttgaagcctgcttcggagaaaagagtattaaagtttcacaagttcataattaaatggccagagtccgctctacagctagggttgagcgtgagggggacgaaactgaagc

SEQ ID NO: 21964 - DNA, 392 bp, Zea mays
  unsure (1)..(392): unsure at all n locations
taggaacttaaaactaagcntttaagggagagcacattntatgattaaccaatgttncatttgagaaagacagggtttgtagcgcatgccaagcaggaaagcaagttggtgtccatcatccacacaagaacatcatgacgactgacaggccactagagctcctacacatggacctattcggcccgattgcttacataagcatcggcgggagtaagtactgtctagtaattgtggatgattactctcgcttcacttgggtgttctttttgcaggaaaaatctcatacccaagagaccttaaagggattcttgagacgggctcaaaacgagttcggcttaaggatcaagaaaattagaagcgacaacgggacagagttcaagaanctctcaaat

SEQ ID NO: 21965 - DNA, 433 bp, Zea mays
  unsure (1)..(433): unsure at all n locations
agcatcgactatggtcaatattttggcatctaaacagtgtaatagcaatgaatgctgaggcaacttcacacctacctgtctggttatatagtgctgcaggggggaaggtgagtcgtcaaggtctcctccaccgaacaaacagtcacccgcactcactgaacggtgggccacaaggtccgagaaggtgaatcaacatggcgcgcgcaactgttgaaagatggggccacctcgcgcgtggattattttaatcgtttctcaccaacgagctcanggaaggtgtttttcggatcttcggcatcccgaagcctagaagactatntcacggatcaagctcgttacgaaaaacgatctatcaccgtgaaggggctactgttgcgggtatgcttcatagccgaagatcctaaagaaagagaacaccttcagcacatcctat

SEQ ID NO: 21966 - DNA, 470 bp, Zea mays
  unsure (1)..(470): unsure at all n locations
tgaactctcgtagagcatcttctgttgagaaaaatgttgatgcgtccaaaatntaagagatgaaactcaaagttgcatatgaacataaagttcaaacagactgtactcgaaaaaagatgcaattataaataacacttctgcttagttgattgatgtgatggcagaaaattacctgatgaagcacctgattagctttcttcaatctctcttagccctagtggatgatgaagaaggttaaattccatgcaatgaacttgctttacagacatggagagtattggtttgttgtctggtcactggcgcttaagatagagactgggatttcttgttgtgcttgatatgagcttttcttgttgatgncattaagaaaattatntagtgctactcttggactntgcttcttgncatctttctctctgaacatgtttctgtatggatggggtacattnctngtggatcttcttggattc

SEQ ID NO: 21967 - DNA, 331 bp, Zea mays
ctcgccggatcttaagcactgggctgcagctgcgtagatattataccacatgtgctcatctgcgactcctgaaacctaccatggatgtcctagcacttaagcaggtgtagagctcaactctggctaaatctgctcagtataactgaccctgcaacactcccttaaatgctatcgaatcatgcctttatctgaagacggagacacctacatgcgctgcacgacaggtgagacccattatgcctaattgctaatctgaacgcctatgcaagctaaagaagctacgagaacaacattcgatatggaatggacaggagatatagctatgctaccc

SEQ ID NO: 21968 - DNA, 129 bp, Zea mays
gacttttgacgacactgagcctcatatcatgctatttgtatgcctactaaccatgcgaggaatcctaaaccacaggtgaatgacgaacaatttctgaagagaagctctaacaatgattggctaaagaaa

SEQ ID NO: 21969 - DNA, 434 bp, Zea mays
  unsure (1)..(434): unsure at all n locations
taagctgtgaagattcttcatcccaacatgggctagtcggcggtgccagagccaacccatgttagtcttagcaattaagcaagtatcgagttcagctctatcaaaatctaccaagtatagctgaccctctaatactcccttaaatgctactgaatcatcacttcttctaaagacagtgacacctacatcagtaaatagacagttgtagcccattttgcataattgagatacagaaagcaaattgtaatctaatgaatctacaagaaaaacattggaaatagaatggtcaggagatatagcaattttacccaatcctttgaccaaaccttggtttccatccccgaatgtgatcgctcgttggggatcttggtttttctcgtaggaggagaacattnttcttctcccagtcatgtgggttgtgcacccactatcga

SEQ ID NO: 21970 - DNA, 406 bp, Zea mays
  unsure (1)..(406): unsure at all n locations
tctgacttgtgggcctgccgaggtgtccggtgcacaccggacatgcactggttgatgtccggggcaccggtatgggcagccctgacgtctgcgcgcgctgcgcgcgcatttaatgctgtgcaaggagccgttggcgccgcagagagcccgtgctccgctggcacaccggacagtccggtgcacaccggacagtccggtgaattatagcggagcggctgtcgtgaaaacccgaggatgacgagttccggaggccgcggttcgttggcgcaccggacatgtccggtgcacaccggacagtccggtgaattatatcgcgccggcctccgcgaattcccgagggcgaatggtngaagtcgaggtcctctggcgaagggtagagaacgaagtctacaggcgcaccggacac

SEQ ID NO: 21971 - DNA, 330 bp, Zea mays
agcttatgaagattcttcatcccaacatgtgctagtcggcggtgccatagccaacccatgttagtcttagcgattaagcaagtgtcgagttcagctctatcaaaatctactaagtatagctgaccctccaacactcccttaaatgctactgaatcattacttcttctaaagacagtaacacctatattcgtaaaaagacagatgtagccaattttgcataattgagaaacagagagcaaattgtgatctaaagaatctacaagaaaaacattggaaatagagtggtcaggagatatagcaattttaccaagtcctttgagcaaaccttga

SEQ ID NO: 21972 - DNA, 465 bp, Zea mays
  unsure (1)..(465): unsure at all n locations
tgtgtcattgtgtgtaccaataacaaatgagacatgagactggaatgatctcactcttaatggtgatcaatcacaaaatgaagaatgacattcatagcgaagataattattcgaatgaaacacataaattatatgcttaattgttgattcaaaatagtatgtgacttgatggctcgagatggtgaacatagcaaggaaattttgtgaggtactaagcaaaggtgaagggcaaacattggcttggcgactaaagaacctagctatgatgaagaagaaagtacttgcatttagtcgagcaattaatcaagcttcgaaggtcatgttgatgtgaaggatcaaacaatttaaaaagtgactttagttgatatgcaaagtcatgatcaaaatggattgattaactcanagtcacaactcaaggaaagtcaactcangacatcacatggtgtggaaacactcgaatgatca

SEQ ID NO: 21973 - DNA, 409 bp, Zea mays
  unsure (1)..(409): unsure at all n locations
agcttgaagganaaaagaaggaaggagaacttatccgactgccctaccactacaaattcaagagacatttcaaagtactctgccaagaatggttggatacaatcgaagtaatgtgcaacgaaattcttggaaattattctaaaaaagaagatcaattgatgacagcggccttcggcacccgtccgaaacaaaggctaaaccgagtgatggatgctataagctttgaatatcctgactacgagcgactggacaagggtgccgaaggacaaaaaagaaaaagagtggctagtgctctgaataaggacgatgaagatcaatcaaagaagaaaaaacaagagcctgaggcgaaaacagttgcttcgcagaaaagaaagggcttcacttcgaagcananatcaattgatgaaaa

SEQ ID NO: 21974 - DNA, 309 bp, Zea mays
  unsure (1)..(309): unsure at all n locations
ctatgttgagcaacctcccggctttgaagatagtgagtaccctaaccatctgtataaactctcaaaggcgctttatgggctcaagcaagccccaagagcatggtatgaatccatgcaagactttctaatcactaatggcttcaaagtcgggaaagctgatcctacactctttactaaaactattgcaacagatttgtttgtatgccaaatttatgttgatgatatcatatttgggtctactaacaaatctacttgtgaagagtttagtaggatcatgatacanaaattcgagatgtctatgatggggga

SEQ ID NO: 21975 - DNA, 384 bp, Zea mays
agcttggacagtacatcagccgccgtgttccgatctctttctatatgatgaaactccagaccttcgaatttatcttctagctttcggacggtggcgcagtatcttcccattgaatcacttgaacaatcccattccttgtttatctgactgatgactaccagagaatctccgtacaccatcagtctcttgacacccagtgatatagcgatgtttaatccgtgtatcaaagcttcatactcggctgcgttgttagaggccgggaatagcaattggagagcatacttgaggtgttcgcctccaggtgcagtgaagagaattcctgctcctgctccctgcagcttcagcgagccatcaaaatacattcgccatacttctgcagtttct

SEQ ID NO: 21976 - DNA, 450 bp, Zea mays
  unsure (1)..(450): unsure at all n locations
tctccagaagatagatgaatacatcacagccgacaatgatttttggcaaagaagggaagaagcttacagatactctgaaattgtgagactggccatgaatggcggatcgtctgctcgaattactgagactgaccaagcactctgttattcaagggtggcaaggtccggaccgtccggccattgtgggcggaccgtccgaccttgacttttctgacagctctgacagggttcaaaccgtcgatataacccgtactagtacggcagaccgtccccgtgtgcgcaaaaactgtgctagttgcacataacggccatgtatgtgttgagggctataaatagaagtggagctagtgtgtgggagctctcttggccatttctagcacatatttaactcatttgtgagccctccactcaaacactcacactagntgattgagatcacattctagtgag

SEQ ID NO: 21977 - DNA, 382 bp, Zea mays
  unsure (1)..(382): unsure at all n locations
agcttatgaagattcttcatcccaacatgggctagtcggcgatgccagagccaacccatgttagtcttagcaattaagcaagtgtcgagttcagctctatcaaaatctaccaagtatagctgaccctctatcattcccttaaatgctattgaatcatcacttcttctaaagacagtgacacctacatcagtgaatagacagttgtagcccatttgacataattgggaaacagaaagcaagttgtaatctaaagaatcaacgagaanaacattggaaatagaatggtcaggagatatagcaattttacccaatcctttgaccaaaccttgatttccatccccgaatgtgatagctcgttggggatcttggtttttctcatatg

SEQ ID NO: 21978 - DNA, 472 bp, Zea mays
  unsure (1)..(472): unsure at all n locations
ttagtgattagagagagagatttgntgtgttcatttgagctcttgcgcttggattgcttcttttatttctcattcttcttgggatcaaactcaattgtaaccaaggcaagagacaccaatcgtgtggtggtccttgtgggaacgttgtgttccgtttgattgagaagagaagctcactcggtctatgtgaccgtttgagagagggaaagtgttgaaagagacccggtctttatgaccacctcaatggggagtaggtttgcaagaaccgaacctcggtaaaacaaaccatcgtgtctcgctctttatttgctcacgatttgttttgcgccctctctctcggactcttttatatttctaacgctaacccggctttgagttgtgcttaagtttataaatttcagattcgccctattcacccncctctaggcgactntcaatactcactcttacctctctcccccacagaagagca

SEQ ID NO: 21979 - DNA, 416 bp, Zea mays
  unsure (1)..(416): unsure at all n locations
agcttggaaggttcttcatccncacatgtgctaagcggcgatgccacagccagcccatgctagtcttagctattaagcatgcatctagaccggcttcttcttttgcaaaatcaactaaataaagtttgtcgtctaatacacccttaaaggctagtgaactatcacttcttctaaagacagacacatctacatttgtaaaaagacaattatatcccatatcgcatagttgactaacagatagcaaattgtaaccaagagactcaactaaaaacacattggagatagagtgctcattaaaaattgcaattttacctaacccttttaccttgccttgattcccatcaccgaatataattgaatcttgggaatccttattcttgacgtaggaggtgaacattntcttctcccccgtcata

SEQ ID NO: 21980 - DNA, 436 bp, Zea mays
  unsure (1)..(436): unsure at all n locations
agcttgtcacttggaaattccgaaagtacaggcgtgaaacaagtaaattctgcaccaagaatgacacctgaaggccagaagttcctttcgctgggtattgcgccacgaagcccagcactgcgtgatttagtaaaatgccaggccagttcgacactcgttgccatgcctccagcgggtaagcctctgtgcaaggcaattgctgcctatcaagtatgcatccattgaagtgtcatttctgtgcaggcctgngaaaatcacggtccatgaagatcgagggccatgattctctggcaccgagtgtgaaggagccaaaaggcaatggtggtctagcaccaagtaaaacgccaaagctgcatgaacctgtgatagctgatatgagcatcaagagctgtgattctctagcactgggtatcgcaccaaatgggcatacccatga

SEQ ID NO: 21981 - DNA, 447 bp, Zea mays
  unsure (1)..(447): unsure at all n locations
ttatcaaatggacgtgaagagtgccttcctcaacggaccgatcaaggaagaggtctatgttgagcaacctcccggctttgaagatagtgagtaccctaaccatgtgtataaactctctaaggcgctttatgggctcaagcaagcctcgagagcatggtatgaatgccttagagaatttcttattggtaatggcttcaaagtcggaaaggtcgatcctactttattcactaaaactcttgacaatgattttgttgtatgccaaatttatgttgatgatattatatttgggtctactaacgaatctacatgtgaagaatttagtaggatcatgacacaaaaattcgatatgtcaatgatgggggagttgaagtacttcttaggatttcaagtgaagcaactncaagaaggcaccttccttagccaaacgaaatatactcaagatattct

SEQ ID NO: 21982 - DNA, 391 bp, Zea mays
  unsure (1)..(391): unsure at all n locations
agcttatgaagattcttcatcccaacatgggctagtcggcggtgccagagccaacccatgttagtcttagcaattaaacatgtgttgagctcagctctatcaaaatctactaagtatagctgaccctctaacacacccttaaatgctattgaatcatcacttcttctaaagacagtgacacctatatcagtaaaaagacagttgtagcccatttgacataattgggatacagaaagcaaattgtaatctaaagaatctacaagaaaaacattggaaatagaatggtcaggagatatagcaattttacccaaacctttgaccaaaccttgatttccatccccgaatgtgattgctctttggggatcttgngttttctcatatgaggagaaca

SEQ ID NO: 21983 - DNA, 337 bp, Zea mays
  unsure (1)..(337): unsure at all n locations
tcacgggctactggcggagctagccgaagcactgtgtgggcttgatggtggctggagtgggctggccacggcggccgtagctctggcggcaatggcgggcggaaatatgcttgccggagcttaagaaccgtggcttgcctgtgaaggtgaatgccgggccaaaagaggtgcgcccggggaggctttatatgcgccggcgggcacnggccatggcgtgggtgcgcggcggacttgaccggactcctgggcgagcgcgcgcgcgggttgggcgagctcttgcgtgccgaccagggtcgaacacgtgtgcccgtgcgttcttgccaagctctagcgcgtg

SEQ ID NO: 21984 - DNA, 412 bp, Zea mays
  unsure (1)..(412): unsure at all n locations
agcttgtgaagattctttatcccaacatgggctagtctgtgatgccagagccaacccatgttagtcttagcaattaagcaagtatcgagttcagctctattgaaatcaactaagtatagctgaccctctaatactcccttaaaagctactgaatcatcacttcttctaaagacattaacacacgtatccgtaaaaagacagttgtaacccattttgcataattgagaaacagaaagcaagttgtaatctaaggaatctacaagaaaaacattggaaatggagtggtcaggtgatatcgcaattttacccaatcctttgaccaaaccttaatttccatccccaaatgtgatagctcgttggagatcttggtttttctcgtaggaggagaacattctnttctccccagtcatat

SEQ ID NO: 21985 - DNA, 385 bp, Zea mays
  unsure (1)..(385): unsure at all n locations
taccgcatttgaagcatgatcgcttccncttggtcttagtcttgctcggctgtccattgcgaccctttagcaccgtcttgaatctcttgataatgagggccatttcttcttcattaagaccggccgcctcaatttgcgccaccttgctgggtagcgcctccttgttccctgtggctttgagagcaaaaggttgcgactcgttgatcggtccattcaaagcgtcgtccacataccttgcctccttgatcatcattcgcccgctgacgaattttcctaggacttcttcgggcgacattttggtgtacctgggattctcacgaatattattcaccaaatgaggatcaagaacggtaaaggacctgagcattagtcggacgacgtcgtg

SEQ ID NO: 21986 - DNA, 438 bp, Zea mays
agcttgtgaagattcttcatcccaacatgggcaatttggcgatgccagaaccatcccatattagtcttagcaattaagcaagtgtctaggacagcgttgttatcattaaaatcaactaaatatagatgcccatctaccactcccttaaatgctattgaatcatcacttcttctaaagacagtaacacctacatcagtgaatagacagttgtagcccattttgcataattgagaaactgaaaacaaattataatctaaagaatctacgagaaaaacattataaatggaatggccaggggatataaaaattttacccaaacctttgaccaaaccttgatttccatccccgaatgtgatagctctttggggatcttcattcttctcatatgaggagaacatcattgtctcccctgtcatgggattgcgcacccgctatcga

SEQ ID NO: 21987 - DNA, 387 bp, Zea mays
  unsure (1)..(387): unsure at all n locations
gacctataaaactaagcttggacccgcncagccgcgcccctccatggcgttcttccctgcgcatgtcgcccagctctcagcccgggcatgcacccctcttcttcctccctgctccactgcgctgagctctccccagctggtcctttttcttcccagctcgtggatctcgcgcccctgcgcaagtccggctgcctgcgcgctccatttttttccgccgcgactagaaccacggcacgcgcgcgcccctgctcgccctttggctgctcccatggcgctatcctccagtgccgcgcgctccaattttccttctcagctgtgcgcgccatccctgctcgccatggccaccacgcccaaacttctggcgtcttccttccatgcgcagcgtct

SEQ ID NO: 21988 - DNA, 437 bp, Zea mays
  unsure (1)..(437): unsure at all n locations
agctggtcttggcgtcctgccacattctggactgtggaagtacttgtatcactgtcgccctgtgatggccggggggcaacatcaactggaggggggcgcgagtttgcagatgcgccgtgggaggaagactgactatcttgaaatcccactcaaagatagtatcaaaggatggcgcttggagtggtttattgttgagaaccacggaaattctctccccccactgtcagggagacagccggatgttcgtactccgagttggactgagtctaccaaggaccangaggtggctgatgcaagggctttgctggctgacgctggactgctgaatgagaggggtctgactgcagaggctgtggttgctaattttgttttcaagaacattcagccattgaatgatatggcataccccggctacctatacccacgtctagctgact

SEQ ID NO: 21989 - DNA, 442 bp, Zea mays
  unsure (1)..(442): unsure at all n locations
tgtgagcaatacaagtacagaagggagaaagctgcttctgtctatcagccgaagcccatgctcttatgtgacgacatagcagagcagaaggtgctattgggatctcatttgtctgaggaacaggagaaaaccttgataaggtttctgttcaacaacaaagatgtctttgcatggtcagctaatgatctctgcggagtcaacagggatgttattgaacactcgctcaatgttgatccatccttcagacccagaaagcagaggcctcggaagatgtctgatgacaaggccgaaggtgctcggaatgaagtgaatagactcctcagcaccggagtcatcagagaagtgaaatacccagaatggctagccaacactggtatggtataaaggccaatggcaaatggaggatgtgtattgattntactgatctcaacaaggcttgtcc

SEQ ID NO: 21990 - DNA, 431 bp, Zea mays
  unsure (1)..(431): unsure at all n locations
tcacaagtttattgaataatgacattaagtttaattgggcttctaagtgtaatgaagcctttgagcaactgaagacgctattgaccactgctccggtcttggctcaaccggacatcactaaaccttttgacgtatattgtgatgcatctggcagtgggctcggctgtgtactgatgcaagaaggccgagtgattgcgtatgcttcaaggcagttgcgccgacatgaggagcattatccaactcatgatctggagctagctgctgtggttcatgccctaaagatttggcgtcactatctgctgggaaatatctgtcacatatatacagatcataaaagtttgaagtacattttcacccagtcagaattaaatatgaggcanagacgatggctcgagctcattaaagactatgaactggagatccattatcac

SEQ ID NO: 21991 - DNA, 456 bp, Zea mays
  unsure (1)..(456): unsure at all n locations
nttctgcanaaatgagtcttgaaacttgatgagccttaccttgaatctttttaaatccagcatacccttgagagtcttttctttagtcgggtaagtcttgctgagtaattgcgtactcacggttttattccctgttgtttttcaggttataagtttgttctggtgtggatggtgctaagtgccggtgggctcggccttcttatataagtatatttcatctttagcttctttattgaggattgtcacttaagctagcatgtattttaaaacttataaatattttatacattntaaagtgtaattcttttgaatcactttctttttgaatcactccgataattgtataatgtaaacttattgtaacatgtaatcantttgcaataaagaatntatttctgctgcanatgttggtgtgtgatttgtgtttacttaatcctgcgatcttggaggtaagtc

SEQ ID NO: 21992 - DNA, 453 bp, Zea mays
  unsure (1)..(453): unsure at all n locations
agcttggatattcttcatcagaacactactgatattngtgtgataaatgaaaattcttcttcacgaagcatgaaaagaagggaaggtgttttttcgtcaaagactcaaaaacggtacgtatgtaaaatttcatgcatcgtaaagaattgaaccataaaaacaagtatattatattcagggttacaagatgttacacatattacatttcagaagtttttacatatagcacttaatcttctctaagtacaacttccgcagcttcgttcaggagccgattaacaacttcatccatgatagattcagccatctttttaatttcgtcgtctcctttcgggtgagggcccggagacactttagtaggacctgaaggaggacaggatacggctacattgctattatcaaatgcgaacgaagtttaaaaccaaaaattacaacacaataaaaaccattagt

SEQ ID NO: 21993 - DNA, 467 bp, Zea mays
tatcatgttcctcatataagagatcctcttgcttttctaatagcctattcttatcattcaaggcatcaattaattcattaattttatctaccttgggtctatctaggcccttaaataaacatgaataatctatttcatcctcatcactagattcgtcctcacttgaagaagcataagtggagtctcgagtacttactttcttctccttagccatgaggcatgtgtgatgctcgttggggaagagggatgacttgttgaaggcggtggcggcgagtccttcattgtcggagtcggatgacgaacaatccgagtcccactccttgccaaggtgtgcctcgcccttagccttcttgtatgccttcttcttctccctcttgttcccttgttcctggtcactatcattatcgggacagttagcgataaaatgaccaatcttaccacatttgaagcatgagcgcttccccttt

SEQ ID NO: 21994 - DNA, 325 bp, Zea mays
  unsure (1)..(325): unsure at all n locations
taacttgaagaatgttatgtgtgtagctaactacnaataaattctgaattctcagataagcgcggcctgaacctgcatgcgaccgtcagatgtggagtatattttttttcttttcgtaatttgagggggctgctttctctctgtttttcagttaacagagcgcaccattttcctaacgggcattagggtgccgttctacaaagtacaaaccctaccgaccatctcgtncaaagcaacaggtgccgttctacaaaaacaaaccctactgaacatcttgtccaagcaacactgacacccaatcttacttactgttatgacatgtttc

SEQ ID NO: 21995 - DNA, 477 bp, Zea mays
  unsure (1)..(477): unsure at all n locations
cgcagcggcaacgctgtagtaggccataaagtagtagggaaagaaaaaaaacattttgagaccatcattgggaatgtctcaaaatatttatctcagctttgtttcaatagtttctggtagccagaagccataagatgttgacctggcgtttaaaaatctggacaactgacttttgagtaaacaaataaactaaaagctataaaacacgctgagagaagcctctctagattgttatgtactgaaaagctaaataaaatattataaaaatcaatagaaaaaagtcaacggacagaaagcccccaaagtccaaaagctggccagtcatgagcaacttgttggtcactataaactatattatatgtacgacatacagtaagtaggagctcaaattctggaggtgaccagatggaaaaggacccgtatttatcagaagaanaattaaactgatgtttcttctgcaacactatctttgaacag

SEQ ID NO: 21996 - DNA, 348 bp, Zea mays
  unsure (1)..(348): unsure at all n locations
agctntagtgttgagtgagagtgatttgttgtattcttttgagctcttgcacttggatagcttccttctttcattctttcttgtgagtcatctgaagcaaggcaagagacaccaattgtgtggtggtctttgcgggaattttggttcccaattgatttgagaagagaagctcactctgtccgagggaccgtttgagagagggaaagggttgaaagagacctggtctttgtgaccacctctacggggagtatgtttgcaagaaccgaacctcagtaaaacaaatccacgtgtcacactctttattcgcttgcgattatgtttgcaccctctctctctgactcgattata

SEQ ID NO: 21997 - DNA, 476 bp, Zea mays
  unsure (1)..(476): unsure at all n locations
cggaggaggttcccttcaaggcataagcggacatggtacttgaagtcaacatggtcgtcgtgtgtcaacggttgccattccctgatgcggaagtcgaggctgtcgtggaggttagcttctacgggtggatccagatctaatggatcaagagactcgcatgcacgcttgcatctaatgattgcttgtatagtagtcgttgcctatactacagacttgatatggntagattcgtgatcaaatatactatgcaatgatcataattttataatcataaaaacgataatatagaataaatgaacggtcaatttgtaatttaagtgaccgtcagtttgagtgtgtcttatggaattaagatgcactctttcattgaaaacaaagagcacgctattcttaatcgtaattcatagcactattntaacattgcacatcatcaaaagtccatgaaactaanaaaaaacaatgtctctcaatacaaa

SEQ ID NO: 21998 - DNA, 397 bp, Zea mays
  unsure (1)..(397): unsure at all n locations
agctttttcttggagtgcaaagcgcacagtgccgctgttggggtttaataagtgggcttcgttttctattttgtccgccaaacagggaaaaaaagagagagagagtgggcttctttggtttgggctggaaggttcctttntattctctgtacagtgtggttttatcacgagtgcaagcgaaattggaaaaagcacagaggtttccttctgttctctgtaccgttttaccaggacttgtcaaatgcaagcgatattggaagtaaagcacagaggtttccttatgttctccgcttctctgtacgttttttttatcaggatttgataaatgcatgagggcacaaagtcatcaatcttcgtgaagaagatagtngtcagtatagatgtccaaacagtgcgt

SEQ ID NO: 21999 - DNA, 446 bp, Zea mays
  unsure (1)..(446): unsure at all n locations
cttaggtnttctcaacttgggttaagttttacccttttaacctctatttagggttaagtcctttaaccagggttctatttgcaaaaacattaaaacaatacaacttgtttgaaatttttgcctagtgaatgcactctangtgtatcaaacatatgcaatgccaatgcttatgatgccatgctcaagttttagttatagtaacaccatgggtgttacatccttccccccataaaagaatctcgtcccgagattaaaattcctagggtaggtaatggtaaaggaaacacatcacatntttatttcttaagttttggcacaaggcangggtaatgtggnggttacttctctattacacagttacacaggctttacaatttacaagatggctaaaagcctgnngaaatcttattcaagaagtcttgagtttcccacgtagcctcatcttc

SEQ ID NO: 22000 - DNA, 242 bp, Zea mays
agcttggcagaaactgtgtgcattgtgtgtcaccgtacaaagacgtattgtcaagcgaactgcgtcataaaaccatggtgtccacttgtgagatgaacgagacattattgaggcttggccatgttacaggtgatggcgcaagcccgcaacattcctgacatactgaaaagccgaaatgctaaaccaaaactgtctcactccattcacatatgcatgtcgaacagggtcgctcctactctcac

SEQ ID NO: 22001 - DNA, 245 bp, Zea mays
tataaaactcagcttaggcatctaacactcttctatggaattgagcgtgaagacttacttggctccaagacgcctaggacatataccattctctgccttttatgcggcacttatggccccgtttggttattctctgaagcaatatttactgcggactcaaactttaaagaatttgcttataccgctattgcgcttcttccatgttttctgccgatggagcttctgccatctccgcaaatgatggc

SEQ ID NO: 22002 - DNA, 443 bp, Zea mays
  unsure (1)..(443): unsure at all n locations
agctngaagccatggtaagtagcataggcaagttatatgcgaattgattatagcctagctacgggtgcataggtttcaccgaaatccaaaccttcgacttgtgaataccccttggccacaagtcgggctttgttccttgtcaccacaccatgctcatcttgcttgttgcggaagacccacttggttcctacaacattttgattangacgtggaactaaatgccgtacctcattccttgtgaaattngtgagctcctcttgcatcgccaccacccaatccgaatcttgaagtgcttcctctaccttgtgtggctcaatagaggaaacaaaagagtaatgttcacaaaaatgagcaacacgagatcgagtagttacccccttttgaatattgccgaggatggtgttcacagggtgatctcgttgaattgcttggtggactcttgg

SEQ ID NO: 22003 - DNA, 466 bp, Zea mays
  unsure (1)..(466): unsure at all n locations
ttggtggtgccccgaagcctgtgaagagggctgcggcctgtgctgctgactccccttatcatcactttgagtagaggtatggatggacctgacatgcctcggatagaatcttcctccgaagcccctgggcatctcagaaaatctgaaagcctcctcccttctttggcgaaaatcattgtcggcacgaatgtactcgtccatcttttggagcagcttctccagagtctgaggaggcttcctagcaaaatattgagctgcaggtccaggacgaagccccttgatcatggcctcgatgacaatntcattgggcaccgttggtgcctgcgccctcanacgcaagaaccttctgacatacgcctgaaaggtatcttcatgatcctgagtgcactggaacaaggcttgagcagtgaccggcttcgtctgaacccttgaaagctggtaacaacaaatccttagcttctgcatg

SEQ ID NO: 22004 - DNA, 401 bp, Zea mays
  unsure (1)..(401): unsure at all n locations
agcttaatacatatattaagttggcttttgatcaaatttgtttgtcttatcttttatttgttttattaaatttgntttgaatttagagctctgatgtgaatttcgggccaaaatttgaatttcgggccctaatgtgaatttcgggccaaaatttgaatttcgggccaaaatttgaatttcgggcttttataatttcgggctgtctgaaatgagtccggcacgtttaagcaattacgtgccgggtcatgggccgaggctaggcccgtgggtcggcctgaaattcaaatgggccggcccggcccgaaattcaaacaatctagatcttttcgggcttggggtcgggccgggccgggcgggccgaatgtacacctatagatgagagcccggctaaaacatgcatg

SEQ ID NO: 22005 - DNA, 441 bp, Zea mays
  unsure (1)..(441): unsure at all n locations
catgggctagtcagcgatgcttgatccaacccatattagtcttagcaattaagcaagtatcgagttcagctttgttaaaatcaactaagtatagctgaccctccaatactcccttaaatgctactgaatcatcacttcttctaaagacagtaacacctatatctgtaaatatacagttgtagcccattttgcataattgagatacagaaaacaagttataatctaaagaatctacaagaaaaatattggaaatggaatggtcaggtgatatagtaattntaccaagtcctttgaccaaaccttgatttccatccccgaatgtgatagctcgttgcggatcaaccgttttctcgtaggaggagaacatncttttctnccctgtcatgntggttgtgcactcgctatcaaatatccaacttgagcccccggatgcataaacct

SEQ ID NO: 22006 - DNA, 445 bp, Zea mays
  unsure (1)..(445): unsure at all n locations
ggcanntgcagctgatgactggtggaatcgagctctaccaccgccaactagccagaacactcaccgccgtcaagctccgaccatcgggagacgtaaactggtcaactccgaccatctccggccgacccaaaggtactggcatgttcgccgtaacctcctgcgttttccccaccctcttctagaaccgctatcaccgacgtcgagctgcatcgccgtgtcttctctctggccattgttttagctgagagaaggaccatgggttcgatactttaaaaaccaggggctaagcataaagtcactggctcagttgaatagtacgccgagggcttatgtgtgagagaaaagggaaaagataaccagggacccagatgcaaaccatttatccctttacgtttaaacaaaatcctttattaatcctgcagatagntttaaaaaatcataactt

SEQ ID NO: 22007 - DNA, 78 bp, Zea mays
atgatctgatcaagtactatgatgagaggtgctcaccaagtggtcgtcatctaaccattggtggcatgaatccatctc

SEQ ID NO: 22008 - DNA, 445 bp, Zea mays
  unsure (1)..(445): unsure at all n locations
agcttcatgaaggagctgtcctccaagatgtgcttcatgatggcagcagcctcgatctgtctcgggtggtgcttgagcttgtgggtcaggtggccggtgtactccggcttgccgttcatgacctcgcagaacacggtggacaggacctcggcgagtaggtatgtaatatggttcggaaaatatccgtccgaatccggattcgaagatggtgaacgctggttcggatggaattttcggatatccggacttttttcggataacggatacgaatacggatattctgttcggatatcggattcaaatacaatatgtctgatatccatcggatatcgaatatccggatattntctcgaataaatcttttcggatatccggatagctgtgtgtattttgtaatttctagaacaaataataatacacaatagccttaaaattctgaaattta

SEQ ID NO: 22009 - DNA, 150 bp, Zea mays
tctaaagggagaacacatgataggtctaaccaatgtacaattcgaaaaagatagaccctgtgcagcttgtcaagcaggtaaacaagtgggaggagcacatcacagcaagaatgtgatgaccacttcaaaacctcttgagctgttgcatat

SEQ ID NO: 22010 - DNA, 364 bp, Zea mays
agcttccacttatcctcaattgagaaaccaagctaaatttcaatagacccaattgcagcccataacatactaagatgccactcgtggtctcacccccacaaatggcatcttaaggccaccatgtagtagcactatctccaacaaatccaacgcacaggtttatccagataagcacatggggtctagttggagaatgatgcaacaagctgtatactagtgtgtcaaagcaacgatcgtctcctcccaccccaatctacagttgttgaacgtacaaatcagacaccagattcttgagtcgtgaaataaaattagcactggactgctagtaacgatagcgcaagcgcgcacctgcttgccgaggatg

SEQ ID NO: 22011 - DNA, 317 bp, Zea mays
tgtactgggatcttgtgaagcaggtatcagtactgtagaaccagaactggaagaactcccaatccttgatccaaaactaatatttgctgaaggacggtgaagattttgcgaaaattgagtaacaacaggcaagtgaggtcgactatgagaaccagaagagctcacttgtctaggttgcactggcctaaatgatgactgctgctgtgtatgctgataagctgggcacctgaaactcccttcaggtaaaaggctgggcagtgattgatcataatcactagggtttattcgcatccgtgtatttcgcatgaattcgtttg

SEQ ID NO: 22012 - DNA, 404 bp, Zea mays
  unsure (1)..(404): unsure at all n locations
agcttcttcaccacgcgtccgtggatatcttgatgaggttgagcaatgcgtcttctccttagttgctttgctttcttgttcctttcttttgatcctgcagcttgatgctcattcaaaaatttgctttcttttgagcaacaggggttagcacatggtgatatattatctaaaagtgcacatgtgcaagaatgaggttcacatgaatttaagtttgaaattacaacttcatgagcaacattaagcatgatatggtcatcaactaattcattatgagaataagatagcatatcatatttttcacttagagcaagtttttctaaatttatcatttctacttgactcttaagcatagaattctcagttntaagttgagcaacatcagataatacatcatgattatttct

SEQ ID NO: 22013 - DNA, 413 bp, Zea mays
  unsure (1)..(413): unsure at all n locations
ntatcacatggacgtgaaaagtgccttcctcaatggacctatcaaggaagaggtctatgttgagcaacctcccggctttgaagatagtgagtaccctaaccatgtttataaactctctaaggcgctttatgggctcaatgaaagggaaatgtgcccttgggccatttctaagtattttggtgattgagtgccaacacaagtgcttaaatgtgaatctatgcccatggatgaacaaagtgcaaatcaagagcaaaggtatgtttctaagtcttagtacattggttttgtgtactaatatacttgtctaagtatgagaaacagaaagaagaagagaagattagagttggctgtgtacagccaagaggctgtntcggtcttgggcaccggagtgtccggtggtgcaccggacagtg

SEQ ID NO: 22014 - DNA, 417 bp, Zea mays
  unsure (1)..(417): unsure at all n locations
agcttgaagccatggtaagtagcatatgctaataatatgcgaattgactcaagcctagctacgggtgcataggtttcaccgaaatccaaaccttcgacttgtgaataccctttggctacgagtcgagctttgttccttgtcaccacaccatgctcatcttgcttgttgcggaagacccatttggttcctacaacattttggttaggacgtggaactaaatgccagacctcattcctcgtgaaattgttgagctcctcttgcattgccaccacccaatccgaatcttggagagcttcctctaccctgtgtggctcaatagaagaaacaaaagagtaatgttcacaaaaatgagcaacccgagatcgagtagttacccccttatgaatgtcgcctangatggtgtcgaccgggtgatct

SEQ ID NO: 22015 - DNA, 454 bp, Zea mays
  unsure (1)..(454): unsure at all n locations
tcgncatctgaaagaaaattaccctgaaggaaagagatgatctcagttctccaatcttcactatagacaggggatttggtgaggactgctctttcaagaagctcgaccgaaggtgcttttattgtttcgaaaaatacttctgaaggtaagggcagcccctgtgctgttgacttggctaatagatcagcatattcattttctccacgaggaatatttttaacatagaatccttcaaaggaagcctcaatcctttggactgtatctaaatatttttcaagcttcggttctcttgctttgtagctcttgtcaatatgaccagaaataacttgggaatcagttttaagaatggcccttctgattcccattgcctttaacttccgaagacccaagagcagagcttcgtactcagcaatattggttgtgcaactgaaatcaagtcttggcgcataacaag

SEQ ID NO: 22016 - DNA, 411 bp, Zea mays
  unsure (1)..(411): unsure at all n locations
tagctagacgagctctgcgcctgcctcgattactctatgtcgtncacgcagcggagcccgtacgctgaggagcggctccgcgcggagatcaagtcgagggccgacttccttctgtcgctcatggccgccgaggtggactgccactgcgggacgcgccctgagcacctggctgaggccgaggcgcgctatcccgtactagaggccacgttcgatcggtgggcgcggcgcgcagtcgctgcacctgaaccagtcgtcgaggagaacgaggaggaggccgactccttggggtcctcccggtccacgtgctcctgcaccgagtcgtgccatgaggcgacggagggggacgccatgcgcgacgccgtggaaacacgcggcaaggaggggacgtcngatggcatcttcgatgacaac

SEQ ID NO: 22017 - DNA, 491 bp, Zea mays
  unsure (1)..(491): unsure at all n locations
acacaagaaactcagcttcggaaccacactcttcacagggtgcctataatgtttgcaccagcacgatcgtggatgcatcccaggatttcttcgtcaaccccgccaaagagtacctatccaagctggtagccacacgagatagcaaattccttcaactctgccatatcctcttcggaaagctgttggccacctaggtgtcgtaggtcgaagtctgcttctttcgaagagatttcttcagtcttcttccctttgtctgaaacttctgtggccacctccttctccgcaaccacgtctgatataattctgtcaattntggacatgttagttgtgataccttcgccttcaatcgtctgtagtatgttcatcatacgccgctttttctggcccccgtcttttccatcggcagccgaagggatttcctttntctgtanaaggtttgtcagttccaatcccagagtacttaacagctngaatggtgtggactcaatcat

SEQ ID NO: 22018 - DNA, 423 bp, Zea mays
  unsure (1)..(423): unsure at all n locations
agcttggtcattntattgctaactgtcccgactatgatagtgatcacgatcaacggaacaagagggagaagacaaagaactataagaaggcaaagggcgaggcgcatctatgcaaggagtgggactcggactgctcctcttctgactccgacaatgaatgactctccgccaccgccttcaacaagtcatccctcttccccaacgagcgtcacacatgccttatggcaagggagaagaaagtgagtattctagactccacttatgcttcttctagtgataatgagtctagtgatgatgatgacatanactattcatgcttattcaagggcttatatagatctaagatagataagattaatgagttgattgatgctttgaatgacaagaatagattactataaaaacaagaagatcttctatatg

SEQ ID NO: 22019 - DNA, 423 bp, Zea mays
  unsure (1)..(423): unsure at all n locations
tctttcatcctcctcatcctcatttgttcttccgctatcattttcattatccacacaacatatgtgggaatcgaaatgcgaagacaaacctcttggagaggtggatttatcggttggtctccatcgntcattttcttcttcttccttcaaagggttaggttcacaaataccaaaggaagtagacacacaaaatgaactatcatgtttggactcatcanatttgttntatatctaggccaaatatcatgcgcattangaatatgttcataataattcatatgaagcatgataatcttccttgctaaagatttactaggatgtcaaaagctgatagttaagcgaaacatccttgacttcttcaaagtatttcttatcatactagaggataaactctgtatagattgtctatcggggactacgtct

SEQ ID NO: 22020 - DNA, 443 bp, Zea mays
agcttactacttggagctcctacattctgaatggacttaattcagtcgggatctatctctatgccatgatcatgaataatgaatcctaagaacttgtcagccaacaccccaaaagcatatttacgaggattcattttgaaaccataccaacacatcttatcaaaagcttttcacaaatcagctatatgagaaccaaattcagtcgatttgactattgtatcatcaatgtaatctctatagtgtttcctaacaactcatgaaagatcaaattcataaccatttgataagtggcactggcatttttaaaccgaatgtcgtgacaacccattcaattaacccaataaagcctggacatataaagattgtttagatggatattcattggccatgaacatctgattatatccagcattatcatcaagaaaacttataactctagtcct

SEQ ID NO: 22021 - DNA, 455 bp, Zea mays
  unsure (1)..(455): unsure at all n locations
tanaggggaaaagaaagagggagaactcgtccgactgccctactcattataaattcaagaaatactttatagtaccctgccaagaatggcttgatacaattgaaataatgagcaatgaaattcttgggaattactctaaaaaagaggaccaactgatgacagcggccttcggcactctgccgaaacgaaggttgaacagagtacttgatgccataggatttgaatatgctgactacggtcgactgggcggagatgatgggggcccgaagcgaaaaaggattgctagcactactgacgaagaagtcgtcaaggcagcacaaaagaaaaagaaagattctgataacattagcgctgaagagttaaatcccgagccgaaggtgaaacagcatataagagaanaagtgcatccncggagccggaaactganagggaatangctaacacctagtccctaa

SEQ ID NO: 22022 - DNA, 420 bp, Zea mays
  unsure (1)..(420): unsure at all n locations
agcttgatgaggtatcatgggtaaatgaagcccctctttcatggaagtgatgggggttcctctnttttgcgtcactcatttaccaagctttatctggtttatttgaccatggnttctggatgtattgtttacttgactgtgtangcaccggttcacgatggcaatggccaaactacacctgggcataattcgcgaaggccaaacctttctttgcaaataccagctatgaccttggataccaatataccttcatcgacaagagttactatatcctgcagccccagttcaacgagagtgggtttgccaccgagacctaattcgacgagaacaaaatcatctatcaagaacatgaatcctcagcacagtttcagagcaaggagttcagcccaggaaggtgatcgagtggtccttctaaatcct

SEQ ID NO: 22023 - DNA, 418 bp, Zea mays
  unsure (1)..(418): unsure at all n locations
tcactatcagacgaaggctagagaagatgggctgcacgagaattttggctgctacaactttgcttaccgcanagacatgaagactccagtgatcaactatcgtaccaaatggccaatcggctggaagaatgagtggttttatgttaaagttgatgaagggaaggagaagatagttcagagcccactggatctaaccttcgggttaactaggcccctgtgcgacatgctgcaaggctcaccatgccgaacagctgtgggcgagtttcgagttgtgtctgagcatattggtactagagatttggtgcaggaatacttagccaatagagtattctcgacgcttaaggaatggaatatgccaaagcttaaaggagaatagaaaaagaacgatacttgtcgactgccctatcacttcaaattc

SEQ ID NO: 22024 - DNA, 405 bp, Zea mays
agcttgcaaatggcgacagtgacactagcagagcatacgaggcgatgggattgcgggacgtcctcatgacctcatctcgcgtagtagaatacaactcttgtaatgcatgatgaagcgagtatgccgagttcattgacgactgtgctagtttggcagtgagggcctgtggcagaggcgcacagcagagaagaggagaggagagcggagcacgggcttctggctgtgtcctgtccctctccggcgccggccgggaatagaaggaccttgccccggaacaacgggaaccgttcgaagcatccgcattcgcggcagattccccaaatcttgccccgctgtagcggagccggagcgggctcatattctggtcccaagaagcatccatggcagaagcaccccgcaagcagt

SEQ ID NO: 22025 - DNA, 344 bp, Zea mays
  unsure (1)..(344): unsure at all n locations
ggcagccatatgcggccatgcctgcatgccacacgtacgtacagaagcaacagctagcatgaccaaccggctgtcagaaggagctcatgcgcgatcgcacacattgcgaagtggagatcctcgtaaccctaataaagcgccgtcgagtactacaagcaaggacgacgcgaagatgtgtgcgtgcgtgccgcatactagctctagctaccagctgctgtatcttgtacgtaaagcccggcccttcctttacttgccctgatgaagaccgagacagcgacgatcagctgccgctacgtacgtgtccagtttcagaggatgagaggtactgcatggtanggtcctgg

SEQ ID NO: 22026 - DNA, 470 bp, Zea mays
  unsure (1)..(470): unsure at all n locations
ttaagtcacctgcggcatgcaagcttgtaagcatgatacatgtatcataattgaatagtcganaacaaagaaacaacttaacatatatggcatataactagcatgaacatgcatcatacatgttatggtacgatatgacagaagagatgaaataaactcatggctacatacgaaacagtagagatgaacagatgaaacatatataatctagaaaacataaaactataaggagatgaatcgatcataccctcccatgcgctctgaggatccagatccttgtctaacttctctcgtcattccgtaggagatcaagacgtctctccgtcaggaagaagaagatgtcacccttgaggaagacaacaacaaacgacagtttcggttcaggcagtcacgtagacgctccccaaaaacctatttgacgatccctagtccaaggtctcgaacgggcaggggcttcggaggcacatgcc

SEQ ID NO: 22027 - DNA, 232 bp, Zea mays
gacagtggcccaccatcccacaactatacaccacagcgtgactatcaaggttatcgctgcgttcataccacgggtatatgctgaatatgaaaatctcgtcattgatttgtggactgtctaatcttagcagacaagaccaatttaagtagcctcgcttagatattcctagttacactcacaagataagatcctctattaataagataagcaacttaataaatactacaactta

SEQ ID NO: 22028 - DNA, 409 bp, Zea mays
agcttatgaagattcttcatcccaacatgggctattctgcggtgccagagccaacccatgttagtcttagcaattaagcaagtgtcgagttcagctctatcaaaatctaccaagtatagctgaccctctaacactcccttaaatgctattgaatcatcacttcttctaaagacagtgacacctacatcagtgaatagacagttgtagcccatttgacataattgagaaacggaaagcaaattgtaatctaaagaatctacaagaaaaacattggaaatggtatggtcaggtgatatagcaattttacccaatcctttgaccaaaccttgatttccatccccgaatgtgatagctcggtggggatcttggtttttctcatatgaggagaacatacttttctccctgtcat

SEQ ID NO: 22029 - DNA, 455 bp, Zea mays
  unsure (1)..(455): unsure at all n locations
tgagcattttgaaagaaagcaaagggtgacaaaatgtcccaccttaagctcattgtggggaaactagtgaataaaaaaaaaacatgaacatcgtcaccattggagcatgaacacgtcacctaaagtagtgaagccaggttctattctagcacgagtagaaagagttctaacaacttctcctttgttcatgtatagctgaagacaacgctctattaaattctgaacctgcaacaggatgtaaagtttgtttagttcgccaaagcataaaactgtcaatgtcatgccactagatagctataaagcttacaagttcaatgtcttcgcgagacaccttcttactgtcattactagctatagacaaggaacccgaatttnctgcaggagcatcagtggtcatcgggtttggttgctgactttgcacttcattagtaccctgtgctgatgactgcaactct

SEQ ID NO: 22030 - DNA, 369 bp, Zea mays
agcttgttggaactcgctctcccgagcaagatgatccaacggcggagtgaaagtaaagcggacaaaggtttagctcaagaaggcaattgctctgttaatctagcctctcaagggcactgtgcgggggtatttataggtgcctgagtgcccaacgtcatggattaaaaacgcatgtgccctcaagcgcctaagtcatacccggaatattcccattcacaaactgtcattacaaaaaatccttcaaaactgggcccgtaatgcgcaaaaatcgcgccgagccttgtacaatgggccgaatttacgtgggccttctcgtagacgaagccgccagactgagcgacctcatcgtaagccttttacttgaacata

SEQ ID NO: 22031 - DNA, 285 bp, Zea mays
  unsure (1)..(285): unsure at all n locations
tctnctctttagntagctttgtctcagcagcaaccctcttgccttgagacatttttcttcagaaatgacaaaaatgtgtctttttaaccgaagcccacaaagcttgagaaactagcaagcgttagtgagccagagctatgaatatgagaaaataaagcaaatggcacaagcagtgtacccaacgtggttggtgcgagttcttatttatatgctcggcacgctccaaatcgggggggcgtctgtcattgactgttgctattctagcaaagggaaagggtgtttttg

SEQ ID NO: 22032 - DNA, 441 bp, Zea mays
agcttgtgagagcaagttaattctaaaattaattattttctgtggatgcatgaccatattaagtttccttaggctactataatatcacacaaggacagtggaacatcattttccatttttatatccatatattatttataaatcatttaaaactactcaaggtgcattaaacaagctaaatcactaacttaaccatacatgcaccacaattcatgaaatttttaccagtcaccaagcatcacacagagggtctactgtaaaaatttcaatccattttaagcaatcgagctacagatccaaaaataacaatcaaaacaatcatctttttcctatttaacatgtttcaattaacacaccaagaaaacagtgaacaacctataagttttatattttccctagatggagtatgacaacatctaactaacaaaacaggtttcatca

SEQ ID NO: 22033 - DNA, 373 bp, Zea mays
  unsure (1)..(373): unsure at all n locations
tgagacaacaactgcacaactngcaagaaaatcatcggtacgtcaacataaccctgcaagttttacagatgcatcattcagaaaattgccaaatgttaggaagatcaataaaagaattgtcagcatgagcacaaatacaaaacgtctgagtacagaaacacaagggattntttaaacaagaaaatccattctgctttttaaagaacaatatataaagtgggttaaaacaacaacaaatctgcgctgcttgatcaaccttaaggagtaaagaccacgaggtaactataacaccttcaacatcgaacttgtgcatagtgtatgaattagtatagcaatatgtgagaataattntagcatacaaaatgcataagaa

SEQ ID NO: 22034 - DNA, 372 bp, Zea mays
agcttctaaagggagagcacattttaggactaaccaatgttcattttgagaaagacagggtttgtagcgctcgccaagcaagaaagcaagttggtgcccatcatccacacaagaacatcatgacgaccgacaggccgcttgagctactccacatggatctattctgcccgactgcttacataagcatcggcgggagtaagtattggcttgtaatagtggatgattattctcgcttcacttgggtattctttttgcaggaaaaatctcaaacccaagataccttatagggattcttgagacgagctcaaaatgagttcggcttaaggatcaagaaaattagaagcgacaacgggacggagttcaagaactctc

SEQ ID NO: 22035 - DNA, 451 bp, Zea mays
  unsure (1)..(451): unsure at all n locations
ctaagcttctacgggagagcacattntacgactaacaaattggcattttgtgatatatacgatttgtagcgcatgccaagccggggagcaagttggaactcatcatccacaccagaacatcatgactagtgacaggccactggagcttctacacatggatttatttcgcccgatcgcttacataaacatctgcgggagtaaatactgtctagatattgtggatgattattctcgcttcacttgggtgttctttttgcaagaaaatcccatacccaaaaaccttaagggattcttggacgggctcaaatgagttcacttaagatcataaaattagaagggacattggacagactcaagaactttcaattgaagctttctgagaggaggcataagatgagtctttctcctaactcacacaaatgtgtttgagaggaaatcgactttttgacat

SEQ ID NO: 22036 - DNA, 452 bp, Zea mays
  unsure (1)..(452): unsure at all n locations
agcttctgggggaagtaaggatgctgggtgctcttatgaagcacagatccatagtggacatatatggacaccaactttcatctaaatgggttcaagtcgacggtgataaagaatataggatattgcagtctataattttaatggaatatgtaaatggaggttctcttaaggtaaaaatcatttatcatgtttatggcttcctcccgcattgtctcaacatcaattaagatngttcattttggtactgtacctgttaatttctcatcagggatatttgacaaagctactgaaggagggcaagaagtgtgtccccattgatctgtcagtttacattgctcgggaagttgcttgtgcattgttggagatgcacaagaagctagttattcacagggacatacaaagtgagaatgntttgattgatttggatcccaagaggaatactggtgcaccca

SEQ ID NO: 22037 - DNA, 336 bp, Zea mays
  unsure (1)..(336): unsure at all n locations
ctcagcttatgcgcagatgggcctggcctcgattccatccactctttctattgtgtgagngccaacccatcctgaccatgcaaagctgcgcctccgtctcaagggaagcaacggccaccatctgacgaaacgtacacccgtgcgctacacagtgtggcaggaagaaataggaagcatccagccaacattctgcctaggaagaaaggaacccaccatagctttcaaaaaagaaaaagagcctgcacacttggcactggataacgaaggcaaaccctaatcgctactccaccgcagcgcccactacaccgatcgggctccgatggacttcgcggagct

SEQ ID NO: 22038 - DNA, 437 bp, Zea mays
agcttgtttattctgtgaatctgagattaacgtaattcgtcaaacttgcatgcttttttgccagaattattattttttcatatgtaccatcattcctccactttatttggttacaatattctacaagttctgacataaacaagtcagtcaaccacatgaataatttgctaattggttttgttctgttccagaggggatcttatgccgccttagaccaaagaatcacgtatgttcttcctcacactctactggcttgctactttcatgtttcaactaaatttttatttacacataattattatttctctactgcttttctactttcgtgtttcaactaaatttggatttacacataattatcatttgacatggaaaacaatgattggtgctttgacttgtgagttaaatttggactctgccttttattctgtccattt

SEQ ID NO: 22039 - DNA, 469 bp, Zea mays
  unsure (1)..(469): unsure at all n locations
actcaagcttgtgaagggtcttcatccccacatgtgctaagcggcgatgcctcagccagcccatgctagtcttagctattaagcatgcatctagaccggcttcttcttttgcaaaatcaactaaataaagtttgtcgtctaatacacccttaaaagctagtgaaccatcacttcttctaaagacagacacatctacatttgaaatagacagttatatcccatattgcataattgactaaccgatagcaaattatatccaagagactctactaaaaacacattagagatagagtgctcattagaaattgcaattttacctaacccttntaccttgccttgattcccatcaccgaatataattgaatcttgggaatccttattcttgacgtaggaggtgaacatcttcttctcccccgtcatatggtttgtgcatccgctgtcgataatccagcttgaaccctcggatgca

SEQ ID NO: 22040 - DNA, 430 bp, Zea mays
  unsure (1)..(430): unsure at all n locations
agcttcaatgagctgggatggttcttaatcacctgtcacagataatgctcatcggtcatcagggttcagcaacgcgctaaacacagtgagaatggaggggggagatagagagaacaagatatgtttttatttcttttgttagttctaaaacaaccaacttaattagctttcctccaagaaacaacaaaacagaacagcataagaaattggacaatgagttagcagaaatatatgcacaagcgcagccagcttataaaaaataagagtgaattaagagctgcaaatgtgtcaagtaccaacttatgggaaaatgtaaaaataacatacaaaaacaatataaaccaatagtgatagggttacctgatacatnttttggctgtgtgaggcagagtggcgcagacttttcactccgatgtggtggttgatctga

SEQ ID NO: 22041 - DNA, 460 bp, Zea mays
tgtgttctggttcaaggtagcagtttcagcaatctgattgctttacctttagataagccttgatgttaatcacgtactgaagatccatttactatgggatgcattggtcaatatttagcagctgatgtaataatttaatggtgaataattcaaaaattaggaatccaagtgtagtgcttcatgcttttgttaattgtactttgcaaatcatgtttccctatgtttaatgatttctctcttctcctacataagatgtttgggagcattacttggctcacatatgcttcatgcagcacattctctgattcagatgaaatcatgaaatagttagattggtggtggtagtctcagaaataactcaagatcagtaactaagtatgaccccaaagagttaaatctatttcacgttgggcatggaagtccttattggagctttagctgagagttgttttaggaattt

SEQ ID NO: 22042 - DNA, 437 bp, Zea mays
tagcttgcctggtggccttcaacattgtgtgtatttacattgtccacagacatttggtgcaagaacatatagctttcaacgtatgaccccttgttaacgaaagggaaatatcaaccttctttcttaaccatggcacaaccccctactcaaggtgacgaacaggttcctcatgatgatggcattgatcaaggggagcatatgaagaagaagacaatgatgaacaagatggtgcgcaccaccatccaaagagatcatccggtaatacatgatcctatgggacatcaacaagggagtaactactcgatctcatgttgcaaatttttgtgagcattactcttttgtttcctctattgagcctttcacgaccagaaatgctttaaatgatccagactatgttatgactatgcacgaagagctcaacaagttcaagatgaatg

SEQ ID NO: 22043 - DNA, 420 bp, Zea mays
  unsure (1)..(420): unsure at all n locations
tctaagggagagcacattntatgattaacaaatgttcatttttatataaacaggatattgagtgcatgccacgcatggaagcaagttggagtccatcatccacacaagaacatcatgacgaccgacaggccgcttgagctactccacatggatctattccgcccgattgcttacattagcatcggcgggaataagtattgtcttgtaatagtggatgattatactcgcttcacttgggtattctttttacaggaaaaatctcagacccaagagaccttaaagggattcttgagacgggctcaaaatgaagttggattaaggatcaagaaaataagtgcgacaacgggacggagttcaagaactctcaaattgatggttncttgangaggagggcatcaagcatgaagtctcctctcccta

SEQ ID NO: 22044 - DNA, 431 bp, Zea mays
  unsure (1)..(431): unsure at all n locations
agcttgtctgcaattntctccacccaatgcaagaggtcaatctttctcagtttcttattggatagaggcagccctaagtgcacacaaggaaaaactgccctggaacaaggtaaaatctcatctgtggcagctaaaacatcttcctcacaagcgatatggattgctcttacttagatttgtatgcagcactgaggcctcaccaaagatatttangatgccttttgtagttaacaactcctcagtggttggtttgatgaatagggcaacatcatctgcatatagagatagtctctgaccagacacccctcgattaaaaggttgaagaaggccctcatgctctgcatttacaaaaaagaccgttgagaacattccgtaccaaaatgaagagcaaggggggtaatgaatccccttgcttgggacctcttttatgg

SEQ ID NO: 22045 - DNA, 166 bp, Zea mays
ggaagggggcctgctttcctttcaaggggacaagctcttctatatcctctcattatcttctttgagcctttgatatgaatcatcatatggtcctgccaattctagctcacacgaagatttgcttgtccacggacaacaagcattatcacatggggatatagtatta

SEQ ID NO: 22046 - DNA, 437 bp, Zea mays
  unsure (1)..(437): unsure at all n locations
agcttctaaagggagaactcattntgggactaaccgatgttcactttgagaaaggcagggtttgtagcgcatgtcaagcagggaagcaagttggtgttcatcatccacacaagaacatcatgacgactgacaggccacttgagctactccacacggatctattcggctcgataacttacataagcatcagcgggagtaagtactgtctagttattgtggatgattattctcgcttcactngggtattctttttggaggataaatctcaaacccaagagaccttanagggattcttgagacgggctcaaaatgagttcggcttaaggataaaaaagattagaagcgacaatgggacggagtttaagaactcccanattgaaggctttcttgatgacgagtgcatcaagcatgagttctcttctcctacacaccacaac

SEQ ID NO: 22047 - DNA, 464 bp, Zea mays
  unsure (1)..(464): unsure at all n locations
cataaaactcagcttctaagggagaacacatttngngactaacaaatgttcattttgaaaaagacagggtttgtagcgcatgtcaagcaggaaagtaagttggcgcccatcatccacacaagaacataatgacgactgacaagcagctcgagctactccacatggatttattcggcctgattgcttacataagcatcaacgggagtaagtattggcttgttattggggatgattattctcgcttcacttgggtattcttttttgcaggataaatctcaaacccaagtgaccttatagggattcttaagacgggctcaaaacgagttcggattaaggataaaatagataagaagcgacaataggacggagttcaagaactctcaaatcgaatgctttcttgangaggagggcatcaagcatgagttctcttctccctacacacctcaacanaatggtgtagtgga

SEQ ID NO: 22048 - DNA, 434 bp, Zea mays
  unsure (1)..(434): unsure at all n locations
agcttgcacttacgaccaaaccgcacccacattcatatcacattcaatggctcaacaatagtggtaaggtcaaggtaaccaagttggtacgaatataatttgctattggttcatatcgngatgttgttgactgtgatgttgtgcctatggatgcttgtaatattctgctaggtagaccatggcaatttgattcagattgtatgcatcatggtagatcaaatcaatattctctcatacaccatgataagaaaattattttgcttcccatgtcccctgaggctattgtgcgtgatgatgttgctaaagctaccaaagctaaaactgagaacaacaagaatattaaagctgttggtaataacaaagatgggataaaattgaaaggacattgcttgcttgcaacananactgatgttaatgaattatttgctttcact

SEQ ID NO: 22049 - DNA, 466 bp, Zea mays
  unsure (1)..(466): unsure at all n locations
ctttctgcanaactgagtctttganattnggtaagccttaccttgattcccaacaactagcatatccttgagagtctttttctttagtcgggtcagtcttgctgagtatttccatactcagggtttatcccattgttgctgcaggagaaactatcaacacgtatgagttttgttaaactcataatggtgacttttaattgtgtgcattatgtgtgtgctgcgggaagatggttgcttcccagttgatgtaatcagttagcactttaactctacctcgggcatgtaataataaatacttcgtggtttgaaacttattagcttattaatggatattatcttattggaaagacttccactccactcctatttttaaagnttatgttcttgactggtntattgaatatttgcaactntgcgcgaatggtccttggaaatgaacgatgttatcgaaactcggcacctcgag

SEQ ID NO: 22050 - DNA, 453 bp, Zea mays
  unsure (1)..(453): unsure at all n locations
gcttcgtcgcgaggaaccgacttaaagatgataagactacgtggcccttaacagatttccataagtcattgagaaatgtaatggatatggatgtaattntacgtgggctgcgtcccgcgtctataaataggtgaacagtactcccgtactgttcacgctgactggatacttgcttttgcgtcacgcttgtacctttttccttctctccgggccgaaggtacatttgtaatttgaaatcatttctatttttccatattaataaaatagaaatgatactatgatgatgcttgtattatatttcattctttatataaatccttcgtcattacttggtacgtttacgaaggtatgtcccttatgaccttcgtctgacgcccattatttcctaanaggacataatgcttcgaaggacgaaggactntaacatttaacactntttatgttgccttgtct

SEQ ID NO: 22051 - DNA, 455 bp, Zea mays
  unsure (1)..(455): unsure at all n locations
tctacccacttgccctagtgatcggccaagcatgttngaatagatctctggtnagtcgctctagcgttcttgagggcgaatgacatggaggtatagtagaaagctccaaacgggggaatgaatggtggcctttcttcatcttcttttggcaagctgatctgatggtatccaaagtagcaagccaggaaggacaacttagaacatccgacngtcgaatctaccacctgatctattctggggagtccgaanggatccttccgacaatgtttgttgagatctgtatagtcgatgcacatgcgccaatccactttattctttttgagtacaagaacaggatatgctagccactcaggatgcagtacttctctaatgaaccctgctgtgactaagcgaagctagctcgcgtgaatagcctctctcttgtcaggcatgaaacaacataatntttgtctgat

SEQ ID NO: 22052 - DNA, 445 bp, Zea mays
  unsure (1)..(445): unsure at all n locations
agcttcgggaaaccaatacttctggccatttctctgcagacagatagctctntgttgtcaggcaggcagtataagaagtcatcttcattcgtcccattgaatattactgcccccttcgggtattttagctccttcgcataatggttagcttcatgagtttcttcttcagatagttttttccccgaagcatgtcgaatgatgtaattacacatgctggcaagcgcttcggggatggcagtatcagtttcttcaactaaaattggatctgatatttttatagcttcggcttccaaagtttgctccttgaagggctctgaaggcccagcttcagcttcagcctgttgcgtcgaagcttcagtagaagcttcagcaacttcaacactcttttttggagttgtgctngaagacttaattgtctccaagacatctnagtacgttaccattc

SEQ ID NO: 22053 - DNA, 479 bp, Zea mays
  unsure (1)..(479): unsure at all n locations
actcagcttactgctcgcacccttttcttcaaatggtggcaatccctctggcacccgagaaagcacatatgtctccgcggctatttaaaatttcctcgaaggcctcagcttcgtgattaatccattcgatgggacctctcgggttgcctcttggaaaagtttcttcgctcgagaatgcgccgacgctggcgaagctagctttcaacttcttgacgcactccatagattttgtatagcatcttttcttgaacgaacgaagctcttcaacagttccctctaaatgatttgcccattggtcgctaagttctcgcttcgtttcttcaagtatgcgttcctctttggttctggcccagttgtttcgaagatcttcaatttcacgcttctgagcctcagcttgacctttanaagtagcttcgtcttcttttattctatntatcaatgaatggaatattntatctttttcgagaccttcgttcctt

SEQ ID NO: 22054 - DNA, 473 bp, Zea mays
  unsure (1)..(473): unsure at all n locations
cagagcgacctgcggcatgcaagctntgtagataatagcttccgcgcttgcttctgagataacctttctaaggtgttctttttaggatcttcagctacgaagcatacccccaacagattccacaccttggaatcctacatttatgacctttttaagagataggagacctaccacaaacataaaactattttctctattaaaaaaatgttggctgattgttctgatgataaatgcttgattcgcttctatgattgattgaaacattatagttcggcatcttagcatgtaccaccataatgtaatgtattagagttagtaggtgacacactaatctacttagctgataaatccctgcagtaacattacttgtaattactcgccgtgtgtacaattcttacttccttaccgtggtgttcttacccagatgggctaccactatagtggtagaagagagcactacagacgtgatcctt

SEQ ID NO: 22055 - DNA, 432 bp, Zea mays
taagcgtgtagatcactctctcaatgaaacctaactgaattgttttctctccattttacaaggagggaacaagcatcagaactcagcgacagttgattccatttagcttgtatggtacatatctggctaactttttcacgtgtttttcataaacaaatataggttttgcactttcctctcacaccacataaacattttaattaatataatagctggcctaattacttaaaaattgtaccataacacaaatgagttatttagtaggattaaagctattttatagaggagttggaagaagaaatagattggtgcaatgcataaatccaaccaaagaggaaagattattacagcaacagtcatttgaatgaaataccatagtattacaaccacttccctttaacaaagaagaaatagattgtgcaatgcataaat

SEQ ID NO: 22056 - DNA, 454 bp, Zea mays
  unsure (1)..(454): unsure at all n locations
catgcaagctnggatatttcttatcagaacactatggatattgtcgtgataaatgataaattcttcttcacgaagcatgaaaagaagggaaggtgttttttcgccgaaggctcaaaaatggtatgtacttaatgtttcatgcatccgaaagaattcaataatgaaaggagacttgtatattacattcaaatgtacaaagtgttacatagattacactttaaatgatttttccaaatagcatctaatcttctctcaatactgcttcggcggcctcatttacaagttggtcaacaaccttgtccaagatagtttcggccatttgtttaatttcttcgtcgacatttgatccagcagtttctgaaggaagagaacatttcttcattacttttacaaaccttgagcanagaatggaataaaattacaacacaataagagcgactaattggtaccctaa

SEQ ID NO: 22057 - DNA, 318 bp, Zea mays
  unsure (1)..(318): unsure at all n locations
tacccatgatgaggcatatgaccagntaaaaggtcctcgatcatcaagcctacatcgagacggtccttaatcgactcagacggagacactacaccgagactctcttctcgtgcaagtcacccgtccggtctcaactttatcattttaacccaaaagttggtacctgacagagggacatcttattcgatggtgaacccatcatggccatggtggatccaccatcaagttttattttgaaaacatcccattccacttgaagcatcattttttggcaaaacaaaacattttgtttttctagagcaggacttagcataagaa

SEQ ID NO: 22058 - DNA, 455 bp, Zea mays
agcttctccatcatatctttctttatttctttagcacaaagatgtctataaaagtagcttagctccgctaatgctttccacacatcattttttacaaaaccacagaacataacatgaaggagtctttccattattatatggtagtcatgactcttcaacccgaaaaacttgttcatcttcaaattcacagaccttctaaaacccgcggcgtaaccatctgggaactttaagtttttcaaccatttcatcaattgtttcttccttttaggtttaacattgaaaggagcatgtggcttcttctcgatctctcatagctctagagttggacgactacaaattaaggccaagtcttttctagccttagggttgtcttcttgtttgtgagtgatattcaagcaagtgctgataatgctttcacccatatttcgttcctagagcatcacatcaatggtatg

SEQ ID NO: 22059 - DNA, 415 bp, Zea mays
  unsure (1)..(415): unsure at all n locations
ttaaaactaagcttcaggcaagcaattcctctagccccaacgcaagccaactagtgcaacgtgatccagtacaaaggcagttcaagagggagtaatccgtaccgtgaatccggtggcgctatgccctaaccgcggtggaggtcaaaccatggcggcaaagatggagtttgacaaggtagccaccctgcccggatacccaaccgtgacagcccacgcagagcccaagtatacgagctttggtgattcaccagcaagccattacgaccgcagtgaggtcacatatggcctgcgtgtgcggcggtccttcacagatcccaccccgcggtgacaaattttcttctctctctcgctctgatgtcctctgcgctccatggatgatggggggcacggncccatatntataccccgagatgtg

SEQ ID NO: 22060 - DNA, 159 bp, Zea mays
ttagtttgtgatgtccatgaacttgtataccttaaaggaatttttggataaataatggaagacccctctgatttacccctttctgggcatcagatctcattgtgatacctatcctgtaactaacaaatccttttctcaacatttgaactacaccgcaat

SEQ ID NO: 22061 - DNA, 441 bp, Zea mays
  unsure (1)..(441): unsure at all n locations
ctatttagntgatttatcaaaagagaatgctgatcttgattcatgtttaatagcgaagactaatatgggctagctctggcaccaccgtctagcacatgttgggatgaagaatcttcataaacttctaaagggagaatatgtgttaggactagctgatgtctgttttgagaatgcagaccttgtgcagcgtgccaggcaggaaagcaagttggaactactcatcaaagcaagaacgtaatgacaacatcaagaccactggaactcctacatatggatctctttgggcccgttgcttatcttagcatggtggaaagtaagaatggtcttgtaattgttgataattttcctgcttcacttgggtggtctttntgtaggataaatctgaaacccaaggtactctanagcgcttcttaaggagagctcacaatgagtntgatctca

SEQ ID NO: 22062 - DNA, 422 bp, Zea mays
agcttgtctctcacatcaccgagtataatgtgatatgacttaatcgaaggaaccttctttgagaactctgttatagaggaaacaatggttaatacgaataaccaagcttagcaatctaccatctaaaaattctgaaacaaaaaaacctaaatgtcaaataatattatttgataatccatcttacctataaagtgctttgcatctttctttgacgaagtccgcgcggcagatcgtctaccgccttgtcgtctgcgcggccgccgcgaccgtgaccacggccacgacaacgctggggcagcagagtgcgtgtgtgggcgatgcgcttcgcaaggccaccaatgtgctcgatgaccgacaggaccgcaacccggtggccaccgtcatgctgctctcttacacccagcagcagtagcaacactcag

SEQ ID NO: 22063 - DNA, 457 bp, Zea mays
  unsure (1)..(457): unsure at all n locations
tcttcttcattctgatgaaaaccaaaccctttgaccacttcatcataatgaatgttccaactctgagatgctttctttaattaatgcataaatgcatttctgaagtttgtgtatctttctagcattgatcggatcaacaaaaccatcgggacgtatcatatacacatcctcgtctaggcttccatctaggaaagttgttttggcatccatttgtccaatctcataataaaaatatgcgactacagctagaatgaatcgaatagacttaagcatcgctactggtgataatattgaagcctagacgtcacccccattatttgaagttntctaaagattcagacttatgtttcattaagtagacataacaatatctactaaaatcatcagtgaaggttatgaagtattggaatcctnccctagctatcgtactcattggtctacactacaggtgcacatt

SEQ ID NO: 22064 - DNA, 459 bp, Zea mays
  unsure (1)..(459): unsure at all n locations
agcttctgcaacatacacgagttattgtacgagacgaagccctggggaaaggagcaataccacaacaactttgggtgctacagcttcggcgcccgctccgggtcaagctaccctgtgccaacctttcggaagaggtggcccggagcctggatgtctgaatggttttatgtgaaaaatgatctaacagcgcaaaataatgtcaaaagtatcattatgtacctcaattggcaacgcttcgggcttcgaaggccgaaggttgaaatggatgaggcagccgaagaatgccaaagagccttcggcgcagtctgctccttcattgggtcaagggacttggtccaggagcacattgccttcagggtatggccacttgcagaanagtgggaaatgccgaaagaaaccatcatagagtccgacgaaggcggactagtcagattaaaatacacattcaaatatgcagat

SEQ ID NO: 22065 - DNA, 367 bp, Zea mays
cgtaaggaccagatcatcaaagcttataagttctggatgagaagtggtcgcccaagttttgttgatgaagcactagaagaccaatcaatgaaggaatccatgtgggagttcgcaagagaaaggtttgtgtgttggcatcgatgcttcctcaataagctagctaccaagcgaaagctagaagcctgaagatgatctttgagtagccagaatcagcgtttgcaatcagcaaccagatgctcctccaaggccggattttgttgaagctccatctcctcgaagagtctgcaaagtgaagatatgtagctgaagtaaagctatacccataacccttctaagccgaatctcgaggacgagattccttttaagt

SEQ ID NO: 22066 - DNA, 411 bp, Zea mays
  unsure (1)..(411): unsure at all n locations
taagcttagcggatgaatctcgaagcttatcggatgtatgatagaagtctgaagacacttgttgtgaaanaaaaactctagaagaaacttttgaattatccttgtaaagaatattgtgatttaagaatcagatactactctgtaaatttgttcataccttggaatatatttttacctttccgtccatgtatgaactgctttgatgtaaacgaaacttgtatttttgagccgaaggcgaaaaacaccttcccttcttttcgtacacagcgaagcataaatctgcttcctttccttttgccaaagcgctattcttataaccgaagcaactgtctgtatctgtatgatatgatgatgatgatcctatgtnatgtctaatgaatatatatgaatgccatgaatgatgtgatgtat

SEQ ID NO: 22067 - DNA, 433 bp, Zea mays
  unsure (1)..(433): unsure at all n locations
tatggcaggattggaagtccaactcaagcaactgaggacaattgtgtgatacatgagccatgccagntcgcctcaaagacagtatttgaagntgggaacacctgtatggtagtgtaacatattagcttgatgacacatgaaactatttcactacaaaaaacattggtacctgacagatattctgagtgcacggcacttaaaaatatgaagctcacgcaatccaccatgtgtaatagttgcttcttggatgccactcccaagagaagcatcgtttactgttaaagcagtcaataatgggcactcagataaagcttgaaaaaatgggcctcccagttgtcccttgcccattgtcaaagtcttcagatgcctacaagatactctatcncataagtacaagatactcaatatgccaacatgggagacaattggaggg

SEQ ID NO: 22068 - DNA, 372 bp, Zea mays
  unsure (1)..(372): unsure at all n locations
agctnggattatagaataattgcccctcttgatctcaaaatcaaagtgcatgtctcctacaagtattcaaaacttgtatgcacacccttaggaggaggttactctataatctaagtatttgagactaacacatgttttcaagtctattatatgtgtagtagtctcattgaaggaaaatggagtcctcggagaaagacattaaactccactgcaaacttacaagtaatttcatgtttcgcaagtggtttcattccaccatcggtatcatttacatgtcttctccagattttgattagagtatatttcatatatttttcttcccatgttgccataaatgcatatngtgttaaaatatatctnttacctatgcat

SEQ ID NO: 22069 - DNA, 464 bp, Zea mays
  unsure (1)..(464): unsure at all n locations
taaccttgtaacgaggataagctacctttgtttcaaaaggtgtatggtccttaagtctctttgaaatacttaagggtaaatgcttaagattccaacatgcttccataagtgcatagtctgtcatgagcatcacacttttattatgacacattgcacttcacagtttctgtgttaaagatatgttctcattaacctaattatgtgcacttggcatttaaggccaaaatcggtattcctcacaaggcacatatttagggggagcaatctattatatagaactggttaagcttaattgacatatccttttaatcatgtctctttcctttggtacatntgcatatttcctatctctattgtgccaggctaagactaatatgtttccatgagcatctcgtgtattaagtcttagattgaaagggaaatggagtattcggcaaagacatcgcttccactctacatcttca

SEQ ID NO: 22070 - DNA, 396 bp, Zea mays
  unsure (1)..(396): unsure at all n locations
agctntacccgtactcccccgcgcgctctcgtcctcaccggagcaagagttcaccggcgtttgccctgtagacggcgtgccagcggccgcccgatcccccgccaccatagaccagccagccgagccattcccaaccccgtccaacccttggaatagattctacgtgcctcagtgaagctcccagagcaagaatcaagctctgcctcaccggagacaccggatcaaggtcgccggacttcacccgaccgccggtgcacgtagaccgagccccacggtgagttattcttcgattccgtgcacgggtcgactcattagcaccccgtgaagctccccgtgccctcggattgacctgtattgccgtggatatgccggagcacacgccttcgacgagctcac

SEQ ID NO: 22071 - DNA, 474 bp, Zea mays
  unsure (1)..(474): unsure at all n locations
cttgaagagatcctcagtgatcgcggggacatttgtgccttctccggcgctcgaggggttgcagcaattttggagaaggctggttgtgaccatcttaaagctgcagcccagaccgaagccgccttctccacagacgacacaagagacccctcggccgaagctactttagtgggcggaaaattttactccaatgtttgggtgaacggtggccgataattggccaacgaaatcataaagaaaaatgaaaaagaaacccacgatgctcgagaagaagctaaacgagctgaagaagctgccgaacgcacaaggcgtataggtattatntttgaattntagcttcggtgttaattttctgcttcggactaacangttggctactacagctgaactctcaccactgctcaatccatacgaccnccaggccaatcccgtcatgaaagaagcgctggatgtaatgagcgtcgctaattccat

SEQ ID NO: 22072 - DNA, 465 bp, Zea mays
  unsure (1)..(465): unsure at all n locations
agcttatcaagaaacagaccggtacgtgtgggtacattattctactctaaagagatacaaaacttaacccctttcttccacgcaaggtttttgccatgctagtcgtcagcaaatatcgtctcaacgattgtcaccaaactagaggggcaaaaggtcacgaaacttctgcggctgtagaaatctcaccaatataatgcagattggactgtcgacatcgatcacgagatcagataatcatcccttacacaggagcacaaaggacgacgccttcaaatcatgaagcctgcattgcttgcgttgcgtgcagcaaacataagcgtgtcactgagtttggccttgctgttttcgtcacgcacgtnncggcccggtctctcgcatcatcaccgtcactgcacgaacagccgctgttccgtccgtgcccccgtgacgcgcgcgccctgcgaacacactcngacaggccactgg

SEQ ID NO: 22073 - DNA, 436 bp, Zea mays
  unsure (1)..(436): unsure at all n locations
cattgctntgggaccttattatactcctctcgacatagagaggagaggagtatagaagttgcttgtgagttaaagtgccgtatttgggctgnctcgtctgagtcgtaatccttgtcccccacctgtggcacctgcgctccaaattcaactatgtcccgtatgcttttttggagtgaggttagatgatgcctcattttatcactccacatacaataatcttcacaatcaaaatatggtggtttacctaaggaacaaaaagtaatggagcgcgcttagaaatacggggatagtgtaggggcatcttactatacttcttgtgctcatggcgtttagaagtagtggacgatgattcggagccggatgtggagggcgacgaagagtcagtctcatagtagaccactttcttcattttcttcttcttgtcacctctccgatg

SEQ ID NO: 22074 - DNA, 461 bp, Zea mays
  unsure (1)..(461): unsure at all n locations
agcttgtggatttgtcgcgggttgggaccgactggagggattccgggtcgtccgaccgcgagctccttgagacccagaggcctcaccaccttgcatgacgttgccagatcctcgcccacgattggatctagaacgtgggggagtatctccattaatctcttgatcgtcagaggagtcggattcaacaacagaaggattcctccgacgcaccatccttaaaaagagaagatagaacctatgatgagcaaggatcttaacaaacacgtttgagtagagacgcgtatgatattgagcatgcacttcaaccgttcatgcgagcggttcaactacaacgaacaatatcaaaccgctaaactctaacaatgttcgagacaaacgaagatagtctaagtgttgcaagcacctaaactaaaatgtatccaacanacgatacactagataatcaagaacgagtgagatcg

SEQ ID NO: 22075 - DNA, 475 bp, Zea mays
  unsure (1)..(475): unsure at all n locations
tctagattaaccgtgagaattactttcacaatacaatttgcatgttgataaatcacactaccaatctaatggaattgacaataaaaaatgtaaatatttaacttagcataaaattagaataaataaagtttacgatgaaacggagaaaggtcgtcaatatgaccaaaacaatatttgttctcgctaaacaagtggtacgcaaaaaaaaagtgctagagacaagttgtggtcgactggcctggtttaagatcagctggtctgtatttaccataatgtcagcaaccgactatactatagattgtgatattgatcatggncatggtcagtttgtatcaattataatgtttcagtgcagnctttattgtcaacttacaaccacctcattatccactatcagaatttgcctctttgtcgagtactcgaggctttgccgagcgtcgtactcggcatagtactactcttggtaactaccaca

SEQ ID NO: 22076 - DNA, 421 bp, Zea mays
agcttgacaatgaggagatggctttaatcatcaaaagctctcgtcaaatcctcaagcaacggaaggggaaggattacaaatcccgttccaagaaggtttgctacaagtgtggtaagcccggccactttattgctaaatgtcctttatcaagtgacagtgacagggatatcgacaagaagggcaagaggagagaaaagaagaggtaccacatgaggaagggcggcgatgcccacgtatgccgcgagtgggacttcgacgagagctccaccgagtcctcctccgacgaggacgccgtcaacatcgccgtcaccaagggactcctcttctcaacgtctgcacaagtgcctcatggcaaaggacggcaaaaagaagaagttaaatctaaatcctcactagatatagcttctagtgataaaatgct

SEQ ID NO: 22077 - DNA, 479 bp, Zea mays
  unsure (1)..(479): unsure at all n locations
ctataaaactaagcttgcattgtctccctgttggaagccaatgccatccttaatgccagggcgtctctcgctatagagcatgcttctagcaaatttaaatttttcattttctaagtcatgctcattaatctgagcactaagttgagctatgtgatcattttgttgtttaattaaagctaggtgatcatgaatagcatcaacattaatatctctacatctagtacaaatagtaacatgctcaatgatagatgtagagggtttgcaaatatttagttcatcaatcttagcatgtaaaatagtattctcattcttaagattggaaatgacatcattgcaaacatttaaatctttagccttagcaattaaattttcatttctcaatttaaggctagagagagatgcattcaatntatcaatcttatgtaacanactcgcattatcatttctaagattaacaattgaatcatcacaaacatcta

SEQ ID NO: 22078 - DNA, 455 bp, Zea mays
  unsure (1)..(455): unsure at all n locations
gcttcgtgaccgtctcaacacagtcagggcctacagttataatgagttagtcaacgtggccatttctcaggaggactgtatcacagcccgtcaggcagagaagaagaggaagaccactgtggcaggaccttcagctcagccacagcgcttcaggatcgtatttgacactcagaacaagggacctcagcagcagcaaggacgttgggtgatccgaccatagcagcagcagcaagcacccagccgcacccagtttctagtgcagagcaacaatcagccacagcagcagcagtatcgtcaggccaatgacaacaattgtttcacttgtggtaacaccggacattatgctaagaattgccctanaaaccagcagaggcaggggcagaatgtcaaccagaaccaaggcaagaggcagaaggtacaagatgtaatggatgggaaacctcctaccacagtac

SEQ ID NO: 22079 - DNA, 417 bp, Zea mays
  unsure (1)..(417): unsure at all n locations
tttaggacctatgaaactcagcttataacaccctntggcacctactgctntgtgcgtatgcacgaaagcctcaagaatgtcngctccaccttttcacggctaaccaagtcagtgctcaaagaacacctgtgccgcaacgtcttcacttatgttgacgtcattattgtcataagcagaaatgaggaagatcgcatcgctgaccgcatcgaaacattcacaagaatgcgtgaagcaaggctacgcctaaatccagaaaagtccgccagggcaaaatcttgggttaccttgtgtcccatagaggcatctgttggtcacttgttctcaaatgctatgaattaagaacaaggcaacacaattgttatggattaaggaccttcgtcctccgaggcattatcttctcttggatataatgatctt

SEQ ID NO: 22080 - DNA, 357 bp, Zea mays
  unsure (1)..(357): unsure at all n locations
gcttttaagctgtataaagcctcattgtatctttggtatctaacgaacaatagcggatccacaactctctgtaatctctttgataatctcgcaggattaattgcagtnatcattccttctgacccatgcttctttattcttttccgaccaaagatggttaccattgctcccttgccaaacttttgtgattgcttaggaaccacgcccttgaccctctgagcttttgaagcccctcaagagaatatactccatcagatcttcttgaagaatccctcagtcttgcaagatgcattgcatcagcacgaaatccagcgactgtaattgcatagatgtctataacaagactatcgaaactat

SEQ ID NO: 22081 - DNA, 336 bp, Zea mays
  unsure (1)..(336): unsure at all n locations
cggaggcgtcgatggggtgtctacttggtgtaaactcctccttcttttcttccgtcgccttgaatgcgacgggttgagcttccgatgtggtgggttcgtcaagctcgttgattttcctcgagccttcgatcatgcactcaaaacttacaaaatgcccgattacttcctcgggggtcattttagtatatctagggttaccacgaattaattgaacttgagtggggttaaggaaaatgagagatcttataataaccttaaccatctcgtgggcatcccactttatgctcccgagggtgcgcacttggttcaccaaggtcttgagccggntgtacatgt

SEQ ID NO: 22082 - DNA, 447 bp, Zea mays
gaactgcagcatgcaagcttgtggtggtgtcccttcaatgacttccttcactgtcatgaatctctgttctttcggcctagctgccttcttcgtttttgagggctccttttccttctgaaaaagcttcgtcagatgtggctccagtggacttagcttgacaggcaaagattcactcattacctttaagatctcctacacgtcggtgtgagaaggtgttgcaatagtctcttcttcttcatcaatagctttctgctacgaagctatagctttctccttttcaagcatctgttttggctcacgctcagctttttcctttttaaacgtcttcatccgcttcatcgagatagtgcttctttattaaagcaccaccactctcttctcttctgccttcgcatccctgctaccctcgtagctggtactcaagctctagcaccattacgagctcac

SEQ ID NO: 22083 - DNA, 397 bp, Zea mays
atatttcttatcacacactattgatattgtcttgtttattataaaatcttcttcaccaagcatgaaaagacaggaaagtgtttttttcatccaagactcaaaaatggtacccgtttaaagtttcatgcatcgcaaagaattgcatcataacaccagtatattacatacaggattacagaatattacacaaatcatatatccaatgttttctgcaatagcacttaatcttccctaagtattatctctgcaacttcgttcaacagtcgatcgacaacctgatccatgatagcttccgccatctttttaatttcgacgccatcttttcgctgacggtccgaagatgccttactcggatctgagtgacgaccggatactataacatccttattacagatcg

SEQ ID NO: 22084 - DNA, 403 bp, Zea mays
acatgtgctaagcggcgatgccacagacagcccatgctagtcttagctattaagcatgcatctagactggcctcttcttttgcaaaatcaactaaataaagtctgccgtctaatacacccttaaaagctagtgaaccatcacttcttctaaagacagacacatttacatttgtaaatagacaagtatatcccatattgcataattgactcacagatagcagagtatatcccagagactcaactaataacacattagatatggagtgctcattagacattgcaaattttctaaaccttttaccttgccttgattcccatcaccgaatataaatgaatcttgcgaatctttattcttgacgtaagaggtgaacatcttcttctcccccgccatatggattgtgca

SEQ ID NO: 22085 - DNA, 415 bp, Zea mays
  unsure (1)..(415): unsure at all n locations
tgtgaaggttcttcatccccacatgtgctaagcggcgatgccacagccagcccatgctagtcttagcaattaagcatgcatctagaccggcctcctcttttgcaaaatcaactaaataaagtttgccgtctagtacacccttaaaagctagtgaaccatcacatcttctaaagacagacacatctacatttgtaaatagacaattatatcccattttgcataattgactaacagacaacaaattatatccaagcgactcaactaaaaacacattagaaatagagtgctcagatgaaatagcaattntacctaacccttttaccttgccttggttcccatcaccgaatattaatgaatcatgggaatcctcattnttgacgtaggaagtgaacatcttcttctcccccgtcatatg

SEQ ID NO: 22086 - DNA, 390 bp, Zea mays
agctatatcaaatggacgtgaagagtgccttcctcaatggaccaatcaaagaagaggtctatgttgagcaacctcccggctttgaagatagtgagtaccctaaccatgtttataaactctctaaggcgctttatgggctcaagcaagccccaagagcatggtatgaatgccttagagattttcttatcactaatggattcaaagtcggaaaggccgatcctacgctctttaccaaaacacttaaaaatgatttgtttgtatgccaaatttatgtcgatgatattatatttgggtctactaacgaatctacatgtgaagggtttagtaggatcatgacacataaattcgagatgtcaatgatgggggagttgaagtacttcttgggatttc

SEQ ID NO: 22087 - DNA, 189 bp, Zea mays
acgcataattataccttcgatgtcttctcgtgctcttagatcatattttacatagaaccattctgtcattcagccgctgggccatctctttcgaaaagttggcacggtgcagcttgacccagaacgagatacaaaattgttacagcccaaggttttgtgatactgttccttaccccacggtattgtctc

SEQ ID NO: 22088 - DNA, 412 bp, Zea mays
  unsure (1)..(412): unsure at all n locations
agcttaatgcccctcctaaaagattatctaattttgttaagggcaagactcccatgcctcatgataacgagggttacattttatatcctgcggttatcccgagcacaaaattaggagaattcattctaggaagtctcactctggctctaatcatgcttttatgtataagagtgaggcatctagttctaggcaatcaacccgtgctaaattgcctaagaagaaaactcctattgcatcaaatgaacctaatatttcatttaagacttttgatgcatcttatgttctaactaacaaatcaggcaaagtagttgccaaatatgttgggggcaaacacaagggctccaagacttgtgtttgggtacccaaggtgcttgtttctaatgtgaaaggacccaagaccgtntgggtacct

SEQ ID NO: 22089 - DNA, 398 bp, Zea mays
  unsure (1)..(398): unsure at all n locations
tgttgatcttctttgatcctttaatcatgcattcaaagctcaataaattcccaattacttcctcgggagtcattagtgtatatcttgggttaccacgaattaattgtacttgagtagggttaaggaaaataagtgatctcaaaataaccttaaccacctcgtggtcatcccatttcttgctctcgagggtgcgcacttggttcaccaagattttgagccggttgtacatatcttgtggctcctccccttggcgaagacgaaaacgaccgagctccccctcgatcgtttcccgcttggtgatcttggtgagttcatcaccctcgtgcgcggtcttgagaaggtcccaaatctcctttgcattcttcaacccttgcaccttgntgtattccttcttgctt

SEQ ID NO: 22090 - DNA, 441 bp, Zea mays
  unsure (1)..(441): unsure at all n locations
agcttaaggcgatgggaataataagggcaatactcatatccgactcacaggtcatctcaggtcacattgacaaaaatagcaaagcaagggacccaaagctagaaaaatatctggatgcagtccaaaggatggaagcctctctcgaaggtttttccgtaaacaacatcccgagaggagaaaacaagcacgcagatttgctagctaaatcagcggcacaaaggcttccgttaccttcggaggtattcttcgaaacaataaaagcaccttcggtcgagctcatggaaagagcggtactcacaatttcactagtgcacagtgaagaatggaggactgagattgtacctctcctctcaggcaatttgtctttcgaatgatgaagcttacaatanaagaaatggagcacgagcaataccatatgtaattatagaaggggagttatac

SEQ ID NO: 22091 - DNA, 350 bp, Zea mays
  unsure (1)..(350): unsure at all n locations
ctgaacaatagcacaagccactgaaaagcacaacaaatgccatcgttgcaggtttctatttatatgcctagcgcatcacaacttggtgggccccatttgtcattgactttctctattctagcgaagggaaggtgtattttcggaccttcggctaaaggccttcgttcacgtcgcagtctgaatntgttagaagcaaaaacaaattaatactgcgaggggctacttgtgggggccttcatcttctgaaggtcctcaaacagaactaacatgttttccagtatagtatactggcaaaggaagcttcngctntaagatgaaggtgcacatggtatgaaaaagcgtgatctgga

SEQ ID NO: 22092 - DNA, 315 bp, Zea mays
agctctccatgttgtgcttgaacattccaatcctagcccgcatctgaccgtggtgaccgtcacaagttggtgttcttctgcagtccgaatccagcatggtcaaatccttttccctttcggtcttctccctgattcctaagcacaacaagagtgcacgggtctccatggtctaaatatgatggacatgaactcaagagcgtaatcacctgatggttgagttgacaagcacgagcgccgattatgggaccagatactggtacttgcattggtatagatgccacagtagtgtggatgtcttcatcacgtcacccattc

SEQ ID NO: 22093 - DNA, 453 bp, Zea mays
  unsure (1)..(453): unsure at all n locations
ttccatgttgtgcttgaacattccaatccgagcccgcatctgaccgtggtgaccgtcacaaggtggtgttcttctgcagtccgaatccagcatgttcaaatccttttccctttcggtcttctccctgattcctaagcaaaacaagagtgcacgggtctccatggtctaaatatgatggacatgaactcaagagtgtaatcacctgatggttgagttgacgagcacgagcgcgagtaatgggaccagaaattggtacttggattggtatagatgcatcagtagtgtggatgtcttcatcagacaatctacgcacatacgccatgatccatctttctttggaacgagtaanacaggaaccgagcaagggctaagagactcacgaatgtaacccttatcaagcagcgtctgcacctggcgctgggatctcttcgtctcctctggatttgacgggac

SEQ ID NO: 22094 - DNA, 333 bp, Zea mays
agcttgcttctgacatggttcaacggcggattatagcaccataccgtgcgtatcttggcaaagtcactgtgtacggacgcttctctgcttcatatcctacctttatgctgtgagttccaagtccagatatggtcggcgtaaggagatatagagggaagaagtttgctgtgtcaactaggtccgaaccgagacaaaagtggtgtcaagtcgagtctagcgccctagggtaggtgtcatctctttccaaggtgttctagggttaatttggcgccactttgccaattgggtcgaagggttttgaaaattggattaacgtgaacatgtggaatcttt

SEQ ID NO: 22095 - DNA, 473 bp, Zea mays
  unsure (1)..(473): unsure at all n locations
tatccgcccacacaaatctcgcgattagttgagattntatagcgatcggctacgataagcgtgacagccaagtaaccataagatcaaacgggcaaaggtagccgcgcccccgcaaggcgaggggccggatatcggcggaccattcacgcgcatgtcgtgcgcctcgccctgacccggcgaagcgagcgagcgagcgcgcgtgtggctctccacactctcctctctcatccatgacttgatgagtgagtgtggcttccatatttaagctagctttactccactagaactagcaatatggtgctattggttccaccaattccctaggcatccacttgtatgggcttttgagatttttctgggattaatagaatttcttaactgggccaagcccataaatcctaacaatatcttcatcaaatatttttacactagagtctgactaatgccttctaaataaaagaatagcagggtct

SEQ ID NO: 22096 - DNA, 360 bp, Zea mays
aatcacaggagcctctgtggactttcgtatgcaaaggtggagcacccacagttctagtgcagaccatcggttttagccttcatctgataatggagatcatgcacccgacaaaacccttcagcattagcactcttcccttggcttcgaagagcccaaaatgacacactaaagtctaactatgggattgggggtcacctgatgaacagaaaattcaaaaatcttcagaacctcaccgatcatcttgtatagggggaaccaaagtcctaccctgaaaaacttttgaagattacaacttcgtcatcttttagctcttaaatcacctcttttttagccgaacgaactagatcatcatcattctct

SEQ ID NO: 22097 - DNA, 448 bp, Zea mays
  unsure (1)..(448): unsure at all n locations
tatagaacacctaagcttgtncaccatgtcgctgctagccaagntgntgcagctaccttcatcaatgatcaaacgacatgaacgctccttaatgacacactttgnttgaaacaacgtatgtcactgattctgctcttgcttctccatttgtgcactaagcacacgctgtacaatgaggctctcataatgctctgcatcatctgcaccaatctgttcttcgggtggttccttagtgcctgcatcatcagccgcaagccaagcaagtgtagcttcatccaaatcactagcagaggaatacccaccatcgtcttttaccaccaaaacacgctgattaggacaatcacgctgcacgtgtccatagcccttgcatcgataacacagaacatctcttgttctacccgtggaggctactgaagaggcactacctcgctggttctgggcagatttg

SEQ ID NO: 22098 - DNA, 447 bp, Zea mays
agcttcatgcaactgctgccaaaaatgagaggtgaactgggtgcctatatctgatactatcttgtttggtacgccatgcaagcacacaatccgggacatgtatagttcggccaacactgcactattgtaggtggtcttgactagtatgaaatgggccgcctttgttaaacggtccactactacccagatggagtcatacctggtatgagtgcgaggcaaaccgactataaagtccatcctaatctcatcccatttccactgagggatctgcaacggttgcaacaaacctgtaggtctctgatgttctgctttaatcctctgacaactgtcacatacagccacatactctgctatctcccttttcataccgtaccaccaaaatcgtttcttcaggtcttggtacatcttctcgctacgaggatgtatagaatatgttgtctcatgagc

SEQ ID NO: 22099 - DNA, 448 bp, Zea mays
  unsure (1)..(448): unsure at all n locations
tggaaatagtgccgaagcttcctggaggccatcaagacagcatacagtatcttctncaactctgtataatttgtctttgataaactaaggacctcggaaacaaaatatattggggcctgccttttgacttgaccatcaagcttctcctgaacaaacgctgcacttaccgctgagtgcgaagctgccacatataacaataaaggagccccttgcattggtggagtcaatggtggtagatctatcaaatactggttcaggtcttcgaaagccttctgctggattggccccattgaaagacttcggccgacttcagcacttcgaagagtggtaaatttctctctggcgatctggatatgaatctatngagagatngccaaccttctgtcaatctttgagcccccttctttgtagntggtggctccatccgaagtatatgcttcaatttact

SEQ ID NO: 22100 - DNA, 384 bp, Zea mays
  unsure (1)..(384): unsure at all n locations
agcttgatggtcaagtcaaaaggcaggccccaatatatnttgtctccgaggtccttagtttatcaaagaaaaattatacagagttggagaagatactgtatgctgtcttgatggcctccaggaagcttcggcactatttccaagcttacaacataattgttccttcatcacaacctctgaaggatattatgaggaaccgagaagctactggaaggattggaaaatgggctgcagagctcaatgaattttgtattgaatatgttcatagatcttcgattcagtcacaggcactggcagactttattgctgattggacgccaggggctcaggaggaggaaacgaataaagacaacgaagcctggacagtgttttgtgatgtatctt

SEQ ID NO: 22101 - DNA, 259 bp, Zea mays
  unsure (1)..(259): unsure at all n locations
ggagagtatatatgtgtcatggttttatacgtttctttctctagttaattgggatggagnattgtgttgagtgaatatcctaaatggttggcggctttttagtggtgtaatggtgtgcgctcgacgatatgtaggtagcttacgctagtgggtgtgggtgcttgtgatgtcttcgtacttaagggttaattcgctagcgtgacttaaaagatcttgggctattccattatattcatacatatgcatcttgcacctcata

SEQ ID NO: 22102 - DNA, 379 bp, Zea mays
agcttgtgagcaatacaagttcagaatggaatagttgcttctgctgatcagccgaagcccatgctcttatgtgaggacatagcagagcagaaggtgctattgggatctcaactgtccgaagaataggagaaaaccttgataaggtttttgttcaacaataaagatgtttttgcttggtcagctaatgatctttgcggagttaacagggatgttattgagcactcgctcaatgttgatccatccttcagacccagaaagcagaggcttctgaagatgtctgatgacaaggccgaaggtgctcggaatgaagtgaaaagactcctcagtgccagagttatccgagaggtaaaatacgcagaatggttggctaacactgtta

SEQ ID NO: 22103 - DNA, 413 bp, Zea mays
  unsure (1)..(413): unsure at all n locations
tgccgtgcggagcgccgtcgtggaccgtggtctgcaaaggaatagaagtctaatggccttaatgtaaaccggcagcgactcactgaaacaatagaagaacctgtcttcagatagataaaaccccgaggccctttttttgcaagcctncatggcgcgggcgcgcgcgcgtgcgctttcttctttgcacgggccgcttgggccgaaaccagcccaatactattcagccttttcctttttctttttcagcagagcttttgaaatctgctaaaaattgtagaaaaatcctaaaattgtgaaaccaattttnctagacttatcattnntcatagtatntaataaaaatagtttcatgagttttaggttaaataacgaatttaaagcatttaaatagttaaagcttagttctgattttt

SEQ ID NO: 22104 - DNA, 429 bp, Zea mays
  unsure (1)..(429): unsure at all n locations
agcttcggtttaaggacgcattttcgccatttccgaagaaaagatgtctcaagacaaanaaagttgctgctgagacgaagctgagcgaagaggagaagctccttgaggagaagactgctggatttgttgagtcgatagcaaaaacaaaaacggagaagattactaaagagatactagaaggcttgtctgaagatactaatgatagcgacagctatgatgtcgaaagtggaggcgaagactctaaagatcggccgtggtgaccaagtcatgcagtcttgggaaatcaactatcaaacagagtcatcttgataatatgagaggaaggtatnttcgagatatgtctattgtgagggctgacgtagatagagtcgttcctgcttccgaagaaaacgaagttgtgatctttcgaagcttcttcaaagctggact

SEQ ID NO: 22105 - DNA, 373 bp, Zea mays
  unsure (1)..(373): unsure at all n locations
tatgaagattttcattccacatgggctagtcggcgatgccatagccaacccatattagtcttagcaactaagcaagtgtcgagttcagctctatcaaaatctaccaagtatagctgaccctctagcactcccttaaacgctattgaatcatcacttcttctaaagacagtaacaccaacatcaggaaattagacagttgtaagcccatttgacataaactgggataccgaaagcaattattatcttaagaatctaccagaaaaacattagaaatggaatgggcaggggatatatgcaatttacccaaacctttgaccaaaccttggtttccatccccgaatgtaatcgctcggtggggatctttgtntttctc

SEQ ID NO: 22106 - DNA, 418 bp, Zea mays
agcttgttattactgttagatgccaactaatattacccttatgacagaacccacccctagttaagagttgtagtgcaaagtggcccatttacacaacttttgttatttttgtctaaagcataaccttttgatgaggacatcactatgagtacgactacaccagcagcacattcacatcaagcgccactttcttcattagcagggccaatcactcgggcccgtgccagagatcttaactttgtcatgctactgaagaatgagggcctagaagaatagacgaccagcccaactgcggcccatagtggacgacctatggttggccgcccctaggggctgtgcccctctctatttatccaggagttgcgcctcctttggtttcgagttttgttttaggttagctttagctactctcgaacac

SEQ ID NO: 22107 - DNA, 427 bp, Zea mays
  unsure (1)..(427): unsure at all n locations
tctgtcaaaatatccctcgaggactaaatgagcacgccgatttgctggctgagtcagcagcacaggggctgcctttaccttcggatgtgttcttcgaaacaataaaagcaccttcggtggaacttcttgaaagagcagtccttaacatatctcctgtttttagcgaagattggagaaccgagatcatctcttatcttcagggtaaattcctttcagatgacgaagcttataacaagaggatagaggcaagagctcgtccatatgtcataatagaaggggagctgtacaaacatggagtttgtgctccgctgctcanatgtttatccagaaccgaaggtatagaattaatgaaagaaatacatgcaggcctgtgtggatctcacatcggatctagngccgtgcttggaaaattttctgtcaagggttt

SEQ ID NO: 22108 - DNA, 374 bp, Zea mays
aatctcctttttgtcatccgtgacatcgcgtctaaggagttttaattaaattattttctaaccgagtgttcggttaacggacggaattcgtctaaaatcaactgaatcagatgctgattgaaataacgaagccgaaatccatttaattcgttccaattacatctcgccccgatccaaaactttggataaataacgggtgtaaatgcatctgatttcgaagtattccccaaattagatcgtgtcccatttatcgctatcaatctcatttgattcgacccttggttcatcgctaaattggaatcccgaaaatatcctatcgttctaatcttcagtcatccaggatattcctcttctccatcgcgtgcgtcgtcttc

SEQ ID NO: 22109 - DNA, 479 bp, Zea mays
tgacaatgaggagatggcgctcgtcatcaagagcttccgccatatcctaaagcaaaggagggggaaggactacaagtcccgctccaagaaggtttgctacaagtgtggtaagcccggtcattttattgctaaatgtcctatatctagtgacagtgaccgaggcgacgacaagaaggggagaagaaaggagaagaaaagatactacaagaagaagggcggcgatgcccatgtttgtcgggaatgggattccgacgaaagctcaagcgactcctccgacgacgaggacgccgccaacatcgccgtcaccaagggactcctcttccccaacgtcggccacaagtgcctcatggcaaaggacgggcaaaagaagaaggtaaatccaactcctcactaaatatgaatcttctagtgatgataatgctagtgatgaggaggataatttgcgttccctttttgccaacctaacatagctcaaaaag

SEQ ID NO: 22110 - DNA, 438 bp, Zea mays
  unsure (1)..(438): unsure at all n locations
agcttcaactcttcgaaccatatccagatatttttcaagcttcggatccttagccttgcaacttttgtcaatatggcccgaaacaacctgngaatcaggtataagtatggcccttctgattcccattgcttttagcttccgaagacctagaatcaatgcttcgtactcagcaatgttatttgtgcagttaaaatcaagctttgccgcataacaagttttgactttggaaggtgataccaacacagcagccgctcctgctccgaaggttccccaagatccatcacaaaacactgtccaagcttcggtgtctttattcgtttcgtcctcctgagcccctggcgtccaatcagcaataaagtctgccagcgcctgtgactgaatcgaagatctatgaacatattcaatacnaaattcattgagctctgcacgccattttca

SEQ ID NO: 22111 - DNA, 469 bp, Zea mays
  unsure (1)..(469): unsure at all n locations
tgattatgagttagcacgaattagccaagtggctagagaggtgaacttgcacaacacgataaccacggagagatcaacacagagatggcacagtggtttatcccgtggttcggccaagtccaacacttgcctactccacgttgtggcgtcccaacggacgagggttgcaatcaacccctttcaagcggtccaaagacccacttgaataccacggtgttttgctttcactttactatatcccgcttgcgaggaatctccacaacttggagcctctcgcccttacactttgatgttcacaaagaagcacggagtaagggagggatgagcaacgcacacaagacacgaaatcagagtacccacacgcacaccagtcacaacaagagctcacaacacaacccgggtgagtcacaactcanatggagctctagttgctatcacaaagaatcaaatgcgcgaaatcgaagtcttg

SEQ ID NO: 22112 - DNA, 347 bp, Zea mays
agcttccttacttgtttggaggaagacattgtctgcccggatgtactcatccatttatgtaagcagcttatgcagaaatgagggggatggctggtgaaatattgggccgtacgtactggccgaagacccttgatcatggcctcaatgacgcttgtgctctcagtcgcaagaaccttcagacatactcctgaaggtattcctcatggtcttgtgcgcactggaacaaggcctgagctgtgactggcttcatctgaaaggcttgaaaacaggtaaccagcatgtgcttgagcttctaccatgacgtgagtgttcctggacaaagagaggagtaccatgattgggccatg

SEQ ID NO: 22113 - DNA, 393 bp, Zea mays
gtcttttctataactattcttgacaatcattgatcaagctggctacatggtccgctctgccacgtcctcgcgtgagtgcttgtcccacgtgtcagccaccacggcttcggtctctcggtcaagtcacagcgctcggtcttcaccactcccggtccatcggcacgaactcacatgactttcacattcgtggtcgaccatcatccctatgctccacacttgcacgccacaaagtgaaagggttctaagtattttggtgatttagtgtccaatacaagtgcctaagtataaaatggtgaacaaagtacaaatcaaggataaatgtatgtttctcagacttagtacattggtttaaagactaatgtatcgtgtataagtgctggaaacaggaaaaat

SEQ ID NO: 22114 - DNA, 419 bp, Zea mays
  unsure (1)..(419): unsure at all n locations
agcttaaaggatactattcaactaaagtaagaagaagttgatcagaggtcaaggtatgaaaacttcctccccttcagntgttttagtattctatccttagtaggatgttccatagtatacgttaatttccttgcaatataaaatgtttaatagtgcatataactttgacatcaactatatgtgtgcactaatttaaaggaatttaatctatctttctgggtttcaagaatgatgattcattctccatccacatataaggattatcatttatgaaaccctcccttgtgtttctaatgctctcttttctaagtgtttaaataaggtccttccaagtgctttcaagatggattcaaaatccacggatataagagtcttggttgttcaatcattgaggttcaatgggtctcatantcatgttg

SEQ ID NO: 22115 - DNA, 341 bp, Zea mays
  unsure (1)..(341): unsure at all n locations
tcanactcacacacgacatgggataaggattgggattgcgatgcggacctatgggaagtcgcggccagtatggcccgcgccgatcggtgcaagcagctccatccactctcgagatggcaacggcgtggagtatacgcgccatgccagtgggcggctgtgcacggcggcgtatcaaggtgtgggtcgctggtgctacgaccatgacatataaccacacatggaggcatgcagggggcgttgggctcggccaggaaagctgctccgagaaccagccatggcgacatccgcacgaaagagaaataaatgcaggaataaacagagtcagaagaagggagctcact

SEQ ID NO: 22116 - DNA, 365 bp, Zea mays
  unsure (1)..(365): unsure at all n locations
agcttgcgagaatcacctatgtcttctatagagatttnttagtatgtcaatntaatgaattcataccataatgttcatatagcttatcgaatcttatttactatatatgtcatggggacatcaactacttgagatctaaatctcccaagaatgattgaatggtttggccatcttatgtatcgagaaaaaaaatattagataagattgatatcaacataatcattgatgaccactcaaaaaaatgttagaagaaacttttgaggcattgtaaaatatatttggtataatattttgatattacaataattgttatctatataatgtaagaatatatatatgtatactgaagaatgttatacttatat

SEQ ID NO: 22117 - DNA, 361 bp, Zea mays
  unsure (1)..(361): unsure at all n locations
agcttgtgaataaagagttctccttgtatgttttgacctctattcattataacgtatcaacatacaccaatgaagtgattaacaagataatgacaaccaaataatatgtgcatcatgttgggttttaattgtctgtgcatctaataatagtaataataatattaatagaaatacagtaatatctaattcacaatttagaatctggagaaatagaatggaagattggaggatggctaataatcataacaggaaataagtaataattacttacaaaatgatataagattattcataagaataatttatctgatacttagnagtatgaagtccaaacaattaattctaatcatttgaactaatg

SEQ ID NO: 22118 - DNA, 471 bp, Zea mays
gacacttgaaactcagcttggctcatcatgtacgaagcgcctttatatgtctaactcccttcagcccttctggcagcttcttgacttccatggatagcaatgggcccttgctccgacagtatcttcatgcataagtatgctggatgaagtatggcttcgaatgcattaaacgtccctcgaccaatgattgcatcgtatgggtaatccatgtgaacaatgtcaaagataacctgctcagaccttgtgttgtggacgtaaccgaaggtaactgacattgtgaatttgccaagtgccacaatctgtcttcctccgaagccacaaagatggtgtgtagcatcatgaatcctgtcctctgggtcttgcatctatctaaaagcctttgcaaatatgatgtccgctgcactgcctatgtcaaccagaacactgtggaccagagatcccttgatgacacaagatataaccatagcatcg

SEQ ID NO: 22119 - DNA, 374 bp, Zea mays
  unsure (1)..(374): unsure at all n locations
gttggtcctggtctgagccccttgatcatggcctcaatgacaatctcattatgcactatatgcgcttgggctctcagtttcaggaaccttcgaacatacgcctggaggtactcttcctgatcctatgtgcactggaacagagcttgagcagtgactggcttcngttgaaagccctagaagctagtgaccagtatgtcctttagcttttgccaagacgtaattgtctctggccaaagagaagagtaccaagtttgcgctacacttttgactgccatgacgaaggatttcgccatgactgcagtattgcccccatatgaagatatggntgcttcatagctcatcangaattgcttcgggtctgaatgcccatcata

SEQ ID NO: 22120 - DNA, 446 bp, Zea mays
  unsure (1)..(446): unsure at all n locations
tgtctcggcggctcggccgagttcaccggagttggaggacaaattctcggtcacccacacgacaccacgcccggtcacgccctcgaaagtgttctacgggtgatgccgaactctttnttaccactcgccgatgtcccacagcgacgaggctcgactctcaacaatggcagctccctccctgtnttctgatggcgagcgcaatcagacttcagcacaaccgggcggaggggtgaggtgaggacttntgtttatgcatcggacagaaggggactggcgcgatgtcgttggattacgcccatgaattccgcagcacaacgagcgcctacatcttcgctggatgccacacagcggacggtgaagctgttacgataggtcatagagccgacagatgggccctacatgatagtggcgatactcacacgtgcacgcggatgcaactgactatc

SEQ ID NO: 22121 - DNA, 477 bp, Zea mays
  unsure (1)..(477): unsure at all n locations
ttaatgacactataagagcacggtggcctcaattctcatcagaatatgtccggtggtgttaagatcaattgatatcgctcacatattcccacaaatgtaaatagatttacagnttagttactcacagcacatgttggtgcgcttgcagaaatcaactaaactacatgtttcctataccctactgagtagcaatgaaacttgttaagcaaaacatgacagagaatacatgcgctatactcctgtatatgcaatgaagcacgtgtctagaccttgtgaacctgaaactccatttttttctagtgcttgggtttagtagaacagatgactggacttggagtcaatataaggcaaaccaattcatggattcatcaacctctctctgcatgtacacaatataacaaaatctagcgcgtctgcaaatcttagcataattcttacattctgaccgactgacaactcccgtacatataaaacact

SEQ ID NO: 22122 - DNA, 392 bp, Zea mays
  unsure (1)..(392): unsure at all n locations
gaaataaatgtaagattatgtaattcgcttccgcatttctttatctccgatgttctgtaatgtctacaagatgggtgagacgttcctggtgaggtaaggaaagataccgaacttgtcaagtagtttatgggcacctacagggttgtctgatgtccgttggacgaggacaactgcaggtgggcctaattacttgggaggttccgtcacagaatctacttgtgaagagtttagtaggatcatgacacaaaaattcgagatgtctatgatgggggagttgaagtacttcttatgatttcaagtgaagcaactccaagagggcaccttcattatccaaacaaagtatattcaagacattctanacaaggttgggatgaaggatgccaagcccatca

SEQ ID NO: 22123 - DNA, 441 bp, Zea mays
  unsure (1)..(441): unsure at all n locations
agcttcacaaatgtaaacaatgtataaacgacaagaatggtgttggtcacaatgtgaccaatgttgatcccataacacctaatgatggcccatgaaaaacaagaaagatggaagtggaccgtaacaataaggtgggcctagaagatcatgtacccgattttatcttcccttgggagttgcacctggtaaactgtgcgccaaacatggcctaacaaaggtggaaaagcccacccaaggatttctcataccttgttgaggccctcttcatttagcacttgggccttcagatggtgtttgacgatcgatgctttctccatcgtcgagcatggggtcgacaaggacaaatcagactataggagggaggatgaagaagagcagtgatggactaatggacaagatggcaatgaactcacatataagataaagccncatctggttcat

SEQ ID NO: 22124 - DNA, 415 bp, Zea mays
  unsure (1)..(415): unsure at all n locations
cacggtctcaccatgaagctatctgggggcttgaatcgaacgganggggactggagaggggttggccacggcggtggctcttggtcggcactggcgggctgcggggaggtcgccggaggcaacggctggctcgggcgagtccggcgaggtacggatgggataacggggaaggcaaccgatcgcttgggcgtggtttatatgcgcggacgtggccggtgcgccggctcaaccgtttggcgcgacgcgggcacgcggngcgcgcgcgcgggcgtgctctggcgagctcatagcgcgtcgaacacgtggcgcgttgcttctgcccgtgttcttcgctctgctgagcggccaggcgtacgaatctcgccctaccgcctatgggagatctcttccctgcacctatggctacctatgtcat

SEQ ID NO: 22125 - DNA, 394 bp, Zea mays
  unsure (1)..(394): unsure at all n locations
agcttcagtcttagtggtagtctcgctcttagttagtcttagttagacagggtggtttgctatatcctgtgcatttatgtttgtcatgatgaactatgtttggtttggatctttgtaatgattgttaccagagtgtgggtaccccctgcattttggtttacatactatgttaataaagntagttatatagttgggaaaccttttattccactttcctctntatctaagaagctgtgtggtctgtgttggagatcagtgaagatgctcatctgttcagtgcttgtgaagaattctattctcttttcttatgctgcaagaattgccagatcagttctgatgtgtggtcgcattctgtagatgtcagagaacangcgtagaggaagaaggtgtgctc

SEQ ID NO: 22126 - DNA, 329 bp, Zea mays
  unsure (1)..(329): unsure at all n locations
agcttggtgccaatggagaagcagaaatccttgaagtcttggctgtcaaattacttgccattgtcaactgtgagttcggacgggactccgaagcggcaaacaatgttttgccagaagaatttctgggcagtcttcgatgttattgtggatacaaccctcgcctcgattcatttggtaaaatattcgacagcgatgaaggtgaacttgaggttcccctgngccgtgggtaggggcccgacgatgtccaggccccaacgctgaagaggccatgtgtgggcgattaacttcgtgaattgcgaagggcttcccgatcgtggagataatttctg

SEQ ID NO: 22127 - DNA, 450 bp, Zea mays
agcttcaaccaggatcagcacaatctcgggctatgaagttcctaagctcctaacagtgaattattgcaggatatttctgcttttaaaattggttattggttgaactatgtttggttgttttatcaataattggatgctagatatatacaagcatgcctgaatagtgttttttagcaaataatttaggacatgtagaagcctcgagcaatgtctctgcccggtgcccagatagcaaaatgattgtggtgtttactgagacaccatatgccagtaaaaaaatagctggtgcatgaagatttgcaccaccgcaacaggttggtatgtcgcacaaccacagccacacaggcatacaatcaagactatggttgttccaattataatcaagataaagtgaaaatgcaacatgttccttatgcaactgtattgcccattatcccaaaatatgtcacg

SEQ ID NO: 22128 - DNA, 472 bp, Zea mays
  unsure (1)..(472): unsure at all n locations
agcttaacaagtgcngaaaagactacaccaaactgtccgcgcaaagaccgactacatgcgcaccagaacaacataacaaatacaccagaccaagtacgcaacgccttcgtgagcatagccaaatgtgcgaaggcacacaacttcatcatacaagctattacatatgtgcaagcgagggcatcacactttacatcggctcaaccttcggaataattcccatctccctatagttaaatagcattatcctcagctcctcacccgcaaaaagacttcgcagctccccctcacccgcactcacagcggccggcaaggacaacagttctcgcctgccagccatactcacacgaagccgaccgccgtccgcctcactcactctacgcttcgcaaccgcccttcgccgtctacacccagcgctcggaccaggcacaacttcagcacccgcagcatgcggcgaagcnnctcgcgctgcaca

SEQ ID NO: 22129 - DNA, 389 bp, Zea mays
  unsure (1)..(389): unsure at all n locations
agcttatccttcaagaactcctgagcaagggcacctaccatgccaaagacaccaccaccaccactgccttgctcacctgactggccctggtggaactttccgagcatgaccttcatgaacttcttaatctttgggctggcatcatcaccaaagatgttgaacagcgtcatccggatagaacccacatcaatgtcatcctttccagtttgttccttgagcatctctatcanggtcgagagtggcanggagcggttnttggtgcggccatttccaattggctgtgcgtaaccgtcgtnctggtcatcatccccatggcgacgactatgatggatgtgaatcccctcagactcgaacacatcgcggacagtctctttgagaaatgaccggaa

SEQ ID NO: 22130 - DNA, 309 bp, Zea mays
  unsure (1)..(309): unsure at all n locations
ccgcgaccaccgacgaccggtcacgccgcggtggagttcttatcgccggcgaggtccaagaccttatcctctgcgcgatattttcagatgatggtaaacagtattctgaattcaaaaagagctagactgacagagcaagttcatgccacattttctctgattntccaatgacaacacatcccgtgacctatnagcaaagtgtatagctatataccatctacaattcaactatanggatgaaacttatttgagcactggatcaaagtctaattcacattcaaagtcgaccctgttacactgaanagctga

SEQ ID NO: 22131 - DNA, 334 bp, Zea mays
  unsure (1)..(334): unsure at all n locations
tctaactagttgtgcgcactggataatttagctcatgccgttatgggtgtcttcccattcctagcagactattaatgtctattatgttgtcttatcatgatatctattcatactttgatgcttccccgtttatgccattttcaaaggagatgctcgtgaaattntatatacgaatggtagatgtgtaagttatgcgcactctggggtgtttgtggatcccggngtgttacaggtggtatcacacgatacgctttatattcttggcaatattgagataaatttgacacacttgcttatataggaagggtatgggtacaaatatggttgatatata

SEQ ID NO: 22132 - DNA, 366 bp, Zea mays
  unsure (1)..(366): unsure at all n locations
tcttcattccaacatgtgctagtcggcgatgccatagccagcccatgttagtcttagcaattaagcaagtgtcgagttcagctctatcaaaatctaccaagtatagctgaccctctaacactcccttaaatgctactgaatcatcacttcttctaaagacagtaacacctatantccgtaaaagacagttgtagcccattntgcataattgagaaacggaaagcaaattgtaatctaaagagtctacaagaaaaacatttgaaatggaatggtcaagagatatagcaattttacccaatcctttgaccaaaccttggtttccatccccgaatgtgatcgctctttggggatcttggnntttctcat

SEQ ID NO: 22133 - DNA, 358 bp, Zea mays
  unsure (1)..(358): unsure at all n locations
agctngcctatcacttcctcgggagtcattagtttatatctaagatccccatgaattaattgcacttgagtaggattgcaaaacactagggatcttataataaccttgaccatttcatggtcattgttgggggccttctttgtgacaccccagtgtcacctatggtttctcttaaaaagccaaaccaagaaccattattttatgtgaaccaaagtaagcatgagcatcaaaataacttaagtaagatagaattcaccaagtatatgcttaatagtgtcatgatcaagacaattgagtctcttaaaggataagaatgtgcaaccctaattaagaaccctaagtgaaccccatgaacaaa

SEQ ID NO: 22134 - DNA, 490 bp, Zea mays
  unsure (1)..(490): unsure at all n locations
agcttttagcttaccggcatagttgcaaggcaaaatatgatagacagctgacgatagtgtttaccttatcaagcttccctctgactagctntacagtagcattcatcgactcggatggaaaataatcctacaaacaacacgaacttttattcatatgtagttaaagtagcattcaactcaaggagaggaaaccaggaccaacaagaaaagaaaaggtgcaaagtcactagagttgtaagctacattaaacagggttgcgtaacagactagcacagcaggatctcgacagaagttagacattntgacccttaccagctactgtgcttaagcgatgtaatgcaaagatgcttgtgtttctagtatcaaatatctcaagtgaccaaagttggctcgttggcatctntagtaaccttataattaccaggaaattatntcaaggtaattagaattaacacacttnttgcacataccttgtctgatgacacatgac

SEQ ID NO: 22135 - DNA, 466 bp, Zea mays
  unsure (1)..(466): unsure at all n locations
ggacgacggtgtcgtactccgttaaactggttngaaccaggtgaaagaaattntttcaggcctgatatggtaaaggaaacagaagagaaagttcaatgaataattcataatttgaaggaagtccaatcccgacagaagagttacgcagacaaacgccggatacccttgtactttctagttggagattatgtctacctaanagtttcaccaatgaagggtgtatcacgtttcggggtaaaagggaagcttgcaccccgttacattggtccttttcctgttcttgaacaatgtggaccagtagcataccgacttcagttacccgaaacattgtctgctgtgcataatgtgttccacgtgtctcaattgaagatgtgtcttcggattcccgatcgaaccattgaagtaacagatgttgccttataaccagacttgacatatgcagaacatcctattcgagtcttggatc

SEQ ID NO: 22136 - DNA, 397 bp, Zea mays
  unsure (1)..(397): unsure at all n locations
agcttgagtcgtctattcaactttttattattgattctcannagggtgataagggtatgaagcatatccacgagaaaatggaagccggctaagctacttgttttaagaatgatgaccaaggagtgttatggtttaacgaccgcatagtggtgcctaatgatgttgaactccgcaacaaatcttggatgatgcccatcttagtcggtattctattcatcctngaaatactaaaatgtaccaagatttaatacaacattattggtgaactaagatgaagacagaaatcgctcgctatgtggcaaaatgtgaacgttgtagacgagtcaaggcggtgcatatgataactgctggacctctgcagtcattgcctatcccaacatggaagtgagaggacata

SEQ ID NO: 22137 - DNA, 488 bp, Zea mays
  unsure (1)..(488): unsure at all n locations
gctttccttntctttntttcttttttctttnntcttttatatttcaaattagaaattgattcaagtttacctcaaattttgaaaatgctcagaacatgtttntgcataaatatttcatttattctcttttttctgtatttggttattcatgaatattntaaactacacagttaatgaaagaaacatcccactttgtttaaaacacatgagaaatcttcttgtattatatatctaaatcatatgttttaaagaacacaattaaataaattttatactaagggatagttntatctcaacctatccaaagaatatttccaattattntatcaaaaagaaaagtctaacacataattcttctatatctaatccaaaccaagtattaatttaattttaagtatctnttattttagtcttttgtttgaacaatatattcattntgngaccattttaattgtaaaagtataaattccannaatagaatttgggtg

SEQ ID NO: 22138 - DNA, 453 bp, Zea mays
  unsure (1)..(453): unsure at all n locations
agcttctccgccagtctgaacagttcgaacgagataagctagagcttaatgcanaacttgaagccgaagctcaacaaaattcagatttgagaaaactactgacaagtcttcaagaataatgcttggaatttagcaacaactgcattcaacgattaagaaagattttttactcagttggagccagcagtgaataattcaccccctcagctgaagatctaccgaanaccttcgaacatattgagggggagattgacgagctcgacgaagtcatagctgggcatggtgacttctgtgcctgggtggcttctcgaggcactgctgcggctttcctgaatgctggctgtgatcatgggaggattgcaatangccaaattcactttatcaccatcaatcctggatgacatccctgatctcgcccgaagtatctcgaatcgattttgtaaaatgatatgg

SEQ ID NO: 22139 - DNA, 391 bp, Zea mays
  unsure (1)..(391): unsure at all n locations
agcttctatagggagaacacgtgatanggttgactaacgtacaattcgaanaagatagaccttgtgcagcttgtcaagcatgtaaacaggtgggaggagcgcatcacagcaagaatgtgatgaccacttcaagacccttggagctgctgcatatggacctcttcggacccgtcgcctatctgagcatagggggaagtaagtatggtctagttattggtgatgacttttcccgcttcacttgggtgttctttntgcaggataagtctgaaacccaagggaccctcaagcgcttcctaaggagagctcaaaatgagtttgagctcaaggtgaagaagataaggagcgacaacgggtccgagttcaagaaccttcaagtggaggagttccttga

SEQ ID NO: 22140 - DNA, 329 bp, Zea mays
  unsure (1)..(329): unsure at all n locations
agctngacgaggtgaagaggggcattcaagatgagcaacttctgttgcagctgctggaatggatcagggacgtcaaggagctggaagagaagcccatatccgtgctcttcgagctgctggtgctgcaacagcaagctgcccggcgagaccaagcgaggggcaaagccatgcgcaaactggcagcatggcacgcccacatcctccggataacagcagagagtctcaagaagtacatagaggcagagcatctgccgcaacaggaggcggagaagaagacgggcaagaagtttgatttctatgatgcaagatatggatatgtcatacacaag

SEQ ID NO: 22141 - DNA, 392 bp, Zea mays
agcttatcataagagaatagcggcaagagcccgtccatatgtaataatagaaggggagttatacaagcatggagtctgttctccattactcaaatgtctatccagaactgaaggtatagagctgatgaaagaaatacatgcaggcctgtgtggatctcacatcggatccagacctctattgggtaaagtttttcgtcaaggattctattggccgaaggcagcttcagatgcagtagaattagtccaaaaatgtgaaggttgtcaaaaatgtgcaagagatcaaaaacaaccttcgtctctaactcaattaatatagcccacttggccattgcaaagatggggccttgatttgctatgcccactttcaccagcacaagggatattaaaatatg

SEQ ID NO: 22142 - DNA, 426 bp, Zea mays
  unsure (1)..(426): unsure at all n locations
ctcgttcgatgtcctttcgtacggcctcctatgctttagcaaaatatttcttcttattaccttgttggtgtgatatggtctttacaaatgtagtccaagatgggtatataccatctacaagataatatcccattttgtaatcatgatcgttgatagtataattcacttctggagcctgaccttcagctaactttgcaaaaagcagagaccattggtaaacgttgatatcattgagatcggtaagccaaaaaaggcatgccaaatccagagatctttataagcaaccgcttctaatataattgtaggttaacgaacatgacctgaaaacataccatacgaacataccaaatctagagttcttgcacttncaatgcatgtaatctatggagcccaacatgccatgataaacactatcctctncaatat

SEQ ID NO: 22143 - DNA, 486 bp, Zea mays
  unsure (1)..(486): unsure at all n locations
gcttaaagccatggtaagtagcatatgctaataatatgcgaattgactcaagcctagctacgggtgcataggtttcaccgaaatccaaaccttcgacttgggagtatcctttggccacaagtcgggctttgtttcttgtcaccacaccatgctcatcttgcttgttgcggaagacccatttggttcctacaacattntggttaggacgtggaactaaatgccacacctcatttctagtgaagttgttgagctcctcttgcattgccactacccaatccgaatcttggagtgcttcctctaccctgtgtggctcaatagaggaaacaaaagagtaatgctcacaaaaatgtgcaatacaagatctagtagttacccncttatgaatgtcgccgaggatggtgtcgacggggtgaatctcgtggattgctgggtggactctngggtgtggcggcttggntgtcatactcttgtcttatcatttgatct

SEQ ID NO: 22144 - DNA, 329 bp, Zea mays
agctcactatggtgcatacacgcatggactgtaatttttacattttttgttcttggtgcggtctaaataaggctacatcaattttctaatcacaatagcgaaagaacagacatgctcaactttctaaaacaagtcgggttccacttcagaccacaatgtggtttttggatgatatatatcattactctaactaatattccaagcgactgctatcggaactctaatctaattgcatgactacctgaacagattcacatcattttagcggggtattaagataaaaaaaaaaagtcattgtaaaaacaattattacttacagcaatgataac

SEQ ID NO: 22145 - DNA, 469 bp, Zea mays
  unsure (1)..(469): unsure at all n locations
tgcaagcttgattgatcagatgtcatgtgaaaggaggctccagggtcaagatcccaagattatgacaaagcaccagcataagaaatggcagcaacatcaactaagcctcgagaaggtggtccggtaccatgaccacgagtagcacgacgtgcacgaaaatcatccagcttttctggaaacttagcaaagcagttctcagagtgtgagtggtctttctgcaatgctcacaaggcaaataagatatactcttgggcttctgagtggcaaccaacacactgtgagaacccacaccagtaatagaagacatggacttaagacgagtctcttcagctagcaatttatacaacgcctgagccatggtgagagtgtcagaactatgatgcaatcttgtacgaagggaatcaaattcagctcgaactcccataacanatatgtanggtaagaacttttcaatgaactatgagctgga

SEQ ID NO: 22146 - DNA, 312 bp, Zea mays
agagaatagcggcaagagcccgtccatatgtaataatataaggggagttatacaagcatggagtctgttctccattactcaaatgtttatccagaactgaatgtatagagctgatgaaagaaatacatgcacgcctgtgtggatctcacatcggatctaggcctttgttgggtaaaagttttcgtcaaggattctattggccgaaggcagcttcggatgcagcagaattagtccaaaaatgcgaaggttgtcaaaaatgtgcaagagattaaaaacaaccttcatctctaactcaattaatacaacccacct

SEQ ID NO: 22147 - DNA, 460 bp, Zea mays
  unsure (1)..(460): unsure at all n locations
agcttataccgagtacaacaatgtctctaaattacctcaccaaaggcaagcataagtacaatcgaggcactatgaatgaccaaacccattgcatatgcctgttttgttcaactcttttgaacagcttttctgagaatctgacagttttttctaaacatcttttctggtacgaagagaatctgttgtgaagagaatctgaatatagtgaagattacgtgcggaagaagataaaatagtccacagactttagtatgtagaaagtgacggttntctgctatcacagtgaagttagaggcatcttaccgaaatatccaacgactattgtccaatctgttctttttatattgattccatccaacaatttctcagttcatttttttagacgcgtccatctcatacaatattcgcaataacaaaaggagtcaacacataatataaaccagtcaaaatgaacaattat

SEQ ID NO: 22148 - DNA, 490 bp, Zea mays
  unsure (1)..(490): unsure at all n locations
agcttgtacaatggtgtggaacccacaacgtttcatgcacatataataatacagttggtaaatgaatcataggattggttcacattcaaataggatatgtcaatctctacttatctcgatgaagaaggcagtctagaagatcacgagggaaaggtataaacaccaaacaaactttactcgcaaattctgttggaacatgtntatataactcttaattaaacaaggaatatgtatgtccataacaacgtataggtacctaacttactactatgaagaaggtaaggggtaggctgaccctctctggttctgcctttcctatctccgacaaatgcactcaacactttnggcaaaaccatccacgcctggtctcctctagctcttccccgtctcttgctccaatcgcgcagcgctccgcatgccacgacctctagccaccttgccgccccccgagcctgccttccgacgcgattcatggtcgcacacacccgat

SEQ ID NO: 22149 - DNA, 444 bp, Zea mays
  unsure (1)..(444): unsure at all n locations
agcttggaggcgtctattggttgtcgacttggtgtagactcctccttcttttcttccgtcgccttgaatgcaacgggttgagcttcggatgtgtcgccaagctcgttgattttcctcgagccttctatcatgcactcaaaacttacaaaatgcccgataacttcctcgggggtcattntagtatatctaggattaccacgaattaattgaacttgagtgggatttagaanaatgagagatctcaaaataacatttaccacttcgtgatcgtcccacttcttgctcccgaggttgcgcacttggttcaccaaagtcttgagccggttgtacatgtgttgtggctcctcccctttgtgaagccgaaaccgaccgagctccccctcgatcgtttcccgcttggtgatcttggtgatgctcgtctcctcgtgcgcgggtttgagtaca

SEQ ID NO: 22150 - DNA, 468 bp, Zea mays
  unsure (1)..(468): unsure at all n locations
agcttcctccagcanttttaagcccctcatgcatccgaaggtaacaatatgtcccactaggggttatgaagctggttttcggttcatcctccttcttcatccagatttgatgatagcctgaatagcaatccagcagactcataagctctgatgaagctgctatatcgactaaggaatctatccttggcaatggaaactcgtccttcggacaagccttattgagatcagtaaaatcgatacacattctccatttaccattggccttcttcaccataacagtgttagccaaccattctgggtattttacctctctaataactccgacactgaggagtcttttcacttcattccgagcaccttcggccttgtcatcagacatcttccgaagcctgtgctttctgggtctgaaggatggatcaacattgagcgagtgctcaataacatccctgttaactccacaaagatcat

SEQ ID NO: 22151 - DNA, 348 bp, Zea mays
  unsure (1)..(348): unsure at all n locations
caagcttgatcattttatacccctgagataccagaaaccctaattggaaccctggaaaaccctaaaccaaaccctatgggcttatatgcaaaattagtccacttttgggctaaagtgcaaaaaccaagccaaataggtttcttaagtcctttggttcacaaaaatgtggacttgaaagcaaaaccccaaagttttggacttaaatgcaaaatggacttcatttgagttttgctctaagtctgaaaatcagtgaatgggctcaactttggggctntgtaacttacaaagtatagggttnttaccctatgttaccacatcaaagttgaagaccaattataggagaacaac

SEQ ID NO: 22152 - DNA, 443 bp, Zea mays
  unsure (1)..(443): unsure at all n locations
agcttagaataatctggtatgaatctgcgataatacccagctagtccaagataactccgaacttggtgaacagtagttgggggtttccactccagaatatctttgactttgctaggatcgaccgcaattccttcggccgataacatgtgccccaaaaattgaatttcctccagccaaaacgcgcacttgctgaacttggcatacaactgatgttccctcatgcgcgtcaatacaatccgtagatgttcagcatgctcctcttcattnttagaatatattaatatatcatcgatgaagaccactacgaacttgtccaactcgggcatgaacaccgagttcatcaaataggtgaagtgggcaggagcatttgttagcccaaaagacattaccaaatactcaaataaaccataccgcgtagtaaacgcggtcttcggtatatcctc

SEQ ID NO: 22153 - DNA, 475 bp, Zea mays
  unsure (1)..(475): unsure at all n locations
agcttatcccatcgactgcaaaatccagtttctgcaattcanaagtaaatatttctcagcatataatattatgcagtccaacattcagtataaataccattattacctttctggcataatcattttgttcattgtcaccactctcattcatatttgcgtgatcctgcaaattaacctgtacctgccaacacattttaagctcaatcctaagccaataacacaaacctataaatcatttatatgtataaccacaaatcaatatagttgttaaagatattacctcttctactggacgtatcggtataggtatttgaacattgtccacaccccgttcaagtatattagatacgtcttgaatttcctgaanaattggttgaaagctcggtatacatcatttacaaataaacattcacaacaatatgatcaaataccttgtattcctttcatccaattcaccatctttttcgatgtctct

SEQ ID NO: 22154 - DNA, 406 bp, Zea mays
  unsure (1)..(406): unsure at all n locations
ctgcatctatgcctaatgatattacaatcggntctttctattaattttgnacacgcactagtgggaacctagtcgtatttagtcgatcaacattgaactggataaacaattgattatatgaaccactagcgaaacggaatttctaaatttaatatcctatttcaatatcatgaacaatgattaacttgcctaagttaaacatattacagctatgatagataataaattaaatacaaaaatgaaaaatagggggcggttgataccggcatggtgccgatgtaccggcctatggcatgggcagtggcgcatggcgcggctctgtgcgtcttcctaggcgccagtggctacgactggtccgcaggtctgctactgggcgaccaacgaagggttggccgacagcggtgtc

SEQ ID NO: 22155 - DNA, 439 bp, Zea mays
  unsure (1)..(439): unsure at all n locations
acgaaagtattgtagtgaacagttgctattatttatttagctgacttgcaattagttagtaagctgaccgtaatatatcaaagcttgtaacatggaagggttataataaacaactacaattaaatagtaatttcactataattctcaagtgttaaaatcggtggcgatcagattaagaagtctttgatgtcatctattctgagttgtgctcctctatctatatctgcaaggtgacatgtttctatggcatgtggaggagcatgcangaagcaaattctaagacagaaatagaagataagtggtcagaagatgaattcgcatggccttgaatgcatcaccctaacggcgaccaaatggattgntggtggtacctatnagtcaatgtctcaatcgtcatgttcagtaattngagttgctccgatgactttatgtcgtacgt

SEQ ID NO: 22156 - DNA, 418 bp, Zea mays
  unsure (1)..(418): unsure at all n locations
agcttcggattcccgacactagaagacgggctntctgtgctgtcataagatgaattgaccgacagcttatcatataatagtttaaaggtgggagagtaagttntttgcatttaaaaacaaaatttttccatttgcttatacttaatatcggactccttttgcagggcctcatccttatcaacgccttcagggcgcaaaaaattgctgaagacgaatgatgcactatagctttgaacaacattagttccgaagttattgaactaaggaatgaaggtcttgaaaaatataaaatgttaatctcattggtgaataaaataaaagaagacgaaattacttccaaagcccaagctgaagcccagaaatgcgaaattgatgaccttcggaaacaactggccgatgctaaagagaaatacgcagt

SEQ ID NO: 22157 - DNA, 451 bp, Zea mays
  unsure (1)..(451): unsure at all n locations
agctnggaggcgtcaattgggatcctatttgttggtgtaggctcttccttcttttctttcgttgccttgaatgcaacgggttgcacctcatgtgtgaaggtggcaccttgctccaagttgacaatgtatttggagtctttgatcataagttcaaatctcacaaacttgtcgattacctcctcgggagacatctgtttatatctaggatctctatgaattaattgcacttgagtggngttacggaagacaagagatcttagaataaccttgaccatttcacgatcatcccacttggtgctcctgaggttgaggacttggttcaccatcatcttgagccggttgtacattgcttgtggctcttctcctttgttgaagatgaatcgaccgagttctccctcgatcatttcacgcatggtgatctttggcacttcatccccttcatgtgctgtct

SEQ ID NO: 22158 - DNA, 265 bp, Zea mays
agcttcgtctaccaatggacgcgatctcgcctcgttcgatcccggcctcgggcgggaacagtagtgtcggcgtttcgaccccgtggggtccctggaccgacgagtaaattgtcgccgcgtgtcccatcccagatgggtcggcgcgaggcggagcacgaaggggggtagaagagaggagaaaacccgcggcctccgtgttgccctgcgcccaggtcgggtgcgcttgcagtatggggttacaagcgtccgcgcggtgggggggggg

SEQ ID NO: 22159 - DNA, 449 bp, Zea mays
  unsure (1)..(449): unsure at all n locations
atctcttgctaagaaccttttcttctatcataatatagcatcttgtccagattatttaccggataaaggctccatccttgcaatggaaccattccagatgggagcaccattggagtgtatgagcctgctatatatgatccaagaactgcgggtgaccttcccatttgccaattngaagcatatgtaatgggggagggcacagatgctgatttgaatgctggatatatgccatgggctaccggaataccaccaaattctggatgatgaaatntacatgtagaaccaaacttgcattgcccagtcttcatatagtaggagcattctntttcaccctgcatttcattaatgtaaatttcttcccaacaacagttataaatggtacaaagaagcacatccatatgagaatctcataccgggcgtagagggaatccattgtggntaatataaca

SEQ ID NO: 22160 - DNA, 455 bp, Zea mays
  unsure (1)..(455): unsure at all n locations
agctntatcaaatggacgtgaattgtgccttcctcatcggaccaatcaaggaagaggtctatgttgagcaacctcccggctttgaagacagtgagtatcctaatcatgtttataggctctctaaggcgctntatgggctcaagcaagccccaagagcatggtatgaatgccttagagatttcctcattgcaaatggcttcaaagtcggcaaagccgatcctacactctntactaaaactcttgaaaatgacttgtttggatgccaaatttatgttgatgatattatatttggatctactaacaagtctacatgtgaagagtttagtaggatcatgacacagaaattcgagatgtctatgatgggggagttgaagtatttcttatgatttcaagtgaagcaactccaagaatgcaccttcatcagccatacgaagtacactcaagacatcctaagc

SEQ ID NO: 22161 - DNA, 353 bp, Zea mays
  unsure (1)..(353): unsure at all n locations
agcttagcaaaagatatntctagaatcaagaatattgagctcatgcctaagtctggtaaaagattgttcatcaagtggcttggtaaagatatcggctaattgatctttagtattaatgtaagaaatctcgatatcccccttttgttggtgatccctaagaaaatgataccgaatggctatgtgcttagtgcggctatgctcgacgggattgtcggccattntgattgcactctcattatcacatagcaaagggactntggttaatttgtaaccgtaatcccgcatggtttgcctcatccaaagcatttgcgcgcaacaatgtcctgcggcaatgtactcggcttcggcggtgg

SEQ ID NO: 22162 - DNA, 442 bp, Zea mays
  unsure (1)..(442): unsure at all n locations
agcttccactcacacagtcacactcatggtgtcataactagctagctaaagctgtccagaagagcacgtagttgctactccttgtcctagatgctcagttacttcacttactatgatttgtcagtgacattntgttttgagtcagttcgttcacctgacgtgacattctgaatcgaaaaattaatctaatagctttgcatcgcanataaaaagatttcgaatgggattcacctgtcatcgaatgcgcagttgatgctcagcgcgaggctgccagcgggcacggtgagcgtctggagctcccactaacagctcacggtgagcagctcgtgggtcacgaacagctcccaccagccgtgaagacgataggttaggtttcagtgggcaacgagcaagatagagggtgaggagaggagcaacgagcaagacaggagaggagcaacga

SEQ ID NO: 22163 - DNA, 405 bp, Zea mays
  unsure (1)..(405): unsure at all n locations
taatattggaaacattgtacaaaatatcatgcttcttggtgtttgactaaccatgcaaggaagaagagctcacaggttaaggtcaaagaaatattgaagaaatgctctagcaatgatgggttaaagaaagttgaacccaagtacaagtccttgaagcccaacaatgggagaaagtggcttgggtacaactcatataaggaaaaccctagcatagagcataaggggtggagatcccccaagttcatagagggaaccaccctatatgatgccttggggaggattcactcctcanatgacaagtcaactcaagtaaaggtaaacttgagttacacaaaggacaagatgaatgatgtggtctccacaaatggagaaaagttagagctcccatttctcattcttatcttt

SEQ ID NO: 22164 - DNA, 403 bp, Zea mays
  unsure (1)..(403): unsure at all n locations
tcttcggataatcccgacctcgttgcaacatgacaccagaaggtccaacccaacaagccgtggatgaattcagaattatggcagagcatatcagtacaagagacctggttcaagagtttttggctttcaagggttttcctatgttaaaagaatgggaaatgccgaagctaaagggggagaagaaaaaaggtgaacttgtgcggttaccttactatttncaagttaagaaatactttanaacaccttgccaagagtggctggatacaattgaagtaatgtgcaatgaaatactcggcaattattccaaaatagaagatcagttgatgaccgcagccttcggcacccgtccgaagcgaagactatatcgagtgctggacgccttgggttttgaataccctgacta

SEQ ID NO: 22165 - DNA, 351 bp, Zea mays
  unsure (1)..(351): unsure at all n locations
agctttggctatggtcaatattttcgacagcacatctgtgcaatagtattgaatgctngtggaacctcacacctacccgtctgtttatatagtgttgcatgtgggaaggtgaattgtcaagtcacccgcacccgctgaacagtcgccctcacccactgaatggtggaccacagtgcgcgagaaggtgaatcaccagatcgcgcgtacctgtcgtatggtggggccacctcgcactcggaatatttaaatcgtttctcgacaacgggcttagggaaggtgtttttcggaccttcggcattccgaagcccaagatatattttcacaggacgagctcattatgataaacgatct

SEQ ID NO: 22166 - DNA, 474 bp, Zea mays
  unsure (1)..(474): unsure at all n locations
agcttcgctcggtatgtgctctcgtgatactatactggtttatttgttcatgttgcttttntacttttacaatggtatgctacatgatatctttgatccatatcttaagttgcatgctattcctcccttctttttaataaaaaaatcagatgtagcttcttttatatttagcactatcatcgntgtagtgtttggctgcacatatttagcatatgccttgagtgctcgacttttatttccttctaagctaccacttgtgaatntgcacttcaatgtcttatatgccaaattcaacatctacagtaccatctcaaacgaatatatgcagtgtcaactacattaaatcttattatggaaattgggatctgctccttattttctcaagtattccacgacctatatttatgaattctncataaacagaagcacaataattntcagcttagttntgtaacattggacccctgaaataat

SEQ ID NO: 22167 - DNA, 436 bp, Zea mays
  unsure (1)..(436): unsure at all n locations
agcttatgaagattcttcattccatcatgggctattcggcggtgccagagccaacccaagttagtcttagcaactaagcaagtgtcgagttcagctctatcaaaatctaccaagtatagctgaccctctaacactcccttaaatgctatggaatcatcacttcttctaaagacagtaacacctacatcagtaaatagacaagtgtagcccatttgacataattgggatacggaaagcaaattgtaatctaatgaatctacaagaaaaacattggaaatagaatgggcaggtgatatagcaattttacccaatcctttgaccaaaccttgatttccatccncgaaagtgattgctcgttggggatcttgggttttctcatatgaggagaacatccttttctcccctgtcatgtggtttgtgcacccgctgtcgagta

SEQ ID NO: 22168 - DNA, 457 bp, Zea mays
  unsure (1)..(457): unsure at all n locations
taccgattntggtatgcaaactngaaaaaatatttccaccaggtttcttcaatccgatgcaacatctacttgttcacctaccattcgaagctaaggtaggaggtcctgtgcaatatagatggatgtatcacatcgaaaggacactaaagaagctacgtgcaatggttggtaataagagacgagttgaagggtgcatcgctgaagaattcanatacaaagagatagcatcgttcacgggcctgtactttgcagaggaacacaatgtcaatgcccatacgttgcggtatcatgtcgacgagcccnctattagtgatattgaaattnttcaatggaggggcaaaactgtatgacccagcacaacatactgtttcaccaacgacgaatggaagactgctntactctacatgtataacaacatggaagagatgaagtcagttctcctgtaagtgtaaaactt

SEQ ID NO: 22169 - DNA, 434 bp, Zea mays
  unsure (1)..(434): unsure at all n locations
agctngccaatacttgtcatagcatcagcacatgcccgcacagcaactacagaccataccagtaacctggcctttcgcatgctggggactggatatgattggacctttcaagaaagctcaagggggatatactcatgtattggtggcgattgacaaattcactaaatggatagagttcaagcccattgcttctttaacctctgctaaagcggtagaattcatacaagacataatattcagattcgggataccaaacagcatcatcactgacttatgatccaacttcaccagttcagaattcttcgacttctgcgaacaaaagagcattcagatcaagtatgcatctgtagcacatccaagatccaacgggcaggttgagcgatccaacggaatgatattggaagcactcanngaaaaagtcttcgataagaatg

SEQ ID NO: 22170 - DNA, 490 bp, Zea mays
  unsure (1)..(490): unsure at all n locations
ttagagtcacctgctgcatgcaagcttctcgattgagagcacatcaaccacaagatctcgccaaataatgtgtcttcaatcctcattntttcattccggatgaacactaatattaaattctagtctagtaaggaaatttaggacctaaaccaaaatctgcatcgattcagttgagagagaaaaggagcatggcagacccatggaattcaatctttgggttgggaggatgcacaggccatacttatcatcaagtaccaaatgcaaataaacagcaagcttgctgaacgacagcattgtttcgacaagcaagcaaatatccaatgctatgtcaacccatctcggcagctccgtgtctcctccatgcagtatcttctcaccacccaaccatttcggtcgtatcgttagtcggntgctaccgttaatcactggacgcaccacgccaccacccgtgcaatgctgtagaatgtccttcgcgctacaatcacaagct

SEQ ID NO: 22171 - DNA, 429 bp, Zea mays
  unsure (1)..(429): unsure at all n locations
agcttctccttgtcgtcatcaaccttgacatagaaccactccgacttccagcctgctgcccatttgcttcggtagctgattacaggaaactttgtggttttccgataggcgaagttatagcaaccaaaattgtcgtgcaatccatcctttctagccttcgtctgataatgcagctcgtgaacccggcaaaagctgtccgcaaatggctccactgcttggcttcggagtgcccagatataaacactaagcctaacgatagcgttaggggtcagctggtgaaaatagataccgaacctcttcagtacctctgcaataatcccacgtagggggaatcttaatccagcctttagataagctttgaaaataacaatntcattcttctncggctttggagtagtctcttctcccccgaagcgtaatagcttcttc

SEQ ID NO: 22172 - DNA, 467 bp, Zea mays
  unsure (1)..(467): unsure at all n locations
agcttcgcggccaatggaattcatactcgtgacctccctctcgtgcatgatctcctctaccactccactcctatctccattgtatttatattacgttntctttcccccacaaattataataaatcgagtgtaaattggttgtttgggacactagatgaattcaaataaaaaacttattaactacaaagtcgcataattntttgagatatataacttttaattaagtggtttcttcatctaaggttgattacaaatnttgaatttcaaatttgaaaacttcaatcatatttttctatgaaaagataacttcaaataaaaagttgtcaactataaattaaaatatcgtttggagattgacaactttcatttcggtgttttttccatctaaggtcgtttaaaaaattcaaaatttgaaattntgaaattctgcatgacaagatgaatttaagttaannaagtgtcatgta

SEQ ID NO: 22173 - DNA, 472 bp, Zea mays
  unsure (1)..(472): unsure at all n locations
agctngatcagtttgcactntgatgagctgattgtggaagctatcaacttcatttggaaatgcaaagtatcctacacatcaccccatcatcccataagcctttgagaatgagaagaggttgagcgaaagggcctctatcctagtggttaaagacttccgagtagcacctccaagtcctggattcgattccacccgggagccgaatttcaggcttggttaaaaaaatcccctcgctgtgccccatccgctctccggttgggccggtgcagagtggacagttgacgccggcccgttagtgatggggggccagggttcggggattntctcggccgggaccattgnttcggtctcttcttaatataataccgagagggcggtctttcccttcccggccgagtttatgagaagaaggtgaccatatgagtatcttctaaagcagtagtgtccattgcatcatacataaagtactcat

SEQ ID NO: 22174 - DNA, 451 bp, Zea mays
  unsure (1)..(451): unsure at all n locations
gcttcgtcagcaatttccttttctttctcagacgctgcggccatggcctcttcggcggcagtagtggcttcttctgtggccatgtttagcaacattntgtcgatgtgttcgattgtgcttgccaaattcaaatcttcagttgaggtagcttcggtagccgcgacctccgaaggtgtgacttcaatatttgttatttcctcagccgctggtatcttctgagctgaagctctcggtggtgtcttgtcaatgacttctgtcactgcgatgattctttgtctctttggtttaagtggtttcttcgttttttgggctccttttccttctgaaaaaactttgtcagttgaggccccaatggacttatcttcgcangcagggattcagtcattaccttcaaaatctcttccacgtcagtggcagagcgtgatgccggagtctnctcttcgtcggatac

SEQ ID NO: 22175 - DNA, 393 bp, Zea mays
  unsure (1)..(393): unsure at all n locations
agcttttntgtggcccggatgattgggagctgtgtttgtgcctctgaggttgaattcctctatcatcacttgagttggaattatggatcgacctgacgtgcctggggtgaattcttcctccgaagcccctggccatctcagaaaacttgtatgcttcctcccttctttggcggaaatcattatcagcccagatgtactcatccatattctgaagaagcttctccagggtttgtggnggcttcctgacaaaatattgagctataggtcctagacaaagccccttgatcatggcctcaatgacaatttcgttgggcactgtatgcgcttgtgctctcagacgcangaaccttcngacatacgcctgaaggactcctcatggtcttgcgtgcattg

SEQ ID NO: 22176 - DNA, 398 bp, Zea mays
  unsure (1)..(398): unsure at all n locations
gcaagcttgaactaacctgtagatgggtggccacggtgatatgctcactgtggcgcanaattcggaattgggggaaaagcgaaattgtggcacggtggtgcacgatagtagctagctggtgatgggttggacgcgtaacatagatgcggagcagatggtatcctcaatttatagatcctgattgaactangcacgaattttggattgggatcacagttaccacgaccaagatatttcacagtggcttgctcgccgtggcgcgcgagatgggactggtccgcggatgataatcggctgcttgccacgacccttacgatgcggaggagtggtcattacgtgtcatggccggaaaaatggtgagctcatgtgatgccagcgtgactgaccgcggtgggaca

SEQ ID NO: 22177 - DNA, 424 bp, Zea mays
  unsure (1)..(424): unsure at all n locations
agcttcgtgttcagctctgttactttagcttcggcctccgccaataatccttcaggtgcttggagctcaaagttcttcttctcaatagcagttgattgctcctttattttgctttctaaattttcaattataacttcgtgtttcttgtcttcaaaatcttgctgcattttcaaggctttgctcaatagcatactctgcacgaatacaaccttcgttagacatgttttcattattaaaaacaataatagtaagggaagagtagttcaccttgaaattggaataaaataaactaccaacgatatgttgtcgtcggtagcggctaatgtccgtttctagcttcggaaaaccgatactctttgatagagtaccgataaccttggcttcagtttgatntcggatacaatctaattnttcatcatcaata

SEQ ID NO: 22178 - DNA, 355 bp, Zea mays
  unsure (1)..(355): unsure at all n locations
agctggctacatgccttcttctttttctccaaagcaggaacttattgttacactaccccacttaanaagaatgagggtagaactcttgaatcttggggatttgaactccttgaagtacctcataacaagggcgttacggngccttcttctgctgntgctgcttgagcatgctgcggagaaatgactgacacagggttgattctgggtcaaccttcttctcatcttctcttcgctatcttctttcctcttctcacttttcactgcctctttctttctcttttgctcttccactcgaggattctatcaaagagtattaccatcatacagaggaggaaaccaaagactatgaaccatg

SEQ ID NO: 22179 - DNA, 450 bp, Zea mays
  unsure (1)..(450): unsure at all n locations
agctngatgctgactcgccgaattctcatanactttangatgnatgcccacatattctagaatgtagggcgaatgatacgaagctgtatgcatgacctgcttcggctgagcttgttgtgctgctgcttcagctatttccttttgcttctgaatagtaacatggcacatcctggtagtatggcctttattctcaccgcagaataaacaaaagattcttctcggttgatcgccaaatcttcctccatagcccctggcgcctctgcctcttggagctggtggtctgaaggagctttgctgntgccccgaagcctgtgaggaacattgtggcctttgctgttggcttcctctatcatcattntgtgtagagttatgaatngatctcacgtgcctcgggtagaacctccctccgagccnctggtatttcagaaacctgaaatgcctctccttctt

SEQ ID NO: 22180 - DNA, 489 bp, Zea mays
  unsure (1)..(489): unsure at all n locations
agctngaagatatcttaagatacccaataaacacatttaaatcaaatatacacctactgtaccaaatggaaatgaanaaggaaatgggaacctgatataaataaaataaacaatgaaggttaagtgctttgaagtttggacttattcataatctactagaaaatggattgaattcaacctgtaagcttgtaggtatatttcaaatagatcagtacaatttttaaatattgaaccactgaaatatcacagacatacagtaagacaccaatccgataatgacaaaaattatacctgtgtatagagctggacaaaatcacttgtctttggggtcaaaaagagaagtttagtacccctgtcattaggtgcaaggggatctaggccataaatgcggaatattggtctacattccccttgcccatcanatattggcaccttcctgattattatacagttcagattcagcattctgtcaacaggaagccatgattc

SEQ ID NO: 22181 - DNA, 449 bp, Zea mays
  unsure (1)..(449): unsure at all n locations
gcttgccttcttccccgtcgccgtcgctgggcctgttaccagcgatgacgacgatggcctcgacccgctccccttgctgctctgctgcatacctgacacgtacgctcgcatncgcgccagctccaaccgcagcgcctctgtctcccttgccagcgacacgtacgcccgcgcctgcgcacgggccttcccggcgggcgactgtgtctcccacccttctccgagccgccgctgccgtccgcgctactgatcttcagctggtcgtagtagagcacgctgagcacggcctgcatcggcagacgcttgttctggacgcgtgcatccgcgccgggtacgacagcctgagcggggacatgacgctgcacaccttcttccgctcgatctcgtccagacccagttgtgtcttgatgtatatgtccacggggcaggacatgcatgcgtgcgacaggcgc

SEQ ID NO: 22182 - DNA, 477 bp, Zea mays
  unsure (1)..(477): unsure at all n locations
agctntaccctgtggactggactataagttggttacggtaggtgtaccttatgcagttgaccatttccagcatttgcgtaatgaggactctagggagaagcctcgtagtgagaccatggccattcacctcgggagtgaatacgggtctagctaacccgggctataagggaatcgcgactcatgggtaaagatgtgccactctgcagagtgtaaaactgatatatcagtcatgctcacggttatgagcagcctggactcctcacatgataactgaacttgaagatggaaataaatcgagatccgatgatctgccaatggtttgcttaagtggtttcacttaagtgtttttgatatactcttatacctttgtttaatgggaatacttgngattcacacttattagtaagacaggtgttgttaataaaatgttgaccaactaaaatgcttactgctcaaccttagcctcacctttgtaaa

SEQ ID NO: 22183 - DNA, 392 bp, Zea mays
  unsure (1)..(392): unsure at all n locations
agcagcttctcattgacaagaatgaagagtcgttagtgatgcctgccaaatgtatggatccatattgagtcgccctcaatgtctttatatcagtttgaaagacaagtaagttctatttttttgccattgcctgtttaggttcatatggtgttttatttggttgtgcaggaaaagatccttgagatgctaaaaactggctagagaggagcattcaagttacagtgtttaccgatggtgaacgtattttggggcttggagatattggatgccaggtatggtagcatcttgttctaggtgtattgagtattgatgacaagcaatctcccaggttttatattgattaagataacatctatttatggagtggngattcctgttaacaaacattctgt

SEQ ID NO: 22184 - DNA, 440 bp, Zea mays
  unsure (1)..(440): unsure at all n locations
agcttgtaccatcatggtggtggcagcagcaataaaggtgttattaatagactccgccatgatgcatttgaaaccatagtttgcaatagactcaacagagttaataaacttcaatgaaaaaatatatctataaattaaggagacattctggcttcatttgttagagcagggacggacacaccttcaaggcaacagtggggaaaggaaatccggcatattccataatagttatctgatggccacagttggtgagcttgtcattcatgctgatctcatcaacattgtattcttgatcatggcgcttcaatagattcaaaagttgaagcctcctacaagaagcaaattcacacaaaacatcacagaagtacctcaagcagtccaaaatccaaatatttgaacaagaaaaagtagaanaaggatactctcgatgcattgctaca

SEQ ID NO: 22185 - DNA, 263 bp, Zea mays
  unsure (1)..(263): unsure at all n locations
cttcacccagtcagaattgaatatgagacanatgcgatggctcgagctgatcaaagattatgatatagaaatccattatcacccaggaaaaacaaatgtagtggcagatgcactcagtcgcaatgcttcctgccattgttaacagtgaggacttctgacatcacattatgccaggagatggagaaattaacctggnaatgattcaacatgggacttcaaatcatttgaagctggagcagncatctacaaagaataatggcccc

SEQ ID NO: 22186 - DNA, 396 bp, Zea mays
  unsure (1)..(396): unsure at all n locations
cattgtctncctggtggaagccaatgccattcttaatgccatggcgtctcccactatagagcatacttctagcaaatntaaattnttcattttctaagtcatgctcattaattntagcactaagttgagctatgtgatcattttgttgtttaattaaagctaggtgatcatggatagcatcaatattaatgtctctacatctagtacaaatggaaacatgatcaacagttgatgtagagggtttgcatgcatttaattcatcaatcttagcatgtaaaatagcattctcatttctaagattagtgtcggcgtttcgagaccggngggtccctataccgacgagtaaattgtcgtcgcgtgccccatcccatatgggtcggcgcgagactgatcgcg

SEQ ID NO: 22187 - DNA, 435 bp, Zea mays
  unsure (1)..(435): unsure at all n locations
agcctaccgtggatnagaatgctgatctactcgtattatggaaagcacatttgatgacaagggatgttagaaaggtgcaagttcagtatgtgcttactagaatgcttatttatctcgctatggtggtaaatatcccccttgggctgtcaaggctatcgacaaaattagaaaatgttttctatggagggggcgcgaggagatcatangagggcactgtctgattgcttggggcagagtttgtagacctctccagctgggcggtcttggcatttctagtcttaaagagctcagttggaccctgcgcatgcggtgcctatggctccaaaatgctgagcctaacaggccctggtgcagtttacccatccaagtgtcggacaaagcaatggctttcttctcggtggtgttgataccaaaagttggtaatgggacaaatac

SEQ ID NO: 22188 - DNA, 491 bp, Zea mays
agcttggtcgatgtaggggagaaggcaagggggtgctttcaatgttagtcttgataaacaaagtgctgcatacatacgtacttaagcagcagtttctttatgcgtttcaaaagaataccagcctttttttattttcttgcccgttcataacaagatgtaataaccaggcatacagtttaaaacattcccatgatcagttctggtatctgcatgtattctgtaggtacttgtgaaagacattcgggtgttagagaggtccctttttcaccccggagcatattggcgtgtatgcggaagaatacactgtaaccatatctggtttggtgtccacgttcaatttctcaccctggagctgaacaagagctagttcaataaaaatttgccctgaactcgctttttttcatccggttctaactgatgcctaacagggtctatgcagggatgtagtatttatgcctttcttctttgaggtttttattagcagaaaatac

SEQ ID NO: 22189 - DNA, 453 bp, Zea mays
  unsure (1)..(453): unsure at all n locations
agcttcgcanaggtgaacgataatagagatttggtgtatggaattatggttcaaatgagtcaagttgatgtgataaaaatcaaggaggccacggaaaaaaggagatatgggaaggccgaggccgcggagaatgaaaggagcgtaaactactgactcgtgggtatcttcggttgggacagtagtcccgtggcaaacccgccaagaacagagttcccgcggaggaagaaccccgatggagacaagacggagaagctcatcttcggaaataacagacatatggttacctgcgaagggtaactgactgttggggtcgattgcggggatcactgcaacagacgaatntgcagttttcctcttgggcgccatcttgcttctcgctggcaaatagagtatgaagcgagtggcggagaagattcagatgcggagatgcaagaactatggcacggaaagcaa

SEQ ID NO: 22190 - DNA, 398 bp, Zea mays
  unsure (1)..(398): unsure at all n locations
tgctgcatgcaagnctgaaggactgtcttggcatgagagcttccgatcgtgaagacttgttctgtccacggagtcgctttatccgagcgcgagttacttctcgcagaaggtgatgaatgaggtattcgtatcccggaggcgtgggagtccctcgactcggtcagccttggctgcttacgtgtactccgtcgtttccaggatccgctttccgaggtagtcaagaagcacgaaagaaatcctgctaaaaagagatcctttttcgaggaataattcgacgcagagggggtctccccccttttagcccccgagggatgggtcggctntgccgaggctatgccgaacctctcttgacgacttaaacttgcgtacgtgcgaggtatatgaacaacttgtaaaca

SEQ ID NO: 22191 - DNA, 337 bp, Zea mays
  unsure (1)..(337): unsure at all n locations
gcttatgacttcgtaataaaatttcaatagatattgtaaggcaacatanaataaaaggtattaaaggggtaaataaatcatagacgaattatgtcatatttacttaatatattgaatcattggatacaataatacctctgccttggtaagggttgaattccagaagatgcgagtataattaccagaatccgtgaacagtaacggactactgttcactatttataggcacaggacacagcctgtgaggaatacaagtatgccccttatagaagcttacaacattgactcagacctttatggactaaaaggtcattctatctttaagtcggtttgaata

SEQ ID NO: 22192 - DNA, 406 bp, Zea mays
  unsure (1)..(406): unsure at all n locations
agcttggataactccgagcaaacgctagtctgcctgatgtaccactgtacagtttcaattnttctcactggaaatcccaccttgagtatggttgcttaaattcagcaagtctggatacatcagcaagcaacaataacggagctgcagcctgcttccttcttcacagagattttctgtgtttctgaatccctcacttgagctatctcatcccaccggccttctgatgcgtatgtgttcgacagcagaatggcatctgaaggatggtagtggccaatggcgtccaactgtgcctgcaccatcctccccagcttcgcattgccatacactctgcaggcggcaagcaacgctctccacgccgtagcatcaccatgggatgacactctctgtatgagttcatatgcttcat

SEQ ID NO: 22193 - DNA, 389 bp, Zea mays
  unsure (1)..(389): unsure at all n locations
agctnttatnttctactacatgtcatcctcaaacttgtggtcaaactgaagttgtgaatagaactttgtctactatgttaagggcagttctaaagaagaatattaagatgtgggaggactggttgcctcatattgaatttgcttataatcgatcattgcattctactacaaagatgtgcccatttcaaattgtatatggtttgttacctcgtgctcctattgatntaatgcctttgccatcttctgaaaaactaaattntgatgctactangcgtgctgaatngatgttaaaactgcacgaaactactaaagaaaacatagagcgtatgaatgctatgatataagttgctagtgataaagggagaaaggaaataaattttgaacctgga

SEQ ID NO: 22194 - DNA, 491 bp, Zea mays
catgcaagcttttgtggaaatgggagatgatttgatcacttgggtgtgtcttgtattgaatgcctagctcttgtaagtggttggaagtgtgaaaacttggatgtcttgaatgtggggtggttggggtattgagagcacctagaggggggtgaataggtgatcctgtgatatttaaaacttaagccacaaaacttggttaagtgttagcacaataatcaccaagtggctagagaggagtctcaacaaaacacaataaccacaaagatatcaatcacagagatggcacggtggttatcccgtggttcggccaagaccaacgcttgcctactccacgttgtggtgtcccaacggacgaggattgcaatcaacccctctcaagcggtccaaagacccacttgaataccacggtgttttgctttgcttttcttaatcccgtttgcgaagaatctccacaactttgagcctctcgcccttacactttgagttcacaa

SEQ ID NO: 22195 - DNA, 106 bp, Zea mays
agcttatatcgtctgcggcacatcgaatacactatccatacttgttctcgcggcggatgctgcttgaccaccccgggacgtctacacctccactcctgcccaatgg

SEQ ID NO: 22196 - DNA, 461 bp, Zea mays
  unsure (1)..(461): unsure at all n locations
agcttgtgaagattcttcattccaacatgggctagtcggcgatgccagagccaacccatattagtcttagcaattaagcaagtatcgagttcagctntgttaaaatgaactaagtatagctgaccctctaatacttccttaaatgctattgaatcatcacttcttctaaagacagtaacacctatatccgtaaaaagacagttgtaacccattttgcataattgagaaactganagcaagttataatctaaagaatctacaagataaatattggaaatagaatggtcaggtgatatagcaattntacaaagtcctttgaccaaaccttgatttccatccccgaatgtgatagctcgttagggatcttcgtttntctcgtaggaggaagaacattcttttctcccctctcatgtgggttgtgcatctgctatcaattatccaacatgagccccgggatgcat

SEQ ID NO: 22197 - DNA, 362 bp, Zea mays
  unsure (1)..(362): unsure at all n locations
agctntagatatacgaanagaggagtagggngcagtcggctatcctttcctatagctcccgagtgcccccctatgtgccctgagctgggcttcatagaattcataagtagcttttgtcgctcccttgggttccttcctttatctcgcaggcctaataagtttattttggtgatcttgtagtcatttccgattgaggatcacgcatcccaagggcagtttgcgacgacatcttccttccgccaccctgactctctccctggggttgtggttntggtgagcgtagtgctcccgatacctttttgagttcggcgtcccaaggcctangcttcgtcggggactgccatccctatcgtacatccctc

SEQ ID NO: 22198 - DNA, 360 bp, Zea mays
  unsure (1)..(360): unsure at all n locations
gcttgggactcgacgcngctcgtcgtgttgcgctctgcccgcggtctacgcactcaagcctagtcctgataggtcatgagtgtgatgctggccggnggatgtgtgggccataaatatgtcgcagtgcgaggggcttgtangtcatgagtgctctgcgcccgatgggttcgtaagtcatgagtgggaggcagatcggtgccttcgctttaactcgatgctaagcatagttaatgtggttggtcatttatgacggtcggtctcgcgctatgcgtgggagccactcgagtggtttcccttcatcacgcctagcccncctaactggttccacgcccgaccccggctcattgtcgcatggttcgt

SEQ ID NO: 22199 - DNA, 212 bp, Zea mays
  unsure (1)..(212): unsure at all n locations
catcttattatttcttcttcccgagctcctggcgtncattcagcgatgaattctgctaacgtctgggactgaaccgaagatctatgcacataatcaatggtgaattcattaagctctacaacccattttccaatccttccaatagcttctctgttcctcatgatgtcccttatagagtgtgacgaaagaacaaatatgtgggatgcttgaaa

SEQ ID NO: 22200 - DNA, 377 bp, Zea mays
  unsure (1)..(377): unsure at all n locations
agcttatgaagattcttcatcccaacatgagctagtcggcggtgccagatccaacccatgttagtcttagcaattaaacaagtgtcgagttcaactctatcaaaatctactaagtatagctgaccctctaacactcccttaaatgctactgaatcatcacttcttctaaagacagtaacacctatatccgtaaaaagacagttgtagcccattttgcataattgagaaacagaaagcanattggaatctaaagaatctacatgaaaaacattggaaatagaatggtcaggtgatatagcnaatttacccaatcctttgaccaaaccttgatttccatccccgaatgtgatagctctntggggatcatgggtnttctc

SEQ ID NO: 22201 - DNA, 387 bp, Zea mays
  unsure (1)..(387): unsure at all n locations
agcttaaagccatggtaagtagcatatgcaagtattatgcgaattgactcaagcctagctacgggtgcatatgtttcaccgaaatccaaaccttcgacttgtgaatatcccttggccacaagtcgggctttgttccttgtcaccacaccatgatcatcttgtttgttgcggaagacccacttggttcctacaacattntggttaggacgtggaactaaatgccatacctcattcctcgtgaaattggtgagctcctcttgcattgccagcacccaatccgaatcttgaagtgcttcctctaccctgtgtggctcaatagaggaaacaaaagagtaatgttcacaaaagtgagcaacacgagatcgagtggtacccccttataatatc

SEQ ID NO: 22202 - DNA, 470 bp, Zea mays
  unsure (1)..(470): unsure at all n locations
agcttataacccaagcgcccagtgtggtcggctatcgctcagctgggaaatccgcgcgggtggttgcgatctgcccgccgtggcgcttttcacgcggtgatgaatgccggattcggagtccgtcccgatggccatgcgaggaaagcggtcgagtttgttttgtcccaaggttgaggattcttacacgcggtgcccatgcgacaatctcagcaaaatgcattacgtgcggtgatagctgacactggcactgcagtcccacggatcagcgacccggccacagcgtatggtgaggctcgttttttttattccacgcggtcctcatgtcagcgtgcaggggatgagagtggatgatagcacacctgatgtcacaattacacagcgtccgatggaaggaataaagaaatagtgaaaagagaagaanataanaaaaagaacattatgcatggcacttgacgtgcatggctggtagt

SEQ ID NO: 22203 - DNA, 215 bp, Zea mays
  unsure (1)..(215): unsure at all n locations
gaaatagcgtccgagtgatgtcgaaacctcgccagcgttggaatgatngatgaccacatcggcgctcttagaggtagcagtcgagtgacttatgacgacattggcgttttagaggtaactaccaagcgactgacaatggcgtcggtgttttagagataactgccgagcgactgaggacgatgtcagcgttttagagataactgctgagcgactga

SEQ ID NO: 22204 - DNA, 483 bp, Zea mays
  unsure (1)..(483): unsure at all n locations
agcttgcaaagggctctacaactntggtattntcacttcagcatgattcaacacttagcaaggtcaaaaagtgctaacacaacagctctgtccagaattggacagattcagacttgcaacttcaaaaattcacaactgaagattcagaaatccaagcaaagtgatcttagactttctggaatggtaataaaatggtctatatatcatttataaacatctcaaggtgattccatatttaactaaggacgaaagacactagaaggctttgctgtccagaattggacagattcagtcttcagattttaaacatccataacttaatcttcagatcatcaaaaagagtgatccaagacttttggaaagcttggaaaagactacatacttttaaattaccaagaattgatctatgctgaactgaataaacaattcggtttcgaaatctggtttgcagtggcagaataaacaaccagtttgtaaattcat

SEQ ID NO: 22205 - DNA, 402 bp, Zea mays
  unsure (1)..(402): unsure at all n locations
agcttgcatgacaaanacgtgaatgccataaatctgactcatcagaaaaattaacagaattcaccattttattacacacatcatgcagtgataagcggaacaagcctccgcagtcatatcctttaccaacaaaagtaccatgtttcgacacaacacatttatttgactcaagcacaactttgtatccatctcgatatagcatagaagcactaacgagattcttcttgatagagggcacatgctgcacgctcttcaatggcaccgtctttcccgaagtaaacttcagaatgaccgtaccaacaccaagaacatgatcacgcgacccatttcccattaacaaggcgccagacctnccgacctcgtatgatgagaacatagaggcatcagcacacacatgaatat

SEQ ID NO: 22206 - DNA, 458 bp, Zea mays
  unsure (1)..(458): unsure at all n locations
atttctctgattctagcacttagacaaacatgttagtacacaaaaaacaatgtactaagtatagaatcataccttcatattgatttgcaccttatccacaatttggcatagtttatcacttaagcacttatgttggacactcaatcaccaaaatacttagaaatggcccaagggcacatttccctttcaaggggctaaagccaaagccaaacacaccttataagcatcggtttcaacggtggtaacacgtcaccctctatgcttaatgcaaaaataaaataaaatcatgcataaataggggattcgaaccttggttgttggcttcacatttacacatgcctaacaaatggaacatatattntttatgtattattaaaacanagtctnctcacataatatatagaaaccatggtaatacacgagccactgactagtagaaatatattgatacacatagc

SEQ ID NO: 22207 - DNA, 440 bp, Zea mays
  unsure (1)..(440): unsure at all n locations
gcttcagataaaactgctagatgcaaatgttntcattgtgggttctggcgctcttggatgcgagttcttgaagaatcttgccttaatgggtgtctcctgcagctccaagggaaaggtaactataacagatgacgatgtcatcgagaaaagcaatctgagccgccaatttctattccgtgactggaacattgggcaagcaaagtctactgtagctgcagccgctgccattgctatcaatcccagcttacaaattgacgctcttcaaaaccgtgcttctccagataccgaatatgtgttccatgacacattctgggatggtttggatgttgtcatcaatgcccttgataatgtgaatgctangatgtatatggacatgaggtgcctgtacttncagaagccactactggagtcatggacattgggcgcatagtgcaatacac

SEQ ID NO: 22208 - DNA, 401 bp, Zea mays
  unsure (1)..(401): unsure at all n locations
agcttgaaccttttttgtagcatangccaataatatacgagatgactcaagcctagctacgggtgcatatgtttcaccgaaatccaaacctttgacttgngagtatcctttggccacaagtcgagctttgatccttgtcaccgcaccatgctcgtcttgcttgttgcggaacacccacttggtccctacaacattttgattatgacgtggaaccaaatgccatacctcgttcctagtgaagttgttgagctcctcttgcattgccaccacccaatccgaatcttgaagtgcttcctataccctgtgtggctcaatagaggaaacacaagagtaatgctcacacaaatgtgcaacacgagatctagtagttaccaccttatgaatgtcgcccaggatggtgt

SEQ ID NO: 22209 - DNA, 330 bp, Zea mays
  unsure (1)..(330): unsure at all n locations
tccatcactcgacccggatcttaaatactgcagcttcaacttatctctttttttctgtatctccccactttaacctagactacaactgcccctatcaagacgagggcgcgggccttgacatcaaaacactcctttaccctaaagatcaaatctcattccttccttacattccaataagctaccatcaagaagacaccttctcgcnaacacacctcctctagctaaagggaacccccccttgctaaattcttcgaaaagttctccaacacttttctttcactattatacgaccctaacacggaaactttacgagcaccacccaaaccatct

SEQ ID NO: 22210 - DNA, 425 bp, Zea mays
  unsure (1)..(425): unsure at all n locations
agctttaaagtagttntggtatcataagagggtgtgggatgggcagtgtgtggagtgattatgtgctgaaatgctttttatggtttatgcattgcattgcaggatgttctctatcatataagcatatggtcttcactaactaacagacaattgtttatcatgaacattttcaaatattattacttgtgtgtgtgctgctttcaattttcatacaactataaaataatttgtcttcagatctaatcagctgtggatcacacgagatgaacttgagctacacttaattatggctctccgtataccaaggtacattattttgatgtcaacaaaaatatggcggaagggataattttagacatgttctcatgtcncagtaaatgctagctacttttggtgctgccatgacgcatttaatttagatttca

SEQ ID NO: 22211 - DNA, 426 bp, Zea mays
  unsure (1)..(426): unsure at all n locations
agctngagattacatgaataagctttctagtagagctgataattntggagtcaagtggaatcaatgtgatacttggaatagattacctaaccaagtatgatggagtaatatcttgtgctatgagaatgattacattaacaagtctgccaggagaaagagttgaagtcaatgttagcatgccaacagaagaagaagccatggtaaatctattggaggagaaatctttggaaaacattagaatagtgtgtgaatacccagacgtatttctggaggaattactaagtatgccacctgatcgtgatgtagagttttctattgaattattacccagaactgcacccatttcataaaaaccttatagaattgatgtcaatgatttagttgaactaaagaaacacatagacgaattatttatgaaaaagttta

SEQ ID NO: 22212 - DNA, 402 bp, Zea mays
agcttgtggaggttctttatccccacgtgtgctaagcggcgatgccacaaccagcccatgcaagtcttagccattaagcatgcatctagaccggcctcttcttttgcaaaatcaactaagcatagtttggcgtctagtacacccttagaagctagtgaaccatttcattttctaaagacagacacatctatgtttgtgaataaacagttatattccatattggccaattgactaacagatagtaaattgtaaccaagagactcaacttaaaacacattggagatagagtgctcattggaaattgaattttacctaaccctttaccttgcttgattccataccgaaataatgaatcttggaatcttattctgacgacgagggaacatctctttcccgtcatat

SEQ ID NO: 22213 - DNA, 435 bp, Zea mays
  unsure (1)..(435): unsure at all n locations
agcttgtggaggaccctatcatcgaagcatataagtttctggatgagaagatgtcacccaagttcccgtgatgaagcactagaagaccaatcaaggaaggaatccatgtgggagttcacaagagataggtttgcgtgttggcatcgatgcttcttcaataagctagctgccaagcgaaacctagaatgctgaagatgatctttgagtagtcagaatcagcgtttgcaaccggatgctcctgataggccagattatgttgaagctctatctcctcgaacagtctgtaaagtgaagatatgtagctgaagtaaagctatacccataacccttctaagtcgaatctcgaggacgagattccttctaagtggngtagatatgtagcatcccagagagtcacatcctgtaattttctcaaactcgctctcaattcaaatg

SEQ ID NO: 22214 - DNA, 274 bp, Zea mays
tggacggtgatcggcggacgatgtcctgcaggatgtggtccgctacctttgatgatggaaagctacacattcatcatatgcttctcgccggtaatgacaccggctgatccatagatcagcattgagtaatatggtggaacatccggatatgagagcctatgatgattgtgatcacgcttgctaccatgtgagacacaattgtccacttatatccttaatacaggcacgcctaacatggactatgatctaatcctgatttataggctgacctaga

SEQ ID NO: 22215 - DNA, 291 bp, Zea mays
ggcttgatttattctttatttatcaccctctagactgatgggtcgagtgagcgagtctctcagcgattggatatgaatctcaaatacgctgtgcagtgcgaccctctcaaagggaaaatcttgctattttataccgagatgtggtataatgccacttaacactcctcattgtgttgttcacctttccaagtcccttatggctatgaatcattagctcttggcaaatctttagacacaagccaagatgataatggaactgtcctatgtgctctacactgagctgatcttatt

SEQ ID NO: 22216 - DNA, 397 bp, Zea mays
  unsure (1)..(397): unsure at all n locations
agcttgcattgcatgtttaagtttcttggattgcatctagggcttgtctaacctagttgagataaccgccaacaaagcgagtgaaaaagcttaactcggatcaaacttgacaagtcttagttntaagcttttagcacttgaattcttacttnttatgcaaatgttgggtcttgaaatatgcatgaggtactgcacttatggggagtattcaaaactcaaatcactcatgaaaacccctagtgcaaggccaaaatgcaaatttcaccattggcctattttctctaaaaatatctagcctatggcgaaatattttgaaaaatatgagataatatatgagggtgccaatacctgtcccaacaagtggtattttgtgtgattataagttgggatttggttt

SEQ ID NO: 22217 - DNA, 429 bp, Zea mays
  unsure (1)..(429): unsure at all n locations
agcttttcttcaattggngctattcggagcctatcacatatatcatcgttttgaactcgaactcttcttctatggccacaaattctatgcaacacacatattgtcgcaatacttataattgaacatggtgtctttttgtaggccaacatttttgcaccatacaacactaacctcagattcttagatcctacacgcaaaacgtctattggtgtcatcaaaagagtcatccgactcaaatgttgtatccctattctgtccatngaacgattggtcaaaatactctcgccatctatgcctaatggtttcacattagagtaattattatggcttcattgaagaagacaccggtttcaaattgtgatgtaactccctgattatttccctaacagatacatagctatgaaacatctctttctcgaatgaaagtag

SEQ ID NO: 22218 - DNA, 405 bp, Zea mays
agctttgtttctgtgcacgcaagatcacgaagaataccttcaggcgtatgtccgaaggttcttgcgtctgaaggcacaagtgccaatagtgcccaatgaaattgtcattgaggccatgatcaaggggcttctgtcaggacctacggcccaatacttcgccaggaagccccctcaaaccctggagaaattgcttcagaagatggatgaatacatccgtgctgataatgactttcgtcaaagaagggaggaagcttacagattctccgagatgaccaggggctttggagggaggattcatccaaggcatgtcagatcaatccactccacctataatgacgacagaggaagccagcaacagaggccatagtgttcctcgcatgcttcggggcagcaacaaagctacct

SEQ ID NO: 22219 - DNA, 395 bp, Zea mays
  unsure (1)..(395): unsure at all n locations
agcttgacaatgatgatatggcgctcgtcattaagagcttccgccaaatcctcaaacaaaggagggggaaagactacaagtcccgctccaagaaggtttgctacaaatgtggtaagcccggtcattttattgctaaatgtcctatatctagtgacagtgatcgaagcgacgacaagaaggggagaagaaaggagaagaanaggtactacaagaagaagggcggcgatgcccatgtttgtcgcgaatgggactccgacgagatctcaagcgactccttcgacgacgaggacgccgccaacatcgccgtcaccaagggacttctcttctcaatgtcggcacaagtgcctatggcaaggacggcaaaagaaaaaggtaatctaactcctcactaatat

SEQ ID NO: 22220 - DNA, 435 bp, Zea mays
  unsure (1)..(435): unsure at all n locations
agctttctcaccatgtacaacatgcttaatgaaacttcatagaatgatgcagtttaatacgaaaacttggtcatcaagcagactggtgaccttctgaccagtcagcactaaagtaggtcggctgcctttctggtagatttgattaagtcggccttaaaagcattggaaactagacttcaagagctttccaaaaagtacttatgggccttcatagcttttgggaatcaaagatatgactggttcttctggacggttcttgagcgctgaactgactcagacatagctcttcttggtgattcgcctttgatatngtttggtcttcctaattggaaacctaagaatatancatacacgacttnggtagcataaaatctattagtggttaattgaaatcataaagtagcatgtgcatctcttgctgtagcttcttagctc

SEQ ID NO: 22221 - DNA, 406 bp, Zea mays
  unsure (1)..(406): unsure at all n locations
agctatggtggttctaacttgagctacttttgntagattgaattgaataccctaaaccctaaaccaataaggaatagtttgcatgcctttagatgtggggcctctctcctaaggctgtaccatcattagtgggccctgatcacatctttgttttgtgaatgggttacacttaactatcctaaatccttagctcctttgggggcacttaagtcctaaagggacaagttctggactccctttgagcacgaggccaatgactctttaagaaccccgagtccaacaagggcggaagcagctattaaatgtttgctatattataaatatataatatcaatgtgtcttatatttctcacaataaatgtggtgtatcgactaatatcaagtctacaaatatttcatcttttgt

SEQ ID NO: 22222 - DNA, 353 bp, Zea mays
  unsure (1)..(353): unsure at all n locations
agcttgtgaaggttctttatcctcacatgtgctaaacggtgatgccacagccagcccatgcaagtcttagcaattaagcatgcatctagaccggcctcctcttttgcaaaatcaactaaataaagtttgccgtctagtacacccttaaaagctagtgaaccatcacatcgtctaaagacagacacatctacatttgtgaatatacaattatatcccatattgcataattgactaacagataacaaattatatccaagagactcaactaanaacacattagatatagagtgctcagatgaaataggcaatttacctanaccctttaccttgccttggttccatcaccgaaatta

SEQ ID NO: 22223 - DNA, 215 bp, Zea mays
agcttggatgataagggatggggttgaacactgatgggactttcccagcccttggcaccttctgccaaagagtgactagttcctcccaactcgcaagtgggaagtcttgtgaggctggcctgtactgaccacgggtgagaggggtgtggggagcccaaatgccccacgccgcgggaggaggagccttcagagacgacacagacgatgcgtgtgat

SEQ ID NO: 22224 - DNA, 423 bp, Zea mays
  unsure (1)..(423): unsure at all n locations
agcttggccattatacttatgtgtacctactcttaccttagaatctatttattatttatttgcagccttagattaccaaaatctcatattttagttcacaagtatacttgtgatattcattattttcactatttgacaacctgagaaaattttctttcctatttggcacaacaagagcattcctgttattttgccagtcacttgacgctgataccagcccagatccaccagagtgtcatttactaaagaaaattttaacgcattacctggtaagaaattttccaaaaaacggtgccctaaaaggatgtctggtttgtcttagtgccaaataaataattctctcttgcttttatctntcagaccgtaatgaaacacagtgtggtggataaaccaagttgggactgtggtcagtctatttaccgc

SEQ ID NO: 22225 - DNA, 429 bp, Zea mays
  unsure (1)..(429): unsure at all n locations
agctntatgggctcatataatatctaaacatagtgctactaaagtatctccttttgagcttgtctatgggcaggaagcagtattgcctatggaaataagtttgaaagctgtcaggttcgccagacaaaatgatctaactgtcactgattattataattcaatgatggataatattgatgaggtgaccgacaagagggtgatagctttgggagcaatagaaaaggacaagattatggtagccagggcctacaacaagaaggtcaaagcatagtcatttcaagtaggggatctggtgtggaagaccatcttgcctctaaggaataaagaccggaagttngngaaatggtcgccaagctgggagggtccttataaagtaaaacaggtgatgtctggtaacgcctatttgctacaaacattacaaggcaagga

SEQ ID NO: 22226 - DNA, 268 bp, Zea mays
gagctcctctctgctggctgcgaatcaatggagacgcgtgctttctgtcgtgacggagtgcccctgtcatgcctgtgtgtaggcttaccttgcaaggatactaccttgattgcaatcgtctgctcctctcactgatgaaactgctcgacccctgctgctacattgagtaacaattgaaatgatgcctcgatgatatcacatgttgattgctgatatgcctgctcccttgtctgaatagataccacctattatccttatgagaccacac

SEQ ID NO: 22227 - DNA, 438 bp, Zea mays
  unsure (1)..(438): unsure at all n locations
agcttatctacgcttttgtggttattattaaatcttaaggtaagaacttctgtacttatgacaagtcaagtatagcaaacggtttaaaccgattgttcgggtcagtttgtttggtgttgaaaaacttcagtttgcccaaaacgacaaacgatgaaaaacaatccgtgtctgtgttagtgtggcatgccaccatcataattcaaacatattacatagctgaaaccacaataatagtttgagagntatatatgttaatgacatagtattatgtttgcacctatgtgacagccaatgtgaaagcaatataagtagcaactaattaatacgaactatacatagaacagtaccaataatcaaatgtagcagtaattgaagtacaattataagtgcatatgatgacctttgcaagaacgataggtgcattataaacaattatat

SEQ ID NO: 22228 - DNA, 388 bp, Zea mays
agcttgcagcatattaaaagaatatagaattctccaacagcactgaacagatgagcatcttcactgatctccaacacagaccacacagcttttcagataaagaggaaaggagaataatgggtttcccaactatataactaactttattgacatagtatgtaaaccaaaatgcatgggatacccacactctggtgacaatcattacaaagatccaaaccaaacatagttcatcatgacaaacataaatgcacaggatatagcaaactaccctgtctaactaaaactaactaagaccgagactaacgctaagactgaagcttccatgtatatatttatttcgtattaattacaagatccaactctaacgatctatggttctaggggtatc

SEQ ID NO: 22229 - DNA, 418 bp, Zea mays
  unsure (1)..(418): unsure at all n locations
agcttgtattantatggatcacagagctaccatatgtggcttggagcctgagaactcaacccagtcgagctctgcatggaaatacctcgttcttcatggtctatgggtcagaggcagtgctgcccgccgacctgatattcggggcgccgagattgactttcaaaagcatagccaaagcagaagctaccaggctagaagatatcgatgtgctggaggaagaacgattgaacgcaataattcagtcgactaagtaccagcagaccttgaggcgctatcatgataaagtcgtgcgacaccggtcctttgtagtgggagacttggccttagccgaattctaacggnggaaggatgacacangctgtcaccactatgggaagggccattcatcatatcagagatcactcggtcaggatcatat

SEQ ID NO: 22230 - DNA, 431 bp, Zea mays
  unsure (1)..(431): unsure at all n locations
agcttacccctccctgggaagggccgttcatcattgccaagattttgaagcccggaacatacaagctggccaacgatcaaggcgaggtctacagcaacgcttggaacatccaacagctacgtcgcttctacccttaagatgtttcaagtcattcatatacctcgttttttctttacatacacgaataaagtccaaccgtcaaggaaggatcagccttacctcggcaaagcccgaccctccctcgggggctagaagggggaaccccctctgcgtcaaaattttcctcgaanaagtcttttgccagaacgtctntcgcacttttcgactgcttcgatagcggggtcctaaaaacaacgagagtacatgtaagcggcatggccgaccgagccgagggactcctacccctccgggatacggatacctcactcatc

SEQ ID NO: 22231 - DNA, 391 bp, Zea mays
  unsure (1)..(391): unsure at all n locations
agcttcgcacctctaaactaacttggctgcatcactcttcgctgttggccaatagaatcctgacctaaaaaccttcccgactagtgtcttggacgccgcatgtgttccacattgcccggcttggacctccttcagaagtcgcttcccagtagatgaaagaatgcacttcatgagaacgcctgatgcaccccttctgtataatgtctcttcaatgagtgtgtagtgagctgacttgttggcaatgcgctcggctgcatttntatcatctggttcctcttcattctttatatacctgatgaatggccttctccagtcatcagaagtctgactcggttgattataaatatacactcttctgcttgatccgtgagatgcttcgctgtagtatttc

SEQ ID NO: 22232 - DNA, 405 bp, Zea mays
  unsure (1)..(405): unsure at all n locations
agcttgtcttcggctcattctccttcttcatccagatttgatgatagcctgagtaacagtccaataagctcatgagctccaaagtagttggtgtgtccacaagggaatctattcttggcaatggaaaatcattccttcggcatgccttattgaggtctgtaaagtggatgcacattcttcattttccattagctttctttaccatcacagtattagccagccactttgggtatgtcacttctctgataacactggcactcagaagtnctttcacttcgtttcatgcaccttcggctttatcatcagacatttntcgaagcctctgctttcttggtctgaaggctgggtctacattgagtgagtgctcaatgatatctctattgacaccacagagatcattggctg

SEQ ID NO: 22233 - DNA, 421 bp, Zea mays
  unsure (1)..(421): unsure at all n locations
agcttgagaaaggaaaaactgcagcaagtgttaagctcaataagaagaatgttccccaagctattaatgaacaaatcaacatgaacgaggaaaaaggtcaaaattcaattattcatgttgcttgcactgatcatctctctatgtcatccaagagcaaaaagggaagaggaaaaaggatgtgcttcaagtgcaaggaattaggtcacttcattgcgtcttgtccacacaaagacaaggatgaaggaatgaggagatgctttggatgcaacgatnaggaccatatgatcacttcatgtccgctcatgaagaatcaaaaacgtgcacccttcaagatgaccctcactaagcaaaaagaccaacaacaagtgtcaagtcaggttgagcgacgcttctgctacatgtgtggtgagcatggtcatct

SEQ ID NO: 22234 - DNA, 326 bp, Zea mays
agcttcgctgtcctacggtatagatatcaacgcagcataccctagcacgccacaaaggcacaacaaatgctaatcgcacaaaactgctgcaaaatccgaatagaaaattagctacccttctccaggggctgaaccgctgttgccccgctccaagagaggaagccagccatacttcggccgcccctgtctcctcgacgcatccgccgcacgtgacacaatcgcacaaccctaccagaaacgacaagaacaaaacaaggagcaagagaagagttagagaagaaacgtacggagcgccaggcgcgggagatgactgacctcgaaaccta

SEQ ID NO: 22235 - DNA, 307 bp, Zea mays
  unsure (1)..(307): unsure at all n locations
agcttgagttattttattacttaccagactaaaagtgagtgccgagtagtaatattacacaaaccaagggaggcacaaactcctcccgaatagctataagtaaaagatcctatgtggaggaccaagtcctcccgcacttcagtcttgtttttcttcttttgggaccaccttggcacagaagcagcaaaagtctgctacttcctcacctaaaaacaacgaaaggataaaccctgagtatggaattactcaacaagacttacccgactaaagaaaagactctcaanggtatgctggttatatgggagtc

SEQ ID NO: 22236 - DNA, 436 bp, Zea mays
  unsure (1)..(436): unsure at all n locations
agctttgcttttgttcgcgtggccggctttctcccgtacgtcgattcgtccaaggaaaaaacaaattggcatgagaataagatgcctatatgtcaagcttatctgtgttgcttttttataatcaaataaagttttatgacctaggaggcttctatctacaaacgtgttctctgtgtgtactacatatagagatatagaggcataataaaagtgcttctttgtctacataaacattatatataactaggtttatgtagtatacctagatatataatagtacaacttattggtgctaaactatataaattggagggaaatgatatatgtttgacaatctacgctttgtttggatcataaccgagttattatattctagattatgcatataataatgggaaacgatgtgttngacaatctatgctgatgtagatataat

SEQ ID NO: 22237 - DNA, 438 bp, Zea mays
  unsure (1)..(438): unsure at all n locations
agcttgtgcatagtccactcgaactaatcttcggagaaacccgacctcgttgcaacatgacaccagaatgtccaacacaacaagcgttgaatgaattcagaattattgcagagcatatcagtacaagaaacctggttcaggagtntttggctttcaaagcttttcctagtttaaaagaatgggaaatgccgaagctaaaggtggagaaaaaagaaggtgaacttgtgcgtttaccttactatttcaagtttaagaaatactntaaaacaccttgccaagagtggctggatacaattgaagtaatgtgcaatgaaatacttggcaactactccaaaaaagaagatcaattgatgactgcggccttcagcacccgtccgaagcgaagactgaatcgagtgctggacgccttgtgttntgaataccctgactatgaaaatc

SEQ ID NO: 22238 - DNA, 434 bp, Zea mays
  unsure (1)..(434): unsure at all n locations
agcttctaccctgttgccccagtgatcggctaagcatgtttgaatagctctctggtaagtcgctccaacgttctcgaggccaaacgacatggaggtatagcagaaggctccaaataaggtaatgtatgcaattgttttctcgtcctcttttgccaagctgatttcatggtatccaaaagagcagtccaggaatgacaacatagagcatctggcggttgaatctaccacctgatctattctaggaagtccgaagggatccttcggacagtgtttgttgagatctgtatagtcgacgcacatgcgccaatccactttattctntntgagtacaagaaccgtgattgtaaccactcangatgtagtacttctctaatgaatcctactgcgactaatcgagctagctcggcacgaataacttctctcttgtcgggcat

SEQ ID NO: 22239 - DNA, 419 bp, Zea mays
  unsure (1)..(419): unsure at all n locations
agcttgtgagataaatattatgtattacataagttcatctctgttctaaattttaggtcaccataaaataaattgatctatgattatgtacttgtaaataacacttaaggaaataataatctattttcaaataaagttaatgtatgccatagtttatgttatactttgaattcattatcccttatgtagtattatgtcttttaaagatgtgttccaatgtttgtacatgtttggtgtgatgtttatttgtactttccacatgtattgaatgcatgctcgctttatttagacgacgagcagtccgaggttcttgagtgtgttgttggagacctccctgagcaacaacctggtgaaggcaagtgtcctctgacctattatgtcctgcatactntatgattcactatcccacattactttat

SEQ ID NO: 22240 - DNA, 359 bp, Zea mays
agcttgcaaaccgtgtggttcaaggcgaaggctctgatcctccccgctgtcgtaacgtcccccacgcttggggtggtagcctcagcgcaccctctcgtcgaggtgggcttgacggtcgcggcgatggtgctcgttgccgaggcggcccggggccacaggcgctatgtcccgcgtgcgcccggtgtggaccgaggccttccgcatgaatcgggaagtcgtggcgcgatgctccggggggtatccctgccttcaagaggcagagctttcggcccgttggaccgcggcatcctccaggagactcctgagttcttcctggataccgccgccctcggtggtggatggttctggcatcgctcgga

SEQ ID NO: 22241 - DNA, 407 bp, Zea mays
agcttgctacgggccttcttctttttctccatagcaggaaccttactggaacactaccccacttaaaaaggatgagggtagatctcttggatttttggggatttgaactccttgaagtgcctcataacaagggtgttacggggccttcttctgctgttgctgcttgagcaggctgcggagaaatgactgtcacagggttgattctgggagaaccttcttcttatcttctcttcactatcttcttttcactgaccctttctttctctttgctcttcccactggaggattctatcaaatagtattaccatcatatagaggaggaaaccaaagatgttgaaccatgtacaacagtcttcaacccaagaatcaccaagcattgtgatcttaggggcgagggagtgggaaat

SEQ ID NO: 22242 - DNA, 435 bp, Zea mays
  unsure (1)..(435): unsure at all n locations
agcttctgattctcataagctttaattgatccaccaagctttgttgctcctcaatgatcatctacaagtatcttccttgtgcttcaattgttagttgcaattgtatttgaacctaaaaacgtaatttattcagacaagcacaagaaagttggcaaggaaaatttagattgatcttgaagctaanaaggcctcaaaaactacaagcaataagacaaaacagaagaactgccaacaatagattattgacagctaagcattactacaaccatacccttaggtgtaacttgacagttaataagtgaatattaataatgggccaaaatatcagcttgtagaaagtagcccccagctaagtaggactgccgatcgtagtaagatngtcggtaaactaaaatgatgtanaanatagaaataaattaacagttttcaataaca

SEQ ID NO: 22243 - DNA, 388 bp, Zea mays
agcttatcatctttgtttacatctgcgttcaacaggaaaggagttccctccttaagaaactggccactctgaaggacttggatcctgcagataagcttgctgcagcagatgttgatcgatcaatgcaattaagcatcacgggtttggaaacattctgccttagcaataagggtttctattttaatagtttggttaaaactttcctcatgtttgtcttgtgatagtgaaatgatatacttgttgtaccctgcaggtccagtggccgttatctcttgtaatttcaaggaaggctttgacaaaataccaattgatctttcgcctattgttccactgcaagcatgttagtcgccagctgtgtgcagcatggcaaatacaacaagtatgaatg

SEQ ID NO: 22244 - DNA, 417 bp, Zea mays
  unsure (1)..(417): unsure at all n locations
agcttcggcttcgccgctgatccattcaattggaccttcgggatcgcccagtatgaagttgtcttcatttgaatatgcgccaatatttgcgaagctagtttttatcctttgtacacatgctatagattttccatagcatctttcttttgaagagcgaagctctacaactggttttcccaagaatttttccagtagtcactggcgtctcggtcagcttcagcaatagcacattttaattntacctcttgcagcagtttccaaagatcctcaattttgcttctctgggcttcagcctgggctttgaaagtagcttcgtcttcttttattnntgtcaacaatgagtttaaaatcttatctttttcagaactttgtacttagttaattacttcggaacgaagggtgtcaaagctatagtac

SEQ ID NO: 22245 - DNA, 403 bp, Zea mays
  unsure (1)..(403): unsure at all n locations
agctttaccttgattcccaaaagccaccatatccttgagagtcttttcctttatcgggtaagacttgcgaaagtacacttcgtactcagggttttcgaacccatgttgttgtatgtgaggaaacaacggagttttgctatttctgttcttaggtggtaccaaaagaggagccgaagcagtgatcgtgcgtgcgggaggatgtttgtctcccagtttgaaaacaataaacttttgtgcgggagggtgttttgcctccctggttnttaataatattttattcactcatagctcctgtactgtaataatactctntctctctatantttatgaaattgaattaagttattgtaatccgcttccgcttattccatccttcgatgtgatgtaatgtctgcatgatggg

SEQ ID NO: 22246 - DNA, 340 bp, Zea mays
cgagctctgatctcgcgccccgaatcaatcgagacggatgctttcgtgcgtgacaagatgcccctacctatcatgtgctaaggggctacccgcgaggcaacccactctattcttatcgtctgcttctcgccctaatgagactgcttgatccattgcactgtattgagccctctgacgctgcctgatgagctgagataacatgtctattgttaataacgcttgctcccacgtctgagaatatacacctcttttcgcctttacatagtcgcacttcactttgcctattgtaatatcttgaattacaacatcaacattgcttattgcatgcacacgccacata

SEQ ID NO: 22247 - DNA, 444 bp, Zea mays
  unsure (1)..(444): unsure at all n locations
agcttgtggtcgcaacctacatgatacatggaggggctgttctttaaaaactataatgttttgcattggaaaaaaacaccgtaaacttagagcatgtttgtttcagcttatagattatataatttggattataatctaaattatataatccagattataatctagacaaattataatttatatgtagctatttggtagtctgtattatacaaatatagattatccacaaagacaacattacccttgtttgtttattngaagtgagaaaagaaggatgatatatattgtaatttctatgaacataactatgggtagtgaattctttttccaaaaataatcttaaataagatacttctgaggagtttatggattatcataagctaagatgggtttagattatataatctgaacatataanttttgatgtagttacctgctggatat

SEQ ID NO: 22248 - DNA, 430 bp, Zea mays
agcttgatgtttttaatgacatcagcctctcccaaatctttcatctcgaaattgctcgatagaagattcttaacttcctcaatcacattgagatttgatccaaagatcaagatgtcatcaacataaaggcacaacataacagactcacccccaccatactgatagtatacacacgtgtcagattcatttacaacaaagccagctgctgtaagagtattatcaaatttatcatgccattgcttaggtgctggttttaggccatacaatgattttatcaacctgcacaccttgttctcttgaccatccgcaataaacccttctggctgatccatatagatctcctcatccaactctccatttaggaaagctgtcttaacatccatctgatgaatgataagaccataagaggctgccacggctattaatgtgc

SEQ ID NO: 22249 - DNA, 438 bp, Zea mays
  unsure (1)..(438): unsure at all n locations
agcttagagcaagttatagtattgtggcacaagatgaagctcatattctagtgattaccaaaagatatcaattgaagcaaactaccacgactaccaattgaaaaatcattactgttatagttccatgatatttaaagataagcatctagtatcacctaaatattatggagcatgagcaatctataaggatgtaattactcacaacttaagataccaaatacttgtcttatggagatacccaagtcctgattgcttcatttcctgctcatcttcccttttccacaatgactatacaagatcactcaagaaacaattagtctaagtataccatgattaagaaggttccttaggtacaccaaaagaaacaacattntanagtaaggagcacttaagccaagatactaccaattcanaggcaagaacatagctgtgatcaca

SEQ ID NO: 22250 - DNA, 437 bp, Zea mays
agcttaatgcatctgatgaaatacaagacaaacaaaagcagctcttgatttgggagcacggatgtggcatgccaagaacccaagcccaagcagaggtgctgctccatgcagatccactttctcctttgcctttccttaagaggctccaattgcttgctttgttgcaagaaaacgaagtaagaaaggttattttctatgtagacttctttttcttgagttctgaagtagagactaattgatgatcatgccttctgctgtaccactgtaacccattgctataaagtcagattagtaaggcttgaccaaagattagtaaggctagaccaataatgtgaaagatcgtagcttgctatattagcagtttagcacttacatcactaaatgtttaccagttatatttcgattattctacgcgcgcgtagcgcgcgccagttact

SEQ ID NO: 22251 - DNA, 405 bp, Zea mays
  unsure (1)..(405): unsure at all n locations
agcttgatctcctcttgacctataatcttttggggtcgatccaccataaagtgtgacaagaacttctccttcacttcttcgtgcacccgggttcattgcttcatgagatcctcgaattgttgctactcatcgaccgacaaactctcgagaatcatgctgaggatgttgccttgagagatgttggtgcgatccttggaacggatcatttacgaaccgatttaatagatctgagtgagagcacctagagggggggtgaataggtgatcctataaaattcaatactaaatagcgcaaacttggtttataaatgttagtgcaattaaaaccaagttgttaaagtgagaactctagaagataatcaatcacaatgaatagggacaagagacacagtgatttntatcccat

SEQ ID NO: 22252 - DNA, 379 bp, Zea mays
  unsure (1)..(379): unsure at all n locations
agcttcggaaaccctatgtttcttgccatcttccggcaaacagatatttccttgttgtccggaaggcagtacataaagtcatcttcatcagtgccattatacaccaaggatccttttgggtactttaattccctagcatagtgcttagcttcggcaatctgctcttctgacaattgtttacccgaagagtgtcgtatgataaagtttgccattcagtaaacgcttcgggagtaggagaattaacctttttggatgcgccttctttttccaagatcagagtggcatccgaaggtccttgttcagtatcttgttcaatagtttcaacaggccctatttcaatgggcactganggcaaagcttcgacttcaacacgagttgt

SEQ ID NO: 22253 - DNA, 320 bp, Zea mays
tgacaatgccctccttcgcggttaaggcacttgctcgacctaacttgagtgcatcgttgcttctcacactaacgataacgcttgaatcatcgtactgcactgagtaatctgtggaactgaggagacacgccatgcatatgttggttggtgaaaaagacccacaccgtgtctactacctatggctcgacttggaactaaatgacataccttatctctagaagctatgacttgatcctatagtcatgtcgagcttcaggcagaacatatcactgcatctaacacctgtgtttgttcaggtaaaggcacagactactcacgcc

SEQ ID NO: 22254 - DNA, 426 bp, Zea mays
agccggtggtttaattctagccgatagcatttgcttgaatgtaagtgtggaaataagggggatagcgtttcccgctaatctcataataatgggtactcagggaatagacgtcatcctatggatgaattggctagataagtatcaagcagttatcatgtgtgataagaggtcaatcaagttgatgtccccactacgagatgaagtggtgaccgagttggtcccgcctgagccaaagaaaggaagttgttatcagatggctgttgatagttgtgaagcagacccactggagatcatcaaggttgtgttcgagttcccagatgtgtttccaaaagacctaccaagcatgccccctgagcgaatagttgagtttgccatagagcttcttcttggaaccgctcccatttttaagagagcttacagagtatc

SEQ ID NO: 22255 - DNA, 433 bp, Zea mays
  unsure (1)..(433): unsure at all n locations
agcttaatgatgaactggctagtcttaatgctcaacttaagactagcaagaatgatttcgataagctaaaatttgcaagggatgcctatacaattggtagacacccctcaattaatgatggacttggcttcaagagagaagctaaggacttaacaagccataaggcttccattcccgccaaggagaaagggaaggcccctatggctagtaatgtgcaaaagaaccatgcttttatgtattatgataggagacaaactagaaatgcttatanngagtataatgctnttgatgattttgactctcatgccatggttgctcctagttcctcttatgtgtatgatagaaatgttactaggagaaatgtttgtcctaagagaaatactattcatcatgtgtctagaaagaatgctattcatgctcctaggaaagtagt

SEQ ID NO: 22256 - DNA, 290 bp, Zea mays
agcttattcaacattctttgagatggtttggatatgcccaccggagaccacccgatgcaccggtgcatagaggcgtcataagaccggacattaatgtgaagagaggttaaggctcaccaaacttgacatgggatgaggcaatcaaaacggactttgaggaatggaatatcccaatggagttgtattggataagtgtttggaaataagctatacacgtgcccgaaccgtgattaacgctttttacttttagtgctctcaagagcttttccccatcattttctatctttctc

SEQ ID NO: 22257 - DNA, 359 bp, Zea mays
agctttaccaaatggacgttaagagtgccttcctcaatggaccaatcaagtaagaggtctatgttgagcaacctcccggctttgaagatagtgagtaccctaaccatgtttataaactctctaaggcgctttatgggcttaagcaagccccaagagcatggtatgaatgccttatagatttccttatagataatggcttcaaagtcggaaaggccgatcctacactctttaccaaaacacttgaaaatgatttgtttgtatgccaaatttatgttgatgatattatatttgggtctactaacgaatctacatgtgaagagtttagtatgatcatgacacaaattcgagatgtctatgat

SEQ ID NO: 22258 - DNA, 211 bp, Zea mays
agctttccatgttgtgcttgaacattccaatccgagcccgcatctgaccgtggtgaccgtcacaagttggtgttcttctgcagtccgaatccagcatgttcaaatccttctccctttcgggcttctccctggttcctaaacaaaacaagagtgcacgggtctccatggtctaaataagatggacatgaactcaagagagtaatcacctgat

SEQ ID NO: 22259 - DNA, 435 bp, Zea mays
agcttcgtggatatattttccgaagttgcacttacgaagatcgatagtgtatttctttgtaacttggcatgattttccccctttttcaaaacattcttcgaaggtcgatattatggcccccttttgtgctatatgcagcatgatgtatgatgcttatgttatgcgaaatgatgcgatgatgttatgttatgcaaaatgatgtttattccgaatgtacaggcacatcctgcgataaatcacatagatcttttgaatcattattgactctttgctataagcctcccttaggagcttcttcgccttttacttcagcggaatcagcgtttatgtttcgctgtaagcctcccttaggagcttcttcgccttttactttcagcggtattcgcgttgactattcgcgcttcgccttatacttaggcggtatcagcgttgact

SEQ ID NO: 22260 - DNA, 424 bp, Zea mays
  unsure (1)..(424): unsure at all n locations
agctttgcaaatttgtgctaccgctcaacttaatgattttaatgtcactcattaattggtattaatgttccaaaattgaaatgggtaattatgacattaacccaatggttaaaacgacattatttcaaattaattggaacatagagtgaccacccaggataacaatgcaaccacgagtgctatcatggctctggctctggtaattagctttatatgtttagtgcctggcaaccttacctgaaatatgggcaagagggggagcggtaggtgctggcagcccacgttaacatggtgacatattcttgtctaaggtacctcacccagngggccaccaccatcgtctttagaaaccttagcgggttgcttcgtattaagtgtattttgtgaaagactcataatggatccctagccattcacctcggcg

SEQ ID NO: 22261 - DNA, 434 bp, Zea mays
  unsure (1)..(434): unsure at all n locations
agcttatgaagaatcttcattccaacatgggctagtcggcggtgccagagccaacccatgttagtcttagcaattaagcaagtgtcgagttcagctctatcaaaatctaccaagtatagctgaccctctaacactcccttaaatgctattgaatcatcacttcttctaaagatagtgacacctacatcagtaaatagatagttgtagcccatttgacataattgagatacagaaagcaaattgtaatctaaagaatctacaagaaaaacattggaaatagtatgggcaggtgatatagcaattntacccaatcctttgaccaaaccttgatttccatccncgaatgtgatagctcgttggggatcttggttnttctcatatgaggagaacatcttcttctccccagtcatgtggtttgtgcacccgctatcgag

SEQ ID NO: 22262 - DNA, 320 bp, Zea mays
  unsure (1)..(320): unsure at all n locations
agcttgcacgagcttgtatcgatgacccgcgccaccggaatagcgaaatcgtgctcgccggagtttagaaccccgccggcgcacgtggaccgggtaagtcactgcgccatttttcganttaatgcacagatagcctctacatcaccccgtgaagctcaccgtgccattggattgaactagatcgccgtggtttgaccggaacactcgccgtcgacgagagcccccgcctgcgcgcgtggaccagacgatttcggccacccccaccgtcaagccgtacaccgttgtgaccgtcagaacctcccagagccaaccccgcccct

SEQ ID NO: 22263 - DNA, 433 bp, Zea mays
agcttgacattgttccccttttggaagccaatgccatccttgatgccagggcgtctcccactatagagcatactacgagcaaatttaaaattttcattttcaagttcatgctcggcaattttagcatctaattttgctatatgatcattttgttgtttaattaaagccatgtgatcatgaatagcattaacatcaacatctctacatctagtacaaatagaagtgtgctcaatggtagatgtagatggtttgcaagattttaattctacaaccttagcatgcaatatatcatttttacttctaaggtcggaaatagtagcattgcaaacatcaaaatctttagccttaagcaagcaattttcattttcatttctaaggctagcaagagtaatggttgattcttcaatcttagcaagcagattatcattatcat

SEQ ID NO: 22264 - DNA, 417 bp, Zea mays
agcttcaaagaaccaagcagaaactgaagctgggccttccaagcccgccaaggtgaaatccttggaagccgaagaaacagaaacaacagaacaaattctgactgaagaaactggtactgctgcccccgaagcatcttccgcagtacttgattatattgtacgacatgcttcgggaaaaagattatctgaagaagaggtttttgaagctaatcactatgcccgagaactaaagtatccaaaaggggccttagtattcaatggcacagacgaagatgacttcttatactgccttccaaacaacaaagaattatctgtcttgcgggagatgactagaagtatggtgttcccgaagcttgaagctggcctcttcgctatgacaaaggacgatcttgcagatagcctcgcatataatagtct

SEQ ID NO: 22265 - DNA, 421 bp, Zea mays
  unsure (1)..(421): unsure at all n locations
agctttatatggacgactgtgtcgaactctgctaaattggtctgaacctggagaaagatacttctttaggcctgatatggtgaacgaggtcgaagaaaatgttcagaaaatttttcttaatatgaagaaagctcagactcgacaaaagagttatgcagaccgacgacgacaacccttatgctttctggtagacgactatgtctacttaanagtttcaccaatgaagggtatatcgtgtttcggggttaaagggaaacttgcacccaggtacattggtccattcctggtgcttgagcaatgtggaccagtggcataccgactccaactacccgaaacattgtctgctgtgcataatgtgttccacgtgtcacaattgaagaagtgtcttctggttcctgatcgaaccattgaagtgactgat

SEQ ID NO: 22266 - DNA, 422 bp, Zea mays
  unsure (1)..(422): unsure at all n locations
agctttagtgttaagtgatagtgatatgtcgngttctttcgagctcttgcgcttggattgctttcttctttctcattctttcttgagatcaatactcacttgtaaccaatgcaagagacaccaattgtgtggtggtccttgcggggaagttttgttcccggttaagttgagaagagaaagctcactcggtccgagggaccgtttgagagagggaaggggttgaaaaagacccggcctttgtggcctcctcaacggtgagtaggtttgcgagaaccgaacctcggtaaaacatatccgcgtgtcatactctttattcgcttgcgatttgtttagcaccctctctcgtggacttgattatatttctaacgctaacccgactttgtagtgtgattaactatgtataattcagattcagcctatca

SEQ ID NO: 22267 - DNA, 441 bp, Zea mays
  unsure (1)..(441): unsure at all n locations
agctagcacacatatttcttttgaataccttagatcatatctcttttatatgctatgactaatgtgtnttcaagcttatttcacaccaagtcataggtatattgaaagggaattggagtcttctgcgaagactaaggcttccactccgtaactcatacttcgccaccactccgagcaactctctcttcttcgggggagaaatgagcatcaatgaaaaggacttcatccttgtgggagagagtaaaagctcaaacgcaaaaggactgctgtcttggtataatcataactcacttatctatgaccaatggggaagattgcacaccattggctatattgattccgtttttggcgattcatgccagacagggggagaaatgatcccatagcataaggaccgcaccaccaccaccataatcataaacttagtgcttcgcaatagtc

SEQ ID NO: 22268 - DNA, 237 bp, Zea mays
agcttgtgaggattcttcatttgtgcataggcttacccgcggagtccgagcatacggtgtaagtctctacccataggcctatgtggagatcatctctatcataaaccaccgaagatagctgagcctatagactgcctatatggtgttgaacattactctgctaaagatatgacgcctgctcaatgatagacatgtgaccccatggagatcatgagaaaccactacggctgatgtaag

SEQ ID NO: 22269 - DNA, 362 bp, Zea mays
  unsure (1)..(362): unsure at all n locations
agcttcagactcctcccgaatatcgcattggtgctcagcgtggtgatgcccttctggctgctgactgcgaactagagtaagtgctattggtggtggtggtggcccacgaagcttgagaatggcttaccgaagcgacaaaagttgtaggttgttgattgcctacatactctgggacgtanggagagtagcatgaagcagtatgtaaaacctgcttctgctgattctgtcgtgcttcagctttggcaatctatttttgcttttgaatcgtaacctggcacgttcttttggtatgccctttgtcttcgccacagaacaaacaaaacaatttcctgggctggtcttcatatcttccttcgaaacat

SEQ ID NO: 22270 - DNA, 437 bp, Zea mays
  unsure (1)..(437): unsure at all n locations
agcttaacggttgactataccgaaaccgaagctcaatggatactaatgaagcttaaatagataactttccatcaatgtataaagtgctttggtgtgaacgaaattagcatttttgagccgaaggcgaaaaacaccttccattcttttcgtacacagcgaagcataaaaactgcttctttttcttttccctttttttccgaagcctggtccttaaggccgaagcaactacctgtgttatgatgatgatgatcatatgtatgtctaaatgaatgtttatgaatgcaaatgtatgatgtaatgttccgtgcaaatgaatgtccaaacacacacatacgaagccacaatcatagccttcattcccttaagaataaccaaagtctcttttgccgtttattttcggcttcaccgcttatntttcggtgtatcagcgctgtctt

SEQ ID NO: 22271 - DNA, 408 bp, Zea mays
  unsure (1)..(408): unsure at all n locations
agcttctaaagggagaacacgtgataggtctaactaatgtaactttcgaaaaagatagaccttgtgcagcttgtcaagcaggtaaacaggtgggaagctctcatcataccaaaaatgtgatgactacatcaagacctttggagttacttcatatggacctcttcggacccgtcgcctacctaagcttaggaggaagtaagtatggtcttgttatagctgatgaatttgtaacaccccaggtggtactcagggtgtccacccagggctacaccatttaaacctactatcacatgtgggttagtttgagcaaagtacatcaaacctagaattcaaggtcctaagcaagtgcaacccatcttggatatcataccctaacttatcatgcacantctanagggagaatttcca

SEQ ID NO: 22272 - DNA, 432 bp, Zea mays
agcttgtgatcattacttgttcagaaaggacaagctgcttcggctgaccaaccgaaacccatgctcttatgtgaggatatagcagagcagaaggtgctattgggatctcaattgtccgaagagcaggagaaaaccttgataaggtttttgtttaacaataaagatgtttatgcttggtcagctaatgatctttgtggagttaacaaggatggtattgagcactcgctcaatgttgatccatccttcagacccatgaaacagaagcttctgaagatgtctgatgacaaggccgaatgtgctctggatgaagtgaacagactcctcattgccggagttattagagaggtaacatacccagaatggttggctaacactgttatggtgaagaatggcaatggtaaatgagaatgtgtatcgatctactgacttcat

SEQ ID NO: 22273 - DNA, 357 bp, Zea mays
  unsure (1)..(357): unsure at all n locations
agactggatgcgtctattgggactctacttggtgtagactcttctttcttctcttccagttctttgaatgcaacaggttgtacctcaggtgtagaggtggcaccttgctccaagttgacaatgtgtttggagtatctgatcataagttcatagctcacaaacatgccaataacctcattgngggacatctgcttgtatctatgatctccacgaattaattgaacttgagtaggattacgaaaaacgagagatcttagaataaccttgaccatttcatggtcatcccattctgagctcccgaggttgcgcacttggttgaccattgtttttagccggttgtacatcacttgaggcttc

SEQ ID NO: 22274 - DNA, 429 bp, Zea mays
  unsure (1)..(429): unsure at all n locations
agcttaatgcccctaatagattgtctaattttgttaagggtaaggctcccatggctcatgataacgagggttacattttatatcatgctagttatctcgaacacaaaattaggagaattcatgctaagaaaactcattctgtttctcaccatgcatttatgtataggaatgaggcttctagctctaggcaatctacccatgttaaattgcctaataagaaaactcctattgcatcaaatgaacctaatatttcatttaagacttttgatgcatcttatgttttaactaacaaatcangcaaagtagttgccaaatatattgngggcaaacacaatggctcctagaacttgtgttgggtacccaaggtgcttgtttctaatgtgaaaggacccaagaccgtttgggtacctaagaacaaggcctaaattg

SEQ ID NO: 22275 - DNA, 429 bp, Zea mays
  unsure (1)..(429): unsure at all n locations
agccttcttcttattctccattttaagggatccaatcatgttaataaggaacaaattggaaatacgtgacttacactatgtatgcttacgtatcgaggttttcaatatcgatagagttccaaaatcatctcttctatcattcttctttagtcatcgtgttctgctccgcaaatcgctgtccgcgttgctgcgcttttattttcgcttcgtcacgttgttcgtccatgagctaaaccgcattggagacctaaatgaaatgttgtcgtgcatgttgtatcttcttcgtgctgacttagcgctgctntgtcagctntcataataagaaatttcttttttgaatatttctgactgcttcacattttgtattatattctntaanaatctgtgaatcactaatataccttgcttntttatttagcctacaacgac

SEQ ID NO: 22276 - DNA, 160 bp, Zea mays
cgcctaaagcactggtcgtctgttaagcgagaggctaaggatgtcttgcctgacaatttcaactatatgaggtatcacactctacaagttgatactttgcgaataaacataatgtcttagctcgaatgaaatggtacgatgatgatgaactatagatgcc

SEQ ID NO: 22277 - DNA, 415 bp, Zea mays
  unsure (1)..(415): unsure at all n locations
agcttgtgaagattcttcattccaacatgggctagtcggcgatgctagagccaacccatattagtcttagcagttaaacaagtgttgagttcagctgtgttctcattaaaatcaactaaatatagctgaccctctaacactcctttaaatgctattgaatcatcacttcttctaaagacagtaacacctatatctgtaaaaagacagttatagcccattttgcataattgggatacagaaagcaagttggtaaaagaatctacaagaaaaacattggaaatagaacgggcaggtgatatangcaatttaccaagtcctttgaccaaaccttgatttccatccctaaatgtgatagctctttggggaaatctttgtttctcgtaggaggagaacattctcttctctcctggcatat

SEQ ID NO: 22278 - DNA, 218 bp, Zea mays
  unsure (1)..(218): unsure at all n locations
agcttcctggcaacagtcttcgtctccaccaccgttgcaacaaggccatcagccatataggagccaatatgcttcacaccaaagggactttagagaacagtccgaagctcgcacagtcaatagcactgtgccagagtcaaagcacatctattgacaaatatcctaccttaatagcagtctttttcatttcagntttattttctgtaataaaagacatt

SEQ ID NO: 22279 - DNA, 411 bp, Zea mays
  unsure (1)..(411): unsure at all n locations
agcttatgcatttctcttgaagttccttcaaggatgtttgcaaatttgaattcttctccatctcagttttaagacttgcttcaaggtgtttcttttcctactcagctttntctgattgtttgagcaactcattctttaaactgtcattctcggcttggacctcagccaaggagccttccatagactgaataacaaagtctttcttttctaatgcaccttcgtgttctttaatcatgatttcaaggtcctggatggtgaagtccttctttttcagaacagcttcgtaattttcaactttttcttccaaatctttgatgaataagtttgtcttctcctcttcgagatcttngtgcatatttagaaccttacttaatagtatactctgccaaaacaatcttcgtcagaaaatga

SEQ ID NO: 22280 - DNA, 197 bp, Zea mays
ataatgggacggtgaatgtgtgtgaccggtgttctgttgtcggtgttagtttacttgcgggatgaaaactattaaaacgtctgcttctggagttaatgagacttcttgatccatgctgattcattgagcaattaatggaactttgaagagcttacataagatgttgattggtcataatgcttgcttacatgtatgag

SEQ ID NO: 22281 - DNA, 436 bp, Zea mays
  unsure (1)..(436): unsure at all n locations
agctttgaatgtttatcatcaaactgagttctaatatcaaccataatggccatcggcacaccgaagcgacaaacaatattttgccataaaaacttttggaccatggccgaagtgattatagctagaggtttagcttcaatccactttgaaaaatattccaccactactataacatattttaaatttccttgagctagtggaagtgggcctaataaatctagaccccacctttgcaatggccaggtgggctggattacttgagttagagacgaacgttgtttatggtctctggcacacttcttgcagttttcgcattcttgaactaaatctgttgcatccgaagctgccttcggccaataaaatccttgtctaanaactattctaagtaaaggcctggacccaatttgagctccgcacagtcctgtatgtatctcct

SEQ ID NO: 22282 - DNA, 432 bp, Zea mays
  unsure (1)..(432): unsure at all n locations
agcttgtatgtttgtatctaccaaagatgtggcatcaggccaaaccgcttgggtgctcggtggcttaacacaaaaaaaagggaggaaggaccgaaggggagagacttaaccggtggtgggtgctcgttgcctgccaacaaattccagtaagaaccgattggaccaaggatgaaacatggcattcacttgatctggattttgaggtggaacttgagatctggtgactgggtacgaggtgggcggccaccgtatgcctcaagacagtagccgtcgggccgaggaacatgccgaggtgcgcgaccaagggcgggatgcgcangggcagaagcagaagtccttcacgccggagcagggctaggcgacagtctgcacatctggtacacgagctagagcgtcnggaattagaagcagcagggatgcataccggtgcgt

SEQ ID NO: 22283 - DNA, 450 bp, Zea mays
  unsure (1)..(450): unsure at all n locations
ttcggcgaatcagctcggacccgggatcctcttagtcacctgcggcatgaagcttgcaccggttctatcatcgagctgattaaccaatccgtttttatcgtcccgatgtgaccaagttggcattctttaattggactctactaagatctcatctgatcgatccgtcgacatataatgggcatggtaaacttgacacttatgccattctcagtggtttggtgacacaattttcaatgttgccacgtcaatcactaccggaatcgacctctttgccgagtgcctgaagcactcgacaaaacttgaaaaacactcggcacatgctntgtcgagtgtcgtactcggcaaagagggctcgacgaacagtacatcggtaaagacttctttgccgagtgtctcctaatacactcggcaaagaagttcctatttgccgagtgtctgccggccatcact

SEQ ID NO: 22284 - DNA, 318 bp, Zea mays
  unsure (1)..(318): unsure at all n locations
agcttcttcttgtcgttatcaactttgacatagaaccattccgatttccagcctgccggccacttgcttcgatagctgatcacaggaaattttgtagttntccgatatgcaaagttgtaacaaccaaaattttcatgtagcccatcctttctggccttagtttggtagtgtagctcgtgcactcggcagaaaccttcggcaaatggctccactgcttggcttcggagagcccaaatataaacactaagcctaacaatagcgtttctggccttagttnggtagtgtagctcgtgcactcggcacaaaccttcggcaaat

SEQ ID NO: 22285 - DNA, 428 bp, Zea mays
  unsure (1)..(428): unsure at all n locations
agcttctgtttcgtctgcagccacctgacttcaggacagaatgaaggtgacgaactgcgtatgaactcngatgtgctggaaatcctgagaaagaccaggttcccaatggtctatgggcaatatgagcgttcgccaaagacaatcttatggcacgagtaagcaaagaaccttgcaacggacccatgaagttttactccatatgcatttggtgtgattgttttgcctttcattgcagtcgaatcatctggctcggngacctaaattaccggatcgcgctttcctatcggtcagtgaaggccctggtcgagatgcgcaattggaaagcattgctagagaaagatcaggtgcgtgcgtgtgtgtagcgttgaagctctagaaagcagtgcagtagaattcttgcgccagaggcaattcagtgcctttagtct

SEQ ID NO: 22286 - DNA, 438 bp, Zea mays
  unsure (1)..(438): unsure at all n locations
agcttgtggatgtttgccacactgcttaaactgcttgcggttggtgtgccggtatcgtattcatcctggcttgcaaggctttgggggtatgagttatgaagcggagaaagtttcatctcgctgtttgattcctttgtgccactgtagtcaacactcatgctgctcctgacactggcactgccgctggagatgacatcagcttcatgaccatggcgggcatctattggtcgcaaaaccgaggatgatgcccgagcttttgcagcagctttcattacctcattcttatcgagctctgcgaggctgcgagcacttgatttgactgccttcttggctctatttgctctttccggatatccagcaccatcaaggtccacgggtgaatgcaccattccangctccagatgtgggatcacttcatcctggttcatggagtcaaca

SEQ ID NO: 22287 - DNA, 340 bp, Zea mays
  unsure (1)..(340): unsure at all n locations
ctctgacccgggatcctctgagttacctgcngcctgcagctcttcactatatttctataatgaacaagttatcctctgattaatagaatacaacaaaatcgttagtcggagggggggatcacaagaaaaatatcttcaagctgtacaactcaattataagaaataatgtatatacaagtgaggcagagacatctgtgcaaaccctggactaatggacccttatgctatctacacactctaaagataagaacactcatattccaataaatgataaaaccatatattatacaaagtatgtttttcaatgatgacaaagagcaatcaaataattgacatgata

SEQ ID NO: 22288 - DNA, 403 bp, Zea mays
  unsure (1)..(403): unsure at all n locations
agctntaccaaatggactttaaaagtgccttcctcagtggaccaatcaaggaggaggtctatgttgagcaacctcgcggctgggaagagagtgagtaccctaatcacctatataaattctctaaagcgctttatgggctcaagcaagccccaagagcatggtatgaatgcctaagagatttccttatcactaatggcttcaaagtcgaaaaggccgatcctaatctattcactaaaactcttgacaatgatttgtttgtatgccaaatttatgttgatgatattatatttgggtctactaacgaatctacatgtgagaaaattagtangatcatgacacagaaattcgagatgtcaatgatggnggagtngaagtacttcttgggattcaagtgaagcaactc

SEQ ID NO: 22289 - DNA, 430 bp, Zea mays
  unsure (1)..(430): unsure at all n locations
agcttctgaaaaatgagttttctattaatcctattaaaccttgtgttaggatatgacaatccacccaggccaggatatcacagtgactttcactaacatctttagattctcaccaggagagatcttcacatttgggttggtcacctcagtggccaacaagttcagtgatctccacatcatcatcaacacattccaggcggagggaaacttgtctattgcaataattcgagaagtactccagtcaccctcaagaaatcaactatgcaatagattggatatactatccgatccaatgtagactcaaacttcacatcacatacaagaaagtctattatgcatcacatacaagaaagtctattgtacatgaaactncacctcaatcagacttngaatcgaattcctcatgtataacaagcttattgagttacaa

SEQ ID NO: 22290 - DNA, 195 bp, Zea mays
atgataaacactaaatgctgcatcatgttgttctgcaaataatgagagtgctggagtccatgtgcgacattgagtgacatgtggaatggagcagaaattatattggatgccctttgagaaaatgatatctactctgtatgaatagacctgacactggtaaccatccgagagacaccctttggtctgactaaccta

SEQ ID NO: 22291 - DNA, 192 bp, Zea mays
atgtcaagcgttagggtcaccttgagaggataaaaactctatgtcaatggagcgcttcacgcagctaatgacacttctcgaaccattccactgcattgtataataaatgtatatatgactcattgcaattagatgatgatagttaataatgcttgctaccatgtattactagacagatcacttataaccttc

SEQ ID NO: 22292 - DNA, 422 bp, Zea mays
  unsure (1)..(422): unsure at all n locations
agcttggaaatatgtgcacacggcatacatcgttacaccatatgtagcaaagttacaatatttttttttctaagacgcgcaggagaactgcgcattanatatattaagatagaagaaataccaatggtctaaagaagaccagagtacagagaaacaacaaaaaaataacaaaaaaataaaataaaataaaaataaaaataaacattcatctagaagacagccaaagctgcccctaaactaaggccagatggtgcccagatccttggcacccgcgagacaccacctctgaacgtcgtctttgatattctgaataatctggttgccactatgagcantcccctcaaacacacatttattccgctgcttccaaagccaccatgccaccaacatcacaagggagttaatccctttgcgcagcgcat

SEQ ID NO: 22293 - DNA, 434 bp, Zea mays
agcttacctgacttcttcttctccaccggcacaatattggagacccactctgcgtatctgcaaggtctaataaaattagcttctagcagccggtggatttcgtccttgattcgtgggagaagatctggacgaaatgttctagctttctgcttgaaaggtctgaaaccaggcttaataggcagccgatgttcgacaatttctcggcttagtccaggcatttcagtgtaattccaagcaaaacaatctgaatattccttcaatagaccgatcatctcatttctagaatcggtctccagggtcttgtttacaatagtcggccttggagttttaccatctcctatgttaatctcctccaaaggatcggccgatgtaacccctgtctagttatcaagatcttgaattctctatcatgtcccacaaggaatagatgatct

SEQ ID NO: 22294 - DNA, 407 bp, Zea mays
  unsure (1)..(407): unsure at all n locations
agcttgttcatatttctcatgagttattccagttagagcagtacgatgagaggtctccccttgtcggtccacattcaaatccttgtacaaccttttactgcaatgcctatagggcgccctatgatggaggtttttaaagcccgtttatggttcaaaccatctactttctatacactcccatccaaggacaatttttataagtatatttcatactctcaagtccctttttattgcgaccatccatgtcaagtttgatcgaccttggccatctcttaaatggtgntgtatcttattggtctctcgtggctctagtggtcttcactgaacatatccaaaccatctcaatcaatggttgacaagcttttctttaatgtgctacccttctcctatcccttatatcnatcatt

SEQ ID NO: 22295 - DNA, 381 bp, Zea mays
  unsure (1)..(381): unsure at all n locations
agcttatgaagattcttcatcccaacgtgggctagtcggcgatgccagagccaacccatgttagtcttagcaattaagcatgtgtcgagttcagctctatcaaaatctaccaagtatagctgaccctctaacacacccttaaatgctattgaatcatcacttcttctaaagacagtgacacctacatcagtaaagagacagttgtagcccatttgacataattgagatacagaaagcaaattgtaatctaaagaatctacaagaaaaacattggaaatagtatggttaggtgatatagcaattntacccaatcctttgaccaaaccttgatttccatccccgaatggtgatagttcgtggagatctcggnttttctcatat

SEQ ID NO: 22296 - DNA, 426 bp, Zea mays
  unsure (1)..(426): unsure at all n locations
agctgttctttgtcttactaagagaccattttctaattaccaacatacaccacattntaccattttttggaggcgggcgcggcgcacagctatttgtatacatcacaaatacattcaaccccatcgttaaagcaccaaaacantttctacaattcccctagactactatgacatagcatcgatccgtcatactacaaaaatcattacaaagccgatatgcattatcaactaatcgtttcaaaaaattacacttacttcttactgtgccactacaacaccctttaatcgcacgaccatctggagcattcttcacccggttatacgacatcaatctaaacgttgtgttacacaagacatacatctttcttcgttgcaatataccatattacggcatatcctgccacctcanataatatctcatccacc

SEQ ID NO: 22297 - DNA, 343 bp, Zea mays
gctgatctcaacggaacaaccaggtgtgagggagcaatttaatacttttattatgaagataggaatgtttgcgcttccacctgttcaattggatgcatttaccatggagccgatcgaatggtgggtaagttatggctctgagactccaaatatagctgaagttgaaaaaaaagtttatcttaacccatcatcagtcatccgtcgagagaattggagcacattcagcatattcatacaccaagcgcatatgataacactaccctgccgataattagcttcatcactccatttgcacttttgcaagataacagatggctccaacatggtcacatgctaatggaca

SEQ ID NO: 22298 - DNA, 463 bp, Zea mays
  unsure (1)..(463): unsure at all n locations
agctttaattncttaactntctcatcagattcttgttctttacgaatctcttcttccaaggtagattcaacttccatcaccattgcttctacattattgagaaatccaacgttgagtcggttcatttcccagcacaattcttgtgacatcaaatgagtagtgatgttgttcacttgacccttacggctcanagcatcaactactacatttgctcttncggggtgatattgtatctccaaatcatagtctttaatcaactcaagccatcttctctgtctgaggttgagttctttatgagtgaatatatatttcaagcttttgtgatccgtgaagattctgcacttgtttccaatcatgtagtgcctccaaatcttcaagcatgcctacgacagctagntccaatcatgtgtaaggtattcttctcatgcttctcaactgtttgaggataagcatcaccttcctt

SEQ ID NO: 22299 - DNA, 393 bp, Zea mays
ttactctatcaaagaaaaattataccgaattggagaatgcactatatgctgcttcgatggcctccaggaatcttcggcactatttttaagcttacaacataattggtgcttcttcaccacctctgaaggatattatgagaaaccgagaagctactgcaaggatcggagaatgggctgcatagctcaatgaattctgtattgagtatgttcatagatcttccattcaggccctgcattatcaaactttattgctgactggactccaggggctcatgaggaagaaacaaacaccgatgcccaagcatggacagttgtttgtgatgggtcttgacgaaccttctgagcatgagctgctgctgtgctgattcacctttctaagtaagacgtgctatg

SEQ ID NO: 22300 - DNA, 399 bp, Zea mays
ctgaatagcttgtctggaaacagaataagaattgtcaccattatttctcactgctcactagctatgaagggagtgaatgagaaattaacttgtgatatccaacattagagtgagatcagttgtgtgagtaatgaaaatcatacacatcacatatcagatcaatgacatatatgccaacttccaaggacttgcgtattcgaactcatttttgaaaactatccatggaatacgtggcaaataccaaagaacaatacaaaaatctacctcaaagatgtctgcctaaataagccagactttcttcatcgacatcaatctcttccacttgtactcggattgccaatatctgtgaaggacattgaacagagattaatgcatattctggacacgaaaaatcgtata

SEQ ID NO: 22301 - DNA, 362 bp, Zea mays
  unsure (1)..(362): unsure at all n locations
agcttcacccttagcgttagtctcggtcttatttattcttatttagacagggtagnttgctatatcctgtgcatctatgttcgtcatgatgaactatgtttgcgttggatctttgtaatgattgtcaccacagtgtgggtatcccctgcattttggcttacctattatgttaataaagttagttatatagttgggaaaccttttattccactttcctctttatctgagaagctgtgcggtctgtgttggagatcagtgaagatgctcatctgttcagtgcttgtgaagaatcctctacttttttcttatgctgcaagatttgccagatcagttctgatgtgtgtgtgcattctgcagatgtc

SEQ ID NO: 22302 - DNA, 394 bp, Zea mays
actgccacacgcgccgggcggcgctaaacttcaaatttcatcactgcccaaagtaccagctcgtatcattgcgcccccacgtaatgaccggagcccacatacccatctactgtgcgctgtgccgggatcagcaatgatcgtagctcgctccctggcctgcttcggtccggtcggccgccggactggacatcgcatccgatcggcatcgcatctccagctgcatccaagattggatgcacccggcggcgcaatgatgcgtacagatcgcctacgtgtacgtacgccgtaacagcaaggaatccatccatggcaggtactgtaccgaaccgaacaggccggcgtgtaatgtgcacctgtgttcttcccgaggcggacacggacgctggcgctcttg

SEQ ID NO: 22303 - DNA, 399 bp, Zea mays
  unsure (1)..(399): unsure at all n locations
tttgataaactaacacacttccgataccaaatatattggggcctgcttcttgacttgaccttcaagcttctcctggacaagtgctgcacttaccgctgagtgcgaagctgccacatataataacaaaggagcccctggcgttggtggagttagtgttgttagatctatcaagtattgcttcagttcttcgaaggctctctgctggactggtccccattgaaaaacttcggctgacttcagcacttcgaanaatggtaaatttctctctgctgatctagatatgaatctgttgagagatgccagccttcctgtcaatctttgagcccccttctttgtacttggtggttccattcgaagtatagcttcgaatttgcttggattagcctcaattcctttgtg

SEQ ID NO: 22304 - DNA, 369 bp, Zea mays
agcttgcatacgagccgaggtagttctttatcttatttgcttaacgaaccgaaccaagccaactcgttaacttaacgagtcagtttaagctcgatcgagccgagccaagctggctcgatatccacccgacgacacctactctctgtcaaatcagcaggtctttcaaccatgctgatctgtcctacgtgatagtattcgattcctctacgtaatcgaggggtatgtgattctaaattaaatctacaattagtggcggatccaggattggatcaaaggaggggctataagttaaagtatgattggcggagccactagcggccatcttggggggtgagtgccacgacgacgtcctcgcaggcctgatgtact

SEQ ID NO: 22305 - DNA, 467 bp, Zea mays
atgcaagctgcttaggccttcttctttttctccatggcatgaaccttacatggaatactaccccacttaagaagaatgagggtaggactgttgaatcttggggatttgaactccttgaagtaccacataacaagggtgttacgggtccttctgctgctgttgctgcttgaccaggctgcgggtgataactgcacagggttgattcagggagaaccttctctttatctcctcttcactatctcctttactcttctcactttacacttttcactgcctctttctttctctttgctcttcccactggaggattctatcaaagagtattaccatcatacagaggaggaaaccaaagatgttgaaccatatacaacagtcttcaacccaagaatcaccaagcattgtgatcttatgggcgagggagtgagaaaatggagttgctcgaatttgcagaggagatttatcgggct

SEQ ID NO: 22306 - DNA, 472 bp, Zea mays
  unsure (1)..(472): unsure at all n locations
gcttgtgaagattcttcattccaacatgggctagtcggcggttgtcaagcccacccaagttagtcttagcaactaagcaagtgtcgagttcagctctttcaaaatctaccaagtatagctgaccctctagcactcccttaaaagctattgaatcgtcacttcttctaaagacagtaacaccagtatcagtaaaaagacagttgtagcccattttacataattgggatacggaaagcaaattgtaatctagagaatctacaagagaaacatctgaaatagtatggtcaggtgatatagcaattntacccaaacctttgaccaaaccttgatttccatccccgaatgtgatagctcgttggggatcttggtttttctcatatgaggagaacatctttntctcccctgtcatatggtttgtgcacccactgtcgagtatccaacttgagccctcggatgcataaacctacaaaac

SEQ ID NO: 22307 - DNA, 300 bp, Zea mays
ctcggcgtagatgatgatgatgtctctgctcccgtccatcaggaccttggtgagcctgacatcgcctactacggtggcgactacgagcgggtatttcccctggctcagcacatgggcggggtggtcagccctggtgaaagagatgggcttgtccgaccaggctaggtagactggcgccggctcctttaacgagcagacctgccgacgctcttgcttgcggagtcgagctcaggtattcgccgcatgccctccatatatcatgatgcagatccggacctcaggaacccacctgctgggtgt

SEQ ID NO: 22308 - DNA, 410 bp, Zea mays
  unsure (1)..(410): unsure at all n locations
cagcttgaagtacatttttacctagntagaactttatatgatgcacacgagatggcttgagctgattaaggattatgaattggagattcactatcaatcaggcaaggccaacatggtggcagatgcactaagtcgcaaggcttcctgtcattgtcttacaatgaaaacttctaacatcacattatgcccagaaatggagaaactaaacatgggaatgattcaacatggaaccttagatcaattgaggcttgagtcaattcttctgcaaaaggctattgatgcacaaagaagtgatcacggtatgagatatattcatgagaaaataaaagcccggaaagaaaaatgtttcagaaaggatgatcaagacattgtatcggttaataaccgcatagttgtgcctaaacatgatg

SEQ ID NO: 22309 - DNA, 335 bp, Zea mays
  unsure (1)..(335): unsure at all n locations
agtctatcatcgcgctctaattttttcttcatgataacatctngaacttggaactgtggtgttaagtatgtatgtggtttttcagatggccgggaggcagcgtcgtggccagaacgagcgcgttccttcaccgncgncaccaccttccactctgcaggagctcatggctcagcagaatgagatcctgaggcagctagctcaacgtcagccaccacctcagcattatggtggtggagaccatcagcgtcaccccgcggcggctacataccaggaattccttagcacccagcctccattgttcacaanggcggaggacccacttgatgcanatgtgt

SEQ ID NO: 22310 - DNA, 107 bp, Zea mays
gcatgctggggactggatatgaatggacctttcaagaaagctcaagggggatacactcatgtattggtggcgatccaccaattcacttaatggatagagttcaagcc

SEQ ID NO: 22311 - DNA, 337 bp, Zea mays
agctttgattgtgtcttggaatgaattgcttgctcttgtattgaatgttgaaagggaaatgtgcccttacgccatttctaagtattttggtgattgaatgccaacacaagtgcttgagtgaaaatatatgccaattgatggacaaagtgcaaatcaagtctaaaggtatgtttctagacttaatacattgttttgagaactaatgtattgtgtctaagtgctggaaacaggagaaatcaaattggaaaagagatagcttctttcagccgaagtctgctcagtctgggtgcaccggactgtccggtggtgcaccggacagtgtccggtgcgccaggct

SEQ ID NO: 22312 - DNA, 432 bp, Zea mays
  unsure (1)..(432): unsure at all n locations
tcacgattctttgttgggatggaactggccactatcangatcaagttactgtataacccagcgagaggcatagaaagggagatgaatgctagatgttctgaactaaaagtgaacaaggcaaatgagatgactgagggataggtgtgtttattgtgtaattgaggatgctcccgcagcgtcccatctttttcttttccactcaggatgggccaaccagagcatttctgtgacagcaaacacacacacacacacgcacaagcggacaagcctcagagagatccaggactggaactgctgccccttccctgtttcgtgctatcttttatctcanagaacaaggagtaacaagcaaagtaagacataaacctgaaacaacttcccaaacaaaaaaaaggaaaaaacaaccctacaagcctctagacacttagatag

SEQ ID NO: 22313 - DNA, 466 bp, Zea mays
  unsure (1)..(466): unsure at all n locations
gctgtggaggttcttcatccgcacatgtgctaagcggcgatgccacagccagcccatgcaagtcttagccattaagcatgcatctagaccggcctcttcttttgcaaaatcaactaaataaagtgtgccgtctaatacacccttaaaagctagtgaaccatcacttcttctaaagacagacacatctacattngtaaataaacaattatatcccatttgacataattgactgacagatagcaaattatatccaagactctccactaagaatacatttgatatagaatgctcattagaaattgcaattctacctagcccttttaccttgccttgattcccatcaccgaatataaatgaatcttgggaatccttatttttgacgtaggaagtgaacatcttcttctgccccgtcatatgggttgtgcatccgctgcaataatccagctgaacccccggtgcataacct

SEQ ID NO: 22314 - DNA, 427 bp, Zea mays
  unsure (1)..(427): unsure at all n locations
agagcacattctaggactattttatgtttttttgagaaagacaggatttgtagcgcatgccaagcatgaaagcatgttggtgcccattatncacacaagaacatcatgacgaccgacaggccgcttgagctacttcacatggatctattcggcctgattgcttacataaacatccgcgggagtaagtattgccttgtaatagaggatgattattctcgcttcacttgggtgttctttttgcaggaaaaatctcatacccaagaaaccttacagggattctcgagacgggctcataatgagttcggctttaggatcaagaaaattagaagcgaccacgagacggagttcaagaactcaacaatttgaagcttccttgacgaggagggcatcaagcatgagttctcttctcctacacgcacaacaaatg

SEQ ID NO: 22315 - DNA, 451 bp, Zea mays
  unsure (1)..(451): unsure at all n locations
gaagagcaagaaggatttggttatttagcacacaaaatggaactctcagtcttactcaaagatttctcttcaaagatntgaaataagagagacgagatgtgtgggaagtatttctcatgttagaaatggagtttaatgcatgcccttgtgtggaggagagaggtacgaatgagtatatataggcgaggctccaaatctagctgtttgggtgaagtccgcgcaaatctcggttgaaccggcttctaccagagaggaacctagtcaattgccttgctgagtacccgagtcaacagggacaaacccggttgaacctagaanaatcccgattcacacatgatcgaccagagagtttctcggtcaatctctctactgagtagccagatggactagganaatctcggttgaaccaagatttgaatcccagttgaacaagccagaatcccggctgaac

SEQ ID NO: 22316 - DNA, 287 bp, Zea mays
  unsure (1)..(287): unsure at all n locations
ttgactattttatgggcgctccattctgtgctcaccagtgtgctcacttgattcaacaacgccttgagcctgttgcacatggcattgtggctcctgcccttggtagaacatgaatcgaccgagctccgcctcgaacgtttctcgcttgatgatctaagtcacctcatcttcttcgtgcgcggtcttgagtaccttccaaatctatatatcactcattaacccttgcctttattatacttgtgacggaacctcccaagtcattangctcacctacagatgtccttgtc

SEQ ID NO: 22317 - DNA, 439 bp, Zea mays
  unsure (1)..(439): unsure at all n locations
agcttgtcattaagccctctcataaaacatttcttcttcttcaagtcgatatccacttggtcaatggcatactgagaaaggtgattgaatttgttgtgatactgcatcaccgtatatcctccttgcttcaaccggataaactcttctagtttcatctggagcactccctctagaacataatgctctcgtaatgccaacttgaactcctcccaggtaatctgatgtccaacaggccgaattgcagaataattcgcccaccaggtactggcaggccctcttagctattgagttgcgaacaggtgcttttgcgtctccgtgcatcgaattaacccaaacttctgttccattactctcacccattcatcgacttctatctctcttgggtggatattgtttgcgggagggggtnttcttttttgatggctggcgggctctaaga

SEQ ID NO: 22318 - DNA, 296 bp, Zea mays
atgcctaagtctggttaaagatcgttcatcaagcggcctggtaaagatattcgctaatcgatctttaggattaatgttacaaatctcgatattcccctttagttggtgatccctaagaaaatgatatcgaatggctatgtgcttattgccgctattctcgaccggactgtcggcccatttaactgcactttcattatcacatagcaaagggactgtggttaatctgtaaccgtagctccccagggtttacctcatcccaagccattgcgcgcaacaattgtctgcagcaatgtact

SEQ ID NO: 22319 - DNA, 476 bp, Zea mays
  unsure (1)..(476): unsure at all n locations
gcttatgaagaatcttcatcccaacatgggctattcgacgatgccagagcccacccattgtagtcttaaccattaagcaagtgtcgagttcagctctattaaaatccactaagtatagctgaccctctaacacacccttaaatgctattgaatcatcacttcttctaaagacagtgacacctatatcagtgaatagacagttgtagcccatttgacataattgagaaacggaaagcaagttgtaatctaaggaatctacaagaaacaacatggaaatggaatggtcaggagaatatagcaatttaccaagacctttgaccaaaccttgatttccatccccgaatgtgatagctcgttggggatcttggttnttctcatatgaggagaacatncttttctcccctgtcatgtggttcgtgcacccgctgtcgagtatccaacttgagcccccggatgcataaacctacaaaacaatt

SEQ ID NO: 22320 - DNA, 398 bp, Zea mays
  unsure (1)..(398): unsure at all n locations
atgaaaagccaaattagacctcgaagaattactatagagttattgttaaatgtaatgggtattaatgtaattttgcatgggctgtgacccgtgcctataaataggtgaacagtattcctgtactgttcacgctgacttggcatttgcttttgcatcacacctgtattcacattccttcaagccgaaggtacatttgtattttaccgttcgttacataagtaatataagtaaaaataaattaacagagattatgttattttctgtattctgngttngaatgttctttatctnttatcatgatcatgaatggttgcccttcatgaccttcatncgaaatccattatattcgaagggaaataatgatccaaaggacgaangggtttgatatttaacatttt

SEQ ID NO: 22321 - DNA, 477 bp, Zea mays
  unsure (1)..(477): unsure at all n locations
cggatcttaagcgactgcgctgcagcttgggagggacttatcctttatgtgttatacggngatgcgccaaccatcccatgcaagtcttagcaattaagcatgtatctagaccggcctcttcttttgcaaaatcaaccaaatacagtattgccgactagtacacccttaaaagctagtgaaccatcacaccttctaaaaacagacacatgtatatttgtgaatagacaattatatcccatattgcataattgactaactgataacaaattatatccaagagactcaactaataacacattagatatagagtgctcgaatgaaatagcaattntaccttgccttggtttccatcaccgaatattattgaatcttgggaatccttgtttttgacataggaggtgaacatcttcttctcccccgtcatatgggttgtgcatacgctgtcgataattcagcttgaacccccggatgcataaa

SEQ ID NO: 22322 - DNA, 470 bp, Zea mays
  unsure (1)..(470): unsure at all n locations
gcttaacagttgctataaaagacttttctgcttaaaattctggagaaatctctgtaatataattgtggaaaaaacttatgtaaatctgtatataccttgtaatatatcttatcttctttatccgtgtacaatctgctttgttgtgaacgaaacttcacttttgagccgaaggcgaaaaacaccttcccttcttttcgtacacaacgaagcatgaaaatttcctctttcttcgaagttttttctcatagccgaagcatctgtcttgtgtggtatgatgatgatgattctatatatgtctaaatgaatgtttatgaatgcaaatgttatgatgtaatgtatcgtgcacatgaatatcggaatatattccaaaccataatcatagccttcattcccttgggaatgactcagnatcttttgccgtatatttntcggcttcaccgtttacttttcggtgtatcagcgctgacttt

SEQ ID NO: 22323 - DNA, 458 bp, Zea mays
  unsure (1)..(458): unsure at all n locations
gctttaaccccccctcgcgagacctttcccgttttcttctaaccataatgaatgtgatatcgaatgtcatacttgatgcatattcactttaatggttcccttgtatgatgtactgtttgtttcccaatttgaatggatgaatgtatgtatgcttgcaatcgcatagagaacgatccggtcgaagagcccgaggagctcgcaggagaagcccctgagcagcagtcggttggtggaggcaagtgtcctttgacctatctctgtcctattcattctntaattcaccnccccccccgcattacacatttatacctaaggattgactagctnttgttatccatgtccttgattacctatttgggttggattattattacctagctttatgctattgctcaactctaatcaatgaacatgatgnagaatatctatgatacgctgctttcccttctcttattatg

SEQ ID NO: 22324 - DNA, 387 bp, Zea mays
  unsure (1)..(387): unsure at all n locations
gtctattgaacactttttcattatgataaacaactgacagttaaccagcaacccgaattttaaacagaaacatcctgcaatagtncattggtgggggcttacaaactttattgccctgaaatatgctaaccctggttgaagctcagcagctagcgaaagaaggcatgcattnttttgtgatatctttttaaaccatctgtatcctcataatgttttacccttgaagttttctgattccatctttaaggtatccaacacttgtcgaagatctacttttttttgcttctcattctcagcttcacctgaagatgctggacctataaataaacataacttattactttatgcctatccatgcacacatagagaagcangaacaacaacagg

SEQ ID NO: 22325 - DNA, 451 bp, Zea mays
  unsure (1)..(451): unsure at all n locations
tgcatgcttaaaattcttggattgcatctatggcttggctaacctagctgagataaccgccaacaaagcgagtgaaaaagcttaactcggatcaaacatgacaagtcttaattttaagcttttagcacttaaattcttactttttatgcaattgttgcgtcttgaaatatgcatgaggtactgcacttagggggagtattcaaaactcaatttactcatgaaaacccctagtgcaaggccaagatgcaaatttcaccatttgcctattttctctaanaattatctagcctatggcaaaatattttgaaaatcttgagaaaagtataagagggtgccaatacctgtcccaacaagtgttattntgtgtggttataagttgggatatggttggcttggaacctagatagaaaattcaaaaaaatccacattctccctgtctgggctcaccgac

SEQ ID NO: 22326 - DNA, 422 bp, Zea mays
  unsure (1)..(422): unsure at all n locations
atggcgaggaatanggtaatcagaaatctggtaaggaaaaatctaaggtaaaagaataaaggtaaagagctaaactttgttaaggaggttccgggattcgtttccagccaactcgcgtccacccttagcccagatttgagtgatgaatctgttccctatgcttcgggcttcggctggaacatcaaccaggtccgatgatgaaaggctgaagtttggcctgttgatagcccttgcgtgattacacccgacttttatgaaagcggtgaccgtacaacgagaagccaccagcgcacaaaagtctccatggccggttatgacttcatcgangacgtcaacctctttctcaacgcattcgagagccccgaggatatcttttgcagagaagctagctttttcagatgcagctccaactgaattgaata

SEQ ID NO: 22327 - DNA, 330 bp, Zea mays
agtgttgagttcaactctatcaaaatctaccaagtatagctggccccctaacacttccttaaatgctattgaatcatcacttcttctaaagacagtgacacctatatcgggaaaagacagatgagcccatttgacataattgagatacagaaagcaagttgcaatctaaagaatcaacacgaataacattggaaatagagtggtcacgagatatagcactttttacccaacctttgaccaaaccttgatgtccatgcccgaatgtaacctctctttgtgaatcttggttactctcgtatgaggagaacattccgttctcccctggcatgt

SEQ ID NO: 22328 - DNA, 421 bp, Zea mays
  unsure (1)..(421): unsure at all n locations
ctctcgtgagacgtatccccgcctctttcttaccatggngaattcattatcgtatgtgatattctatgcatatttactttatttgttctcctgtatggtgtactgtttgtttcctaatttgaatggatggatgtatgtatgcttgcaattgcatagagaacgatccggttgaagagcccgaggaactcgcaggagaagcccctgagcagtagtcggttggtggaggcaagtgtcccttgacctatctctgtcctattcattctttaattcacctcccgtattacacatttatgcctaaggatttactagctntgttatccatatccttgtttacctatctgggttggattattatntgttagctntatgctattgctcacactctaatcaatgaacatgatgagattatctatgatacgct

SEQ ID NO: 22329 - DNA, 284 bp, Zea mays
  unsure (1)..(284): unsure at all n locations
tctgagttgtctgcttgccatgaatctgtctctagtttaaagaatttaaatgacgaatttaatgctaagctagaagaagtttacaaaactaattcatgtcgagagcatgttggtatttcgtatagatgttagaatnttaatggtgatgcctgtgatgaacattttgcttctattaccaaactaaataatgaagcggcaagtcttaatgctcaacttaagacttgcaaggttgatcttgacaaattgaaatctgctagggatgcctacactattggtatacaccc

SEQ ID NO: 22330 - DNA, 382 bp, Zea mays
  unsure (1)..(382): unsure at all n locations
agtgggtcagaaatcagtggatacttgtgaaaactgagtgtgaaaacctatcaaacggaatcggatgaatgccatctttaaatatattgtgcctctatcagatattaacaacttttatatctgggaaaacatgatttgttcaacaaaaatttgggaacgcgagacgtcgacccgaacgacactgatttcagacttagaatgattngaatcctaaaatcagattcttaattacgacttggttaaatagaacatttgttgataacacaggttctacaactgttattaaaggtcanacctcatatcttgaatataaatgaaagttcactttggtganggagcatcattataattccttgggcatgtatctgcatgaacccttaat

SEQ ID NO: 22331 - DNA, 467 bp, Zea mays
  unsure (1)..(467): unsure at all n locations
gcttcacaatgcttacaacggtccagcttgttattcttctcaaagaatagcatgcaactggtgggacacacgttgatcttcttatatgtcatcccaagaccagccaacatcttctttgcgaagtacatattctttggcaacttatgattctccgggagaacctcgcccatcagttggacgatgtccgtgtaagcactggttgaaatgttgtgcttcgactctatcgccattagtcttgtgagagtcccaagaactgacatctgagtgtgctcgtgcagtctctcttctcccgcggtgagtagccggaagaattcctgagcatcgcgtggaagctgcccccggctctcagcgttcantttgaacctcctaccaagatcatgcaacatgtcatccatcctatcatgatcgtcatcaagctccacctncgcgtcaacgtgtctaatagactctccatgctcgtaccatac

SEQ ID NO: 22332 - DNA, 421 bp, Zea mays
  unsure (1)..(421): unsure at all n locations
agctnttctgctcacagcttcggcgctgtgtttatctctcgattctttgggcttctcctactgaggtaccgagtcgagtccaaagatacctgttcatacattatactccagaaacatcattaaatcatgtttttgaggaccttcggaagccgaaggtccccaacagtgcccctccatgactgtggcttctatcagcggcgtgcccttccacgactgctctccgggaccatgactcccctctatggcgcgctcctccatgtttgcgattcacatagcatcatgctacttgatggtcacgacttccttagtggctgtgagattttcccggtgacgcccctcccctcaacgaatgcgactgtgactctcccaacgaccacaaccacgaccacccctcttaatttctagtgcttcagatgtgaga

SEQ ID NO: 22333 - DNA, 353 bp, Zea mays
  unsure (1)..(353): unsure at all n locations
gagttccttgagttccttttatcttaangaaagaatgtgntagtttgtgttagttgtattgataattcttatcatatgcttcttggtgtattatatggtgataatgcaataattcttatcatatgcttcttgttgtattatatgatgataatgcaaaattagtgcttccgttgatatgaatcaattagtagctactgtgtttatcctgtaatagatattcatgtggttctagtgctttaaaattcttatcatatgcttctttttgtattatatgatgataatgcaaaattagtgctttcgttgatatgaatcaattagtagctactgtgtttatcctgtgatagatattcatg

SEQ ID NO: 22334 - DNA, 387 bp, Zea mays
  unsure (1)..(387): unsure at all n locations
atattagtcttagcaactaagcaagtgtcgaggtcagctctatcaaaatctaccaagtatagctgaccctctagcactcccttaaacgctattgaatcatcacttcttctaaagacagtaacaccaacatcagtaaatagacagttgtagcccatttgacataactgggatacggagagcagattataatctaaagaatctacgagaaaaacattagaaatggaatggtcaggggatatagncaatttacccaaaccttggaccaaacctttggttcccatcccgaatgtaatcgctcgttgggatctttgttttctcatggacgagaacatctttctccctgcatatgtttgtgcaccgtgcgagatccaactgaccccggagcta

SEQ ID NO: 22335 - DNA, 361 bp, Zea mays
catgtcacgccactcatggtggcagagataagatggttcaggtcgccaactgcaacgttagaacccattgtttgtcagtaccaaccttttcaataaaatacaaactacattgtatcagatttctaaactgctattggtgaggattaacttacaagtaggggtggcgagctttagcgtgcgaaagcatatgtcatacagagcttcgttgtcaagcaccatacattgatcagcgttctcaacgagttggtgaacagaaagtgtagcattgtaaggctccacaacagtgtctgagaccttggtgatgggaatacagagaagtcaacatcattctgtctgggtacctcctcctgatcttggaaat

SEQ ID NO: 22336 - DNA, 258 bp, Zea mays
caaacaactttgaacctattcacggtgacgtagggacctctgccagtgttagagactctggctacaaagactacttaatcgttcttgatgactgctcacagcacctacggacgtttcgcttacagcatatatgtgacacggtattcaccctgactaactttttcgcctatgtgtctacccgagtcaccgcactcatcagcgttgtcaagagcgataacagcacggagttcgacaactcctacaggcgcacctaattac

SEQ ID NO: 22337 - DNA, 431 bp, Zea mays
  unsure (1)..(431): unsure at all n locations
cacagatgattgctactaccccagttcagaacaagcagcagactccgggatctggtaagggattctctattgacagggttaatcaaatcagcgctgatgctactcctgatggggatgacattgcacttggtatgttttacattaatgcaaattctgcaacaatagtatttgattctagtgctacacattcatttatgtctgctcgatatgccaacacaaatgagttaccactgaatattatgaaaacatcaatgatagtaattacacccaaagcgccttgtgaggaaaatcatatgatacataaattggcattgacaattatgggaagagaatttgggctaccactataatattagaggcaagcagcttggatctaatncttggtatgtcgtggtaagaacaggcaatgccatatacactgtggaggggac

SEQ ID NO: 22338 - DNA, 395 bp, Zea mays
acactgaaattcagacttatgcactattcaccatctgaaaattcataaacttgatagcccttctttgcatcacttgtactcttagcagcacttagttctagggttgtgacacataacaaaggttgctctttgataatcatactacaagtttgttatagtgaccataatctatagctccatggattataagttacagtgctccaaacttgacaaaatgcactgaaactcagcttctgaaattcccatatctgacatcccatctttggacacagttttcatctacttccatatggttcttgggtcacgttgcttaagtaactttgtacacctaatgcaacactatcactttgctacattaaccatctccgaattgtctatagattaaaagttgcaat

SEQ ID NO: 22339 - DNA, 308 bp, Zea mays
atggagccaatatgctccgcattcaagggacttcatagaacaatccgaagctcgcacggtcaacagcactgtgcccgaatcaaaacacatctattgacaaatatcctaccttaatagcaatcttctttattcagttttatttcctgtaataaaggacattgattaggattcatgtaattagcttagctgatttctacaacaaaaatatgttttcttcacgggcttgtggtaataaaaaggactttcagattatcgaaaattctccgaagcaacacaaagccgttctaatgaacccacagtaagtttga

SEQ ID NO: 22340 - DNA, 478 bp, Zea mays
  unsure (1)..(478): unsure at all n locations
agcttatgcttctatgtgaagatatagcattatacatgtactgttgaggtctcagctatctgatgagcaagagaagactttgctaagaattttattcaacaataaagatgtctttgcttggtcagccaacgatctctatggtgtcaacagagatgttattgaacattaactcaatgtggatccatctttcaggccaagaaaacaaaggcttcggaagatgtctgaagacaaagctgaaggtgcttagaacgaagtgaagagacttcttagtgccggtgtcattagagaggtgaaatacccagaatggctagccaacactgntttggtgaagaaggccaatggtaaatggagaatgtgcattgatttcacagatcttaacaaagcctgtccaaaggacgaatttccattaccaagtatagactcccttgtagatgcagtagcttcttcagagctcctgagtctattggattgtactcag

SEQ ID NO: 22341 - DNA, 419 bp, Zea mays
  unsure (1)..(419): unsure at all n locations
tacatgtgcttatcggtgatgccacagacagcccatgctagtcttagctattaagcatgcgtctataccgggctcctcttttgcaaaatcaactaaataaagcntgtcgtctaagacaaccttacaagctaatgaaccatcacttcttctaaagacagacacatctacattggtaaataaacaattatatcccatattacataattgactaacagatcgcatattatatccaagggactcaactaaacacacattagagatagagcgctcatttgaaattgcaatcttgcctaagcctttcaccttgccttggttcccatcaccaaatatgattgaatcttgggaatcctagtttttgacgaggacgtgaacatcttcttctccgcctcatatggtatgagcatgcgctgtcgataatc

SEQ ID NO: 22342 - DNA, 403 bp, Zea mays
gactcttctcgagaagcatagacgtgcttgccttgcacgacaagcgcacggcttctatccgaagcgtactttctctataaataccaagggagccttacatacttcactcaaccttgcctatacaaactcgacaaccatgaatccctactgagaaaacaataatcttgtgcgcttgatggaagaaatggaagacgaagaagaacagttgcagctggcgaggcacatggtcaataagagacgacgtgcacgcaatgagcgtcgtcatggtggttcgattccacggcgcgtgaagattcatcgtgagcacatgagcggcgatgcacgaatgcgagcggactactctggagccaacccagtgtacacggatgctcaatttcgtaagaagtacttacattaacacatt

SEQ ID NO: 22343 - DNA, 375 bp, Zea mays
  unsure (1)..(375): unsure at all n locations
acatataacaacaaaggaacccctggcgttggtggagttagccgtgttaggtttatcaaatattgcttcagctcttctaaggctctctgctggaccggtctccatcgaaaaacttcagctgacttcagcacttcgaaaaatggcaaatttctctctgctgatctagatatgaatctgttgagagatgccagtcttcctgtcaatctttgagcccccttctttgtactgggtgggtccattcgaaggatagcttcgattntatttggattagcctcaatcccttttgttgaaactaagcagccaagatatntccctctcttcaccccgaagacacatttttctggatcaactntaaaccggcctatctgaaattag

SEQ ID NO: 22344 - DNA, 418 bp, Zea mays
gatccaagccacaagaaacagaagaaagaagctcacagaaaagtgtggcatcttggggtccaaggacctacatcagatcaaaatggtcttatgtcccaatcacattctttcaagaagaccttcagctcgagaattatccacacaatcatgctatggtcctatcttatgtcatcaaaggcttcgtggtgcataatggtctagtggatacagacagggcactagatattatcttggcaaaatctttctggcagatgcaagagctagaaaatagaatgcaagatgtcatgcacgcaatatgtgctttcagaggaaagtatatagcactactgggaaaataacaatgctagtaaccgtcaattatgttcataacaccagaaccgaagatattgtatctgatataggtgacattgaatatact

SEQ ID NO: 22345 - DNA, 427 bp, Zea mays
  unsure (1)..(427): unsure at all n locations
gatggcgtgaccaagggaagaaagagattcgctcggcgaggaggaggcaatggtgcctgggaaggtggaattggtgagagccataaatactggagcatcgatggacgatgggcggcgtgggggaaaaaaaatggatcgaatgctctgattaccaagttgaacaatgcaataggaagaatataattggtggcacagcacctcggtgcttgctttgtttctttatatagatagcatgtgcacaggatagatacaaaactaaaaccgtctaggagctaatctaggagttaatctagcatagatgctaacaaccttggctacgctatacaacagaatgctaacacagtcaaccatggaaaagggaaagcattgcatgccataccatggtggaagactggaangtcagagttcgtngtagtacctgttaaag

SEQ ID NO: 22346 - DNA, 425 bp, Zea mays
  unsure (1)..(425): unsure at all n locations
cttattctcgacgacggccgtcgaaaatagcttatgtccgacggtcacaaagggccgtcggcatttagcttcgataacgggcgtaaccgtcattggtggggcccacagctcttatgtttgatggcccaccgctaagctgtcggacataagccctaatatgtccgatggcttagccgtgcgtcgtcggccataaggctattcagcagtgtcatacaagcacatatttntgtaaatttttctgacatttatagaacaaacacaaattatatatatataaacagatttcatataaaacaacatattcacattcacaattacattcacaaacatcaattcacataagcattcacattctcaaacatcacctcacattcacaaatacatagtttcaaataattgtaacaagtctttgacatcaacatata

SEQ ID NO: 22347 - DNA, 383 bp, Zea mays
  unsure (1)..(383): unsure at all n locations
tcattcaaatatctgctctcttgatacaaagtgagtgaagcttaagagcgcagttttttatcttaaaaataatactaaaaggtcgcacaggcagccaagcatctggaatccagcatagatgaggaactagagaaggcgagagcaacaagtaagcgcgtaccaggaatattctgctcccgtcgcggccgagctggagcangtcgagcgcctccttcagcgcgtcggcgaacaccgccagcgcccgctccggntncaccgngggtacacaaggtacctcccggagcttctcgactaagggggcaaagagcccgatcccgcgcgacagcgcgagcagctggcgcctgttcgcgtttctgaacttccaaccaccggattccaccgcc

SEQ ID NO: 22348 - DNA, 260 bp, Zea mays
  unsure (1)..(260): unsure at all n locations
acgcacaatataatcgtatattttggaagttgcttctggggcagcaatatcaatttcttcgaccaaactaagctctgacattttcatttcttcagttgatcttgcaggtnttgcttcttctgcttctgaagggattaccttggttgattctgaaggcccagttccaacttcagtctgttgcttcggagcctcaacaacggatatttcagcaagcgcctcagaagtctcaacagtcttctttggggttgcgcttggaagtt

SEQ ID NO: 22349 - DNA, 270 bp, Zea mays
  unsure (1)..(270): unsure at all n locations
ataatgatggcagattcctctatgctgatctggatataaatctattaagagatgccaacctgcctggtaatctttgggcccacgtctattgtggttggtggcttcatccgaagtatggcttcaattctacttggattagcttcaattccctttgttgacaccaagcatacaagacatttccccttctgtacaccacagacacattatctggattcaactttaagccagcttgtctgaaactggcanaggtctcctgcaaatcagcaatat

SEQ ID NO: 22350 - DNA, 356 bp, Zea mays
  unsure (1)..(356): unsure at all n locations
agcttgccttctccttcgtgtaccacccacaattcattgagttgtggaacgcgccaatggtaaaattttcacagccatcaagaaaatgctcctcgacgacaagaaaggcaagtgggctgacctgttacctgaagcggtctgggcgttgaacatgactgagtgcagggcgactgggttcacccctttccgncttctatatggatcggaggccatgacctcgcaagaaataaaacatgggtcaccatggacaatcactttagcccgtcccgacgtagacgagcctacttcgaaggacctcatcgacggagaccacgtcttcccctacagccctaaacaatccaagctanacaaagcat

SEQ ID NO: 22351 - DNA, 424 bp, Zea mays
  unsure (1)..(424): unsure at all n locations
tgcaagccttgctcttgggtcttcggaattatatagctatgggaatcanaagggcggttgttaattctgattcccaggttatttctggtcatgttgataaaagttataaagcaagagatccgaaccttgaaaaatatttagacacagtccaaaggattgaggcttcctttgaagggttttctgttaaaaacattcctcgtggagaaaatgaatatgctgatttattagctaagtcagcagcacaggggctgcccttactgtcggcgtttcgagacaggggggtcccaaagccgacgagtgagtgtgctgcgtgccccagcccaaatgggtctagcgcgtgggcgagcgcgaaagggggagaggcgatgtggccggagtcaagcgtgagagatgtggatgtcccgcggccttcgtgttcgtcccg

SEQ ID NO: 22352 - DNA, 453 bp, Zea mays
  unsure (1)..(453): unsure at all n locations
gcatgcaagcctgatttcagatgcataaataatattgctgtgtaccaagcactcttattggggcttcgaaagttgagagcaatgggcataagaagggtcatcctaaaaactgattctcaagtcatttctggccatgtagacaaaagtaacaaggccagagacccgaagcttaaaaaatatctgcatacagtctgaacattggaggcttccttcgaagggtttactgtcaaaaatattccaagaggtgaaaatgagcatgcagatttgctagccaaatcaacggctcaagggctccctataccttctgaagtattttttgaaacaataaaggcacctttcgttgaactcatggagagagaagtgcctactaattctccagtacacagtgaagattggacgactgaaaatatatcttttcttcaanggtaattgctttcaaatgacgaagcatat

SEQ ID NO: 22353 - DNA, 303 bp, Zea mays
ctcttcttatgccccatgcaagatgatggatgatgcttatgttatgccaaatgatgtgatgatgttatgctatgtacggcgatattgcgaaggcacacacatgattgcgcgataaaacacaatcttttttgcgagcgcaccattaactgtgcgctattagcctcccttaggagccttttggccttcacttcagcggatcagcgttgactttcgctatagctctgcattccctaggaacggctttgagcttcttggcctttacttaggcggtatcagcgttgactcttcgctggaagctctgca

SEQ ID NO: 22354 - DNA, 262 bp, Zea mays
  unsure (1)..(262): unsure at all n locations
actacattcatcttacatgcgtgaaggatgcacgtgttctaatagtcgaccattttgaaggctcgaaaggcggctgaaaatgctataaacattacaaaaaatccccagaccaagatagccgaaggcactttttctctttcgcttttgcttgaattctttgtgcttatgttgataattgccctctaacttctgctangacgtctctacttacaagtaataatctgaagtacacatactgaagacaaagcataagatgatgcta

SEQ ID NO: 22355 - DNA, 234 bp, Zea mays
gccatcactggctccgagtgcccctattatcaaaagctggcttcttgtggggagaagtgttgattatgggaaaaacggggagcttttcgaaatccttgatcaatctctcttggaatgactctctttatacttcaacatgcgcgtttgacttagagatagagatttgagtattgattgcaaaaacaaaccaagtgcgggcaaagatgatccatatatgccacaattgaataaaac

SEQ ID NO: 22356 - DNA, 484 bp, Zea mays
  unsure (1)..(484): unsure at all n locations
tgcagcttctaagggagaacacattntatgactatcttatgttcattntgagaaagacaggatttgtagcgcatgtcacgcangaaagcaagttggcacccatcatccacacaagaacatcatgacgaccgacaggccgcttgagctactccacatggatctattcggcccgattgcttacataagcatcggcgggagtaagtactgtctagttattgtggatgattattctcgcttcacttgggtattctttttgcaggaaaagtctcaaacccaagagaccttaaagggattcttgagacaggctcaaaatgagttcggcttaaggatcaagaaaataagaagcgacaacgggacggagttcaagaactctcaaatcgaaggcttccttgaggaggagggcatcaagcatgagttctcttcttcctacacaccacaacanaatggtgtagtggagaggaaaaatagaactctattggacatg

SEQ ID NO: 22357 - DNA, 346 bp, Zea mays
tgcaagctagcctatcattaatagacttcatcaagctctgttttaactcaattctgtccgagaaacacatatgaatttcatagtgtgtaagccacaaagaactactactttataccaaattgtgaggcatcttaccgctgccctacacttgtgtagctttaaccaagtttatagaagaatacacagacatctaccacagctaaaagattgattacatacaccatgaaatatatagtgatagtgcatctatctgagattatacatggtaacgtatttttctatagatacggccaaagttagacgattgtcttatgacaaaactaatataacatacaatctgtaatag

SEQ ID NO: 22358 - DNA, 365 bp, Zea mays
caccaaaatccaaaccttcgacttgtgaataccctctggccacgagtcgagctttgatccttgacaccacaccatgctcgtctttgttgttgtggaagacccatttggttcctacaacattttggttacgacgtggaactaaatgacatacctcgttcctcgtgaaattgatgagctcctcttgcatcgccatcacccaatccgaatcttggagcgcttcctctaccctgtgtggctcaatagaggaaacaaaagagtaatgctcacaaaaatgtgcaacacgagatctagtagttaccctcttgtgaatatcgccgaggatggtgtcgacggggtgatctcgttggattgcttggaggactctt

SEQ ID NO: 22359 - DNA, 416 bp, Zea mays
  unsure (1)..(416): unsure at all n locations
cttgaatcgcatttatacccctgggatacctaaagccccatttgaaccctggaaaaccctaaatccaaatcctaggggcctatgtgcaaaaattgtgcacatttggactaaagtgtcaaaagtactatgtttaagcatataaagtcacatggttcacatttgggaagatttacaagccaaaccttaagttttggatttatttgcaaaaagaaccccaattgagatttcactctaagtctgaaaaacaatgttatgggctcaacttttgagctttgtaacttctaaattctagggtctctgccctaggtcaccacatcaaagttgtagaccaatcataggagaacaactntgcttaagaatgtgagctcagttgttaagaagaaattagagataattaaatctaaagttggactatc

SEQ ID NO: 22360 - DNA, 317 bp, Zea mays
  unsure (1)..(317): unsure at all n locations
catacccactggacagttgcacgcgcattcatgaaaccaaaaggcctgactttaaacttgtaatgaccttaatgagatttatatgttgtcttgaactcatatgactcacccattcgtatctgatgatacccacgctgtaagatcaagacctggtagagaatngtgtgcctgataactcatctagaatctcttcatctagtggcatgagacatctatttttgacagtcatgtcatctagtttcctgtactctacacaaaatctccaacatgcatctttgttcttaaccaatagcacttgtgatgcctacggactcaca

SEQ ID NO: 22361 - DNA, 468 bp, Zea mays
  unsure (1)..(468): unsure at all n locations
gcttcacactatgatagaagatcttctntggttacctcaagttcatcgatgacatgtcaaggaatatcangcatgcgcataatgccctgacgatctcaaaaatcttctttggcacgctccacttcaccaacaatacacatgggcatctcaggttaacacctgacaccctggcgacttcgacatcaggagtttgatcagaactaatgtacacgacaacatgacaatcactgcaacaactgttcagactcgagcttcacacaaacttggacacctgtaatgactcaaatactcaggacctcaatttgtgttcatacagactctaggtgagaggagcacccatcctctanggataaagaggactccatgatgagaaggcgatggatccaagaagacctacgtangagtggttaggatatccatgactagaaccttgatggttaaatttatgggcaaactgtacctaccact

SEQ ID NO: 22362 - DNA, 246 bp, Zea mays
  unsure (1)..(246): unsure at all n locations
ccatgaaccgctaacatagccaccttcctcgatgggcattctgctgccgaattagagttatcgtactctgatcataaacaaaaaacgattgacgttattcgctaaatagacctatacgctgcgcatctataaaaattatgaattctatatatatgtccgagaatttagcaacggcatggaaaaatatttcgccaggccaattagagaatatgngtgaagaaggagatctgacaaaattataagttt

SEQ ID NO: 22363 - DNA, 318 bp, Zea mays
ctgagcatgcactgtgaagatcggcccaataggttttattgttacaaggcatatgagaagagattgctacataggcatttgcccacggaatggcctttgactcaaaacgataggggtgctgcggctgatgaagagtggtgatcccatgcatcaaaggtctagaaatgatgtcacctgctgacatgcaacctgacttgtgagatccagctgcacctacatgatacatggcattactatgggcatgataatgacatttgctcaatggatggacggggacatttttgaacacggccgggaggtaatggtacactgagagga

SEQ ID NO: 22364 - DNA, 445 bp, Zea mays
agcttcggcattcgggtctattccttgtgttcttagtgcccagatgaagacgctgagcctaacgatagcgttaggagtcagctgatgaagatagatttcgtaattttccaaaatttccccaatcatctcgttcaaaggaaacctcaatcccactctgaagaaactactgaaaactaccacctcatcattctccggtgtcggagtggcttcttccccggcgaaacgaatcagcttcttctcagcttctctgaagtaacctagctttatcatcatgggcatatctgcctcggaaatagtagattttacaaagtccaagtggtttggtttggctggcatgagagtgttataatctatctcttcttcatcaacatcatcttcttcgatgtcagcctattcagcttcggcagcaggtgcaccttcgtcagtagctccctctgtcacaacc

SEQ ID NO: 22365 - DNA, 280 bp, Zea mays
ggcaatgcggaaccgatggaaaaccggacgaggcgcgcggcgacaggccgcacggcttttccgccctgcgtctgggctgaaaaccaggtgccagccatggcgcacgggccgaaaacggaggctcgggcacgaactcgaaaagtagctaagttcaagcatgtggaaagacaccgaacatacaatgtatgtctttggtgaacggcacacgggaaccgaaggaaaacgacaccgaagcacgccgcgacgggcggcatggctgatcggccttgcgtatgggctg

SEQ ID NO: 22366 - DNA, 400 bp, Zea mays
  unsure (1)..(400): unsure at all n locations
tgatcaggatcaagggaacaagagggagaanaagaagaactataagaaggcaaagggcgaggctcatcttggcaaggagtgggattcggactgctcttcatccgactccgacaatgaaggactcgccgccaccgccttcaacaagtcatccctcttccccaacgagcgtcacacttgcctcatggcaagggaaaagaaagtaagcactcataacactagtacttatgcttcttcaagtgaggatgagtctagtgatgatgatgagatagattactcatgcttattcaagggattagatagaaccaaggtagacaaaattaatgaattaattgatgccttgaatgataggaatatactcttagaaaagcaagaggatttgttgtatgaagagcatgataaa

SEQ ID NO: 22367 - DNA, 439 bp, Zea mays
gcttggaccatcttctatgatgggtcttgtgttaccttcaacgcaggagcggctgctgttctagtagcataggacttcagctgtacaaataatattgctgaatacgaagctcttctgttagggcttctaaagctaaaggctatgggaataagaagggcgatccttaaaactgactcccaagtcatttttagccatatagaacaaagtagcaaggcaaaagatctgaagcttgaaaaatatttggatacagtccggagattggaggcttccttcgaaggattttctgtaaaaaatattccaagaggggaaaatgagcatgcagttctgctagctaagtcagcggcacatgggctccctctaccttcggaagtattttttgagacaataaaagcaccttcggttgaacttctagagagtgcagtgcttgcaatatcacctg

SEQ ID NO: 22368 - DNA, 493 bp, Zea mays
  unsure (1)..(493): unsure at all n locations
ctcgacccgngatccttgagtcacctgcngctgcagcttanagggtgccatcttgatactttcttggtagctattattatatgaaaactccgctaaaggcagacattcatcccatttcagtgagaaatccaagacacatgcccgcagcatatcttcaagtatttggttcactctctcagtttgtccactggtttgaggatgataggccgaactgtggagcagtttagtacccagggatttatgaagttcttcccaaaacttggatacgaattgaggtccacgatccgacactatggtcttgggaacaccatgcaaactgagaatacgggcaatgtataacttcgcaagggtaatgacgggatatttaactntgacagggaggaaatgggcgatctttgtgagtcgatcaataataacccatatagagtcaaagccttttgcggtcctgggcaatcccacaacaaagtccatactaatgtcttcccatttcatg

SEQ ID NO: 22369 - DNA, 339 bp, Zea mays
  unsure (1)..(339): unsure at all n locations
gtgctgaagacctaccatatcttccttcatcagatcacccccgaagccataataaggatggtgatttttgtctgggcagtaaggagtcaagggctagagccaagcgcaaagtgcttctgtagtatagacgaacttttatatgagacaaaggccatgggtaaagaatagtaccacaacaacttcggttgttatggatttatctgccgccccaacgcatgccacccggtgccaacatttctgaaaagatggccttgggcctggatggaagagtggttctatgtgaaaatgatctanagacgacggaagacataanagaaatcattatgcaccccatctggt

SEQ ID NO: 22370 - DNA, 347 bp, Zea mays
  unsure (1)..(347): unsure at all n locations
tatgttgagcaacctcccggctttgaagatagtgggtatcctaatcacgtttataaactctctaaggcgctttatgggctcaagcaagccccaagagcatggtatgaatgccttagagattttcttatcactaatggattcaaagtcggaaaggccgatcctacactctttaccanaacacttgaaaatgatttgtttgtatgccaaatttatgttgatgatattatatttgggtctactaacgaatctacatgtgaagagtttagtaggatcatgacacanaaattcgatatgtctatgaatgggggagtgaagtatttcttatgatttcaagtgaagcaactcga

SEQ ID NO: 22371 - DNA, 456 bp, Zea mays
  unsure (1)..(456): unsure at all n locations
aaaaagaataacgacacccaacctatggggaagcgcgccagcttcatatgtggtaagactagtcactttattgctaactgtccagatnattgatgactagaataaggagaataaggggaagaaagttgagaagaagaagttctacagaaagaagaaaggtgaagcccacatcaacaagtggtgtgactcggccaaagcatgttagaaatctcaatanggagtttcaaggaaccatgtaaggcttttcaatgaagaaggggagttggcaaattgaaatagtttaagtatacttataaaagaaaatagtacaaaatgtacataatannttttcgtttgtgtacactaattttagggatgagacgacggctttagagatgtacacaagtgttcttcatgtagtggcaccatgtttcttgganacattgtatagacatacacgccaacatacacaacaca

SEQ ID NO: 22372 - DNA, 516 bp, Zea mays
  unsure (1)..(516): unsure at all n locations
actaagctcgactggtatngcacaaacaacattgctgagtacgaagcattgatcctaggtcttcggaagttaaaagcaatgggaatcagaagagccatacttaaaactgattcccaggttgtttcgggtcatattgacaaaagttgcaaggctaaggatccgaagcttgaaaaatatctggatatggttcgaagagttgaagcttccttcgaagggttttctgtcaaaaatatccctcgaggacaaaatgagcatgctgatttgttagctaagtcagcagcacaggggcttgctttaccttcngatgtaattntcgaaacaataaaagcaccttcggtggaacttcttgaaagagcagttcttaatatatcntcctgttttagcgaagattggagaaccgagatcatctcttaccttcatggtatatttctttcagatgacgaagcttataacaagaagatagaagcaagagctcgtncatatgtcatgatagaaggggagttgtataacatggag

SEQ ID NO: 22373 - DNA, 497 bp, Zea mays
  unsure (1)..(497): unsure at all n locations
ggatcttaagtcacctgaagctgcagcttctaagggagaaacacatttgggactaaccaatgttcattgtaagaaagacaggatatgtagcgcatgtcaagtaggaaagcaagttggtgcccaccattcacacaagaacataatgaccacggacaggccactggagctactccacatggatttattcggcccgttagcttacataagcatcggcgggagtaagtactggctagtaattgtggatgaatattctcgcttcacttgggtattggttttgcaggaaaaatcacaaacccaagaaactttaaagggattcttgagaagggctcacaacgagttcgtattgagaatcaagaaaataagaagcaacaacgggacggagttcaagaactctcaaatagaaagctntcttgaagacgagggcatcaagcatgagttctcttctccctacacaccagaacaaaatggtgtagtggagaggaagaatagaacactac

SEQ ID NO: 22374 - DNA, 191 bp, Zea mays
gcctttctgggggtattctggaggtattttcacctgtatttaaattttttaaaattcagcccctagttgagctatttgtaatcttttacgaggggaatttaactaacgtattacttccagttcatacaacaacactagttttaagctacaattcgtgcattattttgcaatttacgtctcttgtgcacgtc

SEQ ID NO: 22375 - DNA, 469 bp, Zea mays
  unsure (1)..(469): unsure at all n locations
agcttgtgaaaggtcttcatccccacatgtgctaagcgacgatgccacagccagcccatgctaatcttaacaattaagcatgcatctagaccggccttctctttttgcaaatcaactaagtaaaagttgccgtctaatacacccttaaaagctaatgaaccatcacttcttctaaagacagacacatctttatttgtgaatagacaattatatcccatattgcataattgactaacagataacaaattatatccaagagaactaaaaacacattagatatagagtgctcggatgaaatagcaattntacctaacccttttaccttgccttgantcccatcaccgaatattatngaatcttgggaatccttggttntgacgtaagaggtgaacatcttcttctcccccgtcatatggtttgtgcatccgctgtcgataatccagcttgaacccgcggatgcataaacctg

SEQ ID NO: 22376 - DNA, 358 bp, Zea mays
cacctattcacccccccctctaagtgctcttcattggtatcaaagccgctctcttcaagaaagggactaaccgcccgaagagatggatcctaacgggataggaatcgtgatcaacgattaagaaaaagagtccttcttcaacgagccaaaggatgacaagtccaacgacttgggctcgggtcatagaccaaaagatgggaagaagaagaagacaaggcgcatcaaggagattgtctactacgacagcgacgaatctttctctttcccaaggatgacgacaacgactacacgaagacggtcaattcgaacttttcatttgattattctcgtattccacataattcgaattcgcatttgc

SEQ ID NO: 22377 - DNA, 448 bp, Zea mays
  unsure (1)..(448): unsure at all n locations
acatgagcaagtctactatgctagagccagcccatgttagtcttagcaattaagcaagtgtctagttcagcattggtatcattgaaatcgagtaagtatagctgaccaacatcagtaaataaacagttgtagcccattttgcataattgagaaacagaaagcaagttgtaatctatagaatctacaaaaaaacattagaaatagaatggtcaggagatatagcaattttacccaatcctttgaccaaaccttgatttccattcctgaatgtgaatgctctntggggaatcatcattttctcatatgaggagaacatacttttctcctctgtcatgtggtttgtgcatccactggtcgatatccaacttgttccaccagatgcataaacctaaacacaattttaggtcttgtncttangtacncaaatggtcttgggtcctttcacatt

SEQ ID NO: 22378 - DNA, 336 bp, Zea mays
  unsure (1)..(336): unsure at all n locations
actcgtccgactgccctaccattataaattcaagaaatactttaaagtaccctgccaagaatggcttaatacaattgaaataatgagcaatgaaattcttgggaattactctaagaaagaggaccaactgatgacagcggccttcagcactcggccgaaacgaaggctgaacagggtgcttgatgccatatgatttgaatatgctgactacngtcgactgggcggagatgctgggggccctaagcgaanaaggattgctagcactactgacgaagaagtcatcaagacagcaaaaaagaaaaagaaagattctgataacattagtgctgaagagta

SEQ ID NO: 22379 - DNA, 438 bp, Zea mays
  unsure (1)..(438): unsure at all n locations
agagcacattttaagactaaccaatgttcattttgagaaagacaggggttgtagcgcatgccaagcaggaaagcaagttggtgcccatcatccacaccagaacattatgacgaccgacaggccgcttgagctacttcacatggatctattcgggccgattgcttacataaacatcgggaggagtaagtattgtcttgtaatagtggatgattattctcgcttcacttgggtattctttttgcaggaaaaatctcaaacccaagagaccttaaagggattcttgagacgggctcaaaacgagttcggattaacgatcaagaatataagaagcgacaacgggacggagttcaagaactctcanattgaaggtttccttgaggaggagggcatcaagcatgagttctcttctccctacacacctcaacaaaatggtgtagt

SEQ ID NO: 22380 - DNA, 386 bp, Zea mays
  unsure (1)..(386): unsure at all n locations
agctcgtgaacctgtggcatcagagaagatgtcggtcagtgtactgtgctttagtttcttctgaggcccagcaacttctaatgctggaaaccactctaagctttntgagcttacttgctgtctgaaagtctcttcatgcttcagcatggccaccttcagcgtgtctttatcgcagtgcctgaatgctcgctccatgggcattgtgagagtagtgcttctcactctgtctttttcgatctgcaatgaagtgaattcaaataagaggtgagtactatgcaaatgcaactgagagagaaatgcaacactacaatgagaaatgcaaaacattacatgcagaggaaggaaggaaaagagagagagagagagagagagagagagagagagag

SEQ ID NO: 22381 - DNA, 431 bp, Zea mays
  unsure (1)..(431): unsure at all n locations
tcggatccttagccttgcaactcttgtcaatatgacccgaaacaacccgggaatcagttntaagtatggcccttctgattcccattgcttttaacttccgaagacctagaatcaatgcttcgtactcagcaatgttatttgtgcaattaaaatcaagctttgccgcataacaagttttgactttggaaggtgaaaccaacacagcagccgctcctgctccgaaggttccccaagatccatcacaaaacactgtccaggcttcgttgtctttattcgtttcctcctcctgagcccctggcgtccaatcagcaataaagtctgccagcgcctgtgactgaatcgaagatctatgaacatattcaatacaaaattcattgagcttctgcagcccatttccaatccttccagtagcttctcgggtcctcataata

SEQ ID NO: 22382 - DNA, 423 bp, Zea mays
  unsure (1)..(423): unsure at all n locations
tatataatctcttccgcatttctttatctccgatgttctgtaatgtctgcaagacgggtgagacattcctggtaagggaaggaaagataccgagcttgtcaagtgacttaagaacatctatagggtgtctgatgtcttgtagacaaggacaactgtaggtgggcctaattacttgggaggttccgtcacaaagagcagcggcaggaggaggactgaagtgcgtccatggcggctcagtgcgttcggcagtctgtgcgtgcatgagtgaatccatggccacaaagctagattaaggattanggattacagattacttactggattagggcattggggacagtttgtccgtccgtggtccagcagagaggagaggagaggaggaagacgagtcacgctgtcacgggatttgggggcatgccatgg

SEQ ID NO: 22383 - DNA, 472 bp, Zea mays
  unsure (1)..(472): unsure at all n locations
cctgctattaggacacttaaaactcagcttctaagggagaacatgtgataagttngactaacgtgcaattcgaaaaagatagaccttgtgcagcttgtcaagcaggtaaacaggtgggaggagcgcatcacagcaagaatgtgatgaccacctcaagacctctggagctgctgcatatggacctcttcggacccgtcgcctatctgagcataggagggagtaagtatggtctaagtattgttgatgacttttcccgcttcacttgggtgttctttntgcaggaaaagtctgaaacccaagggaccctcaagcgcttcctcagaagagctcaaaatgagttngagctcaaggtgaagaagataaggagcgacaacggatccgagttcaagaaccttcaagtggaggagttccttgaggangaanggatcaagcacgaagtcttcgctccctacacaccacagcanaatgatgt

SEQ ID NO: 22384 - DNA, 412 bp, Zea mays
  unsure (1)..(412): unsure at all n locations
tgaacatacatgaaggtgtctagaatgcatcttttcctaatgaagtcagattgggacttggagattaaggtgttcgaaaagggggcaagccggttagcaagtaatttggagaagaattttgctatgttgtggatcaagatgatagggcgatagtctctcactgaattagcatctggcttctttggaatgagcacgatattcacagagttgaagaacttgaaatcagctccgttcatggcatggagttggtgaaaggcctctattggggcccttttggaccaaacactaacgatccctangtcatcctcgctgtgagtttggaccctagggatgatccctanagtttgcccatagagggtcgagaccttgtgtagtgatatagtaaataagatgtaagacaaataacactatc

SEQ ID NO: 22385 - DNA, 487 bp, Zea mays
  unsure (1)..(487): unsure at all n locations
aaatgaccccaagaataaacttgaatctcatttatacccctaaggtactaaggaccctaattggaaccctgaaaccaaaccctatgggcttatgtgcaaaagtggtgaacctttggactaaagtgtaaaaactactatgtttaaacatataaagtcattgggttcacaaatatgtgaatgtgcaagttaaaccctaagttttgggcttatttgcaaaaatcacctcttaagcactatagagcctaagtctgaaattcagttttgctggttcaactttggagccctgtatcttttaaaatatatggatttttcccaaattgaccacaacaagtttgaagaccaaacatatgagaacaactttgtttaaggattcaagccatgttcttatgagaaatgtggagaaaatctcaacccaagttggactgtcagactgctagaagactganatcatgctaacagtgagctaacagcaacttcaagcccaatt

SEQ ID NO: 22386 - DNA, 447 bp, Zea mays
agcttcttcaccacgcgccagtggatatcttgagatagttgagcaatgtgtcttctcctcagttgtctttgcttcttgttcccacacaatttcttttgtgaccctgcagcttgatgcttattcaaacattggctttcttttgaacaacaggggttagcacatggtgatgaattatctaattgtgtacttgtgcaagaatgaagttcacatgaatttaagttcgtaattacgacctcatgagcaacttcaagcatgatatgtctatccaagagattatcatgataacaagacaataagtcatatttttcattaagagcaaggttatcatgacttaacaattctacttgattcctaagcatagaatcttcaattttaagttgagcagcgttagataatacatcatgattatttctttgctcaattaaaaatgattcatactggtggatc

SEQ ID NO: 22387 - DNA, 440 bp, Zea mays
  unsure (1)..(440): unsure at all n locations
actcagcttcttagggagaacacgtgataggtctaaccaatgttctattctaataagatagaccttgtgcagcttgtcaagcacggaaacacgtgggaggagcgcatcacagcaagaatgtgatgaccacttcaagacccctggagctgctgcatatggacctcttcggacccgtcgcctatctaagcatatggggaagtaagtatgggttagttattgttgatgacttttcccgcttcacttgggtgttctttttgcaggataagtctgaaacccaagggaccctcaagcgcttcctcaggagggctcaaaatgagtntgagctcaaagtgaagaagataaggagcgacaacgggtccgaattcaagaaccttcaagtggaggagttccttgaagaagaagggtcaagcacgagttctncgctccctacacaccacagc

SEQ ID NO: 22388 - DNA, 312 bp, Zea mays
tttctgaaattcaaaattctgaatttcaacccttgagccaaagaccgagcgtgttcaccttgatccctagctcaaatcctaatgaccccattgacaaaattgtgcctaattaacccctctatctcatgtcagaagatggcatcgggacgcgtgccttggacatgtcaaacccgcgatcttctctctgtgcgcggtagtgagacaaaccagatttctcccctctctatctcttgatccagtcagcaaaacctacaagccttcacacacaaacgacaaaggaatggtagaggaagagatctctcacaggatcat

SEQ ID NO: 22389 - DNA, 465 bp, Zea mays
  unsure (1)..(465): unsure at all n locations
attaggacacttaaaactcagcttcttagggagaacacgtgatacgtttaactaatgtgccattcgaataagatagaccttgtgcagcttgtcaagccggcaaacaggtgggaagctctcatcacaccaaaaatgtgatgaccacatcaagacctttggagatgcttcacatggacctattcggacccatcgcctatctaagtatatgaggaagtaagtatggtcttgttatagttgatgacttttcccgcttcacttgggtattctttttgcaagataaatctgaaacccaagggactctcaagcacttcctaaggagagctcanaacgagtttgagctcaaggtgaaaaagataaggagcgacaatgggtccgagttcaagaaccttcaagtggaggagtaccttgaggaggaanggatcaagcacgagttctccgctccctacacaccacagcanaatggtg

SEQ ID NO: 22390 - DNA, 368 bp, Zea mays
  unsure (1)..(368): unsure at all n locations
tatgaattatgaaactctaggtatggtcgntgggccgcggctgtttctgttggcctgaccgaaatgagccggtctgttcactggtaaggttcatcaagtaaacggaccaattggctcttccagatatggagacttttgtagagggataaaagttcttacttccagcagaatttcatgatttttgagtgagtagtttgtgagatatcgaattttgaaagttaactatgcggctgtctaaaacagaatcagtcagttatcttgtgatatgatttagacttatagatggcagaatttaattatctattgaataccgaagttgtagagtcttttatgtagatacttctagagtatttgttcgatatcaccac

SEQ ID NO: 22391 - DNA, 447 bp, Zea mays
  unsure (1)..(447): unsure at all n locations
caaatgttcattttgagaaagacatgatttgtagcgcatgtcaggcagggaagcaagttggtgttcatcatccacacaagaacatcatgacgactgacaaaccactcgagctcctacacatggatctattcggcccgatagcttacataagcatcggccggagtaagtactgtctagatattgtggatgattattcttgcttcacttgggtgttctttctgcaggaaaaatctcatacccaagagaccttanagggattcttgagacgggctcaaaatgagttcggcttaacgatcaaaaagattataagcgacaacgggacggagttcaagaactctcaaattgaaggctttcttgaggaggagggcatcaagcatgagttctcttctccgacacaccacaacanaatggtgtaatggagaggaagaatagaactctattggacat

SEQ ID NO: 22392 - DNA, 450 bp, Zea mays
gatagctacacctgcatgcatagctgggcctgggctcgcagcaagcaagcaaggagccaaacacacaagcccacaaaggtcaaaataatgtcagtggatcacaaagaacctaggttgtgtaacaaaaagggtaggataccagttgatcacctaaagtaattcaattgctccataatgttagcatatttataagtcaagataaacatgtagatagctaggaactgatgccattcattaaataaattcaggttcatcttcatacacagagaaagctagttcaaagagaggatgaaatggcaggatagtgagtgtaacaaatcacttctgctcaacatatacgataaagttggtagaaattcttacgagttgatggtgccaactaggaaggaccctcgatgaggcataagctgtcgcagaatatccaggaggaggaggagagctcgatgtgca

SEQ ID NO: 22393 - DNA, 350 bp, Zea mays
  unsure (1)..(350): unsure at all n locations
cgctcttcttccgcgctttatatataacgggctggccggcgtacagtatacagtacaggggagcgatcctggatggttcaacgtaggtcgcgctaggtgcaagccttgtgccgctacggggcatctagctgtgcctggacgtacgtacgaagatttaacgcgggcgcttgctttgtatgcagttcagtgcaactgtgccaacctctgccaggttcagtgattcagtcaactgtgaagtctgaacatacatgtccatgtgtcctaaattaaaatttggtttagaaatttaataaattcatacaataattgatattngnnngtttgatatatttctagaattattattatct

SEQ ID NO: 22394 - DNA, 446 bp, Zea mays
  unsure (1)..(446): unsure at all n locations
gactaccgtagcatgcacaaaaccccttcaaaagaataccaagctttccaagaaaggcatgagcaaaattcatggtaagaaaattaatgctcatactatttgctctaacaatgtacctatgtgcttcaacaaagaaagatcaaagagaagcgatagaaggtgctatggatgcaaagagaaaggtcatgaaattgattcatgcccccacatgaagaaccaaaaccttgcacgatcaagaaagatgaccatcaaaaaggatgaaagcaaaaggaaaatgcattgcaaggacaagcaccacatttgttacaattgccgtgaanagggtcatctattcaaggtttgtccaaagggtaaaactccaaagcctaacttggcaatacattcaaatatgcttaggagacccanatttgactcttgtgctagaaaggtgatgagttcaccacatt

SEQ ID NO: 22395 - DNA, 488 bp, Zea mays
  unsure (1)..(488): unsure at all n locations
tcaccccacatacagttagtccactttagccaaatgggacatttgttgagtacattgatatgtactcacccttggttaaacaccaaacaccaagtgtccccattgcaacccctactcaagagaagatgaaggccatgtggaggacttccaggagtttcaagacttcgatgagttctaaagtagattagcgacaaacccccagtgcctgtgaaggccttatcttactacgtttcgcttagcactttgatttctatttaagttaatgactatgtggatatttcagatatcatgatgcaataaagcaatacttctttccgctattatttgagcattgtgtgatgatgtccangtatgtaatcactgtgtacatgaatntctgatcctagcacatacatgggtcgcattcggtttgcttccaaaccaggtgtgacagaagcttcttatancaacatcttttgaaaacgtgacatacaaaacgtcgcgttcga

SEQ ID NO: 22396 - DNA, 405 bp, Zea mays
  unsure (1)..(405): unsure at all n locations
gcatgccaagcaaggaaacaagttggcactcatcatccgcataagaacatcatgacgaccgacaggccactggagcttctacacatggatctatttggccccgatgcttacataagcatcggcgggagtaagtactggctagttattgtggatgattattcgcgcttcacttgggtgttctttttgcaggaaaaatctcatacccaagagaccttaaagggattcttgagacgggctcaaaatgagttcggcttgaggatcaagaaaattagaagcgacaacgggacggagttcaagaactctcanatngaaagcttccttgaggaggagggcatcaagcatgagttctcttctccctacacctctcaacaaaatggtgtagtggagaggaagaatagaactcta

SEQ ID NO: 22397 - DNA, 504 bp, Zea mays
  unsure (1)..(504): unsure at all n locations
actcagctgctctagactccccgagtaacccagatttttcatcatagtcatgtcatcttctattacaatggattntccaaattcaagatgactaggctttgccgagttcaaaatgttgttatcctcttcgctttcattatcactctcaccctcaaccacagtttgtacagcttcggcattgggagcaccttcgttagaagcttcccctagcacaactaggcctgatcgcttcattacttctgatatggtgtcacacccggttttagaaggcaaaccgaatgcgaaccatgtacgtgccaggatcagcaattcacgtacacaacagttacaaaactggacatcatcacacagtgctcanataatgacatataagagggcataatagtcgattacatcatgatgtccgagacatccacatagtctttaacaataatcaaagtgcggaaaaaaacgtagatacacatggcctacacaggcagccgactgggggtttgcactaacaca

SEQ ID NO: 22398 - DNA, 466 bp, Zea mays
  unsure (1)..(466): unsure at all n locations
agctttctcactatatatagcatgcttaatgaaacttcgtataatgatgcagtttaatacgaaaatttggtcatcaagctgactattgaccttctgaccagtcggcactaaagtaggtcggctgcctttctggtagatgtggttaagtcggctttagaagcattggaaactagacttcaagagctttccaaaaagtacttatgggacttcatagctnttgggaatcaaaagatatgattgtttcttctagacggttctgttgcgctggactgactcggatatagctcttcttgctgattcgcccttgatatgttttgtccttcctctttggtgaacctaagtaatatcaacatacacgacttaggtagcataaaattctcattagtggttaaatgaaatttataaagtagcgcgtgcacctcttgctgtagcttcttagctcggctacgtgtaattggtccatcaa

SEQ ID NO: 22399 - DNA, 504 bp, Zea mays
  unsure (1)..(504): unsure at all n locations
tctcctgaacaagcgctgcacttaccgctgagtgcgaagctgccacatataacaataaaggagcccctggcattggtggagtcaatgttgttagatctatcaaatactggttcagttcttcgaaagccttctgctggattggtccccattgaaagacttcggccgacttcagtacttcgaagaatggtaaatttctctctgccgatctggatatgaatctattgagagatgccaaccttcctgtcaatctttgagcccccttctttgtagttggtggctccatccgaagtatagcttcaattntacttggattggcttcaattcccttttgtgaaaccaagcatccaagaaatttccccttcttcactccgaagacacattnttctggatttaacttcaagccagcttgcctgaaactggcgaaggtctnctgcagatcagcaatatgattctcctgcttcgtgctttngacaatgatgtcatcaacataagttaacacatttc

SEQ ID NO: 22400 - DNA, 472 bp, Zea mays
  unsure (1)..(472): unsure at all n locations
agctttgaataaccaatttgtccatcatctcacgacaaacattaatctccttactggctggcagacagtaaaggaaatcatcttcgccgtctccttcgtataccaaagacccacaggggtatttcagctccttagcataatgttgcgtttcggcaagttgctctgttgatagttgctttcctgaagcatgttgaacaatatagctcanatcaccctgtgaaggtgcatcgggagtaggtgacatgggcttttctggcagattntctttcaccagctctactggcgcagcccccgaaggccccgcttcaacatgaacaggagaagtgcttgcagcggctacttccattgcatcttcaattntatcatcagaaacttaagtagtagcaggagcgggctacttagaggattgaaaacaacatctaaaacgctggccattctcctctttctaggagtcattagtgcagtagttgat

SEQ ID NO: 22401 - DNA, 432 bp, Zea mays
  unsure (1)..(432): unsure at all n locations
ctgagctcactttaaggggacactttaagatactttgttctttgaaaagacagattgtaggcctgccagccggaagcagttggcactcatcattcgcacaagaacatcatgactagtgacaggccactggagctcctacatatggacctattcggcccgatcgcttacataagcatcggcgggaagtaatactggctagttattgtggatgattattctcgcttcacttgggtgttctttttgcaggaaaaatctcatacccaagagaccttaaagggattcttgagacgggctcanaatgagttcggcttaaggatcaagaaaattataagcgacaacgggacggagttcaagaactctcaaatngaaggcttccttgaagaggagggcatcaagcatgagttcttctctccctatacgccacaacaaaat

SEQ ID NO: 22402 - DNA, 468 bp, Zea mays
  unsure (1)..(468): unsure at all n locations
actcagcttgtcggtcgtggagatgggtcacatcattaccacgagcgagattgaacttgttgggcaggccggcgtcgccacaatgacgagcacggcaagggcatcgagacaggcatggtcgagcgacattgggacggaccggttcgtatggcataagaaagaatgggatcgaacggacaaatgcacaaactagatcaaggaagaggagacgagttatgaggacagggccaatggatcaatccgacaagtaggctcaggatggaattggtttagtccatccaaaactttttttctatacttaagagcatatccaacagtggtctatcttgaaatataaggctcaacacataaaanacatctccaataatgccctattntacaatntttattaaaaaataggacacatcatgaagtgccttanatgtattacatctcatattaatactctatttttgttctatatcatct

SEQ ID NO: 22403 - DNA, 385 bp, Zea mays
  unsure (1)..(385): unsure at all n locations
ctacaccccgaatcctctaattattcagctaagggcaccccattccaccctcatggttgcacttgtttcccgggcggtcattcaaagaacaagtccttacggagaggcactcgagaaaccactcgagcccccttgaagaccacaagtataacatcataatacgagaggggaaaacagcgtatcatagataatctcatcatgttcattgattagagttaagcaatagcataaagctaaacaataataatccaacccaaataggtaaacaaggacatgaataacanaagctagtcaatccttaagtataaatgtgtaatgcgggaggtgaattaaagaatgaatacgacagagataggtcaagggacacttgccttcaccaaccgac

SEQ ID NO: 22404 - DNA, 96 bp, Zea mays
ttctgttggagccaagtctgaagaagttaatctttctgctgaagatatcctttgagctcttggaagtattgagaaagaggttgacgttcttgacca

SEQ ID NO: 22405 - DNA, 417 bp, Zea mays
  unsure (1)..(417): unsure at all n locations
cccatgttagtcttaacaattaagcaagtgtcgagttcaactctatcaaaatctaccaagtatagctgaccctctaacacacccttaaatgctattgaatcatcacttcttctaaagacagtgacacctacatcagtaaaaagacagttgtagcccatttgacataattgggaaacagaaagcaagtggtaatctaaggaatcaacaagaaaaacattggaaatagaatggtcaggagatatagcaattttacccaatcctttgaccaaaccttgatttccatccccgaatgtgatagctcgttggggaatttggttnttctcatatgaagagaacatncttttctccccggtcatgtgagttgtgcacccgctgtcgagtatccaacttgagcccccggatgcatanaacctacaa

SEQ ID NO: 22406 - DNA, 403 bp, Zea mays
cgagtgagctcaccggaagtgggcaccaatgttggccacttgttctcaaatgctatgaatcaagaacaaggcaacacaagtgttaatggttaaagacttttgtccttcgaaacattatctcgtttaggatataatgatcttcggacgaaggtcatgaaggacttaccttcatcattttaataagcaaggatgtaaacaaagacatatgaaacatgaagggattatgaataatcatttcaaatcattagactattcaaattcttattatctaacataaacaaacatcaacgatatttgaattacatttgtacctttgacttggcggaaggtgaaaaggcaggagtgacacgtgagtgattacaagtcagcgtgaacagcacggtgttactgttcacctatttat

SEQ ID NO: 22407 - DNA, 467 bp, Zea mays
  unsure (1)..(467): unsure at all n locations
gcttgcacacatagctctattgaatacccttgatcatatctcctttatatgctatgactaatgtgtgttcaagtcgatttcaaaccaagtcatatgtatattgaaaggaaattggagtcttcggcgaagacaaaggcttccactccgtaactcatacttcgccaccactccgagcaactctctcttctttgggggagaaatgagcatcaaggaaaaggacttcatccttggggaagagagtaaaagctcaaatgcaaaaagacttcgtctttggtataatcttaactcacttatttatgaccaaaggggaagattgcacttcaagggctctaatgattccgtttttggcgattcatgccaaaaagggggagaaatgagcccaaagcaaaaggaccgcaccaccactcaccaaattaaaaacttaanaacttagtgccttctaaaagtanttatcattnagtattcta

SEQ ID NO: 22408 - DNA, 471 bp, Zea mays
  unsure (1)..(471): unsure at all n locations
catcttacataaaatttctgagatcaagaatatttagttcattcctcaacatgcaaaagcgggtcttatcaagtggcttagtgaaaatatccgctaattgatcttccgacctcactccttctaaaatgatatctcctttagcaacatgatctctaagaaagtgatgacggatatcaatgtgcttggtgcgagagtgttgtacaggattattagcaattttaacagcactctcattgtcacacaacaaaggtaccttttctagaactacgacatagtctagaagaagttgtttcatatataaaatttgtgtgcaacaagcacccgcggcaatgtactctgcttcggcggttgacaaggcaacactattntgctttttggatgtccatgaaactagtgatctaccaagcagatgggcatccccagaagtacttttcctatcaattttgcaaccggcataatccgaatcggaat

SEQ ID NO: 22409 - DNA, 449 bp, Zea mays
  unsure (1)..(449): unsure at all n locations
agcttgtcccgcagtccttcccttagccttaacactcggagttgatcccgtctccggaggaagcagctggtaataatggcgcggtgccaggggaccgttgagagcctctgccaggggctgctcgacctcgacgacgacaagttcggtgcaatgtgcagcgccttcggctacctccaggagtggccggacctgngtgccgccatgtgcggcgccaatctcgccgtgccgcctgccgtggcgacgccgagcgccggcgacggcaacgattcctcctcttgcagcgtcagcggcgggttgaggaagaggaggccggacgcgtacctcgatgccaaggtgagaggttcaagcatggacggcggtgctgcttctgctgaattgtcaagtctttgactgacagttgtgtgtcaaanaanaaactgaaattggcagggtggtgcgaacggcatgaa

SEQ ID NO: 22410 - DNA, 495 bp, Zea mays
  unsure (1)..(495): unsure at all n locations
cttgaaactcagctctgtgggtctccttctctgttgaaggtgctctagatgaacgatgccgttttgattcatcttaacggatatgtcgaaagaccaaatgtcgaagctagagcaccggagcaagggatgcaagtaatataacaaagcttcggcaagagttagagcttcgacttgaggtggtcccgaaggtcacacaagaaaccaaatcaacagtgaaaagacccattttccttagtatctgtaataagacaaatgtataagtatcagggtcataattatacttttgtttgggctacgtcccatgcctataaatatatgaatagtaccatcgtactgttcacacttttattggaagtcattctcacattctcttcttctatgcagccgaatgtataaatagcttgaatgctntattggtgtataattcagattataacattatntanacatgctaatgaaatanatgaagacttaatattatattacattgtaata

SEQ ID NO: 22411 - DNA, 290 bp, Zea mays
  unsure (1)..(290): unsure at all n locations
ttcgacgtggtagaaatagctgaagcagcagcctttctcttctttccctactttcacgaaggataacaatagtctgggtacacgaaaccaataacatcaaagactctgttcaatctcttcttgcctcgccctctgaaggccactggtagggcatcatcctcggccctcttgtaggcaccaagcaactcgtcgctagttgcctcaatgcaatctaaccagtcatcattcggctcatcgaattgatttcggtacctgaaggtatacttcangtaaactaaaccatcttggct

SEQ ID NO: 22412 - DNA, 432 bp, Zea mays
agctcatagctggtaaaaatatctgaacttatgttggtgatatcattgtgagaagcatgaagccacgaagccacatctcagatctttgagaaaccttcgctaatttcctaagggcgggtttaaagttgaaccctgagaagtgtgtctttatagtaagaaaagggtaaatttctgggatgccttgtctcaaccaagggatcgaagcgaatccacataaaattgaagccatactttggatggagccaccgaagtctagaaaaggacctcatagactagcaggaagagttgcgtctctgaaccggtatatttctagaccaacagagcgaatctcgccattcttcataagcttaagatcggtagaagtgttttagtggggccttctcagcacaagctttcaagagctgaaaactatctgatatgctgacacactct

SEQ ID NO: 22413 - DNA, 460 bp, Zea mays
  unsure (1)..(460): unsure at all n locations
agctttaatgagcacgctctaataaaaacgatctccaagagttcctgcattcactgaagactagtttaagagtaagaggattgaggaggttaaaaaatctctccaccaagtcagtaatctcttcccaggcatgtaaattctagcctgtacatatcaaagacatagaagattaccaaccaagtactagggaattccggctcgctttcctcattcacctagtttattgaaagggtgaaggaatgttcatgctgcaaggaaagaggatgaggtgtcaatctgacagacaagtcaaaaggcagaccacttttcaggagcatatcatgtctagctagggtaacactgtaacagatatagggaataagtgagtgcagtcatcagaatttattcaccaatgtggngttaccatggacacttcttgtnttttttctgtagcccagatagtgacatacaggctacactg

SEQ ID NO: 22414 - DNA, 439 bp, Zea mays
  unsure (1)..(439): unsure at all n locations
tgactctctcaattaaagactttgccacccagaattgtctatgtctactcttatttggtggacctaagaatggaaccttaatcttttcatttgcaacctttcttagaacatagtgagcattgaaagccaatggtcctgagtgcttaagccaaggagttggtggtttaactttgcaggtgtgggcaaaatgaccttcatttccacactcaaagcatttgataggcttgtgagtctgctttggcttgtattgagtgatagctttctttagcacaaaagcattgtatccaataccactcttgttattnttcataacagtgttcataagcagctcaatttggaggtatagaccctagttgaactttngcacactnagtgcaagaatgtcattnntcacttttaagttcttgacctcattcttaagccttngattatncactgc

SEQ ID NO: 22415 - DNA, 266 bp, Zea mays
tcaacataagaaaaagagtagtgtaatagtttctattcattataaaataaacagtacataacaaacacaagctatcacaccagagacatgtttatcatggaaaacccaaacaggtaacacatgtgctcaaaataggaggattcaaagagtaacatgtggaattgatagtgtagtccatcctcaataggctaaagacttgaagtgtttatgtatggtagataataacacccagcatctcctcacggaacccaagcatgcgaagagcc

SEQ ID NO: 22416 - DNA, 170 bp, Zea mays
ttactttcagcggaatcagcggttatttttcgctggaagcctcccttaagagcctctttgccttttactttcagcggaatcagcgtttatatttcgctggaagctctggattcccttcggaacgacttttgagcagaaaacttacactgctgctccttaggaacgacttt

SEQ ID NO: 22417 - DNA, 398 bp, Zea mays
  unsure (1)..(398): unsure at all n locations
tagagttcttcgatttctgcgaacaaaaaagcattcaggtcaaatacacctcggtggcacacccaagagccaacgggcaagtagagagagccaacgggatgatattggatgcgctcaaaaagaaagttttcgacaagaatgaaaagttcacaggaaagtggatcagagagctgtcgtatgttgtttggagcctgagaactcaacctagccaagctctgcatggaaacactcctttctttatggtctatggttcggaggtagtgctacccgcttatctcaagttcaaggcaccgaggttaatctttaanaacatagcagaagctgaagctactagactggaggatgttgatatactagaagaagaacgattgaatactgtgattcagtcagctcggtat

SEQ ID NO: 22418 - DNA, 396 bp, Zea mays
  unsure (1)..(396): unsure at all n locations
cagggagatagtctggtaaatctatttgcatgcatgtagcaattaccttcatgagcttcccaagatcgaacttgggggccttgagtatcttcaccttgccgatgaagacgttttgaagtgggaagatgctggaggtagacttctcaatcttcttaccaataacttctggaatgaacttcgaaacaagttctttcaggtcacatgtagaagcctggttgatcataatctcaaccatcttacggcggatctgcgcacaatacatggcaagtataaagataacaggcaaatatagcaggtgactggttgacgttntgagaaaatgctacagttntacgactgctgcatatgtggaaagaacagaaacgttacctgacggatctgggatgcctgagcata

SEQ ID NO: 22419 - DNA, 440 bp, Zea mays
  unsure (1)..(440): unsure at all n locations
acctctttaggccttgatctcagctgtagaaactgatggtgggtaacttgntacaatcccattatgtggaaaaggtattgagtcgctctggttttagtgactgtgatcctgctccaacaccttatgaccccaatgtgctattaagaaagaatcggagaatagcaagggatcaattgacatactcccagatcattggctcgctcatgtaccttgcaagtgcaacaagggccagacatctcttatgctgtgagtaagctaagtcggtttgtgtcgaaaccaggagatgatcactggcgtgctcttgagagagtgtgccggatttgaaaggtactatgacatacggtattcattataccggaaacccaaaagtgctggaaggctattgtgatgccaactagatttctgatgctgatgagctttatgccacaagcggatatgtg

SEQ ID NO: 22420 - DNA, 443 bp, Zea mays
tgtgaagattcttcatcccaacatgggctagtcggcgatgccagagccaacccatgttagtcttagcaattaagcaagtgtcgagttcagctttatcaaaatctaccaagtatagctgaccctctaacactcccttaaatgctattgaatcatcacttcttctaaagacagtgacaccaatatcggtaaaaagacaggtgtagcccatttgacataattgagatacagaaagcaaattgtaatctaaagaatctacaagaaaaacattagagatggaatggtcaggggatatagctattttacccaaacctttgaccaaacctttatttccatccccgaatgtgatagctcgttggggatctttgtttttctcatatgaagagaacatccttttctgccctgtcatatgggttgtgcacccgctgtcgagtatccaacttgag

SEQ ID NO: 22421 - DNA, 466 bp, Zea mays
  unsure (1)..(466): unsure at all n locations
agcttagcttnctcttccgtgattagcatttgtagaataagaacacttgcataattntgtattaaaaagaaaatagtgcaagctgtgctaattgtactttggcaagtataaactaaaattatcagtttttttaacaaattaaaactatcaggttttgagagaaagcattttgctcttaacaccttgattgcanttttgtcctttatccctccatttctaatttccgcagcaacatatctattttaggatgccaaggagggaacaacaactggtgtttcagcaaaggattggacaaacacaatattggcacttgtgtctcctaattccaaaccggaggacttcaaccgcccaggtcatatttttcctcttaaatacagagaaggtggtgtgttaaaaagggctggacatactgaagcatcggtggaccttgctatgttagctgggttacctccttttgcagttcttt

SEQ ID NO: 22422 - DNA, 325 bp, Zea mays
  unsure (1)..(325): unsure at all n locations
acagtgcaatagcaatgaatgatgtggtgacttcacatctacccgtttgtttatatattgccgcacgtgagaatgtgaatcgtcaagtctttcgcaccggacgaacaatcgcccgcacccactgaatggtgggccacagaacccgagaaggtgaatcgccaggacgcgtgtacccgccgcatggtggggccatctcgcgctcggaatattttaatcgtttctcggcaacgagctcacggaagggtgttttcggaccttcggcattccaaagcctatgaggatatttcacggatcaagctcgttacgaanaacgatctaacaccgc

SEQ ID NO: 22423 - DNA, 230 bp, Zea mays
tggaaaaacaaaaattcttgttatcttggctgtcaaactacttgccgttgtcaactggtagctcggacggtactccgaagcggcaaacaatgttttgccagaagaatttctgggcagtctttgatgttattgtagaaacagccctcgcttcgatccatttggtgaagtattcgacggctacgaaggcgaacttaaggttcccctgagcggtgggcaggggcccgacaatg

SEQ ID NO: 22424 - DNA, 311 bp, Zea mays
  unsure (1)..(311): unsure at all n locations
atgctagtcttagctattaagcatgcatctagaccggcctcttcttttgcaaaatcaactaaataaaagttggccgctaatacacccttaaaagctagtgaaccatcacttcttctaaagacagacacatctacatttggtaatatacagttataccccatgttgcataattgactaacagatagcaaattatatcccaaggactcaactaanaacacattagaaatggagtgctcattngagattgcaattttacctaacccttntaccttgccttggattccatcaccgaatatgattgaatcttggga

SEQ ID NO: 22425 - DNA, 341 bp, Zea mays
  unsure (1)..(341): unsure at all n locations
agcttggtaggggcgccagcgtttttttttcttctctgtccagtcgcttccggtcaacagcagctgcgcgcgcaaattntttttggtcacagccacactctactaccgtgtgcgcagccttttatttttgtgtccggtcgctgtctggccgtttgacagctcacgcagtaactttcttgtgaccggtcgctgtgtgtcggggaccataattaggggtaccctcaagacgcctaattctcagctggtaacccccatcagcataaagctgcagaggcctgatgggtgcgaataagtcaaggatcagtccatacgagtgactcgatcacgcttcacccgagcct

SEQ ID NO: 22426 - DNA, 355 bp, Zea mays
  unsure (1)..(355): unsure at all n locations
tctcgcacaaaggatggtgagcacagtgcactgcatggcacgggcacactgttngacaatagactggacatgtgcgccgtctgcaagatgaccctgacgtcgtctgccagcggagaggactggacgcattaaatgccgagagggcacatcgtctgtcagcatggtggcaggcggtgcgtcctctccgcaataaatgcagagacctcctagctttagaggccttacgttatgctccgcccgttggcttatgtcacgggccacaagccacacagcagcagcgggccttcaccctcgcgggtagcacaagcacgcagggtaaggcctggacacgtgccagcaccggacccttacttat

SEQ ID NO: 22427 - DNA, 399 bp, Zea mays
  unsure (1)..(399): unsure at all n locations
ctggcagtcgccaagtttcttctcgtcgtcgatgagcgaccccaacccgagtgtctcctgctaatggtggttggtccggggttccaagtaaaaaacatggattcatgtttgacgttggtttataaaaatgactcacaagtcagatccctggaaaaaatattacgaacaataaatgtcacgcatgccaaaaaaggaatttaagttgaaaacattattcaaacaaaaacaattgcatgcaaagctcttctttaaatactactccctccattcaaaaatataattcaagaatctcggtggtacttattctactactacgcattgtgcaaggatagcagttgggcttggagagagatgtagtagatgtgtttcctgtatagatgtagacatanacacacatgt

SEQ ID NO: 22428 - DNA, 470 bp, Zea mays
  unsure (1)..(470): unsure at all n locations
tcaactccatctatattatggattgccttggaatcagtccagctttcttcggcccttctggcagctttctgactcccatgaatagcaataagcccttggtccgaaggtatcttcatgcagagataagctgggtgaagaattgcttcaaaagcatttatggtaccacgaccaatgatggcgttgtatgggtattccatgtcaacaatatcaaacacaatntgctcagtccttgtgttattaacaaatccgaagggtaccggcatggtaatcttcccgagtgccacaatctgccgccctccgaagccacaaagagggtgcgtagcatcatgaatcttgtcttcaggctcttgcatctgtctgaaagctttggcaaatataatgtcagctgcacttgctgtgtcaactangacattgtgaaccagaaaccctttgatcacacaagaaatgaccatagcatcattgtgaggata

SEQ ID NO: 22429 - DNA, 353 bp, Zea mays
ctaaaaaattgagccagccaagcaagcggcagatagcgtaccaaatgtgcttggggtgagttcttatttatacgcccagtgcgctccaaattggagggccccgtctgtcattgattggtgctattctagcaaagggaaggtgttttttcggaccttcggcttaaggcctttgtccatatcgcaatctgaattcgttattctaacaaattaatattgcgaggggcaactgttgtgggccttcgtcttccaaaggtcctcaaaaacatgatttaacaatgtttctagagtgtaatacatgaacatgtacctttggactcggattagaaccacagtgtgagaagcacaaagaatac

SEQ ID NO: 22430 - DNA, 423 bp, Zea mays
  unsure (1)..(423): unsure at all n locations
cgagcagtgaccggcttcgtctggaacccttagaagctggtgatgagcatgttcttcaacttttgccacgatgtaattgttcctggacgaagagaagagtaccaggtttgtgtaacatttttgactgccatgacgaaagatttcgccatgactgcagtattgccaccatatgaagatatggttgcttcgtagctcatcagaaattgcttcggatctgagtgtccgtcatacattgtgagctggggtggtttgtaagacgggggccaaggtgtagcctgcagttctgctgacagaggagaagcatcatcaaaagcaaaatttccatgatggaaatcctcataccagtcatcctcgttgacaaagccctcttggtgaagctctctgtactggngcctccggttctgctcatcttgcgtaagatga

SEQ ID NO: 22431 - DNA, 417 bp, Zea mays
  unsure (1)..(417): unsure at all n locations
agctngcatggaggaggatggttgatcttgtgcatttagaggctcttcggattccttaggacacacatccccaatggacatgttccttagagcgatgcacggagcctcttcatcacctatctcatcaagatcaacttgctctacttgagagccgttagtctcatcaaacacaacgtcacaagaaacttcaacttgtccagaggacttgttaaagactttatatgcccttgtgtttgaatcatatcctagtaaaaagccttctacagtcttaggagcaaatttagattttctacctcttttaacaagtataaagcatttgctaccaaagactctaaaatatgaaatattgggctttntaccggttaggagttcgtatgatgtcttcttgaggattcggtgtagatacaaccggttgat

SEQ ID NO: 22432 - DNA, 350 bp, Zea mays
tcattcaagtcattggtggagtccatcgcaagaatacccacacgagtgctaaactcttgtcgcgataacttcgtggatagcctcggtcttccctatgcacaagtggtttctataaaagcctccatgcacatcatcacaccatctgacacatggtgcgcagactaatgtgttagattccgatgactcttaatggccactatttcagcactatccgctgttgattttgaggcatgcctgtgtggtgtactggtgtatagtccgatgtctaccattggaccagtctaatgaccatttctctctccaggaacctttctagtgacccccaaacttcatttccactagtctaacat

SEQ ID NO: 22433 - DNA, 416 bp, Zea mays
  unsure (1)..(416): unsure at all n locations
tgacttatgtgcaattcgaaaaagatagaccttgtgcagcttgtcaagcaggtaaacaagcgggaagagcgcatcacagcaagaatgtgatgaccacttcaagacccctggagctgctgcatatggacctcttcggacccgtcgcttatctgaacataggagggagtaagtatggtctagttattggtgatgacttttcccgcttcacttgggtgttctttntgcaagataagtctgaaacccaaaggacccttaagcgcttcctcaagagagctcaaaatgagtttgagctcaaggtgaagaagaataggagcgaccacgggtccgagttcaagaaccttcaagtggaggagttccttgaggangaanggatcaagcacgagttcttcgctcctacacaccacagcaaatggtgt

SEQ ID NO: 22434 - DNA, 434 bp, Zea mays
tctaaagggagaacatgtgacacgtttgactaacgtgcaattcatataagatagaccttgtgcagctcgtcaagcaggtaaacaagtgggaggagcacatcacagcaagaatgtgatgaccacctcaagacccctggagctgctacacatggacctcttcggacccgtcgcctatctgagcatatgaggaagtaagtatggtctcgttattggtgatgacttttcccgcttcacttgggtgttctttttgcaggataagtctgaaacccaagggaccctcaagcgcttcctcaggagagctcaaaatgagtttgagctcaaagtgaacaagataaggagcgacaacaggtccgaggtcacgaaccttcaagtggatgaagtccttgaggaggaatggatcaagcactagttctcctgctcctacacaccacagc

SEQ ID NO: 22435 - DNA, 453 bp, Zea mays
  unsure (1)..(453): unsure at all n locations
agcttctaaagggagaacacattttgggactaaccaatgttcattntgagaaagacaggatttgtagcgcatgccaagcagggaagcaagttggtgttcatcatccacacaagaacatcatgatgactgacaggccacttgagctactccacatggacctattcggcccgatagcttacataagcatcggcgggagtaagtactgtctagttattgtggatgattattctcgtttcacttgggtattctttttgcagaaaaaatctcaaacccaagagactttgaaaggattcttgagacgggctcaaaatgagttcggcttgaggattaagaagataagaagcgacagtgggacggagttcaagaactctcaaatagaaggctttcttgaagagganggcatcaagcatgagttctcttcntcctacatgccacaatanaatggtgtagtgg

SEQ ID NO: 22436 - DNA, 309 bp, Zea mays
  unsure (1)..(309): unsure at all n locations
agtaccctaaccatgtctataagctctctaaagcgctttatgggctcaagcaagccccaagagcatggtatgaatgccttatagatttccttattgctaatggcttcaaagtcggaaaggccgatcctacgctctttaccaaaacactcgagaatgatttgtttgtatgccaaatttatgttgatgatattatatntgggtctactaacaaatctacatgtgaagaagttaataggatcatgacacataagttcgagatgtctatgatggnggagttgaagtatttcctatgatttcaagtgaagcaac

SEQ ID NO: 22437 - DNA, 311 bp, Zea mays
  unsure (1)..(311): unsure at all n locations
ccgcaggatggctgggccgacagagggcanaacccgacgtggtttcaaggcgcggtggggatgggggagggaagttcctctgctgggaatgagaagggagaggggaagtctgctgctggcggctggganggaggaggctggaaaaacctaatctgataccatattggaatgtgaacccctaaccctaacaggggttgggtgatatattaatagactgagtgaactgggccangcccattacagaagggtgagatgatcattacatgatgaaggccctaactctaaacggtattctacagagccaattggtt

SEQ ID NO: 22438 - DNA, 440 bp, Zea mays
atctcttgccttgcaacttttatcaacatgaccagaaataacttgagagtcggttttaaggaccgcccttcttattcccattgcctttaacttccgaagccccataagtaaagcttcgtattcagcaatattatttgtacagctgaaatcaagccttattgcatagcatgttctgactttggaaggtgcagctaagacaatagtcgcacctgctctgaaggttccccaagaaccgtcgcagaacactgtccaagcttcggcatctttatttgcttcttcttcccgagcccctggcatccagtcagcgatgaagtctgctaacgcctgagaactaaatgaggatctatgcacataatcaatgctgaattcgttgagttctgcagcccactttccaatccttccagtagcttctctgttcctcataatatccttcagagtct

SEQ ID NO: 22439 - DNA, 443 bp, Zea mays
  unsure (1)..(443): unsure at all n locations
tagtactttcagatgctatcttgtgaattatgagctaaacaaatagttggtgttctgctgtccaaaatcagcaagtattaaaatgatttgcttggagtttcttttgtgtaggtaactaaatttggttaagccagagaaacatgattgttatgcttagtgatatatcgacgtctaatgtttgcttatgggtgctgtaatgtgtctctccactaagtgtttaattctctaccacgtagcatttgttattatcgttctagtccttatgttcatacatgagcattatgcatatcatttaggtacgttaattgatcacatgatgtagaggaanagtgttggattaatctcaaagtgatgctgatgaataaaccagaggagtggatgatctgatcaagtaccaggaagggagatgtcaccaagtggtcgtcatttaacaacactaacgt

SEQ ID NO: 22440 - DNA, 278 bp, Zea mays
tctgaagctcgaagtctttcttttcaagagcaactgaatggtcttttattttgctttctaaattctcaattataacctcgcggtttttatcttacaaatcttgctgcattttcaaagctttgctcagcagcatactctgcacataaataatcttcgttagaaaacatcttcgttaatcgaaaacaataaaagttagtgtcggcgtttcgagaccggggggtccccgagccgacgagtgagtgtgccacgtgccccagcccaaatgggtcgagcgcgtg

SEQ ID NO: 22441 - DNA, 451 bp, Zea mays
  unsure (1)..(451): unsure at all n locations
ttgtcactggtgaagaattctcggatctttgaatggatcanggtggtggtaccattggtcaatatggtgaaggggcacgacattcttggattaaggctacttaacttgtattatgagcacttttggctgtcctgggtaacttttgcggacctggtagttggttctccacatggctctactgtcctgggtagcaaaaaacattgcttctggtcttagtcttggtgtaaagtccagtagcaatgatgcttcgaggtataacttagctgcgtttaatctgaattttttagctcctgcataacattactcagaaaaaaccttgaactaacaaaccactattgntataggctgacattctggctctccaacacagttgtcctcaaggagataattgtacaaactnttggcatctcacatcaatttactccatccatgatgaatctgagcatgaatg

SEQ ID NO: 22442 - DNA, 487 bp, Zea mays
  unsure (1)..(487): unsure at all n locations
cgtgaaaagtgccttcctcaatggaccaatcaatgaagatgtctatgttgaacaaccttccggctttgaagatagtgagtatcctaaccatgtttacaaactctcaaaggcgctttatgggctcaagcaagccccaagagcatggtatgaatgcctacgagattttcttatcactaatggcttcaaggtcggtaaagccgatcctactctctttactaaaactattgcaaaggatttgtttgtatgccaaatttatgttgatgatatcatatttgggtctactaacaaaactacttgtgaagagtttagtaggatcatgatttaaaaattcgagatgtctatgatgggggagttgaagtatttcctatgatttcaagtcaagcaacttcaagagggcaccttcattcaccaaacaaagtacattcaagacatacttaccaagttnggaatgaaggatgccaagcncatcaagacacccatgggaact

SEQ ID NO: 22443 - DNA, 470 bp, Zea mays
  unsure (1)..(470): unsure at all n locations
gcttatgaagaatcttcattccaacatgggctagtcggcggtgccagagccaacccatgttagtcttagcaattaagcaagtgtcgagttcagctctatcaaaatctaccaagtatagctgaccctctaacactcccttaaatgctattgaatcatcatttcttctaaagacagtgacacctacatcagtgaatagacagttgtagcccaattgacataattgtgaaacggaaagcaaattgtagtctaaagaatctacaagaaaaacattggaaatagaatggtcaggagatatagcaattttaccaagaccttngaccaaaccttgatttccatccncaaatgtgatagctcgttgggaatcttggtttttctcgtaagaggagaacatcttcttctcccctgtcatgtggtttgtgcacccgctgtcgagtatccaacttgagcccncggatgcataaacctacaaa

SEQ ID NO: 22444 - DNA, 488 bp, Zea mays
  unsure (1)..(488): unsure at all n locations
taccgcaccctcaanatggactacgacaaggtactgaagaagctctcccccgcaaggaaaatccgcaagaagaccagaaaccaaggatgccaaactgagcagcaggaagagaaccctcccagaaaccagtccgacaccgaggacatgtccctggccagccttgatgaccttctcaaggaatttggggacactttagagaaagagttcgggggtaccttaggtagcactcgtatgtgataagcttgtggtagtggtatgctatgtaatgtaatggcttgatgtaatgaataaaataactagttaaaaaaatggcatgtgcataatagtgactctcttcccatggcagatgacttcggatagaaccacgcctaccgcctccgggattggagcaagacttcctctatgagctganggagaggctggcggagaagggggtgagacccaccttcccgcaccttcagaactaccactagacctagcccaaattc

SEQ ID NO: 22445 - DNA, 467 bp, Zea mays
  unsure (1)..(467): unsure at all n locations
cagctttaagcatgccatgtctcgtgcatcatatctagtgtatgcacataagtgctagctcaaatgcgacatggcacactcctatctagtggctcatattcggtgcccaccagacacgatcggtgccactgcaacatcgccaagacttattttgatttcattttgagttgggttttgttttcaacttctcatgtgctctcatggatttacctagaactagtttttaaaagtgtgtatcatcactcctaactaggctagccaatgtcatgctacccatttcatttccccctttatagtatgaccaaagcaaaaataaaggtcttgtcactacttgaagtgccgaacaactatattgacacttagaactagctgantctttatcttcttgctcattctnntgaaaaccgatattaattnccatcaataagagaagaaacaccatatangtccattaatttctcattatt

SEQ ID NO: 22446 - DNA, 512 bp, Zea mays
  unsure (1)..(512): unsure at all n locations
actcagcttggtatattagtgaagccaagagaanactagttcgttttggtggaagtgaaattactccgaagccagaatagaatgaagtggtagtctttaaaagcttctttaaagcaggattgagatttcctttgcatgagatgattgcagatgtgttggagaagtttgggatttatcttcatcaactaactcctaacgccattgttaggcttagcgtttacatttgggctctctgaagccagggggtggaaccgcttgccgaaggtttcttccgggcacatgaacttcattatcagacaaaggctagagaggatgggccacacgagaatntcggctgctacaattntgcttatcgcanagatgcgaggtctccagttattagctatcgtaccanatggcccactggctggaagaccgacatggtntatgttaacgttgacgagaagaanggagaagctggtcanagcccattgggagtagtctttggagagactangcctcaatgcaacatg

SEQ ID NO: 22447 - DNA, 375 bp, Zea mays
  unsure (1)..(375): unsure at all n locations
aatgtccgccgcgcaactggtcacctcggtggactttcggttatccagactctctaagcttgcagtgctctgtactggtgagttctgtactcgtgtacctgcggttggacccctgaacgcatcactccctagtaaatccaaccctgtgagcacattcaaagcttggcacatcttccttgagttcacgtatggtgccaggccaaggtcgcctaagccacacgatacagcacttctcgctaccatatcctctgccatctttacctgcaaattcaaacgggttggttacttgtagagagctgcanagtttgtgatctttcagtgttctggcagctgtgagaagcgaactggtcaccttaattcttaacgcttctacat

SEQ ID NO: 22448 - DNA, 173 bp, Zea mays
cctttctcctgcttgagaacaaatcagtggggttctgcatcttctccatataaagcttcaaaaggtgccatctttagactggactggtagcttttattataggaaaactcagccaaggaaagacacttgttccaatctttttcgtaatgcagtacacatgcccttaacatatc

SEQ ID NO: 22449 - DNA, 297 bp, Zea mays
  unsure (1)..(297): unsure at all n locations
aaaagtgaaccgtccgtcctgtataattgccaccaccgggaccacttctgtacataacccaaaagaaaagggccaatgggacacttgacccgacaccttctgcacacaactagcacacacgccacgtctgacatcaatttgtagggtaggtaagatgctgagcttcacagatgaccgccgatgganggtttgttatgatttcatagcacttcttccctaaagatgaaagtaaggtggctcagtgtcgaagagcatttcaggtacctgagtgctcgatgcctaatgatgacagtggaa

SEQ ID NO: 22450 - DNA, 129 bp, Zea mays
cttgctctcagcaacaaagaggccaacaagagtgaacagtggtgacaacaaggttacgtgctcgggggcaatagctctgttgatctggcctctcacgagcactgtgcgggggtatttataggtatctga

SEQ ID NO: 22451 - DNA, 430 bp, Zea mays
atagtgtgtcttcgggtcctccgaagcatgctcctaaggttcatcgtcttcgagcgaggcatcgaagccaacccggagaagaatgcggccatcaccagcatgggacccatcaaggacttaaaaggggtacagaggatcatgggatgcctcgcggcccttgaccgcttcatctcacgcctcggcgaaagaagtctgcctctgtaccgcctcttaaagaaggccgaatgtttcgctaggacccctgaggccgaagaagccctcggcaacctgaaggcgctccttacaaaggcgcctgtcttggtgccgccggcggacggagaagccctcttggtctacgtcgccgcaaccactcaggtggttagcgccgcgaatgtggtcgaaaggcaggaggaagggcatacattgcccgttcagaggccggtctacttca

SEQ ID NO: 22452 - DNA, 461 bp, Zea mays
  unsure (1)..(461): unsure at all n locations
gttgtctttnttcggggacttcattttccttacaatgagactactacatgaaatagacttgaaaaatatattagtctcaaagtcttagattatagagtaacctccccctgaaagtgccaagtctccaaatttctcggggtccttcggactcctcacttccctttcggaatccaaaccttcttggtgcttttcatggttgaaattatttcctttagcacccagatgcgtttggcccccttttctttgttggcttgcttggtggtcttgattgctatcacctttctattctttttcttcttgatcaaatatggtgtagcagcctttntatcccaccttttatgtaagtgttggagactttgcttgttggctntggcttgagcttttgcttttgcttatccccggtcttcgccttgcattggaaagacttgtgaccttctttgtgacatagcctacaaatcaca

SEQ ID NO: 22453 - DNA, 455 bp, Zea mays
  unsure (1)..(455): unsure at all n locations
agctagcattgcatatttaaattccttgtattgtatctaagacttgtctaacctagttgagataaccgccaacaaagcgagtgaaaaagcttaactcgggtcaaacctgacaagtcttagtttttaagcttttagcacttaaattcttactttttatgcaattattggttcttgaaatatgcatgaggtactgcacttagggggagtattcaaaactcaaatcactcatgaaaacccctagtgcaaaccaaaatgcaaatttcacctattgcctattttctctaaaaattatctagcctatggcgaaatattntgaaaagtatatgagggtgccaatacctgtcccaacaagtgttattttgtgtgattataagttgggaattggtttggttgggagttagatagaaaaattcaaaattttccaaactcttctctgtctgggctcaccggacagt

SEQ ID NO: 22454 - DNA, 349 bp, Zea mays
ctgcagcttaccaacctcaccgaccgctagagctttcgtggcccgacagcaactgcgtttgcacctatggcgacatcctctttcaatcctgaaggtatattcttcgattattccttataatggctagggttacaggctaagatctgatagaactacattgtgggaagctcaaaacaaactgccactgcatcgttgataacgtatgatgaatttgtaagacaacataacaaaactagtgaagttatagtgcaataataaaccggtagtgttttactcatataacaacttaagtgctgctgccaaacatataggagaaaattcaggatcaaacaattcaacttgagctttt

SEQ ID NO: 22455 - DNA, 390 bp, Zea mays
tcacctcacccacccccagctggctgtaaatcaaaagggtactgggaaattcgacgaaaaaaaagtagctcattaaccagcgggaaccctttctattaatggaaaaaaccaattttgccatcgattgcggaacttagatgtaatcctctattcataatttcatatgaactataaattccaaagtacaagagaagtgagtaaaggaaaatacctggtgatcagagatcttgacgggcacgaggaagaagtcattatccacctccatagtatgcttccccccagccaccacctctttccgcatctttgacagacggcgatcatcaggatactgaacctcagctttcagtaccccatccttgaagagcttgacacaaatctcactcatctgga

SEQ ID NO: 22456 - DNA, 442 bp, Zea mays
  unsure (1)..(442): unsure at all n locations
agcttctcggcgtcagcaccccagtctggtgtgctcggngggattccccatttggaccagctagaggtaaccggtgagccaaccaggacggaagcgccggagcccaggtcacgagagctcatacttctcacggcggcngcagcaggaaagaagactgggccggcggctgtgagctgccgccgagtcccaccggcctcgacatggggggtcgtggtcgccgacagctgggacgccatgctcggcaacgccgctgcggcggcgcaggaccagacgttcttgaactggttcattggggccgccggcgacttgaatcagtcatgaccgccgcttcccgtgcaccaccagccgctcctcnacaatgtgggcttcgggttcccagcagcggaccctctgggtttacgctcgatcccacctcagcggcgtgcctctgacatgtcgtccc

SEQ ID NO: 22457 - DNA, 128 bp, Zea mays
gtcttcttcccgcatcgaggacgtacgcgaacctcgcgcgcggtatctacaccgttcattcatttcggagtcgcgtcgagaccagctatcccgccgaaaagttccccgcgcgcgcgagaccactttct

SEQ ID NO: 22458 - DNA, 424 bp, Zea mays
  unsure (1)..(424): unsure at all n locations
tgacatcaaacaccaaaaaccatactcaagcaagaacatatgatgatgtcnaaggacagcacggtgtttaagaagaaaaacgactattcaaaactcccccttatttattgaacatatgcactatcaacatttaagtaagatacatatatgcaaaaagattaatacttccttttgtacctttaccatgttgtaatgtactttccatcttgaaagtatttaatctctcgagagcttctccacacttgtgcctgattctttctcctaactttttcttagtgctaagacaccaaacttataacaagttatagtattgggcacaagaagaaacttctattctaatgattatcanaagatgtcaattgaagcagactatcacggctaccaattgaaagataccaatngcaaaagttcatttattatcata

SEQ ID NO: 22459 - DNA, 475 bp, Zea mays
  unsure (1)..(475): unsure at all n locations
actcagcttcgtgggctttattcgttccttcttctgagcccctggcgtccaatcagcaataaagtctgccagtgcctgtgactgaatcgaagatctatgaacatattcaatacaaaattcattgagctctgcagcccattttccaatccttccagtagcttctcgggtcctcataatatccttcaaaggttgtgatgaaggaacaattaagttgtaagcttggaaatagtgccgaagcttcctggaggccatcaagacagcatacaataccttctccaactcttgataattnttctttgataaactaagaacctcagaaacaaaatatattggggccttgcctttgactngaccatcaagcttctncttgacaagcgctgcacttaccgctgagtgcgaagctgccacatataataataaaggagcccctggcattggtggagtcaatgggtgtagatctattaaatactggttt

SEQ ID NO: 22460 - DNA, 413 bp, Zea mays
gctattgcatgattattggtggccgatttggactgtgcacatctctttactgagtgcttgctaccaaccaaagaatggtaacgtcaggtgaaccagtgatgctaactcttttggttactaattgaatgatagggttaatgaggagatgatcgagagcctttttggttgtcatgctactgacaagaaaaatgctgacggcaaaaaggatttagcagcaaaggatacccctcaatttgttaggatactcgatgctaaaaaggcacagaacttagcgatatcactgaaggcactgagtgtttcagctgacgaagtacgtaatgcagttatggaagggtaaagctgaccatctttgggtctcttctgtgttatatatgcagcagaaactatgtaccttatattaatgggtaaatata

SEQ ID NO: 22461 - DNA, 503 bp, Zea mays
  unsure (1)..(503): unsure at all n locations
ctcagcttactgacttcagtgtgtgcctaagcttatgcactgctcaataaatgagaggtgaactgagtgcctctatctgatactatcttcttcggaacaccatgcaagcacacaatccgagacatgtatagttcggccaacactgtactgttgtaggtggtcttgactggtatgaaatgggtcgcctttgtcaaacggtccactactacccagatggagtcataaccagtacgagtgcgaagcaaaccgactataaagtccatcccgatctcatcccatttccactgagggatctgcaatggctgcaacaaacctgtaagcctctgatgttctgctttaatcctctcacaactgtcacatacaaccacataccgtaccaccagaatcgtttcttcaggtcttggtacatcttctcgctaccaggatgtatagaatatgttgtctcatgaactttcttgagaatcaantctcggatcgatttgatgtcnggaacacaaagtcta

SEQ ID NO: 22462 - DNA, 468 bp, Zea mays
  unsure (1)..(468): unsure at all n locations
gattcttcatcccaacatgggcaagtcggctatgccaaagccagcccatattagtcttagcaattaaacaagtgtctagctcagcttgattatcattaaaatccactaaatatagttgaccatctaacactcccttaaatgctattgaatcatcacttctaaagacagtaacacctatatcagtgaatagacagttgtagcccattttgcataattgagaaacagaaaacaaattgtaatctaaagaatctataagaaaaacattggaaatagaatggtcaggtgatatagcaattttacccaaacctttgaccanaccttgatttccatccccgaatgtaatagctcgttggggatcttcattnttcttataggaggagaacattctcttctcccctatcatgtggttngtgcacccgctatncgatatccaacttgaaccatcggatgcataaacctacaaaacaa

SEQ ID NO: 22463 - DNA, 329 bp, Zea mays
  unsure (1)..(329): unsure at all n locations
ctacttcacatggatctattcggtccaatatcttacataagcatcggcgggagtcagtattgtctngtaattgaggatgattattctcgcttcacttgggtgttctctttgcaggaaaaatcacaaacccaagagaccttatagggattcttgagacgggctcaaaatgagttctgattaaggatcaagataataagaagcgacactcggaaggagttcaagaactcacaaatagaaagctttcttgaagatgaaggcatcaagcatgagttctcttctcctacacaccacaacataatggtgtagtggagaggaagatagaactctac

SEQ ID NO: 22464 - DNA, 437 bp, Zea mays
  unsure (1)..(437): unsure at all n locations
tccactgcanatctacaagaattcttatgtctcacaagcctgccatttgtcttcaatnggttcgccattgattttcaaattggtatctctgagactacatttaatatcatttacatgtcttctccaatatttgaccagactatacttcatatcttatacttcccgtggtgctaaaatgcatatattgttgactcatatttttgtacctattcataagggaagttagtctattcaaatcatgtcttgtcacctctatttgcacatgctcttttctaagtagaagatctctgtcaaggggagctnttcttcgtctctaatgggggagaaaattcttcctataaggagaacactcatttatggggagtaacaatttggtgcttcaactagtattaattgacaaatcttntatgacggcaagtcttatttgcttcctacat

SEQ ID NO: 22465 - DNA, 428 bp, Zea mays
  unsure (1)..(428): unsure at all n locations
tctcccacctggaagcctcgggaccggacccttcnggcatggtagcgtcacagagactgctgataccgtgtcgagtgtagtaaggccacgtcccgagcctcctctaactggtccaaagagtcttctcggctggtctgggtgcttcgctcgtcgtacgcctttgtcctcggggaaccgtattctaagtctgtgggtaagatagcctcggccccatagactagaaagaacggcgagaaacccgtggctcggctcggcgtcatcctcagactctagaccaccganggtagctctttcatccaccgctagccaaacttggtgaggtcatagtagatcctcggtttaagtccctgtaggaatcataccgtggcacgctccacctgcccattcgtcatggagtgagctacggcggcccagtccacatggatgtg

SEQ ID NO: 22466 - DNA, 463 bp, Zea mays
  unsure (1)..(463): unsure at all n locations
tcacaatcggtaactcccgttctggtgacgtgtacaaccctaacagccacgccttgggccaggtcaagaacggctgcgtgatggtcacagctcatgcggtcctcggcaagaggctcttctgcatcgaatggaagaaccacaggtctctagcaatcttcaacccagctgacgactcctggcaaaaggtccccgtgccgctcaccggcagctcaagcactcgtttctccctcgtggtgcacgaggacaagctgctgctcttccctctggaggaagagcccgggtaccaaacgctgatgtatgaccctgcagctccgatggggtccgagtggtgcacgtcgaagctgaagccgacgggttcttgcctgtgcagcgtgaccatcanagcctgatgatgaccttgaatgcgtgggatgccgtggtcgtactgtcctcataagatggagtccacacgccttcatatttc

SEQ ID NO: 22467 - DNA, 470 bp, Zea mays
  unsure (1)..(470): unsure at all n locations
cagcttagctggcagcgagctactgtggcttgaatagcggcgacgctctgtgcttttctcccgggtagtcgtggctcacgccgtaaccctctcttttgttggtggcttgcgatgggtgagatgatgggaggttttgcgatggcgccagtcgtggctcacgcggtaatcttctacacagaagcctagggatcattaaccaactccgagcggacccggccgcgacaaaacggaccagcatcctcgcgttcggactggtagaagattatggaattgtggtccattgcagcattgatgaagtcatccatgacgttgtggtgatgtaatctccggctaggagattaaaaaaagaaaaaagaaactagcaggtagggacacggctacctaggagagctaggccatgctggccaatcgaccaanacaatcgtggcatttagtaacctaatccatattctgntttntgggtttcttat

SEQ ID NO: 22468 - DNA, 471 bp, Zea mays
  unsure (1)..(471): unsure at all n locations
tggccatcatgtatctttcagagctaatctataaatattggagacatttcagagatcatggagggaggaaaacatcccatggccaccgacagtaacctcttgagcagtaaagatggacttggtacggtgtaatgcataattcaattcgcaaagatatacaagcaccacaaaaatttacaaaactaaagcaacactgaataaaacaccagtggatagtagcggagaaagtgtttgacctgaagttaaaatataataacttgtgcagatatacctttgcactgccatacttgaggcaactaattcctagttntaatccttcccttgtctgcatgatccgaacaataagtggctctttcgaccttttcttcttagctcttctttctttggtagtctggagcgttgtnggtcatctcatctatgttaatgcccctgagtagaatgggataagtgcaatacatcgagctgagctac

SEQ ID NO: 22469 - DNA, 424 bp, Zea mays
  unsure (1)..(424): unsure at all n locations
gaaatttgaattatctttggagaagatattggactttaagaatgaaacattgctctgtgaaattggccttaccttgtaatatatttttacccttttcattcgtggtttgaatggcttgatgtggacgaaacttgtattttttgagccgaatgcgaaaaacaccttcccttcttttcgtacacaacgaagcataactttgcttcttttatactcatcgaagccttgtcatcaaagccaaagcatctgttcgtactctatgttatgatgatgatgatcctacgaatgtctaaatgaatgtgtatgaatgcaatgaatgatgtgatgtaacgtgcaaatgaatgtacaaacacacgcatacgaagccacactcagactctgcatcctcttaggaatgactntntgagtctaagctctacatcttctt

SEQ ID NO: 22470 - DNA, 503 bp, Zea mays
tacggaactataaaactcagcttataagacactggtgaattgtgggctatcacgcacacccttatagatgaagatggtcataaaagggagtggttccaaatagagcaaagtgtggtgtgggtgcacaattgtcgtatctagaatgcgattatcgatgtaagtggcactgtggatgctctcattccaacagcgaatacgaatgaaggcctcgaagataaataaacacaatatgtgttactacgtggtgtgaatcatgcgctatgaagggaattatatgtgcatgatatcttgagctacactccatgggagaagtatccggatgagttattcaactcttgacattgtcacactggatggccttaatggtgcaaccaaactgtgtggaaacagcgaataaatggagagttgcacaagtgtctgacttcaaacgcataagataaaagtccacgaataatgatatgcatcatcaagagtcacccaataatatttatagcatgaaacac

SEQ ID NO: 22471 - DNA, 429 bp, Zea mays
  unsure (1)..(429): unsure at all n locations
acatgatacgtctaacttatgtcactctcgaaaaagatagaccttgtgcagcttggcaagcaagtaaacaggtgggaagctctcatcatgccaaaaatgtgatgacaacatcaagacccctggagttacttcatatggacctcttccgaccccgtcgctatctaagcatangaggaaagaagtatggtctttgtataattgatgattttcccgcttcacttgggtattctttttgcaagataaatctgaaacccaaaggaccctcaagcgctttctaaagagagcccaaaacgagtttgagctcaaagtgaagaagataaagagcgacaatgggtccgaatntaagaaccttcaagtggaagagtatcttgaggaggaaagaatcaagcacgagttctccgcttcctacacaccacaacanaatggtgt

SEQ ID NO: 22472 - DNA, 430 bp, Zea mays
  unsure (1)..(430): unsure at all n locations
tatagacatgctgcataaatatattggcgattcctgctgctgaaatgggtgttaagtggaatataatggccaaatttggaaaaattatccactaccaccaagacacaatttttaccccctgacattggtaaaccttcaatgaagtccatagtaatggtctgccaggctccagcaggaacaggcaagggttggagcaatccagggtacttcactctttcagccttggcttgttgacacacagtgcaagaggaaacaaactggataactgactttntcatgccaggccaagcaaagagatgtttcagcctatggtaagtcactggaatgccggagtgccccnctacagctgaactatgtaaggcctgaataagcagttgttggagcttgtaattgcgaccaacccagattttacccttaaaccgaagtaatc

SEQ ID NO: 22473 - DNA, 469 bp, Zea mays
  unsure (1)..(469): unsure at all n locations
agcttctaaagggagagcacattntaggactaaccaatgttcattntgagaaagacagggttagtagcgcatgccaagcaggaaagcaagttggcgctcaccatccacataaaaacatcatgacgactgataggccgctcgagctactccacatggatttattcggcccgatagcttacataagcatcggcgggagtaagtactgtattgttattgtggatgattattctcgcttcacttgggtgttctttntgcaggaaaaatcacaaacccaagagaccttanaaggattcttaagacgggctcaaaatgagttcggattgaggatcaaaaagattagaagcgataatgggacagagttcaagaactctcanatngaaggatttcttgaggaggagggcatcaagcatgagttctcttctctctacacacctcaacaaaatggtgtagtggagaggaagaatagaac

SEQ ID NO: 22474 - DNA, 306 bp, Zea mays
tctgttgagcaacctcccggctgtgaagatagtgagtaccctaaccatgtgtatatactctctaatgcgctctatgggctcaagcacgcgccaagagcatggtgtgaatgccttatagatttccttatcactaatggagtcaaagtcggagaagccgatcctacactctctactataactcttgagaatgacattggtgtgtgcccaaattatgttgatgatattatatatggggctactaacgaggctacatgtgaagaatatatgaggagcatgacacaaaaatttgagatgtctatgatgggg

SEQ ID NO: 22475 - DNA, 446 bp, Zea mays
  unsure (1)..(446): unsure at all n locations
ctactggcggagctagccgaagcactggctgggcttgaaggtggctggagtgggctggccactgcggccgaagctctggcggcaatggcgggcggaattgagctcgccggagctaaaggaaagtggctggccggtgaaggtgagtgctgggcgaatagaggtgcgcccggggaggctttataagcgcgggcgaacaccgccganggcgtgggcgcgcggcggacttgaccggacgccggggtgagcgcgcgcgcgggttgggccagctctggcgtgccgaccagggtcgaacacgtgtgcccgtgcgttctgcccaagttctggcgcgtgtggtcgctcatccgagcctgctctcgcctaggtcagtgcacgaaacctcttcttcttcctacaagctaccattcttgtgtgggggtcatangattttgctactgggtgagagatat

SEQ ID NO: 22476 - DNA, 408 bp, Zea mays
  unsure (1)..(408): unsure at all n locations
cttgaagacttaattgtctccaagacgtctagtacatttaccattcttttcctttttggggtcactgatggccccttttggttttttgctgtttcaatatttactgcaggactcaaaacttctgatgttttttccttagtcggttttttcgcttcttccattttttctgtggatggcgcttcggccatctctgcagtttccggcagcaaggttggctggtcagcttcggtggccgaagaagcttctccggtgaactcaggcaccgaagctggttcaatatagcgtggccggtgtgtgaggacctttatcctttntctctttgattctggctcgctaggagcaagtgcagcttcttcttctgcagaggttgtgttctttcttttctgccctcgagtgggatagcgatag

SEQ ID NO: 22477 - DNA, 361 bp, Zea mays
caacttgaaccctcgtatatatacgcaaaacaccactgagcggtggggctcgcaatgcaaaatgtttcactattctagcgaaaggaaggtgttttttggaccttcagctaaaggctttcattcttttcgcaatatgaatttgttacaaagaaacaaactaataatgcgaggggctactattggggccttcctctttcgaaggtcctcaaaacacggctaaccatttgctttcagtatactactgaatattacaggagcttcgtcaccagaaaagcttcggtataacacaagaagagcgaagcaagcttcgtccaccaggcttcatcatggtgaaatgggtagacaacgtggcttctgcata

SEQ ID NO: 22478 - DNA, 467 bp, Zea mays
  unsure (1)..(467): unsure at all n locations
gcttctaagggagagcacattntaagactaacaaatgttcattttgagaaagacaggatttgtagcgcatgccaagcaaggaagcaagttggcactcatcatccacacaagaacatcatgacgaccgacaggccgcttgagctactccacatggatctattcggcccgattgcttacataagcatcggcgggagtaagtattgtcttgtaatagtggatgattattctcgcttcactagggtattctttttgcaagaaaaatctcaaacccaagagaacttanaaggattcttgagacgggctcaaaatgagttcggcttaaggatcaagaaaataagaagcgacaacgggacggagttcaagaactttcaaatcgaaggattccttgaggacgagggcatcaagcatgagttctcttctccctacaccccacaacaaaatggtgtagtggagaggaagaatcaaac

SEQ ID NO: 22479 - DNA, 499 bp, Zea mays
  unsure (1)..(499): unsure at all n locations
ctcagcttctgacaatgtctgacgataaagccgaaagtgctcggaacgaagtaaaaagacttctcagtgctggttcattagagaagtcaaatacccagaatggctagccaacactgttatggtgaagaacgccaatggtaaatggagaatgtgcattgattttactgatctgaacaaagcttgtccaaaggatgagttcccattaccaagaatagattctctagtagatgcaacagctttgtcagagctcatgagtctactagagtggtattcaggctaccaccaaatctggatgaagaaggaagatgagccaaatactagcttcataacccccagtggtacatattggtatcttcggatgcctgangggctcaaaaatgctagaggaagcttcaacaggatgacaaccaaggttcttcattctcagataggcagaaatgtactaacatatcgtgatgatatcatagtgaagagcacgaagcatgataaccacattact

SEQ ID NO: 22480 - DNA, 265 bp, Zea mays
attcttgcgatgctcaatgtcccgtacctccactgggtatcggtgttcgggttcttggagaggccggccatgacgctgcgctcgagctctgagatgtcgaaacagcggtaggagcggacggggcgggcgtcacgttccgcgtcttctgagcggtggcggtctggcgagaagagctttgcgcgggagatcgtgccgagatcaccggagccagtggacatagaaggacgccgacgatgacgatgatgtgttctctccagaacacgac

SEQ ID NO: 22481 - DNA, 471 bp, Zea mays
  unsure (1)..(471): unsure at all n locations
gcttactcctncctgggaagggccgntcatcatcgccaagattttgaagcccggaacatacaagctggccaacgatcagggcgaggtctacagcaacgcttggaacatccaacagctatgtcgcttctacccttaagatgtttcaagtcgttcatataccccgttctctttacatacacaaataaagtctaatcgtcaaggaagggtcagccttgcctcatcaaagcccgaccctccctcgggggctagaaggggggaaccccctctgcgtcaaaattttcctcggtaaaagtctttctcccagaacgtctttcgcgctnttcgactgcttcgatagcgggatcctgaanacgacggagtacacgtaagaggcaaggccgaccgagccgagggactcctacgcctccgggatacggatacctcactcatcaccttctgcgataagtaactcacgctcggataagcgattct

SEQ ID NO: 22482 - DNA, 465 bp, Zea mays
  unsure (1)..(465): unsure at all n locations
actcagcttggaaattcttatcccacatgtgccagtcggcgatgccagagccagcccatgttagtcttagcaattaagcaagtgtcgagttcagctctatcaaaatctactaagtatagctgaccctctaacattcccttaaatgctattgaatcatcatttcttctaaagacagtgacacctacatccataaaaagacagttgtaacccattttgcataattgcgaaactgaaagcaagttgtaatctaaagaatctacgagaaaaacatttgaaatggaatggtcaggtgatatagctattttacccaatcctttgaccaaaccttgatttccatccccgaatgtgatagctcgttggggatcttgngttttctcataggaggagaacatcttctcccctgtcatatgggttgtgcacccgctatcgatgatccaacttgagcccncggatgcataaacctac

SEQ ID NO: 22483 - DNA, 468 bp, Zea mays
  unsure (1)..(468): unsure at all n locations
gctttatgctatagctntaacttaatcaatggacatgatgttaatctttatgatacaaagatgttatgtcgatgatgatcttgtgatactctaggggacctcagctgttttctgagtaccactccgtaaagaccttgtcattgagtgaccacctgtgataacagtacaactatgagtgtggaatggcacacccttagctgattaattagaggaactcgaggtgtagttggcttcgccgtaaggcgtctatggtgtctaagcacaacacttgctctgccgatgctggttgccgagattctttcgatttgagtttgttagtcacccttcctgtgaggggaattattgtgcttatcaaactagagaaacctaacgggcggctatgacctctanggaatctttgaaaggctacgtagtgtattcctagccattcacctcggttgtgaagatcgagtttgtagaacctatgct

SEQ ID NO: 22484 - DNA, 297 bp, Zea mays
  unsure (1)..(297): unsure at all n locations
aaacaccttcccttcttttcgtacacaacgaagcctaaacgatcgctttctctttttgccaaagcttttcttcacatagcaaaacataaaaaactacttcttctttctggcgaagcttttacatagcaagacataaaagactacttcttctttctgccgaagcttttacatagcacaacataaaagactacttcttctttctgccgaagcttttacatagcanaacatataagactacttcttctttctgccgaagcttttacatagcanaacataaaagactggtactcttatata

SEQ ID NO: 22485 - DNA, 438 bp, Zea mays
  unsure (1)..(438): unsure at all n locations
gagaaatatctggacacagttcgaaagctttaatcttctttcgaaaggatttctgttaagaatattccaagaggggaaaatgagcatgctgatctgctagccaagtcagcggcacatgggcgttctctacctttagaagtattttttgagacaataagagcaccttcggttgaactcctcgaaagagcagtgctcacaatatctcctgtccatagtgaagattataggactgagattatatctttccttcagggtaactgtctctcggatgaagaggtttataacataagaatggaagcaagaacaagaccatatgtcataatagaaggggaattatataaacatggagtttgctcctcacttctcanatgcttatacagaaccgaaggtatagaactgatgaaggagatacatgcaggatngtgtggatcccacatt

SEQ ID NO: 22486 - DNA, 416 bp, Zea mays
tctctgcgcaagatttggagcccctgccatggccgcaagctcgctctgccccctgcttttcctggccacagcgttcctgtttctcgttgcccgggcgcttgatctctcctctagcgcgcagccactccttattctctctctggtctgcttccagtcgagtggtgccatggcgctccattttttttcctgcgcgtgagctctgctccagccgcgtccgctgctcattccctctaccgcgtcttcctccttgctccttgcgcgagccgcgaccctctgaccagtcccagccgagctccctccagctccaacccggctccatccatggtcgtgccctgctgctcgtcggtgctcgccgcgggagacagcgctcggtcgccccttctcttcctgctacgatctcgctcgtgaagctccat

SEQ ID NO: 22487 - DNA, 457 bp, Zea mays
  unsure (1)..(457): unsure at all n locations
tatggtgccctgacgcgctctgcccacggagtagccgcgtatcggcctagtgctcgaacgcaggcgagtaattggcgtattcacggtgacccgtcgtgctcacagcttgcttggctgggacactgtgctatggacaaaggcgcgcacgtggtggagaaagggaaagcggtggtgacactacttgcgcgcangcggaagatgagccggactgggcaaggcgagaggtacaacggacgtgagcagtggcatttgtaaccccggagctggatagttgacgcggagtccgagcgccgttgcaacgccaggaggtcctggtcgagtggttgcgcaagcgagggactcggtcctcacgtggattccacgacgaccggtgcgcgccctcccatcctggtgaagaagacgaacagggcacagccaacgctacagaanaacgcgccgggcgcgagccactgagcag

SEQ ID NO: 22488 - DNA, 404 bp, Zea mays
  unsure (1)..(404): unsure at all n locations
gactagtgtcttggacgctacgtgtattccacattgtgcagcatggacctcgtctagaagtcgcttcccagtagatgagagaatgcacatcatgaagatgcctgatgcgccccttctgtatagtgtctccccaatgagcgtgtagtgagctgactgtctagcgatgcgctcggctggcattttatcatctgggtcctcttcattttttatatatctgataatcggccttcttcagtcatcagagcctgactctggttgattcacgatattacactcttctgcctgatccattgagatgctnggatgtggtatttcttggacgaagaactcnggtgggacttgagttcgactggatcctagctttgacaatacatcggctaccgtgtntcgatctctttctacat

SEQ ID NO: 22489 - DNA, 417 bp, Zea mays
  unsure (1)..(417): unsure at all n locations
cccatgttagtcttagcgattaagcaagtgtcgagttcagctctatcaaaatctaccaagtatagctgaccctctaatactcccttaaatgctattgaatcatcacttcttctaaagacagtgacacctacatcagtgaatagacagttgtagcccatttgacataattgagatacagaaagcaagttgtaatctaaagaatcaacaagaaaaacattggaaatggaatggtcaggagatatagcaattntacccaaacctttgaccaaaccttgatttccatccccgaatgtgaatcgctcttggggatcttggtttttctcatatgaggagaacatctttttctccccagtcatgtggttggtgcacccgctgtcgagtatccaacttgagcccncggatgcataaacctacaaa

SEQ ID NO: 22490 - DNA, 454 bp, Zea mays
  unsure (1)..(454): unsure at all n locations
taatgatgaattagctagtcttaatgctcaacttaagactatcaaaagtaaatttgataaactaaaatttgctagggatgcctacaccgttggtagacacccctcaattaaggatggacttggcttcaagagggaagtcaagaacttaacaagccataaggctcccactcccactaaggagaaagggaaggctcctatggctactagtgctaaaaggaaccatgcctttttatatcatgataggagatatcctagaaatgcttttagaggtcatgatgtttttggttcacatgcttatgactcttatgctatgactgcttctagttctcatgttatgcctggtagaaatgtgcttataagaaatgttgttcatcaaatgcctatgagaaatgttngttataatgctcctatgaaagtagtgaatgaaccttctacaatttactgtgctttaaat

SEQ ID NO: 22491 - DNA, 433 bp, Zea mays
agcttgtggtgccctcgggcgtcctgccgcagcctaagtaccaagtctcccacctagaagccttggggccaaacccctcgggcgtggtagcatcgcagggactgctgataccgcaccgagtgtagcaaggccatgtctcgagcctcttcgagctggtccagtgagtcttctcggctggcctggatgcttcggtcgtcgtacgcctttgtcctcggggaaccgtattcttagtctgtgggtaagatagcctcggccccatagactagaaagaacggcgagaaacccgtagctcggcttggcgtcttcctcagactccagaccaccgaaggtagcactttcatccaccgcttgccaaactagttgaggtcgttgtagatctttggtttaagtccctgcaaaatcataccagtggcacgctccacctgcccattcg

SEQ ID NO: 22492 - DNA, 462 bp, Zea mays
  unsure (1)..(462): unsure at all n locations
ctaagcttggcaagtccacttttatagttggcaataccctggatgccataaattcttgcactaaatctctagggccaatatgttctgcgataattctgaattcagccagtgcagcccaagttggaccttctactgccattttgcatcggggtcttgtttctccgaaaatcaattcaagatggctctgtaccagcttctctttgtcttcgtcaactttgacataaaaccattctgactttcagcctgccggccatttgcttcggtaactgatcacatgaaactttgtggttttctgatacgcaaaattataacaaccaaaattttcatgcaatccatcttttctggccttagtctggtgatgcagctcatgaactcgacaaaagctgtctgcatactgctccaccgcctggcttcggagagcccanatatatacgctcagcctgacaatggcgttaggagtca

SEQ ID NO: 22493 - DNA, 466 bp, Zea mays
  unsure (1)..(466): unsure at all n locations
agcnttggcatctttatatatctcttcttcctgagcccctggcgtccaatcagcaatgaaatctgctaacgcatgggactgaattgaagatctatgcacataatcaatggtgaattcattaagctctgtagcccattttctaattcttccagtagcctctctgttcctcatgatgtcctttagaggttgtgacgaaagaacaattatgtggtatgccaaagctttctggaggctattaacacagcatataataccttctccaattctgtgtaatttttctttgatggacttaaaacttcagagacgaagtatattgnggcttgctttntagcctgaccatctagcttcccctgtaccagtgccgcactcactgcagaatgcgaagctaccacatataagagcaatggagcccctggcgcgggtggagttaatgtngttaaatcaatcaaatattcgttaaactctt

SEQ ID NO: 22494 - DNA, 401 bp, Zea mays
actcagcttgccagacttgtcgaagcaacaacatctaccagcacagtaactgctgaccataccagtgacttgggccttcgcatgctgcggactcgatatgattggaccttttaagagagctcaaggaggatacactcatgtactggtagcaatcgacaaatacaccaaatggatagagttcacacccattgcttctttaacctcagctaatgccgcggaatttatacaagacataatattcagattcgggataccaaacagcatcataactgacctatgatccaacttcacaagttcagagatcttcgatttctgcgagcaaaaaagcattcagatcaagtatgcttctgtagcgcacccaagagccaacgggcacgttgagcgagccaacgggatgatac

SEQ ID NO: 22495 - DNA, 410 bp, Zea mays
  unsure (1)..(410): unsure at all n locations
caaatgttcattttgagaaagacagggtttgtagcgcatgccaagcgggaaagcaagttggaacccatcattcacacaagaacatcatgacgaccgacaggccactggagctcctacacatggatctattcggcccaattgcttacataagcatcggcgggagtaagtactgtctaattattggggatgattattctcgcttcacttgggtattctttttacaggaaaaatctcaaacccaagagaccttaaagggattcttgagacgagctcaaaatgagttcggcttaaggatcaagaaaataagaagcgacaacgggacggagttcaagaactctcaaatcgaaggctttcttgaagaagaaggcatcaagcatgagtttttctcttcctacancgccacaacaaat

SEQ ID NO: 22496 - DNA, 480 bp, Zea mays
tatgaagattcttcatcccaacatgagctagtcggcggtgccagagccaacccatgttagtcttagcaattaagcaagtgtcgagttcagctctatcaaaatctaccaagtatagctgaccctctaacactcccttaaaagctattgaatcatcacttcttctaaagacagtgacaccaatatcagtaaagagacaggtgtagcccatttgacataattgggatacggaaagcaaattgtaatcaagagagtctacaagaaaaacattggaaatagaatggtcaggagatatagcaattttacccaatcctttgaccaaaccttgattccatccccgaatgtgatcgctctttggggatcttggtttttctcatatgaggagaacatctttttctccccagtcatgtgggtcgtgcacccgctgtcgagtatccaacttgagcccccggatgcataaacctacaaaacaagtttagttct

SEQ ID NO: 22497 - DNA, 456 bp, Zea mays
  unsure (1)..(456): unsure at all n locations
tgagactctntcttcttctaatgttaattgtgcgngctcgacctctgacatttggtctggtaatgccaaagaggactaccttagtgttggcgcccattacataaaccctgattggcaactagagaaaagggtgcttgctttagtgcttatcgatgtgtcacacaatggacaaaacattgctgatcgtgttgctggagtgcttgctgattatggcttgactaataaggagtttgcttttaccctagacaatgcatcatctaatgctgctgccatgaggttgcttagacctataatgtcaccatatcttggtattgataatggggcagattctgaaatgttcttgcatcagccgtgtgcatgtcatataatcaatttgatagttaaagaggccctaccatctttaagaacttgatcgaaacatttagaactgcaatatcatttttaaactcatctaat

SEQ ID NO: 22498 - DNA, 232 bp, Zea mays
  unsure (1)..(232): unsure at all n locations
tcaaactttacaacaacttattatggtgacaaactgtcgagcgtgcataatccaccccctcgttacaatgatgacgacaatgaatcgaaccttatcatatttcgaggccaactcggaagcgcaagtggctcgaccaccaagaccctgacacatgaagagtggcggatatcatgctatacgtattgccaacctngaagaggtgacccatacatggataatttcttatgaattc

SEQ ID NO: 22499 - DNA, 455 bp, Zea mays
  unsure (1)..(455): unsure at all n locations
agatcacaacttcgttttcttcggaggcaagaacagccctgtctgcgtcaagcctcacaatagacatatcttgaaaataccttcctctcatattatcaagatgactcttgttgatagtcgatttcccaaagactgcatgacttggtcgccagggccgatcttcagagtcttcgcctncactttccgcatcataactgtcgctatcatcagtatcttcagataagccttctagaattccttagtgatcttttctggatttggtcttgctattgattcaataaatccagcagtcttctcctcaaggagcttctcctcttcgctcagcttcgtctcagcaacagcttttttggctagagacatcttctcttcggaaatggtgaaaatgtgtccttaaagccgaagcttagaaagtctaanaaaacaagcaagcgttggtagacaagagctaaaaaatt

SEQ ID NO: 22500 - DNA, 509 bp, Zea mays
  unsure (1)..(509): unsure at all n locations
tactattagtggatccttaagaatccattntactcattaggttaagtaattacctgcatctagattcctttctattcttagatcaagaaactggcctatactagtcatcttttatcatcccttcagttcaattgtcgctatgtgtagggcagtgaccaagtcttcatattcgggaagtaacagcgatctgaatcgattaatacccagctggggatctccaaccacacgacatatgtagcacttaacccttgcatatgtcaactcgcacctcgggttctcaagaccagaatgggttcacgccaaccgagagcacaaatactccaccgtccagcctcttgccatagagggtacacgcaactctcaccatctctccactcccattgcanagatcgaacttcattacatgttcatcatgacanacattccaacatacgataagcanactaactcgaactaagactaactaaactaaggcactggaatcattattacagactctgnactcaccg

SEQ ID NO: 22501 - DNA, 466 bp, Zea mays
  unsure (1)..(466): unsure at all n locations
gcttctcacaattctcttttagattggtgtgagaagtcttgagctnctcaaaagacacttggagggttttatacaattccttcaagtattaaactttctttnttctttgtgcatgtagtcatcggcctcacctaacattctaacaagatcatcatatgaatagctatcatcaacaacatcatcaacatcatcatcatcatctacatcattttaaatggttatgatntttactttagcatcctcctttgccatgagacaatgangggatgagaaaagtgaaggggcttccttgatgacaatttcggcattaagcttggatgaagtgtcatcatcatcatcatccgagctagcatccgaatcccattcaactatgtaagctttgccatctttcttcttgttagagaatttcttcttcttattatcatctncatctttgcccttcttcttcttggtagggcaattcatg

SEQ ID NO: 22502 - DNA, 187 bp, Zea mays
  unsure (1)..(187): unsure at all n locations
cgtcatcatcgccaagattntgaagcccggaacatacaagctggccaacgatcaaggcgaggtctacagcaacgcttggaacatccaacagctacgtcgcttttacccttaagatgtttcaagtcgttcatatacctcattctctttacatacacaaataaagtctaaccgtcaaggaagggtcagc

SEQ ID NO: 22503 - DNA, 351 bp, Zea mays
  unsure (1)..(351): unsure at all n locations
gatattatttggaaaacctggacgccttccaaatgcaattntttcttgtgtcttactggcctcgggcgttggccgacctttgatcgtttacagagacgtgggcttgaacatcctgacagatgccctctctgtgaccaggctctggaatcaattgacctcacttgatgcatttntcctagagaattttggggttcgaacctctgaatatggtcaacctccagacattaactcctcagccgggtgatcttttcagggactggtggagaagagcaagtgatcaggtgcatgacattgcaagacaaggtctcaattcgctaatcattttaagagcttggatcctttggaatcaca

SEQ ID NO: 22504 - DNA, 449 bp, Zea mays
  unsure (1)..(449): unsure at all n locations
ttagcagcaaaacagtgcaatagcaatgaatgttatggtaacttcacacctacccgtctggttatatagtgccgcaggtggaaaggtaaatcgtcaagtctttcgcaccggacaaacagccgcccgcacccactgagcagtgggccacaaagcccgagaaagtgatatcgcaggacgcgcgtaactgctgcatggcgaggccacctcgtgctcggattattgtaatcgtttctcggcaatgagctcagagaaggtgttttcggatcttcagcatcccgaagctgtcacacccggattntatgggtccaaaacccgggcgcgaacataatcaccaggtgtgctgggaccaagtctcacacatatgatgaatcatggcacaagatcgaatgtcacatctttactatataacacgagttctatacaanatanataaataattacatcatatg

SEQ ID NO: 22505 - DNA, 479 bp, Zea mays
  unsure (1)..(479): unsure at all n locations
tgaagggacatacttaaagcatgccccagtgtactttgtctccgaagctctcagtttatcaaagaanaactatacagaattggagaaggtgctatatgctgtcttaatggcctccaggaagcttcgacactactttcaagcataccatataattgttccttcatcacagcctttgaaggatattatgaggaacagagaagctactggaacgattggaaagtgggctgcggaactcaacgaattcagtattgattatgtgcatagatcctcaattcagtcccaggcgttagcagacttcatcgctgatnggacgccaggggctcaggaggaagaagcaagtaaagatgctgaagcttggacagtgttctgcgacagttcctgnggaaccttcggggcaggtgcagctgcttgtttagttgcaccttccaaagttagaacattgctatgcagtgaaacttgattcagctgcacaaataata

SEQ ID NO: 22506 - DNA, 399 bp, Zea mays
  unsure (1)..(399): unsure at all n locations
gtgaattcgcctgggtctactggtcctgcccgaagcttggctcgggcgaagcgagatcctgtcccttgagtggatggagcctcgacctgaattgcgcccatcangcttttgcagcttgtgctgatggtgattactagccgagtttaagagtcttggggtacccctaattatggtccccgacagtagccctcgagcctcaaagggagtgttggtactcgcttggaggctttgtcgcacttttttgcaaggagaccggcctttctcggntacatnttagtccggtgggtgcgcgcgagcgcacccgccaggtgtagcccccgaggcctcggaagagtggctagactcctctgaggtcttaatgccttttgtgacgcctcggtcggtttggttgtccctcat

SEQ ID NO: 22507 - DNA, 505 bp, Zea mays
  unsure (1)..(505): unsure at all n locations
tcttgaaagctggactacgatntccnctgagccacttttgtgtggatgtgctgaagatatttgaaatccaccttcaccagcttatccccgaagcgatcataaggatgaatatttttgtgtgggctgtgaggagccaaggcttggaacctgatgcaaaaagcttctgcaacatgcacgaattgttatacgagacaaaaccctgtggtaaggaacaatatcacaacaactttggctgctacagcttcggctctcggtctgggtcaagctgcccagtgccgacctttcgaaagagatggcctggcgactggacgacggaatggttttacgtgaanaatgacttgaaatctcgagaggatataaagaagatcattatgtatcccatctggcaacgcttcggcctgcgaaagccgaaggtggaaatgaatgaagcggccgaagaatgccagagagccttcngagttgtctgctctcttattgngacganggattaacacaagacatattg

SEQ ID NO: 22508 - DNA, 416 bp, Zea mays
  unsure (1)..(416): unsure at all n locations
aaacaccttttctgagctcgttgccgagaaacgatttaatttcccagcacacagcggtcccaccttgcagaggttactggttgtccctgcggtccaccgcgcagcgagcgcaagcgggtgtgcgcctggtgtaaaaactctggcgcttcgccttcttacctgcagcactatataaacagacgagtaggtgtgaagttaccacagcattcattgctatttgcactgttttcctggccaaaattttaaccatcgccgaagcttgtccgttagaaacgaacgaagctccagtttgaaacctgcttcggaggaagaaaattntaaagtttcacaagttcataattgaatggccagagtccgctctaccgccagggttgagcgcgagggggaggaaactgaagcttcggagactcttccca

SEQ ID NO: 22509 - DNA, 193 bp, Zea mays
catcaagttttattttctaaaaacatcccacccacctttgccacatcatatattgtaaaaataaaaccttttgtttttctaaagccaagctaagcatcaaagagcttttataaaacaagtgattaatgaaggttatccaattcaacgaaggtaatgcaagaatggtttatcaagcaactctatcacctaatgc

SEQ ID NO: 22510 - DNA, 506 bp, Zea mays
ttttcttctccccccccccgggtttatgtactccgccggacttaagcactgagctgcagctctaaggaaaccggatagttgctacgtcaatcaaaaaataacctggcacttgtcagcatgtaacaagtgggacgagcgcatcacagcaagaatgtgatgaccacatcaagacccctggagctgctacatatggacctcttcagacccgtcgcctatctaagcataggaggaaggaagtatggtttagttattgttgatgactcttcccgcttcacttgggtgttctttttgcaggataagtctaatacccaagggaccctcaagcgcttcctcaagagagctcaaaatgagtttgatctcaaggtgaagaagataatgagcgacaacgggtccgaattcaagaaccttcaagtggaggaagttcttgaggaagaaagaatcaagcacgagttctccgctctctacacaccacaacaaaatggtgtggtagaaaggaagaacatgac

SEQ ID NO: 22511 - DNA, 344 bp, Zea mays
  unsure (1)..(344): unsure at all n locations
ccttgatacaaagatcttatgccacggtagcaggatgaagaattgctttcaaagcattgatggtgccatgaccaataattgcattataagggcattccatgtcaacaatgtcaaacacaacttgctcagntctggtgttattgatgaatccgaacgtcactggcatggtgatcttgcccagtgctacaatctggtcttctcccaagccacagatagggtgtgtaacatcatgaatcttatcttctggctcttgcatttgtctgaaggccttatcacatataatatcagctgcactgcctgtatcaaccaagacattgtggaccacaaaccctttgataacgcaa

SEQ ID NO: 22512 - DNA, 448 bp, Zea mays
  unsure (1)..(448): unsure at all n locations
agcttcggaagaagatacggagatcagcccaaaagactattttgcttattctgcggtgaagacaaaggctaaaccacaagaacatgccaagtcacaattcagaagcaaaaatagattgatgaagctgaggcacagtaaaatcaactgaagtaggtcctacatactgcttcatgctattctccctatgtcccagaatacgtaggtaaccaacaacctatggcctctgtcgcttcggcaagccactctcaagcttcctgggcccagctcccaccaccaccaccgctacaacctactctggcccgaagccagcaggcagaagggcatcagcacactcaacagcagcgcgattnttgggaggagtccaaagctcgcacagtcaatagtattgtgcctgaatccaagcacatctactaaagaatatccctacccatggggatctttatctttc

SEQ ID NO: 22513 - DNA, 388 bp, Zea mays
gatgcctacaggtatgtgatgccctctaaatgctttcttgaactctccccactcaaccatgtggtcaaccggctgcataacgaggaaatggtcccaccatgtccgcgcgggcccacgaagctactgggtggcaaaaccgaccttggctacatctgaaaaatctccattatgcagtgggaatttggattccaccaccctgagccacacatcagcatcaaggggatcttctgtccgagtgaacaatggcggctgagtactgagaaactcctgataaatggttgctgctatgggacgctgatgatgatcaccaccaccataatgctaatgcggtggctgacgctgggctaactgtcgcagaatctcattcttctgagccatcaagctctgc

SEQ ID NO: 22514 - DNA, 408 bp, Zea mays
gctttacaaacacttagagagtttatagagagatgaagacagcatgattaacgaaaccaagcaacaagagcaacaaatgaaacacgaatcactctctctcaagtcactaatcactaatgatcacttgtctcaattgcggaacttggagagattggaagctctgattgtgtcttggaatggattgctagctcttgtattgaatgtgtatgaggggagtgcttgggtgaagagaatggatgtgagaggggttgtatttatagcctccaaccacttcctagacgttgcttctttcctaccgaccgcggacagtccgcgcccctgatccggacggtccgcctatgcacatcaacgactaacatcgcaatggacagcagtaacggctatatcaacgactatagagcatttaat

SEQ ID NO: 22515 - DNA, 452 bp, Zea mays
  unsure (1)..(452): unsure at all n locations
gcttctaagggagagcacaatctatgactcacaaatgttcattttgagaaagacagggtttgtaacgcatgtcaagcanggaagcaagttggtgctcatcatccgcataagaacatcatgacaactgacaggccactggagctcctacacatggatcttttcggcccgatcgcttatataagcatcggcgggagtaagtactgtctagttattgtggatgattattctcgcttcacttgggtattctttttacaggaaaaatctcaaacccaagatactttaaagggattcttgagacgagctcaaaatgagttcgacttaaagatcaaaacaataagaagcgacaacgggacggagttcaagaactctcaaattgaaggcttccttgaggaggagggcatcaagcatgagttctcttcttcctacacgccacagcaaaatggtgtagtgga

SEQ ID NO: 22516 - DNA, 404 bp, Zea mays
  unsure (1)..(404): unsure at all n locations
cttcattcccacatgtgctaagcggcgatgccatagccagcccatgctagtcttagcaattaagcatgcatctagaccggcctcttcttttgcaaaatcaactaaataaagtttgccgtctaatacacccttaaaagctaatgaaccatcacttcttctaaagacagacacatctatattagtaaataaacaattatatcccatattacatagttgactaacagatagcaaattatatccaagggactcaactaaaaacacattagagatagagtgctcattngaaattgcaatcttgcctaagcctttcaccttgccttgtgtcccatcaccaaatatgattgaatcttgggagtccttattcttgacgtaggaagtgaacatcttcttctcccccgtcatat

SEQ ID NO: 22517 - DNA, 397 bp, Zea mays
ggaaccgacttaaaggggaaaaggctgcctagccctcgatagattatccctaggtcaatagaaaatgtcaagggcataaatgtaattccacataggctgcgtcatgtgcctataaatagatgaacagtgacatcgtactgttcacgctgactagtattcactcgcgcgtcatacttgaacttttgctttctatcaagccgaaggtacaaatataattcaatattgtttatgctcattcatgatgatgtaataaagatacatcaataatgtcatatggttacttatgttatttttcatgttatatatgcttctactttcattaatataaattgtgatgacgaagcatttgagaacaagtccccaacagtcatcatgtgtcgtttcttctaagcatttc

SEQ ID NO: 22518 - DNA, 458 bp, Zea mays
  unsure (1)..(458): unsure at all n locations
tgagcaaaatccatggttagaaaattaatgatcatactatttgctctaacaatgtgcctatgtgcttcaacaaagaaagatcaaagagaagcgatngaaggtgctatggatgcaaggagaagggtcatgaaattggttcatgcccccacatgaagaaccaagaccttgcacaatcaagaaagatgatcatcaagaaagatgaaagcaaaaggcaaatgcattgcaaggacaagcaccacatttgctacaattgccgtaaaaaaggtcatctattcaaggtttgtccaaatggtaaaactcctaagcctaacttgtcaatacattcaaatatgcttaggagacccaaatttgactcttgtgctagaaaggtgatgagttcaccacattctangaccaaagctatntgggtgcctaagtccttattggctaaccttgatggacccatcatgagatgggta

SEQ ID NO: 22519 - DNA, 484 bp, Zea mays
  unsure (1)..(484): unsure at all n locations
tactcagctgctctgcgagtgtcaacggggagcttctttgccgagtgcaagaactcagctcttgacaaatataacgaccatcagctttagacggtggctgacgtccctttgccgagcgtttgttgttgccgaatgtttagcactcggcaaagatgtctttgccgagtgttttcctatgtcgagagtgctcgatataaagcactcggcaaagagctgagcaatcggcaaagagccgcattccagtagtgatatattgctcgatccattagctaaaaaatacgttgcgcatgcatacctggcaacagttcttgaacatgtagcattgacttaatggtgccgcaagggtttataatgcattgcgtattcattcagacatgcaagaaactgaaaactttaaaagggtaagaataggaggaataacagaataagctaacctcttctatcattaaactaccatgcaaacatanaatgatgaatatatcga

SEQ ID NO: 22520 - DNA, 418 bp, Zea mays
  unsure (1)..(418): unsure at all n locations
catgttagtcttaacaattaagcaagtgtcgagttcaactctatcaaaatctactaagtatagctgaccctctaacactcccttaaatgctattgaatcatcacttcttctaaagacagtgacacctacatcagtgaatagacagttgtagcccatttgacataattgtgaaacggaaagcaaattgtaatctaaagaatctacaagaaaaacattggaaatagaatggtcaggagatatagcaattntaccaagtcctttgaccaaaccttgatttccatccccaaatgtgatcgctcgttggggatcttggtttttctcatatgaagagaacatctntttctcccctgtcatgtggntagtgcacccgctgtcgagtatccaacttgagcccccagatgcataaacctaccaaaca

SEQ ID NO: 22521 - DNA, 431 bp, Zea mays
  unsure (1)..(431): unsure at all n locations
ctcagcttatattcaccctcttagcaaggtcgtatttctcacctatcataattcagaagaagaaaatgatcaataaattggcattcataaaaagctacatatgattggaagaagcagaattttcaggttcaaacttttcacgagaacgttcaaaagaatcttagggtaattatagcattcttgttgaaattaaccctaaccaaaggctagaaagaaacatcagattgtattgccaataccagtatctaccagtagccatcataaatcaacatgtcagcactttcagaagaaaaaggagacgaaaataatcgcgaaattagccccacaattgtcaagtcaatgatatgaatagatagacatctctagatgactagctctntatcctctaaagtctaaatggacagattattnaaaaaaagacatatggagac

SEQ ID NO: 22522 - DNA, 369 bp, Zea mays
agccccgcaagatgaggcaccccagcaatagcagctaccaccctgcccccgatgaccatcgagcagatgttcctaatgcagactcaagcagttcaagacatcggtcagactctagccaccattcagcaacagcagcagcagccaccacctcagcctcagatgcccagagacaagcgtgctgaattcatgagaggtcttccccagtgttcgctcactcttctcaccccatggatgccgaagattggctgtgcactatggagcgggagttgcacatcacccaatgcgaagacagggagaaagttctatatggtccccgtctgttgagaggagcagctcagtcttggtgggagtcttatcttgccacccatg

SEQ ID NO: 22523 - DNA, 315 bp, Zea mays
gcgcaactgtgcgaccgctcgaaaccatttgacgatgatcttcgcttgctaacggacgaatcgacgcgtctatattatcgacctgcttcgtctacttttgtgcttgatcaacctaagcaccgacaaactcgacgtgagtaaatatgttaattcagatggttaatgtgctgatctatatattgctatgcgtagtgcgcatataaagttgaatatctataaaatttgcctcgatttaaaatctggacttataatattacgcagtataccaacaatccaaaaacccttatttctgcattattctattattctagcaat

SEQ ID NO: 22524 - DNA, 395 bp, Zea mays
ttaagcccctttgaaatccttaagggaaaatgctgaaaatatttgtaaacatgctttcagtagggcataaactggcatgagcatcacacttatcctatgacacaatgcacttcacattctatatgatttagatatgttcccattaacctaattatgtgcaattggcattgtaggccaaactatgtgttgttgctctccatgcacatatttagggggagcaatctatgttgtatagaactatgatcatatttaattaacatatctcttgatcatatctctttcattttggtacaaatgcatatatcctattattcccggaccatgactacgactaatatgtttccaagtatatcactatgctaagtcgtagagtgaagggaaatggagtcttcggc

SEQ ID NO: 22525 - DNA, 500 bp, Zea mays
  unsure (1)..(500): unsure at all n locations
tctaaagggagaacacattctaggactaaccaatgctcattttgagatagacagggtttgtagcgcataccaagcatgaaagcaagttggcgcccatcatgcacacaagaacatcatgacgatcgacagaccactggagctcctacacatggatctattcggcccgatcgcttacataagcatcgacgggagtaagtactgtctagttattgcggatgattattctcgcttcactggggtattctttctgcacgaaaaatcaccaacccaagagaccttagagggattcttgagacgagctcaaaatgagttcggcttgaggatcaagataattagaagcgacgacgggacggagttcaagaactctcaaattgaaggcttgcttgaggaggagggcatcaagcatgagttctcttctccatacacgccacaacagaatggtgtagtggagaggaagaatataactctattggacatggnacgaaccatgcttgatgagt

SEQ ID NO: 22526 - DNA, 444 bp, Zea mays
agcttcaagagatcgtctggtcattggcggaccacagcagcaatgatgcactcgttgcagccatcacagtttccgtggctggagtcgagaacctgcctaatctgaaaaatgtggtgctcaaaggcttgcgagagcagcatccttccaccttgaccaaagacatcgcaaagcaccccaatcgcccagtctttagccgtcatggccactaactacattgcaagtaccacctacgtactgcagatgatcgacgggcggcccgcccgtcaggatattcggtgatgcgacacagcatactgtgtccggctccatatctcgcatccccacatgtgtcttatctctctgtgtattgtatgcaagagtgacatccatcaatctatttctaactcaaggccgagctatctatggatacaacatcgctacctagttgtgtacatacatatcata

SEQ ID NO: 22527 - DNA, 227 bp, Zea mays
cgtactaagcacatgccgagaaaatggtgtccggccaacctagtacctgagtgaagccgggcgcggactctatccctcatgcgaactgagactgggtcttccatgctgactatggtgggtacaagtgcggtcactgcactgcggcagacggagtcagtggagcattgtatgccaaagccgcgaggcctgtacctgaatagggaatcaatagggacgagtgtcatgtg

SEQ ID NO: 22528 - DNA, 339 bp, Zea mays
  unsure (1)..(339): unsure at all n locations
ggcctttcttggggcgatggaggtcatcacatgataatattttgaccaattgattactagtgcaagaatgatattcatatgaagttaaactagtaattactacctcatgagcaatatcgagcatgatatgatcatcaactagtttactatgagagtatgacaacgtatcatatgtttcattaagagcaagcttttcgaaattcattgtttctacttgacttctaagcatagaattntcagttntaagttgagctacattagatagagtgtcatcattatggctttgctcaattaacattgattcataccgttggaccaaattcccatgagagtacttta

SEQ ID NO: 22529 - DNA, 501 bp, Zea mays
  unsure (1)..(501): unsure at all n locations
gcttgcgaggcagagcgagcgaccaagctcccaccgagcggacccataatgaaggaacccgagccgacgctgctggtcggtcacgacaagacgccacatcaccaaaccacgtctagaccatacatataatactagaaggtctctagtagacacgatggaacatccctgtgtgcgcccatagatatacccttactgactcgtgagaccgatcaactccagtcgaagagacctcaacaccaaagtctctacattggccccaacaccagaaaggacaagacaataccccataccgggtgtatacctacgcgtgatggatagtgatacaaggagtacggcgaaagatgaaatcgtactggacacaaccctaaacctcgtcgtatacccactttgcgggacccaccaggtacctcaacgttgacaccgagcacgctacaatgacccgtatggagagcgaacatnacagaatgtcgtatcaggagtaccgcagcgcatgcccctata

SEQ ID NO: 22530 - DNA, 446 bp, Zea mays
  unsure (1)..(446): unsure at all n locations
tctatggtattccggacagtccatttaaaatagttgtagatgaacctttgccacctgtataacatataatctaaagcaaactagttagttcaatgatttgtgttgtgcaattcaaccaccaaaatcatttaagaaaagggttgagcctatttccctttcaaaaatccccggcctctaccccgtccctggcccagaccacttcctctcctgctgcggtccatcggacgtgaggcantggcancgcgagaggaagatgggtgatgtggaggctcangaagtggctcatcagaggaagcanggcctctagaccctgaaggagcccgcttcgtacaagcagttgggttggtggaatcaacccagtanggtacgtagcgggagtgtttgataggtttttcgaagtgagtctgggtgaccacttcgatcatcttcatgataaatggtgcatg

SEQ ID NO: 22531 - DNA, 400 bp, Zea mays
  unsure (1)..(400): unsure at all n locations
catgagaagacaatcgcgcactgtgagtggagagatggcgagagtggcacgtaccctcctggccaaagaccgcctaaaaagggtggtgtgctctcgggtggcgcggacctgttcatgcagtggaagatccgtgggaataggtgacatatgccagggttaagtgctacatatgtcgtgtggttagaaatcctcagctgagtaaatcgattcggatcgccgntatatccccggagagtggagacttgatcgcttgcctgcaacctaagtcaggatgtgaacctcatgaataaaaatgatgtngtattgatgagatggtgaaattagaccagatgcaaatagagtctattaatatttaatcttgacgttaaatattganagtaaggactcactttagtaagct

SEQ ID NO: 22532 - DNA, 450 bp, Zea mays
  unsure (1)..(450): unsure at all n locations
cttcttgatgagtttgcatatgaaacaatgatttcaagtcatccgactaatcgtgattagtcgggctagtcggttttagtggagcgaccagggtatctgacccgattaggtcgactaatcgaccagttgtccgattagtcgtcgtccaagtgcgattagtcgtccagttaatgtgtggacgataagtaaggtttggttggctggtggctggcctgtttttgctttgggctggacgtctagtaagtctgcaactctacatcatatgttatgtagtgagtagtgagtgatattcagttcatgttctgaaatctgaattcttaattctgaaacgtgatctgagtgcctgataattctagtattcatnaattttatgatgttctgaaatctgaatgttcaatggtgttctgaaatctgaattgtccactcttcactatccagttctagtattca

SEQ ID NO: 22533 - DNA, 468 bp, Zea mays
  unsure (1)..(468): unsure at all n locations
gcttatacggctagaccgagccagaggcgcgatggactattagtggtgtgctcaagcttgggcccataaacagatttctacatagctttcatacacatattctacacatatttcatacatatatagatttctacacagattacatacatagatttcacatatatatttcagcaatatacacataaatcatacaacaattaacacatatttcattaaaactggagtcttagtgcaatgctgactcgttaaaacctttcctaggtaaaaactcatacctcgtaagaaaacgctaggacgaaagaaaagagtacaaccaactccttttagagttctagctcaagtgtncattacagaactacatattgacagtccattacataaatcatgagttcaagttctaattctctgtntcttggcactntaactctttatagctcnttatcttgatcccagaactatttcttgtca

SEQ ID NO: 22534 - DNA, 367 bp, Zea mays
  unsure (1)..(367): unsure at all n locations
ttcttcaaagcccgacccgcagacaagagttgccattgccacgaagccgccgccgccgccgcatgtcgtccgcaagaggagcacgacgtcgacgttgatgaggtgcacggacggcctatgcctacacggcttcacggacgacgaggctgttcatcagaccccggaaccggaagaccaccagaccaccgagctccccgtcgtgacgcacccgtcggtcgtcttccccggcgccacgctgcagctgcacgcgttcgagttccggagccgcatcatggcgcacaccctgctgcagcaaggcctcagcttcngggtcgtctgcccgcggggggtagcggacgtggggtgcgtcttgcacgtcgtggagtgc

SEQ ID NO: 22535 - DNA, 452 bp, Zea mays
  unsure (1)..(452): unsure at all n locations
agctntcctttaaccccgaaacgtgatacccncttcattggtgaaactttcaggtagacatagtctcccacaaggaagtataaaggcattcgccatttgtctgcataactcttctgacaggcttgagctttcttcaaattatgaattattttctgaaccttttcttcagtttctttcaccatatcaggcctgaaaaagtacctttcaccaggttcagaccaatttagcggagtacgacatcgtcgtccatataaagcttcaaagggtgccatcttgatactttcttaatagctattattatatgaaaattccgctaacggcaaacattcatcccattnttgtggaaattccagaacacacgcccgtagcatatcttccagtatcagatntaccctctcagtctgcccactggtttgaggatggtaggccgaactatggagcaacttagtacc

SEQ ID NO: 22536 - DNA, 378 bp, Zea mays
  unsure (1)..(378): unsure at all n locations
tctaaagtgagaacacgcgatatgtctgactaacgtacaattcgaaaaagatagaccctgtgcagcatgtcaagcacgtaaacaggtgggaggagcacatcacagctcgaatgtgatgaccacttcaagacccctggagttactacatatggacctcttcggacccgtcgcctatctgagcataggaggaagtaagtatgggttagttattgctgacgatttttcccgcttcacttgggtgttctttttgcacgataagtctgaaacccaaggcaccctcaagcgcttcctcaggagagctcanaatgagtttgagctcaacgtgaagaagataatgagtgacaacgggtccgaattcaagaaccttcaagtggagga

SEQ ID NO: 22537 - DNA, 458 bp, Zea mays
gctgcagcttttccagcattttaagcccctcatgcattcaaagatagcaatatgtgccattgggggttatgaagctagtcttcggctcatcctccttcttcatcctgatctggtggtagcttgagtaacaatctagtagactcatgagctctgacgaagttgctgcatctactagagaatctattcttggcaatgggaactcatcctttggacaagccttgttaagatctgtaaaatcaatgcacattctccatttaccattggccttcttcaccataatagtgttggctagccactctgggtatttgaccactctgataacaccagcgctaagaagactctttacttcatttcgagcaccttcagctttgtcatcagacattttccgaagcctttgctttcttggcctgaaagatggatccacattgagtgaatgttcaatgacatctctattgaca

SEQ ID NO: 22538 - DNA, 358 bp, Zea mays
tctcatcacaccaaagatgtgatgaccacatcaagacccctggagctgctacatatggacctcttcagacccgtcgcctatctgagcataggaggaaggtaagataggctaactatcgttgatgacttttcccgcttcacttgggcgttctttttgcaagataagtctgaaaccctaaggaccctcaagcgcttcatcacgagagctcaaaatgagtttgagctcaaagagaagaagataaggagcgacaaccggtccgagttcaagaaccttcaagtggaggagattcttgaggaggaagggatcatgcacgaagtctcctctgcctacacaccacagcagaatggtgtggaagaca

SEQ ID NO: 22539 - DNA, 442 bp, Zea mays
  unsure (1)..(442): unsure at all n locations
agcttctgtaaaataatctccgaatctatacctctaanatcaatattggttcttcctgtaacttggcatgatttgccctttttcaaagcattttccgaatatcgataacatgcccccttcttgtgccacatgcagcatgatgtatgatgattatgctatgcaaaatgatgtgatgatgttatgttatgcaaaatgatattttgtgccgaagatacacacattcctgcaatggggcacaatcttttgtatcaatactgactttttcattataagcctcccttaagagcttcttcgccttttacttcagcggaatcagcgtttatttttcgctgtaagttctgcatccccttaagaacgtctttggaacttcttcgccttttacttaggcggtataagctcttgcattccttaagaacgtctttggaagcttcttcgcttttac

SEQ ID NO: 22540 - DNA, 150 bp, Zea mays
  unsure (1)..(150): unsure at all n locations
ccccccccagagaggnttgaaccttgaacccgactttataccgagctcacttatcccgtgaattgtttactttttaaagggaggttccggatcttggggctatcaaaaaaaaatggatgtcatacttatgcagtcttcaccccccaaatt

SEQ ID NO: 22541 - DNA, 327 bp, Zea mays
ctgcaattgctgtaacctcaaaccttcatatctctacatcatgtagttaagcccactcatgtcaaagttctaaatcccaaataaaaactgaggatgagcttgtaggctcatcaaatttcaaataaaacattaaatgagttcttggctaaaccgccaacaaacagcattgaaacctgtccgttgaacgactataagcctccgaatagccatccataacctcttaaacattccctaatacgaagctgtatgaacctacttttttcccttatggggacaaatattcatcttcaatcaattgaaaacatcttgtccaaattcaaccccatt

SEQ ID NO: 22542 - DNA, 445 bp, Zea mays
gcccatctggtccttgtactcggttgttgactctgcgttccaagactactgcagtcgctgcacttcagaatgatacgtctttagtttctggtatctggctctctcttattgtatgtgtgaccatctgtcgtcgaagtcgcacacatggatttttctgtgccgaccatggacattttgctttctagaatttggctggtagttcctacatgggaagctgtatgctgatttgtctggttagctgcagatttccgtccgccacatagacgtgtgggtgagggaggcttgtatagaggagagacaactgtgatgctgaccaaattgcacgatttcacacccctaaaatcacaccagctgtttggtttggagactatttgatttttacttgaaatataccataattgggctattggatcaataaaaacacacaccaaaacagcaatagctg

SEQ ID NO: 22543 - DNA, 363 bp, Zea mays
cattccaattttatgaatacccggataaccgccccaataactcatgaactcttgagaggcctctgcatttacaaaggaatctattcttggcaaggggaattcattcttcatacacgccttgttgagatctgtaaaaccaatacacattctacactttccattggccttttttaccataacaaagttggctaactattctgggtatgttacttggctaatcactctggcgctgagaaacctttttacttcatttctgtaaagcccacaattggtagaagggaaaataataaaataaatcaatcaatatttttaagttagtgatttacggattcttaaaacctttggatactatttggcttcttt

SEQ ID NO: 22544 - DNA, 255 bp, Zea mays
taatgcttgggattggatcgaagatctattgacaaaaacaatagctgaattcattcaaattctacagcccatcttctaactcttcctgaagcttctctggttctctcacacccaaatttaaaggataaagctcggtgcgtctcatatgtgcgccatagaagaacatctcatataatgacgaagtgcatacagaataatgtcacaatcattattatatactgaagtatctacacaataaatgatactataagcgac

SEQ ID NO: 22545 - DNA, 199 bp, Zea mays
acctcctcagaccctgggaaactgtccaaagaggatgaatcatccggctgatatgactttccacgatagggggaagctacgatctccgaatgaccagggcttcgaagaagatccatgacgtcaatcaattattcactcaaagacgatgagaaccgcacagagccacaatttcctcaagttggggcagacagactatctc

SEQ ID NO: 22546 - DNA, 307 bp, Zea mays
  unsure (1)..(307): unsure at all n locations
agctngacctatcgaagatacgataaagtcactatgtgtacttaatctttcattatcatgtatttaaaggggttacccaattatcaagtagtttaagtaaaggatgcatgcatgctcgtcctatacaacctcattttaacttagagggaatagggaaaagattctccattccttataatagccagtagggcttactcaaatagccacctagctacccctctattattgtaaagcttcacgtcctaagtctattcttatcgtcctgacgacctatccaacatttgtttctaaccaaccttacttttga

SEQ ID NO: 22547 - DNA, 437 bp, Zea mays
ttaccctgtagtctggactataagtttgtttctgaggtgcgccttatgcagattgaccatttccagcatttacgtaatgaggactctacggagaagcctcgtaatgagaccctggccattcacctcggaagtgagtacgggtctagctaacccgggcaagaagggaatcacgactcatgggtaaagatgcaccacctctgcagagtgtaaaactgatatatcatccgtgctcacggttatgagcagcctgtactcctcacatgataattgaacttgaagatggaaatacatcgagatccgatgatctaccaatggtgtgcttaagtgggttcacttaagtgtttttgatatactcatatacttttcgttaatgggaatacttgggattcacacttattagtaatacaagtgttgataataaatggtgaccacctaaa

SEQ ID NO: 22548 - DNA, 400 bp, Zea mays
  unsure (1)..(400): unsure at all n locations
actcagcttataagggtcttcatcctaacatgtgctagacgacgatgccagagctagcccatactaatcttagccattaagcatgcctctagatcgacattctctttcgaaaaatcaactaaatagagcttgccggctaatacactggaatactcgattttggtaacaaagaatatggagagggctcctcatgtcatgtgccatatttgcatcataaaaagagaacacatataattgagattgatttatttaaaaccaatgatattaaaataaagagaaaacgcatcatattggatttttgttgtgcatttaaaacaataataatatgaataaaaataagatagtaatgagttggagaattggatttaacccccaaaagtgcanattgggaacttggaaa

SEQ ID NO: 22549 - DNA, 217 bp, Zea mays
cacgatacaatactcaagctttatctggaccacgatgtcggactccgctatattggtgtgaacctatcgcaaggtacttctctagcccgatatggtgaagaactgaccaaacgtacgaggataattcataagttcacaaacgcctcatgctcggcgcaagagttatgcagacgaaactgggaaagcacttatactacctctggggagactatgatac

SEQ ID NO: 22550 - DNA, 368 bp, Zea mays
  unsure (1)..(368): unsure at all n locations
tagtgagtactctaatcatgtctataggctctctaaagcgctttatgggctcaagcaagccccaagagcatggtatgaatgcctaagagatntccttattgcttatggctttcaagtcggcaaggccgatcctactttattcactaaaactcttgacaatgatttgtttgatgccacattatgttgtgaatcatattgggtctactaatgaattacatgtgagaattagttgacatgcacaaaattccgatgtcatgatgggggagtgagtatttctaggattcaagtaagcactcaagaagcccttcataccaatgagatactcaacatttaccagttggatgaagagctaccatcagacccatgga

SEQ ID NO: 22551 - DNA, 314 bp, Zea mays
aaagtgataaagaaatcttgtggtccgtgaatccacagatgggtattctataatgataatcttgcatcttatattgttctgccaccgatatgtgatgcaagtaaaataattggtttacccatctcattgccacttgtgtatccatgactaatatcatcccgtatgccctgaatagtctccatgcgtaaaattttttgggtttgtagtaaggattataatatggtctcatcaatacaaactctggcatcaaccctttgtttgaattgatagtaatccataacatagatatgggttgtgctgatcttttcggaatg

SEQ ID NO: 22552 - DNA, 242 bp, Zea mays
  unsure (1)..(242): unsure at all n locations
gcagcttgggaagaaagcaacgctcgcagcaactgtctgttgctttatagggagaggctactggcaaagccctcaattggggcgcgcgggcgaangcacgcaacgtcctacatcgcattgaagatgatgccgaagccgctgaacctcccgccctcaaccgggcgagccaaagcctagcagtggctgcgctcctactctgcaccatgccggagccctccaccaccgaaagacgccgcatccac

SEQ ID NO: 22553 - DNA, 409 bp, Zea mays
  unsure (1)..(409): unsure at all n locations
ttaccaggagcatggagagctcgtttttgttgtactttctagccatgttatggacacaaaggacgttgtcgtgaatgcttcggccctcgatgaacccggattgattcatggataccatgtctctcatggaaggtgcaagtctcaatgatggaagcttggtgaaaagtttatcacccctggacatttttaggatgaatggcctgaaactcacaatcgtgtcaaagccattgttcttggatagcagaatgatattagcctgatttaggatgtcaaagttaaggaagcgttggctgggaaaaaaatgcatgcatgactgcaatgaaatccaccttaatgattggccaacatgatctcgaaaaggcnnttatatatatatatacatatatatatttatatctatatatatata

SEQ ID NO: 22554 - DNA, 270 bp, Zea mays
catgtgctaagtgtctatgccacagccagcccatgctagtcttagcaattaagcatgcatctagaccggccttctcttttgcaaaatcaactaaataaagtgtgccgtctagtacacccttaatagctagtgaaccatcacatcttctaaagacagacacatctacatttgtaaataaacatatatatcccatattacatacatgactaacagatagtaaattatatccaagagactcaactacaaacacattatagatagagtgctcat

SEQ ID NO: 22555 - DNA, 297 bp, Zea mays
actgcaagcatgcaagctttaatacacacaatctccctctgtgacatcatacaccataaaacatacttcagccagaacatatgatgatggtcaaggacagctgggtgtttaagaagaacacaactatcataacttcctcttacttattgagcatatgcccgaacaacatttaagcaagatacatatatgcgaaaagaataatactccctttgtacctttaccatggtgtagaggaccttccatcttgatagtatctaatctctcaagagcttcttcacactagaggctgaatcttta

SEQ ID NO: 22556 - DNA, 450 bp, Zea mays
  unsure (1)..(450): unsure at all n locations
agagacttttttacggatcaagctcgttacaataacgatctatcaccgccaaaggggctactgttgagtccatgcttcgtcgccgaaggtcttatangaaaaagcggtcttcggctgatgctgtttgtataaaatggccgaaggttcctcttcataaagcttcggtattacaaaccgacttaaagatagaatgaccttttaatccataaaggtccgaatcaatgttgtaaacttttataaggggcatacttgtaattcctcacaagctgcgtcctgtgcctataaatagtgaacagtattcctttactgttcacgaattctgggagtggtaatcacatcttctggaatccaacctttgccaatgcagaggtattattgtattcaatgatttcatatattaagtaaatataatataatttgtctatgatttatttaccccttctatacctc

SEQ ID NO: 22557 - DNA, 270 bp, Zea mays
  unsure (1)..(270): unsure at all n locations
atattagtcttagcaattacgcaagagtctaagttagcattgttatcagtgaaatcaactaagtatagctaaccatctaacactcccttaaaagctagtgaatcatcatttcttctaaagacgggtacatcaacatcagtaaataaacaattgtagcccatnttgcataattgagaaacaaaaagcaagttgtaacctagagattctataagaaatacattccaaatggaatggtcaggtgatatagcgattntacccaatcatttgaca

SEQ ID NO: 22558 - DNA, 384 bp, Zea mays
tgcaacatgacaccagaaggttcaacaccactagcattgaatgaatttttgattattgcacagcatatgagctcaagagacctggttcacgagtttttggctttcaaagattttcctagcttgaaagaatgggacatgccgaagctgaatggggagaaaaaagaaggtgaactttggcgtttaccttactatctcaagtttaagaaatactttaaaacaccttgccaagagtggctggatacaatcgaagtaatgtgtaatgaaatacttggcaactactacaaaaaagaaaatcaattgatgactgcagcctttggtcaccgtccgaagcgaaaactgaacccagtgctggacgccctcggttttaataccctgactatgaaa

SEQ ID NO: 22559 - DNA, 266 bp, Zea mays
tgctagtcttagcaattaagcatgcatctagaccggcctcctcttttgcaaaatcaactaaataaaagttgtcgtctagtacacccttaaaagctaatgaaccatcacttcttctaaacacagacacatttacatttgtgaataaacagttatatcccatattacaaagttgactcacagacaacaagttatatccaagcgactcaactaagaacacattagaaatagagtgctcggatgaaatagcaatttttcctaaccctttc

SEQ ID NO: 22560 - DNA, 373 bp, Zea mays
atgctagtcttaacaattaagcatgcatctagactggcctcttcttttgcaaaatcaactaaataaagcttgccgtctaatacacccttaaaggctagtgaaccatcacaatctttaaagacagacacatctacatttgtaaacaaacagttatatcccatattgcataattgactaacagatagtaaattatatccaagagactctactaaaaacacgttagagatagagtgctcatttgagattgcaattttacctaacccttttaccttgccttgattcccatcaccgaatattattgaatcttgggaatctttgtctgtgaccgaagaagagaacatcttcttctcccccgtcatattgtttgtgcatc

SEQ ID NO: 22561 - DNA, 437 bp, Zea mays
  unsure (1)..(437): unsure at all n locations
tctaaagggagagcacattgtaagattaacttatgtttattttgagaaagacaggatttgtagcgcatgtcaggcacggaagcaagtgggagtccatcatccacacaagaacatcatgacgaccgacaggccgcttgagctactccacatggatctattcggcccgatagcttacataagcatcggcgggagaaagtattggcttgttattgtggatgattattctcgcttcacttgggtattctctttacaggaaaaatctcaaacccaagagaccttaaagggattcttgagacgggctcaaaatgagttcgccttaaggatcaagaaaataagaagcgacaacgggacggagttcaagaactcacanattgaaggcttccttgaggaggagggcatcaagcatgaagtttcttcttcctacacgccacaaacaa

SEQ ID NO: 22562 - DNA, 175 bp, Zea mays
acgcttaccttttctatatagatatatcattagaggctcgtcttagaggactcatgatccggagaacctattaggattacgaatcctactgtatgtcggtctataagaagtctggactttgaatgactatgttgtacggttgtttgagagagatgacccttccgtgactggacat

SEQ ID NO: 22563 - DNA, 211 bp, Zea mays
  unsure (1)..(211): unsure at all n locations
tacaccccacaacanaatggtgttgtggagaagaataatccaaatctattggacatggccagaaccatgcttgatgagtacaacacaccggatcgggtntgggccgaagcggtcaacaccgcctgctacgccatcaaccgggtatatctacaccgaatcctcaagaaacatcctatgaactcctaaccgcgtaaaaggcccatatttcata

SEQ ID NO: 22564 - DNA, 73 bp, Zea mays
aacagcactgatatccaacttaatttttaaaaaaaggcaacaacagaactcatatttttccacatttatatca

SEQ ID NO: 22565 - DNA, 288 bp, Zea mays
gagctcatgcctaagtctggtaaaagaatgttcatcaagtggcttggtgaagatatcggctaattgatctttagtattaatgtaagaaatctcgatattccccttttggtggtgatccctaagaaaatgataccgaaaggctatgtgcttagagcggctatgctctacaggattgtcggccattttgattgcactctcattatcacatagcaaagggactttggtttatttgtaaccgaagtcccgcacgggttgcctcatccaaagcaatagacgcaacaatgtcct

SEQ ID NO: 22566 - DNA, 343 bp, Zea mays
agggaacaagagggagaaacagaagaactatatgaaggcacagggcgaggctcatcttggcaaggagtgggattcggactgcttctcgtccgacttcgacaatgaaggactcgctgccaccgccttcaacaagtcatccctcttccccaacgagcgtcacacttgcctcatggcaagggagaagaaagtaagcactcataatactagtacttatgattcttcaagtgaggatgagtctagtgatgatgagatagattactcatgcttattcaagggattagatagaaccaaggtagacaaaattaatgaattgattgatgccctgaatgataggaatatactt

SEQ ID NO: 22567 - DNA, 440 bp, Zea mays
  unsure (1)..(440): unsure at all n locations
tcggctccatctatgttatggatcgcctttgtattcgtccaagtcccttcaaccctcctggtagcttcttgactcccgtgaacaacaatgggtccttgttccgaaggtatcttcatgcataagtacgctgggtggagaatggcttcgaaggcattaagcgttcctcgaccaatgattgcattgtatgggtattccatgtcaacgatgtcaaagacaacttgttcagaccttgtgttgtggacgtaaccgaaggtaactaacattgtcattntgccaagtgccacaatctgtcttcctctaaagccacaaaaagggtgtgtagcatcatgaatcttgtcttctgggtcttgcatctgtctgaaagccctttgcaaatatgatgtcgactgcactgcctgtgtcaaccagaacattgtgaaccagaatctcttgatgacaca

SEQ ID NO: 22568 - DNA, 228 bp, Zea mays
tgcgcgcatggctcttataccccgtgaagtctcggcccctaatgactatacgccgggttggcggagcagagcgccacaaccccgcgctgtgttcgggcagagaagtcgacacctcgaggcgaccgacaccgagtgacggtggacctccgacgtactgacacccgcggagtttatgcgccgaagcccccgcgtattatgcggggactattatcggcaagaggcgggtaa

SEQ ID NO: 22569 - DNA, 431 bp, Zea mays
ctgactgcgaaagaaaagatgagacagatggttaactcggaagatgctgctggctcgagtggagaagctttgtatgtccgtggccgcactgatcagaaaaagtccaactcaggtggcaaaggaaaggggaagaaccagaggggtcgctccaagtcaagggggccatccgatgaattattttgcaaatactgcaagaagacgaaccatgtaattgagaactgttacaaactgcagaacaaggagaagaggaacaaggagaagggtaagactggaggtactgtctctgttgcatccgaaaataattctgataatggcgatgttcttattgcctttgctgtgtgtgctgctgatgatgcccaatggatcctcgattctgcttgctcgtatcatgtttgcactaaaaaatctcttgttagtacctatgaagctgt

SEQ ID NO: 22570 - DNA, 133 bp, Zea mays
tcccatatcttcctcccccagaggcctgtctctcccccatatatacgccctcattccttcagaaaaatttctttctggcaaccaagacttttccgtgcgaaaacaagccatagaatttacttggctatgtgac

SEQ ID NO: 22571 - DNA, 115 bp, Zea mays
cttaacctacctcaggtttgggggacagccaatttgcttaccggggggtgagggctgcccatgccaatcgcggaagcggggaataactcccaattaggaaggggctgccggaaaa

SEQ ID NO: 22572 - DNA, 236 bp, Zea mays
  unsure (1)..(236): unsure at all n locations
atgttagtcttagcaattaagcaagtgtcgaggtcagctctatcaaaatctaccaagtatagctggccctccaacactctcttaaatgctatagaatcatcacttcttctaaagacagtgacacctatatcaataaagagatagtcgtagcccattttgcataattgagatactgaaagcacatngtaatctaatgagtcaacaagaaaaacattggaaatggaatggtcatggga

SEQ ID NO: 22573 - DNA, 444 bp, Zea mays
  unsure (1)..(444): unsure at all n locations
acacataaaactcagctttaaaggagaacacgtgatgngctatctcatgccatttcgaaaagatagaccttgtgcagcttgtcaagcaggtaaacaagtgggaggagcacatcacagcaagaatgtgatgaccacgtcaagacctctggagctgctacatctggacctcttcggacccgtcgcctatctaagcataggaggaagtgagtatggtttagttattgttgatgacttttcccgcttcacttgggtgttctttctgcaggataagtctgaaacccaagggaccctcaagcgcttcctcatgagagctcaaaatgagtttgagctcaaggtgaagaagataatgagcgacaacgggtccgagttcaagaactttcaagtggaggagttccttgaggaggaanggatcaagcacgagttcttcgctccctacacaccaca

SEQ ID NO: 22574 - DNA, 410 bp, Zea mays
ggcattttattgctaactggcccgacattgtagtgatcaggaccaacggaacaagagggagaagaagaagaattataagaaggctaagggcgatgctcatcttggcaaggagtgggattcgaactgctcttcgtccgactccgacaatgaaggactcaccgccactgccttcaacaagtcatccctcttccccaacgagcgtcacacatgccttatggcaagggaaaagaaggtatgtactcgagactctacttatgcttcttcaagtgaggacgaatctagtgatgaagatgaaatagattactcatgcctattcaaaggattagataagtctaaaatcgataagattaatgagttgattgatgctctgaatgacaaaaatagactactagaaaaacaagaggatcctt

SEQ ID NO: 22575 - DNA, 289 bp, Zea mays
  unsure (1)..(289): unsure at all n locations
agctnngattantaagaatatgcccatagctgctattacatactcgtagccgaatctttgacctacaactctgctgcagaactttatgtatgttgccacagacaattaagagaaacttaaccctatacctagtctgtcaggccaactgaagcaactgcgccattgtacaataccacaattggatcagaccgccagcgcagcaatctcaccgtcgccgacctctctgtcgtgattcgtgccgccggcgtctcgattcgtgctcagattgattagatagtacctggagtca

SEQ ID NO: 22576 - DNA, 415 bp, Zea mays
  unsure (1)..(415): unsure at all n locations
tgaagtattngaaagggcaagccatactgatccgtcttcatgccaaatgggttgagtttatcgaaacatttccatacattgtgaaatataagaaaggtaaggacaatgtggtcgctgatgccttgtctcgaaggaatgtgttgttgaatcaacgagaggtaaaagttttaagtcttgaaaatttgaaagaaatgtataatgatgatcctgaattttcagagccatacaatcattataaagatggaaaaggttgggaaaaatatcatatacatgatggatttttgtttagagctaacaaactgtgtgtaccaaattcttcagttagattgcttttattgcatgagtcacatggaggatgtctaacacgtcatttttgacaaaagaagacttatgaactgctcagtgataatttcta

SEQ ID NO: 22577 - DNA, 420 bp, Zea mays
  unsure (1)..(420): unsure at all n locations
acactatnagaaactcaagcctgacaggatagcgatcttgttgctcctgtacttctgcaaccctgcatggagtatgtatgcacattgaatgttgttgtccccggtggactttatctaagtctcgccctaggattgtcttgcttaaccgacgtgggctcacgctatgcggagacctccgttctggggagaggggacctctgccgggacaagaattctttcgagaacacaccccgtccgatggcaggctcgggcgagccagagttatggtgacccctgagggaggccttacgcaaaacatggcttatgatccttcatctttggggaacgtgcttcgatggtggtctatatgtcacgcgtgctttatgggtgtaatctaagtactcttaattactatacccgtcagctattcgttgactcaaa

SEQ ID NO: 22578 - DNA, 258 bp, Zea mays
  unsure (1)..(258): unsure at all n locations
agcatgcatctagaccggcctcttcttttgcaaaatcaaccaaataaaggttgccgtctagtacaccctctaaagctagtgaaccatcacaccttctaaagatagacacatctacatttgtgaatagacaattatatcccatattacaaaggtgacttacagataataaantatatccgagtgactcaactaaaaacacattataaatagagtgctcggaccaaatagcacatttacctaaacccttcaccttgcctg

SEQ ID NO: 22579 - DNA, 150 bp, Zea mays
gccattttttatcccgctccgatattttcgtctggatactgacacttctgttttaaccaactggccttgtgccagcgctctttaatcgaaattttggaccatgcttccgaatcatcgaggtgtgtcaggtcctgggctctcattgacaca

SEQ ID NO: 22580 - DNA, 350 bp, Zea mays
aactaaagcttggcaatacttgatcaaacaggagcaggtattatctctttatcttcataccaaaccagaaagaagggcgatcgcacgctgcggactagatatgattggacccttcaagaaagctcaaagaggatacactcatgcactggatgctattgacaaattcactaaatggatagagtacgagcccatcgcttctctaacttcacctaaggcagtgcaattcatacaatacataatattcacgcttggaacaccaaatagcatcataactgacctatgatccaatttcactaagacaaagatatatgatttctgtgaacgaaaaatcattcagagaacatatgcat

SEQ ID NO: 22581 - DNA, 54 bp, Zea mays
cccccaaaaactactgcctacagagatcacatttatttttcccgcttaaagttc

SEQ ID NO: 22582 - DNA, 422 bp, Zea mays
ctgacgacattgtctctggagagtgctcatattatgctacaaaacctccccacaatgcatggaaatccgtttgcacgacaaaaattctagggggtcttggagtcattaaccttgagtggcataataaagctctccttatgaagagtctacacaaattctttaacagagtcaatatcccatgggtcaacatcatctgggacactcattacaacaattctctgccctcatctatactaatgggctcgctttggtggaaagatattctcaaaatccatggctcattcaaagaaattgcccaaatgcaaattggaaatggtaagtctacccttctctatcatgatcgatggaatgggcaatgtttatctgtaaagttcccggagctctggtcttttgcctcggtcaaagagattaacatccatcaa

SEQ ID NO: 22583 - DNA, 274 bp, Zea mays
  unsure (1)..(274): unsure at all n locations
ccccccccagatgggtttgttaactttganccgactaagcccgggagcactaaccaaagggctcggcctttgttcttgggcacctcgacggttagcaccgaaaatcagcctcccactgggccattaagacttgaaggtcagaggcacgaatgcctgggcttgaccgttatctccgcctgggaaagagctgctctgtaccgctttaaaaaagcagtgttattgacctgagcgagaacctaaacaaggcttcacccctttggcccctgagaaacct

SEQ ID NO: 22584 - DNA, 253 bp, Zea mays
aaactatttgttgagagaaatttaaaatataaaatatgattgaaaatctgctgggcataaactaatgcttttccaagtccgagctatgcggcactctgcactgcacacatcatccacttcctcatggtccgcatccctcgtggtcaaagagacaaaaagagagggctattcggcccgctatctatgtttgagaacacgtgcgcgcaacgacagggacggaggaatggatataaatgaatagctgtactcccgc

SEQ ID NO: 22585 - DNA, 395 bp, Zea mays
taagcttccaagaccttggactcgattgtggcctaatattgcggccagtaaacccttgtcggatcaccttagcagccagggcccttggccccgcgtgcgagccgcaagttccactgtggacctcgcgcaagatttggatgccttcggtctcggtgacgcatttaagcattggctgactgacccccttcttgtataattggccctcgattggagcgaagtcccggctccgatgttcgaagcgcttcgcctcactgacgtcggttgggtgatagtatccctgtaaaaacagggttattggggcccgccagtcttcggtcatgattaggtggactatacggtggccctcgctatcatttgttatttggagcccttcggggctccggacggctggcgtg

SEQ ID NO: 22586 - DNA, 372 bp, Zea mays
  unsure (1)..(372): unsure at all n locations
aggacctatgaaactcagctttttccagccactctgcctctgtctgtgttggcaccgctgcctccggctccagctcatcgcagagcgggccgaggttcctttaactaaacaagagaagcctncggtggcaaggccgaaccgacccgaggactcctacgcctgcgggatacggatacctcacttatcacctttgcacgaggcaactcacacttggttaagcgattcaattagccgacaggcgagtcctagtgctcaaaatgaggaaaaaacatggctttacgccaaaatacataaatgttcaggccccgacagccacgatgaacaaacaaccgcactccaggtgccattccaaatgaactctgggtctgcccc

SEQ ID NO: 22587 - DNA, 299 bp, Zea mays
tttttttcatttcgaacccaatttcccatctcatatcaaaccggtttcctaagcttggaaatatccctatggacttccacctctcctcaaaaaaatctccatatacacgtcccatggacgatgccgtataatggcttgtccaaatgctggctgatataccatttacaccctctctatacacactaaggcctttctagacacacataactaaaaagtgttattaaagaatgtggccccaaaccccgcatgttttcgttgtagtgacaaggaacttttgctttttagcccgaaaaatgccc

SEQ ID NO: 22588 - DNA, 432 bp, Zea mays
  unsure (1)..(432): unsure at all n locations
ntcacttagagtcgcttttcacccttagacatatgggcagncagagcgaacaatccaaaccttggaagatatgttgcgtgcttgcgttctgtcatggaagggtagctgggaggatcatcttgcactggcagagtttgcttataacaacagctaccaggctagcatcaagatggcaccatttgaggctttgtatgggaggcggtgtatctctcctctgtgctgggagactttgggagagagatcccttgttggtcctgattgggttcagcaaacttctgaaaaggttcaggaaattcgttagaatattttggcagctcaaagtcgtcagaagagttatgctgatgtgaggaggcgggatctggaattngctgtgggtgaccaagtccttctcanggtatcacccactaanggagttgttcggttcggtgtctc

SEQ ID NO: 22589 - DNA, 361 bp, Zea mays
ttgagcaacggtcatatcacataatcttggccccaacgcaaaatattgcaaaacttggacgggcgagtatgggtaaccttgctcatcattaaaaatactcccgcactacacatatttaagtccttagcggggaacggactaacagcaaggcccacttgcatggcaacggtgttgactggtaagacaagtgttgatctctgccatttgacactccattttggacaatcgtgatcaactgcttgcaaaaactacgaattttcagacggcaaccatggaacacggtgtgtcccccccccccccccctgataactgagaggaccactcatgctgcactccttttctactatgagacttgctttct

SEQ ID NO: 22590 - DNA, 433 bp, Zea mays
ctcagctatgaaatttatccacatggttttgttgtgcgaccacccatgtgtttagcaataagcatgtgtcgagctcagctctatcaaaatctactaagtatagctgaccctttaacacacccttaaatgctattgaaacatcacttctttctaagacagtgacacctacatcagtaaaaagacagatgtagcccatctgacataattgggaaacaaaaagcaagttgtaatctaaggaatcaacaagaaaaacattggaaatagaatgggcaggagatatagcaattttaccaagtcctttgaccaaaccttgattttcatccccgaatgtgatagctcgttggggatcttggtttctctcatatgatgagaacattcttttcttctcagcatatggtttgtgcacccgctgtcagtatccaacttgagcccc

SEQ ID NO: 22591 - DNA, 314 bp, Zea mays
  unsure (1)..(314): unsure at all n locations
ctcagctgcagctggttgccacacaacattccaccttatacattctatggttaacaatagcggtcagatcaaggtaataaaaacagcaaaggtgcgattttctggtggctcttaccatgactttgctgatttcgatgtggtgaatatggatgcttgctctcttttactgggatgttcttgggagtttgatactgatgctattcaccatggtagatctaataaatatactttcatgcataanggaaagaaaattgtgctgcttcctatgactcccactgaaatggtccacttagaacatgagaaaaagaataatg

SEQ ID NO: 22592 - DNA, 335 bp, Zea mays
accaagtcaaaaattttttgactgggacaaacgataattccactgtacggccccctgcagattactgtcgtcctgcgccacggcacgaggcaaccggtggcgccgggtaaaacttgcgcttggcttctactggagacatataaacaacagttgtggaagatccacagatcattgcttttcactgttcctgccaaattttaccatcaccaagctggtgtaaatcaacaagctcagttgaaactgcttgtagagaaatttaagtcacaagtcaaaatgaatggcatagtcctctacgcaagttacgcaagggagaatgaagcttgaatttccatctc

SEQ ID NO: 22593 - DNA, 297 bp, Zea mays
  unsure (1)..(297): unsure at all n locations
gcttgacacaccatttgacatcttanataataattctgagatcaagtatatttaattcattcctcaacatgcacaagcaggtcttatcaagtggcttagtgaaaatatccgctaattgatcttccgacctcactccttctaaactgatgtctcctttagcaacatgatctctaaagaagtgataacggatatcaaagtgctcggtgcgagagtgtagtacatgattattagcaattttaacatcactctcattgtcacacagcaaaggtaccttttctagaactacgccatagtcta

SEQ ID NO: 22594 - DNA, 389 bp, Zea mays
ctcagcttctggcagcagaaagctcttctttctttttcgccagggcagaggcgccaggggcttcagggaaaattggggatcagccaagaaaaatttactgcctattctgtggtgaagacaagggccataccaccaagatgtgccatgttaccatccacaagcaaaaggagatagcagaagctgcagcacaacagagtcagccgaagcaggtcatgcatactgcttcgtaccattcgccttacattccaaaatacgtaggctatcaccctgcagcttctgtcgcttcggcaagccaaccccaagcatcttggcaacagcctccaccgccaccaccaacacaacgaggtcagcagccagaagggagtcagcacactcaccttcagcgggac

SEQ ID NO: 22595 - DNA, 443 bp, Zea mays
ggacctaaaaactcagctgccagccctcgcccaccggtcttttctgggcccgagatcaacctcaccggacttcggtctttcgccgccgcgcgtggaccgagctatccagtgagtctccgaccaattcctttcgctcatgtcttctctggcatcccgtggacctccctgacctatttgattgaactacctcgccgtgaccaggccggtctcctcgccgccgacgagcatccccgcctgcgcgcgtggaccgaccgactccggccatctccgacggcgttccgcacaccgttgagatccctgcgacctccccttcaccctcgaccacttcaccggaacagtcttgccgctggtaagcccctccgcccttttcttcgccgcggctactgtttgatgtataagaacgacctcgggttatgttctgtagaacccgtagggttttctgt

SEQ ID NO: 22596 - DNA, 205 bp, Zea mays
cttctggcagtcggagactgtctcttataatacttcgctgccagcggtgcgacagcttgttacctgatcgcaaccaaaacctgtccaatttactggaaacatgccatcatgtttgaggagctcgaaccaaagcgccacatacccacctacaaatgtgctcactttgcttctgttacctgtgggggatatagttctactctcactc

SEQ ID NO: 22597 - DNA, 438 bp, Zea mays
cgagcacattagcctccacactactgattttttccatattctcacgataatgactgtgagtcctggtcttcacaattatatccatcaacgatatgatgaatctgtgatagactctaaaatttcaaaggattaatgaccatgaataatgaatcggcatttccaactggttatggctggagtcaggaagctcttgcacgctaccgacttgggattaaccgcatgtactgcatgtacaagttcccctatggttctagtacgtgggaatccaagaaagacttcccatgcgtacattgtgtatgttcccaatcttaccaccgcagcgtacatatatgggcacacaaaaaactggcgaactatgtgagaattcaatctccgccgagcattaacttttagaaacttttcatgagaatctattatggcccgacacttgcttgatca

SEQ ID NO: 22598 - DNA, 138 bp, Zea mays
  unsure (1)..(138): unsure at all n locations
cactgcagcatgcagctgtggtgcagagcatgctcgtgacacggactcttcatncaacgtactgtgcgtggttggaggaaaaacttctttcttccctaacacctcaattctctttcttagtaatttcccctaattaat

SEQ ID NO: 22599 - DNA, 369 bp, Zea mays
  unsure (1)..(369): unsure at all n locations
ctatcatccccccactgtctcatggctaaaggagatgcttaggctaaaatcatcaccgcatttaatgatattaaagatgatgatgatatcgatgatgttgatgatgatggctattcatatgatgatcttgttagaatgttaagtgaggccggtgactacatgcacaaagaaaaagaaaaatttaagaccttgaaagaattgtataaaaacctccaagtgtcttttgaagagctcaaaacctctcacaatgacctcaaaaaanattgggagaagcttgccgatgctcaaaaatcatctattgtgcctgaagttgaggtggtcactaaagatgttggagtcacttgngacttacttgatagtcttacaagt

SEQ ID NO: 22600 - DNA, 448 bp, Zea mays
  unsure (1)..(448): unsure at all n locations
ntagctccatctatgttatggatagcttttgagtcagtccagttcccttcggcccttctggcagcttcctgactttcatgaatagcgatgggtccttgatccgaaggtatcttcatgcaaagataagcaggatgaagaattgcttcgaaagcattgagggtgccacgaccaataattgcattgtaagggtattccatgtcaacaatgtcaaatataacttgctcagttctaatgttgttgatgaacccgaaggtcaccgacatggtgatctttcccagtgctacaatctgccttcctccgaagccacagagaggatgtgtagcatcatgaatcttatcttctggctcttgcatttatctgaaggccttagcaaatatgatatcagctgcactgcctgtgtcaaccaagacattgtggaccagaaatcctttgataacacaagagataa

SEQ ID NO: 22601 - DNA, 191 bp, Zea mays
aaaatactccttgcccttacattgcaccggcccgaatgcttggcggctgtgaacgggatcagccatccccttcccttttttggccattcacatggaagcctcgaaacccagctcataatggttcagagcgggactcgctggcgcttgttttgtaacattgcaagcttgttttggcccccagggatccaact

SEQ ID NO: 22602 - DNA, 426 bp, Zea mays
ttttcgccctgcgtaccgattgcggaggagatattatgtcggcgctggtcaccgagtattgcgccgagctctgtgttggccaccaactgacggcgccgtacactccacagcataacggcgtcgttgagcgacgaaatcaaactgtcatggccatggccaagacgatgcttaaggcaaaggatctccctggcatgttctacggggaggccatcaacgcagttgtctacatcctgaatcaaacgacgacgaaggggaccgacggccagacctcgtatgagctctggaacggggcaacgccctcggtgcatcacatgcgcacgttcgggtgcgtgacgcatgtcaagatcgtcgaaccgtacttgaagaaactcgacgactgccgcaagcctatgggcttcgttgggtatgaaccaagctccatggcat

SEQ ID NO: 22603 - DNA, 435 bp, Zea mays
tcgtaaagatattttccgaagctacacttcctaagctatcacttcgtaaagatattttcaaagcgttcttctgtacattgataatgtgtccacctcttgtgcaaaatgatgtatgatgcttatgctatgcaaaatgatgtgatgatgttatgttatgcgaggtgatgtttattccgaagatacagacacatccctgcaataaaacatgattcttttataagcctccttatgagcttcttcgccttttacttcggcggtattagcgtttatttttcgctgtaagccttccttaagagctgcttcgccttttactttcaacgatattcgagtttacttttttcgctttgccttttacttatgcggtatcaccgttgacttttcgctcgatgctctgcatatccctttggaacgactttggagcagaaaacttacact

SEQ ID NO: 22604 - DNA, 170 bp, Zea mays
aacaagtgggaggagcacctcaccacaagaatgtgatgaccacttctagacccctggagctgctgcatatggacctcttcagaccttgtccctatctgagcataagaaggagtaagtatggtctacttattggtgatgacttttcccgcttcacttgggtgttctttctg

SEQ ID NO: 22605 - DNA, 288 bp, Zea mays
  unsure (1)..(288): unsure at all n locations
ntttgcgcgtcgatccgttctccgtccgaatttgctctgttccctttcacgggatcatccctgtgaagcgcgttctgcccctctggcgactcgacctcccagtctgcttctgaacaccctccaacttccgaagggagaccctgacgttcgaaatggtcgggtttcgaagaacctaccacgccgtgctaaggaagccatgctacgcgaagttcatggccgttcccaactacacctacctggagctcaagatgccgggccccaacggggtcatcactgtcggccccacgt

SEQ ID NO: 22606 - DNA, 339 bp, Zea mays
ctcaactgcaattcctgatgcggctcaataatcatcaaatgccttagaggtaaactctccagcattatccattctgatggactttattccggggtcagggaaacttattccggatgatctaccaaatccactttgcaaatgtatggttttgagtttataattaacatgcgtgcgacccctttgaggaatcattcattaacaccactaaattattgaaaaggccccgcaagtggttgaattggaccacaaatgtctccctggattcgttccaagaaagcgggaatttcatcctttactttcaaggggatgggttcactattaattttgccatggcacaca

SEQ ID NO: 22607 - DNA, 226 bp, Zea mays
tctcacatctatacccctgagtttccacagaccatatgtgaaagactgctctttcctaaaactaaaccctaggtgcttatattcatacaggatataccttcgaacgtatatgcagaaactactctgttgacacatacaatagaatatggttcacatatattccgacatgaatacctatcactgagaaacctactaaagagccctcaggacttcagactagatctat

SEQ ID NO: 22608 - DNA, 431 bp, Zea mays
  unsure (1)..(431): unsure at all n locations
tcagcaactggggctgcagctctgcaaccgttggaccacaatcaggagactgtctcccttcgggaggcccgaagccagaaaaggaaggctgttagcccgacaccgccagaggatgagatagaccaagaaatcagagacatggagatacttcatcaacaggtgcagaggaagaaggaaaagatggtcaggctagctgaactgcaaaggcagatagacgaagcctctaaagaagttcgtcatcttactcaggatgagcaacaccgaaggcctcaacaccaagactttcatcaggagggtttcctcaacgaagatgactggtatgacaatttccatcatggaaattnntgttttgatgatgcttctcctctgtccgctgagctgcaggctacaccttggcctccgtnctacaagccgccttagcttccatattc

SEQ ID NO: 22609 - DNA, 373 bp, Zea mays
tctaaagggagaacacgtgatatgtctaacttatgttcatttcgaaaaagataaaccttgtgcagcttgtcaagcaggtaaacaagtgggaggaacacaccacagcaagaatgtgatgaccacgtcaagaccactggagctgctgcatatggacctcttcggacccgtcgcctatctaagcataggaggaagtaagtatggtttagttattgttgatgacttttcccgcttcacttgggtattctttttgcaggataaatctgaaacccaagggaccctcaagcgcttcctaaggagagctcaaaatgagtttgagctcaaggtgaagaagataaggagcgacaacgggtccgaattcaagaaccttcaagtg

SEQ ID NO: 22610 - DNA, 368 bp, Zea mays
  unsure (1)..(368): unsure at all n locations
aatgcttaaaatgtttacaacatgctttcataagtgcataaactgtcatgagcattacacttatactatgacacaatgcacctcacattctctatgatatataattattctcagtaacctaattatgtgcaattggcatttaaggccaaaatatgttttcatctcaatgcacatatttagggggagcaatctatgttatatagaactatgattatgcttacattgatatatcctttgatcatatctcttttatgcctatgactaatgagtnttcaagagtatctcatgcttagtcatagaattgaagaggaaatgagtattcagcaagacgacgcttcactcaccccatcgtattatctatgctttat

SEQ ID NO: 22611 - DNA, 453 bp, Zea mays
  unsure (1)..(453): unsure at all n locations
ggacctataaaactcagcttgatgttaaaatccagaacttaagtgcttcttgaaaattgcaagaacatcaatgtctcatctttagtgattgaatctaagtctagctccttaaatgataattgttgcaaacattgtgccaaatatcatgcttcttgttgtctaactaaccatgcaaggaaaaatagcccacaggtgaaggtcaaaggaatattgaaaagatgctctagcaatgatgggttaaagaaagttgaacccaagtacaagtccctaaagcccaacaatagaagaatggggcttgggttcaactcatccaaggaaaaccctagcacagtgcataaggggtggagaccccccaagttcatagagggaaccaccctatatgatgccttggggaggattcactcctcanatgagaagtcacctcaagtaaaggtaaacttgagttccacaaag

SEQ ID NO: 22612 - DNA, 245 bp, Zea mays
attgacagtggatgcacacaacatatgacagacaacccacagatgttcacctcactagatgagaatgttgatggtcaagataaaatcacatttggagacaactcacaaagaaaagtgcaaggacttgacaaggtggcaatctcaaatgacttatcaatatcaaatgttctcttagttgcacccttgagcttcaatttattatcagagggacaactctgtgatcttggacttcaatgcttattcac

SEQ ID NO: 22613 - DNA, 446 bp, Zea mays
  unsure (1)..(446): unsure at all n locations
taaagaaagcttaacaaaaagagcattcgcttttcaaaaacgtcgcacgtaatggttataataagaaggtattcttttcaaaaatgtgtgatcctatactttataaaacaagacatgagcttaaaatatcttaattaaaatatacaaatattaagtgcaccaaattaatcttttataaaacgtcatatgtgatatgtctaaaattaagggtttataagacaataaaacacgttataacaatattaaacctttttaaccttttagaaaagatatatgttatatatctaaggttaatctgctactaatcacattattaattttagaagtattatggaacatattataattcattgttaaaccttcacttatgataaactaagatataagtctaaatacgttttatatgaaaagatcattattattaaatacctnatttatgacaaact

SEQ ID NO: 22614 - DNA, 449 bp, Zea mays
  unsure (1)..(449): unsure at all n locations
aaactcaagctggctcattanaggtaacctatctacaattataattttactaaactacgagatctaagcaagagactaactattctaaagttgaattagttgcttcttcgtaatatttttctcacatgattatgacatagaatatattatcagttaatcacccaaaacttgtgaaaactatatctcctgaaccgtaacttcggatttaaaggatctcgagcccacgatctcgtaacgacacgtaaatcattattatgctgattgtgcttatgtttggtgcgatgttaattatgcctataccatgtttgtttgaatgcgaatgattaccaatgaggttacgattcttgaagaccaagctggtacctaagaatcttgagtctcaagcaagttgtgcgcgtgatcactcctttttacctaaaaatgatcgctggtaatcactgtgacatgct

SEQ ID NO: 22615 - DNA, 427 bp, Zea mays
  unsure (1)..(427): unsure at all n locations
taccgcatntgaagcatgagcgcttccccttggctttggtcttgcttggctgtcccttgcgacccttaagcgccgtcttgaatcttttgatgatgggggccatctcttcatcattaagtccggccgcctcaatttgtgccaccttgctaagtagcgcctccttgcttcttgttgctttgagagcaagaggttgcagctcgttgatcggtccattcaaggcgtcgtccacgtacctcgcctccttgatcatcattcgcccgctgacgaattttcctaggacttcctcgggcgacattttggtgtacctgggattctcacgaatattattcaccaaatgaggatcaagaacggtaaaggaccttagcatcagtcggacgacgtcgtggtccgtccatcgcgtgctttcgtagctccttaatcttgtgat

SEQ ID NO: 22616 - DNA, 199 bp, Zea mays
  unsure (1)..(199): unsure at all n locations
cgtgcaagcttcttcaaagcgggacataggattcctctttactaaattgtagntgaaggagtgacaacctaccacatcttcctccatcatatcaccctcgaagctataataaagatggggatgtttgtcttaacagttatgagtcaagggctatatccactcgcgaagcgcttttgtgctatgcgccaccttatatatg

SEQ ID NO: 22617 - DNA, 437 bp, Zea mays
ggactagcgaggaaaacatctattgagattgtgaagggatagactatctcgagcactatataccacctcatacatcacctttgtatttcaaacgctagagtgtcatctacaatacaaaataatgttttttacatccatttacactatctaatggagatgacttcaagataaagatagctagtgccgtactgcgaaacggcgccattcgtgccggcactgctacagagcgacgtcgtgtttcacggcaaaaaaaatatctctacaactgattatagaaaagttttttcctatattgtcctttatatgcctatgtacaaataataatcggtggatggtttttcccaacaccatcaaaacataaccataacactatataatctatcgggttaaaccttacagaaacctagacaccaatcactcttgcattataacctata

SEQ ID NO: 22618 - DNA, 157 bp, Zea mays
attaccggggtggtgctccgcttttccttccccttcttaatggttctttttccggggcttaaaaatctgccaaccaaccagaaaaaaggtcccaacgtggtcacttttattggccccggaacaccccaaccacagggatttgggtggtcgccttccg

SEQ ID NO: 22619 - DNA, 234 bp, Zea mays
gctctatcgccctctcttcaaagacgacatgctctgtctcagagggcattgatggcctaacttctgcttcaaatgaatatgcgcaacttcgacttctgcatgtctaatttcagcttccgcctgcgacttggtttcagttggagcgactttctttgtgagagcaagactcaaagcctttgttggttctaacacaacatacagcacgtttgcaaccttctcctgttgggagttgcg

SEQ ID NO: 22620 - DNA, 436 bp, Zea mays
  unsure (1)..(436): unsure at all n locations
ttatcaaaaggacgtgaagagagccttcctttatggaccaatcaaggaagaggtctatgttgagcaacctcccggctttgaagacagtgagtatcctaaccatgtctataagctctctatggcgctttatgggctcaagcaagccccaagagcatggtatgaatgccttagagatttccttattgcaaatggcttcaaagttggaaaggccgatcctactttattcactaaaactcttaacaatgatttgtttgtatgccaaatttacgttgatgatatcaatattgggtctactaacgaatctacttgtgaagaatttagtaggatcatgacacaaaaattcgagatgtctatgatgggggaagtgaagtattntctaagattccaagtcaagcaactccaagagggcaccttcattattcaaacgaagtacact

SEQ ID NO: 22621 - DNA, 437 bp, Zea mays
  unsure (1)..(437): unsure at all n locations
agcttgagacataatatcttattggtcatgtgtngnccgaacgacacacttgaggacatcatataatgcaccatagaaccatataaagccttcaatgtccatacaatctctgtaatggaccacactcgttcctttgaaacaattcaaagaacttaaccaattcaaatcagattttaagataagagggacttaaaatctcatttccgatgatactcatcaagtatccatcttatgggaaaaacatgaccaatagaattgttcataacttttcatttcatcccaacaatgggatgaccaattcaatcttacccagcatggtaagtatcatcacttgaaaagataataacatatgcaacactttgtatgggacgatgtatgtanaatacaatccataagatatgtctccgagaaacatatgcaatatacatcactatcac

SEQ ID NO: 22622 - DNA, 463 bp, Zea mays
gatggtgtcaagccactgcactcaccaaccttatcaaaagaagtgtcgctcccctcatcaatcaaacaactacaatattgcatcgaacctaactaatactaaatttaccaaatcaaaacccctcaatagatgatctaacaactctgctacactgccacttggtagcccctgcacaaccatcgaccatcgtcttgcttgtgccgctgcgtgcctacgtgggcatgtcactggcgtatgagtgcacatgtccaaatggtctgagtttgctagacgacccatggcctatagatggtaatggataaatacccacagggtatttgaaagtcgcctagaggggggtgaataggcaaatctgaaatttataaacttaaagcacaactacaagtcggggttagcgttagaattaaagtcgagtccgaaagagaagggcaaaacaaatcacaagccaaaacgacggatgaca

SEQ ID NO: 22623 - DNA, 446 bp, Zea mays
  unsure (1)..(446): unsure at all n locations
ccgtgatctataacccacctgcggcatgcangctgtgaaggttcttcatatcatatgtgctaagcggcgacgccacaggcagcccatgccagtctaacaattaagcatgcatctaaaccggcctgctcttttgcaaaatcaactaaataaaagttgccgtctaatacacccttaaatgctattgaaccatcacaccttttaaagacagacacatctacatttgtgaatagacagttatatcccatattgcataattgactaacagatatcanattataaccaagagactcaaggaaaacacattaaagattgagtgctcattagatattgcaattttacctaacccttttaccttgccttgattccatcaccgaatattattgaatcttgtgaattcttattcttgacgtaggaggtgaacatattcttctcccccgtcatatggt

SEQ ID NO: 22624 - DNA, 463 bp, Zea mays
  unsure (1)..(463): unsure at all n locations
atgggannaaagaagggattatgaggccctactatctactctagaccctctccttatagatgccttaaggtgaagatctttgcaatcctatcagatgtcgcactcggaatgcggttgatgtgctcaggcgcctgttggaacttattgttgtatgtactgacaatgctatagagatgctcatgcgcctatgcgcctagtggaactcatcaaatcttgtgctgaaaatgttgtaaagacacatgctggtctgagaggctcgttccttagcattcgctggtgttctgttagattatcatcagcagaatccataatatccattctctatatatctcatttatgatcttatctagacgatttcctcatatatatcccatttctcttcacacatcatctattactcaggctctatacataaatacatatattccagacataattcgctttaatattaatatgcatgtat

SEQ ID NO: 22625 - DNA, 432 bp, Zea mays
agcttaagagactgttttcacttatcaagctcgttacgaataacgatctagcaccgcgaaagggctactgttgggtttatgcttcgtcgccgaaggtcttatatgaagaagtggtcctcggctgaagcttgttgtataaaatagccgatagttcctcttcgtgaagcttcggcattacaaaccgacttaaagatagaatgaccttttagtccataaaggtctgagtccatgttgtaagtttttataaagggcatacttgtaattcctcacaggctgcgtcctgtgcctataaatagagaacagtatttcgttactgttcacgcattccggtaattgcaatcgcatctctcggaattcaacctttgccaaggcataggtattatcgaatctattgtcaatataataaataaatattatatagttagcctatga

SEQ ID NO: 22626 - DNA, 426 bp, Zea mays
  unsure (1)..(426): unsure at all n locations
ctcaagctncggcgtgatagctgaaaatgatatcgacttaaagatgaatatagtcattcttacctctgtggatacctatagaattactaccatatgtaaagggcatggatgtaattttacatgggctttgtcccgtgcctataaataagtgaacagtgctcccgcactgttcacgctgacttggcatttacttttgcgtcacgcttgaacttctacctatctttcaaccgaaggtacaatatgaactccgatatcatttctacttttctataataataatatacaaatgagtcgataattatacataattgtttacgctatcctttatatcacatatgattccttcttcattatggaatgatgagttgatgaaggtctgatcctcataaccctcgtacgaaattattatattaccagggaaattat

SEQ ID NO: 22627 - DNA, 429 bp, Zea mays
agcttgcttaacaggcgcggttttctgtctttttttgtcgcaaactaatcagcagcagtcagcttatttcgcccggcagatttggcgctagctactccgatccttaaccacgcagaccaaaccaacgcaactgaccggcctccactgaccgctgaccaagatgcttgcatggtggggtttcttttcttaacgcatgaagcaaagcaatgcaggggacacgcaggcatgcaaatatatataaataatataaaaaaaggcagcagcatctatatctatcacctctggcactggattgaataaccgaagccgtgcaagccagtgtcagtggtggtgtgtgaagtgcactgatatggcagatttgcttgcacggcatcttaattggtttggctggttggtagagctagctaacaccttgctgcatgcatatgt

SEQ ID NO: 22628 - DNA, 501 bp, Zea mays
actcagcttcgattaaggacacatttcgtatttccgaaataagatgtctcaagtataaaaagttgttgctgagatgaagctgagcgaagaggagaagctccttgaggaaaagactgctagattcattgagtcaattgcaaaaacaaatatagagaatattacgaaagaaattctagaaggcttatctgaagatactgatgacagcgacagctatgatgcagaaagtgggggcgaagactccgaagatcggccctggcgaccaagtcatgcaatcttcggaaaatcgactatcagacagagtcaccttgataatatgagaggaaggtattttcgagatatgtctattgtgagggctgacaacggagataggactgttcctgttcccgaagaaaatgaagtcgtaatctaccaaagcttcttcaaagctggacttcggttccccctaagcagaattgtgttgaagtttaaaatatatgagattttcttcaccagattactctg

SEQ ID NO: 22629 - DNA, 422 bp, Zea mays
  unsure (1)..(422): unsure at all n locations
agctngacattgctttggctcttttattggaacccaatgccatccttaataccagggcgtctccattatagagcatgcttctagcaaatttaaaattttcattttctagctcatgctcggcaattttagcatttaatttgctatgtgatcattttgttctttaatcatagcagtgtgatcatcaatagcttcaacatttatatctctacatctagtgcaaatggaaacatgttcgacggtagatgtagatggtttgcaaacattcaaataatcaatcttagcatttagactagcattctcatctgtaagacataaaattgaatcattgcaaatgctaagctctctagacaaattttcacatttttctacctttagagcataagcattnttcaatttaacaattttttatttttcttaatgag

SEQ ID NO: 22630 - DNA, 486 bp, Zea mays
  unsure (1)..(486): unsure at all n locations
ctcagcttacacctctggactaactcggctgcatcgttcttcgctgttggccaatagaatcctgacctgagaaccttcccgactagtgttctggatgccgcatgtattccacattgccctgcatggacctcctccagaagttgcttcccagtggacgggagaacgcacttcttgaggatgcctgatgcgccccttctgtacaatatctccncaatgagtgtatagtgagccgactgcctagcaatgcgctctgccgagttcttgtcgactggctcttcttcattctttatatacttaataatcagccttctccagtcaacagagtctgactcgggttgatctatgacgttgcactcttctgtttgatccattgagatactcagccgcagagattcttacatgaagactccgggtgggacctgagatcgactggatccgagcttggacagtacattggctggtgttgtcgatctcttttatatgatg

SEQ ID NO: 22631 - DNA, 440 bp, Zea mays
  unsure (1)..(440): unsure at all n locations
agcttctccaaggcgtctcgagtccgcctccgctcgcgggcccgggccttctgcgcgtccttcttttcttcttctcctccgcggcgacccgccgcgctgctcggtccaccgcatcctgcgggacccgtggcaaggaaggcttgtgccaccccacctcctgaagaagggggaaaccccaaccgtaagaacgaggagcaacccgctgcaagaggaaggaagaagcggacactcaccagagtcacgcacccttggtctgggcgcatcaaaagctgggagtaggcggtggggtccgacttccccaacgcgacggacacccgcccgtggagggcgtcgaagggaagaggatcagaggacatccgcgagccctcncagtcagcctccggtgtcatctnccaaagcgacagtcgtcgcttcgccaagggaagcaccctctgacggtg

SEQ ID NO: 22632 - DNA, 359 bp, Zea mays
  unsure (1)..(359): unsure at all n locations
tgctctaaagggagaacacatanttgtttgactaacgtgcatttcgaagaagatagaccttgtcagcttgtcaagcatgtaaacaagtgggaggagcgcattacagcaagaatgtgatgaccacttcaagacctctggagctgttgcatatggatctcttcggacccgtcgcctatctgagcataggaggaagtaagtatggcctaattattgttgatgacttttcccgcttcacttgggtgttcttattgcaggataagtctgaaacccaagggaccctcaagcgcttcctcaagagagctcaaaatgagtttgagctcaaagtagagaagataaagagcgacgacgggtccgagttc

SEQ ID NO: 22633 - DNA, 477 bp, Zea mays
  unsure (1)..(477): unsure at all n locations
tctanagggagagcacattntaggattaacatatgttcattttgaganagacaggatttgtagcgcatgccaggcagggaagcaagttggagtccatcatccacacaagaacatcatgacgaccgacaggccgcttgagctgctccacatggatctattcggcccgattgcttacataagcatcggcgggagtaagtattgtcttgtaatagtggatgattattctcgcttcactcgggtattctttttacaggaaaaatctcaaacccaagagaccttanagggattcttgagacgggctcaaaatgagttcggattaaggatcaagaaaataagaagcgacaacgggacggagttcaagaactctcanattgaaggcttccttgaggaggagggcatcaagcatgagttctcttcttcctacacaccctcaacaaatggtgtagtggagaggaagaatcgaactctattggacat

SEQ ID NO: 22634 - DNA, 393 bp, Zea mays
  unsure (1)..(393): unsure at all n locations
agcttcggcaacaaaggcttcttatgcacttcggaagtttcaacaatattcttcggagttgtgttgaagacttaattgtctccaaaacatccagcacattaaccatcctntttctttttggggtcactgctggacccttttggctttttgctgcctcaatttttgctgaaggacttaaaacttctgatgtctttagttcttcagtcctcggttcttctgttttttctattgctagcacttcggccagctcttcgatttttggcagcagagtttggtctttagcttcagtggccgaagatgtctcaccgataaactcaggcactgtggccggttcaatataacgtggccggtgtgtgagaacctttacccttntcctcttcagcgccgactcgc

SEQ ID NO: 22635 - DNA, 453 bp, Zea mays
  unsure (1)..(453): unsure at all n locations
gggtgccaatgganaaacagagatccttgaaatcttgattgtcaaactgcttggccgtgtcaactgttagctcggacggtactccgaagcggcaaacaatgttctgccaaaagaatttttgggcagtctttgatgtgattgtggacacagccctcgcttcaatccacttggtgaagtattcgacggctacgaaggcgaacttgaggttcccctgagcggtgggcaagggcccgacgatgtccaggccccagcgctgaagaggccatgtatgggcgaccagctttgtgtattgcgaggggttgcctgaccgacgagagaacttctggcaggcttcgcaggaccttgcgactcgatttgcggcgcacatcattgcaggccagtagaacccttgtcggatcaccttatcagccagggcccttggccccgcgtgcgaagccgcaagttcactgtgga

SEQ ID NO: 22636 - DNA, 402 bp, Zea mays
  unsure (1)..(402): unsure at all n locations
tgtcaatttgaanacatattttcgtaccgatattatactatgtggcgcgttatcaacaacaattacacaacaacaaaacaagcaatgtaattaatattgataattcacatttatgaatttaaaaattaataaatacattttttacgcatcatttgtgcagcgtgaaatgggaagaaaacaaagaaaaatgaacaaaatggaaaaagggaatctgttaaaactgtagctttaggggaacaaaattagaggacactgctggagactgagaatatatagatgacagaatcttttagagtgttctgtanaggacagagaatattcctttaggggacggaatttaagggacgctgctggagacagtctaagactagctccaacaaggagctctaaatgctcctgtac

SEQ ID NO: 22637 - DNA, 393 bp, Zea mays
agcttcggatatgtgtacactttcttattgctcacgatggacacgacctacaatacagtgagttcatcgttatgcaacaatgcattcaatgagtaaataaagttgatttaatcggatgcactataaccaagacaaaatggccaggtaacatgaatacacttctttgcttgaacacagatcaatattatgaatataaaactttgttttcataagcaatatctctaagcaagcttgcatcatgctcccttgaatcagaatgtcatttctatgtttcacccaaaattagctacaagtgttgatcagttacatctcccacatacgataactatttagagagcaccttaccttgctggaatttcatctagtagttgttgaaaccatgcgccatccttc

SEQ ID NO: 22638 - DNA, 472 bp, Zea mays
  unsure (1)..(472): unsure at all n locations
tgaagttcggacatttatgggcactattgaaataatgtgtggcgaatgtgatggttcaagtggtcttgtaagagacccatctcatatatgtgttagataacactgttccgctatatgatataatttggcaaatggcatgattaaaatatgctgctaaaaggattcagaagatccatcatgagatcctagaaggacttatattcttgaattataaatatacaacatataaatctcataccgacaatacattcccgatgaatgatcactctcctatgtagagagaatatctcctagttgagattatagtccctagatagaaccttttcagaagacacaaagtctgtgttgaacaccaaagtttgataaccnctataaagggataaagacccatacatacccgataatgaataatatgaggtatcaaaggaccttgagttcaccgtataatcacatgtgcattccacgnggttac

SEQ ID NO: 22639 - DNA, 409 bp, Zea mays
agcttgcatcatgagaaaagtttatataattctccaacagcactgaacagatgagcatattcactgtcttcaacacagaccacacagcttgttagataaagaggaaaggagaataatgggtttcccaactatataactaactctattgacataggatgtaaaccaaaatgcaggggatacccacactctggcgacaatcattacgaagatccaaaccaaacatagttcatcatgacaaacatagatgcacaggatatagtcaactgccctgtctaactaaaactaactaagaccgagactaacgctaagactgaagcttctatgtatatatttcgtatagattacgagacccaactctaacgatctatggttctagatatatcttggccttgcacgcgggagtgccata

SEQ ID NO: 22640 - DNA, 420 bp, Zea mays
  unsure (1)..(420): unsure at all n locations
agctntgcaggaaaaggagattgtattaagctccggggtgctcgagagagtcaattcaattttcttaactcaagctatcaatcttcaatgatctatatccaagattaacccaaagttattttgaattgttatgtctaacactcatatcatctcggggaagatattgatgttgtaggaaataaagaattatcctgtgccgaaaagtcaagacctacaacatggaggaaagccaaaagatggtaacaattatgcttttaagtgcaagtatcttaaattatcatttcttatgtgtcttgtgtagtcacatagaaaaagaaagcacttcaaatgtttttaaattatgtcaccattctttgaagaaatgtctctcatatggtagattgtatattcatcatatctataccatggcaatctacatgc

SEQ ID NO: 22641 - DNA, 395 bp, Zea mays
  unsure (1)..(395): unsure at all n locations
tactcaagctngaaccgaggacccgcgtcaccggaatagctaaaccgtgctcgccggagttcttccccccgccggcgcacgtggaccgggtaaatcactgagccattttccgattcaatgcacagatagcctctacatcaccccagggagctcaccgtgccgttggattagaataggtcgccgtggtttggccggcacactcgccgccgacgagaacacccgcctgcgcacgaggaccgagcaattccggccatccccgccgtcgagccgtacatcgttgtgaccgccagagcctccccgagccaaccctgcccttcgccggacctatctcgccgccggtaagccgcgccacccttttctttcccgcgggtactgtttacattgnnggagggact

SEQ ID NO: 22642 - DNA, 425 bp, Zea mays
  unsure (1)..(425): unsure at all n locations
agcttgtcttcagcaattcgatatgacatctttctctntattgctttggttaatctcttcattntacattccaatttaaaaataataaacttagtcttttgatcttttgaatcttgttgaaacttaaatgccttgcttaacataaaactctgcattctcacaaaaatgaaaatttttaacaccatatccttattattctaagtcaagaaatacaccgcacaaaccaaactttaccttaaagtttgcgtaggctaggctccctgcaatatgtttttttctcaagccgcttagttcatgttctagcttcgggaaaccaatactttttgtcaatgtattagtaatccgagcccnctccggactaggaacgcactccaacacatcttcatcaactctaccaaagataacagcttcagctttatatccac

SEQ ID NO: 22643 - DNA, 457 bp, Zea mays
ataacaggaggatagaggcaagagctcgaccatatgttataatagaatgtgaactatacaagcgtggggtctgttctccgatactcaagtgtttatccagagccgaaggtatagaattgatgaaggaaatacacgtaagcctatgtggatctcacattggatctatgcctttacttggaaaagtttttcgtcaaggattttattggccaaaggcagcttcggatgcagcagaattagtccagaagtgtgaaggttgtcagaaatgtgcaagagataaaaaacaaccttcgtctttaactcagttaatacaacccacttggtcgttgcaaaggtggggccttgatttgttaggtccattaccaccagcacaagggaacttaagatatgttgtagtggcagtggaatatatttctaaatggattgaggcacagcctttatccacaataacttccgtcac

SEQ ID NO: 22644 - DNA, 350 bp, Zea mays
ataatagacgaatcgactcgagccttgctacaggtcataggtttcaccaagatccaaccttcgatagggagttcccttggccacaattcaagctttgttccttgtcaccacaccatgctcatcttgcttgttgcggaagacccatttggttcctacaacattttggttaggacgtggaactaaatgccgtacctcatttctagtgaagttgttgagctcctcttgcatcggcactacccactccgaatcttggagtgctgcctctaccctgtgtggcctaatagaggaaacaaacgaataatgttcacaaaaatgtgcaacacgagatcgagtgttacccccttatgaat

SEQ ID NO: 22645 - DNA, 341 bp, Zea mays
tccttgtgctcctcctcagccgaggcatggtcccactcttttgactaaccaggaggcaagatggacggtcaagtcactccaacaaccatgactttcagggaacctatacaaattacaccaccagcacagctaaaaatactaatactcatctagacttacccggtgtgaggagactacccctctacctctagacatgtaactgtgtggctgaggggtccggttgccaaaagcactaactgagtctataaatcaacgtttagctctgtcaagacttaacgagactctctgaagacgaagagaggacctatcgaatcatacatggtgtcgaacatttagcaatc

SEQ ID NO: 22646 - DNA, 268 bp, Zea mays
catttttttaactcgagctatcaatccttcatgatctgttatcgagaataaccccaacgttatttgaattgttatgtgtaacactcatatcattctggggaagatattgatcgtgtatgacataaaaaataatcctggtccaaaaagttaaacctacaacttggcggaaagcccacagatggtgacaattatgcttttaagatgaagcgatcgtaaatatcatttcttatgggtctcggggagtcacatacgaaaagaaagcacttca

SEQ ID NO: 22647 - DNA, 450 bp, Zea mays
  unsure (1)..(450): unsure at all n locations
ttggagatgcanatgttctttatattgtcgacaatcttattcagaactttaaaaagtttgatgtgaacaagcacgaatactatagtgacgttttttagaaatactagtgagagaatgaaaacttgagttagctgagtgatcaaacattcacaatgatgcgttgatccaatcatggttaacagaacaacggtgagacgtttaacacttcacttgtttatttgactgcttgatgctacaggattgttattattacgcgaaacagccctgctcagtagtcagtgttcacgtggataaaaactgctaccgaataagcaaaattcctggataaaagggaggcaaggagaaacactaataagcatcagtaagacgattagttgtagcttcctacaattatcacagtgagagccttgctaaatttgtcggtctaaacaattcaaattaaaccacgtt

SEQ ID NO: 22648 - DNA, 419 bp, Zea mays
gcttttaatgtataatatttttctccaccttttcacattccttaacggtgtcatattatttttgaacttgacactttcgtaataaccatctggttatcacattacataagggtcgctataatggaattttccactatgattaaatacatcaagacctcccgcacccgttcggggttccaaagcagttgtatttaatgaagtaagctcactatggttgacctggctaatatggtttatttgcatgacctccgcgagacaagagcccctccacgagtaaaaacatacttggctatttcctttatcacatcatcatcacaaatccaagtagaatcactatatcactcaggtaccttgagatagctagcatagtgaagactatagcccattataccactcaagtagggcataaactctttcaa

SEQ ID NO: 22649 - DNA, 420 bp, Zea mays
  unsure (1)..(420): unsure at all n locations
tcacgggctactggcggagctagccgaagcactggcttgcttagatgatggctggagtgggctggccactgtggccgaagctctggcggcaatggcgggcggaattaagctcgccggagctaatggaaagtggctagccggtgagggtgagtgcggtgcgaantggggcgcgcctgggaaggctttataggcacggcgcggtgcacgggcggtcgtggaccggcgagtgcgcgcgggcgtgcactgtgaggcgcggtgcgcgaacgggcgtgaaccatgggtgtcagccacggtcgaacacgtgttcccgttgcctctgcccctgttcaaacgccgattgggagcaaatcttcgcgaatntgggcaagatcgcttgcaggggattgntcaccagaccaagctttgtcttttgtgtatgga

SEQ ID NO: 22650 - DNA, 301 bp, Zea mays
agctttccaacatgcagcatttttgcttgcgccagggaggagagaccataccggggcgtgtttaagtgtggaggtaaccggccgtcgagacaatgtcggtggaatcctctgaggggtttctcccttacaagacctgaaaaaatttcttccgagtgggagtgtttttgatgacgggtgggaagtatctccgggggggatcatagatctcccttttacaaaattggcaagctgtttcagggcttttcgggcaacactttggcaagtgtctgggaagcggtgcccgatgaaagagacattgaat

SEQ ID NO: 22651 - DNA, 352 bp, Zea mays
acctacaactcccttaccatgaagttttttgttcttctacctttttgatgatgatcgtatgacgtattctatgcatgattaaactacttgtcttcttgtatggtgtactgctggttacctaccgttaatgaatggatgtatgtatgttcgcacccacatcgacaacgatctggttgaggagccctcgatttcactggtaaaaccctgacctgcgctcgctgttggggtgagcgctcttggccatttctgtccatacttccttatgtaccttccgcttacacttaatgccaaagagagcttgctttgtatcctatccttggtactagttgggtggaaagcattgttaacttat

SEQ ID NO: 22652 - DNA, 435 bp, Zea mays
  unsure (1)..(435): unsure at all n locations
agcttatctgagcgccaagatcttntactcccctcggntatctactttgcgtcgagcacgaatcacacgaccgacacgaaaccgagcgcggagtcactggcggcgaagtgcagtgaatctttgatctttttcagtctactgtacaatgggaagccccattcagagtacctgacagagcgcnttgcagggccttgatctccaatttttatgtggcaacttgttaatccatctgtaacaaagttgttgatctattgtccagctttgaattttctatggcacccattcacagataatcactggattatactcaaaatggctcccaagatcagtcctagatcactgtcagtccagatccagtattaaagtcgactgacaggtcagtttccaatctatttttcttccatttccatgtagcacagggcttaatcacttaat

SEQ ID NO: 22653 - DNA, 424 bp, Zea mays
gctccggcggcccgaaccacgctaaatcctcgcgtattcatgtgctcggtgatcgcttagcaagacaggcaaaacgcttaagccccttcctcatcttatgatttaaggcgggtgcattccgccacccggccggagaattccctctccgacatatatatatatacatatatatatatatatatattcttcctctcgccgaacctgttctagatcttgtaccctctttcgcgagatcaccgaaccacttcctctcgcgaatgacatgctgctcgcgtcggctagcctcgtctatccccgtctaccccccattcgacgtccaccccatcatcttgggcctgcgagccagctctgaccatcttcgtctaattttatataaccctattacaccactctctaactccgtcttcgcttacactgtctcgcg

SEQ ID NO: 22654 - DNA, 434 bp, Zea mays
agcttgagcgatgaccggctttttatttctccctaggaaactggtaatcagcatgttcttcagctctgccatgacgtgattgttcctggccgaagagaggagtacctggtttgtgcaacattcttgacagccatgacgaaagacttcgccatgactgcagtattgccaccatacaaagatatggttgcttcatagctcatcaaaaactgcttcgggtctgagtgtccatcgtacatgggaagctaaggtggcttgtaagacgggggccaacgtgtagcctgcagttctgctgaccgaggagaagcatcatcaaaagcacaatttccatgatggaaatgctcataccagtcatcctcgttgaagaaaccctcttgaagaagctctcttgactgaagccttctggtctgctcattttgagcctagatgaacaactt

SEQ ID NO: 22655 - DNA, 465 bp, Zea mays
  unsure (1)..(465): unsure at all n locations
tcggcttttgaaatagttntntagtgcctccgaagatgtcttaagataagaagactgctgctgagacgaagctgagcctcgacgaagagaanaacttgnggtttctcatagcgatgtccaagaccaatacagaaaaaatcaccaaggagattctggaaggtttgtctgaggatactggtgacagtgacagctatgatgtggacaatggcggtgaagactccgaagatcgcccctggcgaccaagtcatgcggttttcggcaaatcagctatcaaagaaaaccatcttgccaatatgaggggaaggtatttccgggatctgtccattgtgagggcggacgaaggggaaaggacttgtccacaccctgaagagaatgaagttgtggtgtaccgaagctntntgaaagttggattgcgattccccttgagcagcttcgtcgtggaggtgctaaaaatcttcgaagtta

SEQ ID NO: 22656 - DNA, 411 bp, Zea mays
  unsure (1)..(411): unsure at all n locations
tctgcgcgtcgatccgtcctccgtccgagcatgttctgctcctcttcacgggatcatccctgtgaagcgcgtncagcccctcgggcgactcgacctcccagtctgcttcgggacaccctccaacttcctaagggagaccctgacgttcgaagtggtcgggttccgaggaacctaccatgccgtgctaggaaggccatgctacgcgaagttcatggccgtccccaactacacctacctgaagctcaagatgccgggccccaacggggtcatcaccgttggccccacgtacaaacacgcgttcgaatgcgacttggagtgcgtggagtacgccgaggccctcgccgagtccgaggccctcatcgccgacctggagaacctctncaaggaggtcccagacgtgaaacgccatgc

SEQ ID NO: 22657 - DNA, 427 bp, Zea mays
  unsure (1)..(427): unsure at all n locations
agcttatgaagattcttcatccttacatgggctagtcggcggtgccagagccaacccatgttagcttagcaattaagcaagtgtcgagttcagctctatcaaaatctaccaagtatagctgaccctctaacactcccttaaatgctattgaatcatcacnttttctaaagacagtgacacctacatcagtaaagagacagttgtagcccatnttgcataattgagatacagaaagcaaattgtaatctaaagaatctacaagaaaaacattggaaatagaatggtcaggagatatagcaattctacccaatcctttgaccaaaccttggtttccatccccgaatgtgagtgctcgttggggatcttgatttttctcgtaggaggagaacatcttcttctcccctgtcatgtggattgtgcacccgct

SEQ ID NO: 22658 - DNA, 409 bp, Zea mays
ctgccatatagggcgcataattatacctttgatatcttcccgtattggcaggtcattcttcacataaaaccattctgtcatccagtcgccgggccacctctttcgaaaggttggcacgggacagcttgacccataccgagaaacgaaactgtagcagccaaaattattgtgatactgttccttaccccaaggttttgtctcgtatgataattcgtgtatattgcagaaacttttcgcatcaagctccagaccttggcttctcacggtccacacgaagatattcagccttatgattgcttcgggggtaagttggtgaagatatacttcgaatattctcagcacctctacgacaaagttgctcaagggaaatctaagtccagctttcaaaaagcttccgtacactacgact

SEQ ID NO: 22659 - DNA, 414 bp, Zea mays
  unsure (1)..(414): unsure at all n locations
ancttgtgaagaatcttcattctctcatgtgctagncagcgatgccagagccagcccatgtttttctaccaaataagcaagtgtcgagttcagctctatcagaatcgactaagtgtagctgtccctctaacactcccttaaatgctacagaatcatcacttcttctaaagacggtgacgcctatatccagaaaagacagttggaacccatttacataattgcgaaactgaaagcacgttgtaatctataaaatctacaagaaaaacattggaaatgtaatggtcaggagatatagcaattttacccaatcctttgaccaaaccttgatttccatccctgaatgtgatagctcgttgaggatcttggtttttctcataggaggagaacatctttttctcccctgtcatgtggttt

SEQ ID NO: 22660 - DNA, 415 bp, Zea mays
  unsure (1)..(415): unsure at all n locations
tcagctccatctangttatggattgctcttgaatctgtccagtttccttcggcctttctggcagcttcctgacttccatgaatagcaataggcccttgatccgaaggtatcttcatgcaaagatatactggatgaagaattgcttcaaaagcattgagagtaccacgaccaatgattgcgttgtaagggtactccatgtcaacaatatcaaacacaacttgttcagtccttatgtngttgataaatccgaaggttactagcatcgtgatcttgccaagtgctacaatctgccttcctccgaagccacaaaggggatgtgtggcgtcatggattntatctttgggctcttgcatctgtctgaaggccttagcaaatataatgtccgctgcactgcctatgtcaaccaaaacattat

SEQ ID NO: 22661 - DNA, 385 bp, Zea mays
agcttgaagccatggtaagtattatatgctaataatatgcgaattgactcaagcctagctacggggcataggtttcaccgaaatccaaaccatcgacttgggagtatcccttggccacaagtcgagctttgttccttgtcaccacaccatgttcgtcttgcttgttgcggaagacccacttggttcctacaacattttgattaggacgtggaactaaatgccatacctcattcctagtgaagttgttgagctcctcttgcattgccatcacccaatccgaatcttgaagtgcttcctctaccctgtgtggctcaatagaggaaacaaaagagtaatgctcacaaaaatgtgcaacacgagatcgaatgggtacccccttatgaat

SEQ ID NO: 22662 - DNA, 211 bp, Zea mays
  unsure (1)..(211): unsure at all n locations
ctcaactccatatagagcgcgaattgactatttatctgacctagaaccctcagcccnacaaggcgcttcttgactcacaaggacaataatgggcccttgatctcgatgtattttcacgcttaaatatactggatgaaggattgttctgaaggcatgtatggtcgctctaccaacgattacatcatatgggtactccatgtcagcgatgact

SEQ ID NO: 22663 - DNA, 432 bp, Zea mays
  unsure (1)..(432): unsure at all n locations
agcttgcacacatagctcttttgtttacctttgatcatatctcttttatatgctatgactaatgtgtttcaaagttaattcaaaccaagtcatatgtatanttgaaagggaattggagtcttcggcgaagacaaaggcttccactccgtaactcatacttcgccaccactccgagcaactctctcttctttgggggagaaatgagcatcaaggaaaaggacttcctccttgggggagagagtaaaaagctcanacgcaaaaggacttcgtctttggtataatcttaactcacttatttatgaccaaaggggaagattgcacttcgagggctctaatgattccgttnttggcgattcatgccaaanagggggagaaatgagcccatagcataaggaccgcaccaccaccaccaaattcaaaaacttagtgctt

SEQ ID NO: 22664 - DNA, 410 bp, Zea mays
  unsure (1)..(410): unsure at all n locations
ntgaaataactntaaaggacttccttctgaagttgcaaagagaatgacattcgaagagcagttaactagagaaacttggctaaaggaaaaaggaaacacaccagcacaccttcttggtacccctaaaggatccctacccaaaatctcggggcaagattcctttaaggggggagggctgtaacaccccaggtgttaccaagacaatggcttcatttatgcactgatgccttgttatcacatgtggtaaaagggaggagaagaaacacctaaaaccttggaaacatgggttagctcagaaatgttaatgacaaaagcttcacccaatacctttgaacaattgtcatcttgagccatagaggttaagccctaaatacccctaaaggcactagacttccaagcagaggatcagt

SEQ ID NO: 22665 - DNA, 427 bp, Zea mays
agcttgagcaagcctcacggccttatcaggaagctatctgagggcttggatcgaacggaggaggacgggagaggggctggccacggtggttgctctcgggcggcactggcgggtcgcggggaggtcgccggagttaatggctggctcgggcaagtccggcgaggtacggagggggtaacggggaaggcagccaagcactggagcgggttttatagccgtggcgcgggcgtggtcacgggcggccgcgggcgcgcgggggttcgcgcacgggcgtgctctgagcgcgcccccggatgccagctcgcgtcgaacacgtggaagcttgcttctgccatggttcaacggccaattagagcgccataacgtgcgtatcttggcaaagtcactgtgtacggtcgcttctctgctccaatcctatcttttcgct

SEQ ID NO: 22666 - DNA, 502 bp, Zea mays
  unsure (1)..(502): unsure at all n locations
tcttctcgtcgtcgatgagcgacgccaacgcgagcgcctcgtgctagtggtgtttgttcgggttttccatgtaagaaacatggattcatctttggcattggtttatgaaaatgacttataagtcaggtccatagaaaatattacggagaataaatgtcacacatgcaaaanaaggaatttaagttgaaaacattattcaaacaaaagaaattgcatgcaaggctcttctttaaatactactccctcaatccaaaaatacaatttaataatctcggtgatacttatctactactacacattgtgcaagggtagcaggtgggcttcagaagagatgtagtatatgtttttactataatagatgtagacataaacacacgtgtggtgtagtggtagctacgagcacatttgcttgaggggtcgcgggttcgaatccccttaaggccatttgtgttnttttaaattaattttagctaggcgtgggatgtacgtgggcatgggaatg

SEQ ID NO: 22667 - DNA, 405 bp, Zea mays
  unsure (1)..(405): unsure at all n locations
agcttatgaagattcttcatctttacatgggctagttggcggtgccagagccaacccatgttagtttaacaattaagcaagtgtggagttcagctctatcaaaatctaccaagtataactgaccctttaacactcgcttaaatgctactgaatcatcacttcttctaaagacagtgacacctacatcagtaaatagacagttgtagcccatttgacataattgagaaacggaaagcagattgtaatctaaagaatctacaagaaaaacattggaaatggaatggtcaggtgatatagcaattttacccaatcctttgaccaaaccttggtttccatccccgaatgtgatagctcgttggggatcttggttttctcgtaagaggagncatcctcttccctgtcatg

SEQ ID NO: 22668 - DNA, 503 bp, Zea mays
  unsure (1)..(503): unsure at all n locations
tgagcgagtgtcagacggcagacactcgataagtattgtttaataccctaaatccgaccttcgtcgagtgcctgtcagatggcactcgacaaagaacactttaaaatttanaaaaaactttgccgagtgctatatggcaggcactccgcaaagagggtgaaattaacagaccgcgaccgccgctccttctccttctattctcattctcctttgactcaccgncaccgacttctactttctcacccgccggcgacgacttctccctcatccgccgccgctgagcatagcctcctcgcgcgcctgtctgtcctccaccgctctacaccgcaacccttctgttcttcaccgctctccaccgtcgcccgctcttcaccgccgnaagcggncttctccgtcggtcgtgccctccgtaggccaccctctgtcaccagtaattaagggtataaacttattgaattgtacttattggaattagggtataaacctattcaatgtacttattg

SEQ ID NO: 22669 - DNA, 406 bp, Zea mays
  unsure (1)..(406): unsure at all n locations
agctcgcttctgagatgtttgttttcatgcaacatgtaagacatgtcagagttaataacattcaactggtcgggatatggacacctgcactntgtttcagtgttaagttgtccatgcaaattgcttaattgtagctcttaacaaaaagcgacttgcacgggcagatttgaccacagattggtggtgacaggccgtaagataatgtgcatggaaagtcaagctgatcacgcagtgcagtcctagtccaaccaaaggtggcaagaaatcgataacaaatttgtggctgggccacgacggatgtgagagggagaagcatcgaatacaatagaggcagtatgacattatacgtgtgggtcgaggatgaattcgtggatatggtactggaaggtgcggaagcacttccccc

SEQ ID NO: 22670 - DNA, 445 bp, Zea mays
  unsure (1)..(445): unsure at all n locations
cgagctntgcgtgtagagcatgccaatgctttgatgtggtatttaacatctgaaggggccttcgtgcataatgcagataaaaaggtgtgtgtgtgctggggagagcgacacacgaaattaacacagcaaacaacatggtatcgagctagggtttggtgcttcctcctgctggcggcgccgccgccggccgtcacctgaagctccgccgcaccgtcatactcttactgcctgctgtcccgccgccgccggccgtcatcctcctcctgcctgctgtcccgccgccgccagccgtcacctgcagctctgccacgctgtcacccgcactccgcgtacgcacgcgctctgcgtctgccgcgcgctgcctactgtccgcggccgcgctgggcggtgctgccatgctgctgctcacgcggaggctctttgccaccacgagttcagaaacagc

SEQ ID NO: 22671 - DNA, 389 bp, Zea mays
gcagcttatcttagattcatagggtttaaaatagagaatgattctatactatttgtactgtgcaactatagcatgctcttcgatagaacatagaagcgcaacacataagtatccccctcatatgtccgacaatagtataaatatattttatgtacaactatattaacttaatgaatttgtggctaagttataattattagaatggaattcaattttaaggagccaaacagagtctaagtggttttagatgattgataatttgatattggaagttaggactacagaataacaacatcatgcatcctgactcatcttctaacacaataagtcataaatttaatgccaaaattccagctgagatgcataaatctcaatgagttgaattcatg

SEQ ID NO: 22672 - DNA, 443 bp, Zea mays
  unsure (1)..(443): unsure at all n locations
tncggatttccgaagtggaagatggcctntcaatattatcaatcgatgaactggctgacagtttagcgtataatagcataaaggtataaaagtcaattttgtatttgcaaatgaaatatttcatttgtttatacctaatcttgtcctcatcttgcagggcttaatccttagcaatgcccttagagcacaaaaaaacattgaagatgaagggtatacaatggctctgaaccaccttcattcagaggtgatcgaattaaggaacgaaggccttgaaaaagacaaaatattaatttcattggtaaacaaagtaaaagaagatgaagctagttccaaggctcaagctgagattctagagaatgagatcgaagaccttcggaaataattggcagaggccaaagaanaatgcgctctcgctgaagctaaccgagaggccagcgaatgtt

SEQ ID NO: 22673 - DNA, 415 bp, Zea mays
  unsure (1)..(415): unsure at all n locations
agcttctgatgancggcagattttgaaccgacttaaaggggaaaaggctatctagtcctcattgattgtctttaagtcaatagtaaacataaagggcataaatgtaattttacacaagctgcgccctatgcctataaatagatgaacaatacccccgtactattcacgctgacttgtattcactcttgcgtcacgcttggactgttgccttcaacaagccgaagtactaatgaattcaatattgctcttgttcaatcatgatgatataataaagaaatacttgatatgtcatatgattattcatcttgtatctcatatctcgtatccttcttctttcattaacatatactatgatgataaaggacttccttcatgaccttggttgaagacattatatcctacggagataatgctt

SEQ ID NO: 22674 - DNA, 477 bp, Zea mays
  unsure (1)..(477): unsure at all n locations
tnccctgcacgccaaggatacgcagacctcgggtgccaggacacaagaagatagcctctgcaacagacattggaggatccaagcactatattctttatgtccctgggcccacatgttggggcccagttcctttgtgcatgccccccttcagctataaaaggggaggcatgcgacgttacacacacacgcaatcccaggacataccatagactcgcaagctcacaagcaatacatctcacaatggagtagggtattacgctccggcgtcccgaaccactctaaatccttgtgtgttcttgagttcttcccattcattccaacgatcaagcaaaacgcctaagcccctcctcatctcaggatttaaggcgggtgcactccgccacccggtcggagatctactctccgacattnggcgcgccacgtaaggggctaggcttcaagttttgcttgtttctcgctcacatgatgggcggatca

SEQ ID NO: 22675 - DNA, 439 bp, Zea mays
  unsure (1)..(439): unsure at all n locations
nttatgtcaacatcaaggccactggaactgcttcacatggatctatntggaccaacaacttatgctagtgctggtggcaacctctactgtcttgtcggngaccataattaggggtacccccaacactcttaaactcggctggtaatcaccatcagcacaagctgcagagcctgatgggcgcaactctggtcaaggctctgtccgctcaagggacacgacctcgcctcactcgagcccagcctcgggcaggaacagtagacccaggcgaattcacgcctcgctcgagggcctcctcaagcaacgggcgcaccctcgactcgcccgaggcccagctcgggcacgcttcgtagtgaagcaaccttggccagatcgcctcaccaaccgaccgtatcgcaggagaattcaattgcaggatcgcctgacaccttatcctgatgca

SEQ ID NO: 22676 - DNA, 388 bp, Zea mays
agcatgcaacttctgtaactgctgccattatttataggtgaactatgctcctcgatctgacactatcttctctgcacagcatgcgggcagactatccgtgacatgtacaactcagctccagtcgctaccggtgatggtagctccacaggtatgaagagggccacctttagattaacggtccacatccgcccagatggaataatagacagccggcgtatgaagcaggccaactcatacattcatcctgatctcatgccacttgcactgaggaaattagaacaggattcaacagtcccgccggtctgtgatgctcagcttaggttcttcgacagctatcacagatggggacatatactgcatgtgctatttaatgcataccaacaaacct

SEQ ID NO: 22677 - DNA, 456 bp, Zea mays
  unsure (1)..(456): unsure at all n locations
tctanagggagaacacattntaggattaacatatgttcattttgagatagacaggatntgtagcgcatgccaagcagggaagcaagttggctctcatcatccgcataagaacataatgacgaccgacaggccactggagctcctacacatggatctattcggcccgatcgcgtacataagtatcggcgggagtaagtactgtctagttattgtggatgattattctcgcttcacttgggtattctttntacaggaaaaatctcacacccaagagactcttaagggattcttgagacgggctcaaaatgagttcggcttaaggatcaagaaaataagaagcgacaacggaacggagttcaagaattctcaaattgaaggcttccttgaggaggagggcatcaagcatgagttctcttctcctacacgccacaacanaatggtgtagtggagaggaag

SEQ ID NO: 22678 - DNA, 396 bp, Zea mays
actgcaaatctacaatatctcttacgtctcacaaagctaacacttgccttcaaatggccgccattggcttcaattggtaactctgagactacacttagtattacttacatgtattctccagcatttggttagactatacttcatatcttatacttccatgttgctatacatgcataagtggttaaatcatattctattacctatgcataacgaagttagtctaatcaaatcatgtcttgcacctctatcttcacatgcttttttctaagtagaagatctctatcagggggagtatttctctgtctccaaaaagggggaaaatatctttttaaagataacactcatttagggggagtaacaatttggggttcaactggtatcctacaatctggttca

SEQ ID NO: 22679 - DNA, 453 bp, Zea mays
gaccttaaaactcaagctggacctcgcgaggtacatcttttccgatgttgaacccatcacggccatgatggatccaccatcaagttttattttcgaagacatcccacccactttgccacatcatcttttgtaaaaacaaatcattgtgtttttctaaagcaaggctaagcatcaaaatctttttgtaaaatagggatttcaaggaaggtaatcaaattcaaggaaggtaatacaggacattgttttagcaatcaattcctatcacctaatgcatcaagcaagtgaaaaagatttttaatacacaaggaggtggcaaatgcaccggggcttgccttcgtttataggtgagtcaagctcggatccgcagatgtcaaagtataaacaattccctgcctgatgttccgcaagtggtggtggtgcagacttcttttcttctatctgaacctcttcctc

SEQ ID NO: 22680 - DNA, 427 bp, Zea mays
agcttctaaaggaggacacattttatgactaaccaatgtcaatcagggaagcaggttggcgttctcatccacacatgaacatcatggcaatcgagaggccacttgagcttctccatatggatctattcggcccgattggttacgtaaacatcgacaggagtaagtattgtcttgtaattgtggatgactattctctcttcacttgggtgtcttctattgagctatataggatagaggatgcacttagagatccagactgggtggtggcaatgcaagaaaagctcaacaacttcacaaggaatgtggtctagcatttagctccacgttctaaccaaaatgttgtaagtaccaagtgggtattctgtaacaaacaagatgaacatggtgtggtgactaggaacacagtccgacttggtgccaatgggta

SEQ ID NO: 22681 - DNA, 449 bp, Zea mays
  unsure (1)..(449): unsure at all n locations
nntttagcgttggctccaaaccttggcttctcacagcccatacaaaaatccccattcttataatagcttcgggagtgagttgatgagggtagatttggaatgttttcagtacctcaacaacaaaattgctcagggggaatcgaagcccagccttgaggaagcttctgaaaatcacaacttcatcctcttcaggggtgggagaagtcttttccccggcatcagctctcacaatagatatgtctcggaagtatcgccccctcatgttatcaatgtgactctgcttgatggttgttttcccaaaaactgagtgacttggtcgccacggtcgatcttcggcctcttccccatcactttctacatcatagctgccgctgtcatcagtatcttcggacaaaccttcgagaatctccttcgtgattntctctgtattagtctctgccatcgctatc

SEQ ID NO: 22682 - DNA, 344 bp, Zea mays
atcctaccgtcaattcataccatggaccgactctagttctatgtgatattgtctattagtacgagtgaatggagatgatcttatgtgatgggatgatggatagattaactgccatggatattacatgatatataagttaatcattgatggatattagattatcaggtgcggtagcactgtctttagattcttagcgatgtttcatgtgatctgattcttctaaatattccctatatttctttgattttacgcgataaatctgaagcattttgtctcaccagggggctttaaccccttggctgccggacagtggctgggatatacattcgagtggatgagatcct

SEQ ID NO: 22683 - DNA, 406 bp, Zea mays
  unsure (1)..(406): unsure at all n locations
tgtatcaatggcaactgtattcattttacttttttacacactggtaattataaagtgtgtaataacacatgcgtaatactttttgatgatacactggaaattatatntttttacatgggtaaaagaatcttgttgctccaaggtatccattacattatggttagtttctttctgcacaaacttaatacaactaaggttcttcatctttagccttatccataacaacatcttcacagtacacaaaacttgtagacatgataattgcaaccttttcatcccatttaacattgatgatatagcaaccataccacctgtcacgaaaccttgcttcaaatggtcactatgatcatccccatcggtgccattaagtagtacacatgaaggcagactgccaagcgtgtgccac

SEQ ID NO: 22684 - DNA, 317 bp, Zea mays
atctagggcctggctaacctaagtgagataccggccacaaagcgagtgaaaaagcctaacccgggctcaaacctgaccagtcttaattttaagcttttagtacctgaattcttacttactatgcagctggtggttcttgagatatgcatgacgcactacacttagggggagtattcataactcaaatatctcatgaaaacccctagtacaacgcccaaatacaaatctcatcatttgcctatgttctcctaaaattatctagcctatggcgaaatcatttggaaaatatgagaaaatatatgatggtggcaatacct

SEQ ID NO: 22685 - DNA, 453 bp, Zea mays
tgtgaagaatcttcattccaacatgtgctagtcggcgatgccagagccagcccatgttagtctttgcatataagcaagtgtcgagttcagctctatcgaaatctactaggtatagctgaccctctaacactcccttaaatgctattgaatcatcacttcttctaaagacagtaacacctacatctataaaaagacagttgtagcccattttacataattgcgaaactgaaagcaagttgtaatctaacgaatctacaagataaacattggaaatggaatggtcaggtgatatagcaattttacccaatcctttgaccaaaccttgatttccatccccgaatgtgatagctcgttggggatcttggattttctcataggaggagaacaatttcttctccccggtcatggtggttgtgcacccgctatcaatgattcaacttgagcccccagatg

SEQ ID NO: 22686 - DNA, 413 bp, Zea mays
  unsure (1)..(413): unsure at all n locations
agcttatgaagattcgtcattctctcatgggctagncggcggggccagagccagacccatgttagtcttagcaattaagcaagtgtcgagttcagctctatcaaaatctaccaggtatagctgaccctctaacactcccttaaatgctattgaatcatcacttcttgtaaagacagtgacacctacatcagtgaatagacagttgtagcccatttgacataattgagaaacggaaagcatattgtaatctaaagaatctacaagaaaaacattggaaatggtatggtcaggtgatatagcaaatttacccaatcctttgaccaaaccttgatttccatccccgaatgtgataggctcgtggggatcttggtttttcttatatgatgagaacatacttttctcccctgtcatgt

SEQ ID NO: 22687 - DNA, 488 bp, Zea mays
  unsure (1)..(488): unsure at all n locations
attanaagaacgtctgtcagcacctgcanaagatcatgttctgtctagacgcacttattanggagatctactttgactccaacaaacacaaggatataccacacacgaaaaacttgatcttaaggctgctaaaaatgaatagaactattatagggcaagtatctagactggagcaatctaagagcaagccatcaaggtttatgatatcgtccacagcanagtttatgatgttatcatgttacatatagtcaaccaaaagtcttaccatataataactctcttatcatcttatgtagaagatgtgcatttaatacttggtagatcccttcctctcaaaaatagtggcgggcccactaccgttagggacaattaatcatagaaacaattatgataggatataatcttcgaattcatattgtgtacaatgaatgtcttataatatgtgtatatgcactaaccacacactagtaagggatatgtatgcatat

SEQ ID NO: 22688 - DNA, 413 bp, Zea mays
  unsure (1)..(413): unsure at all n locations
agcttgtgaagaatcttcatcttctcatgggctagtcggcggggccagagccaacccatgttagcttagcaattaagcaagtgtcgagttcagctctatcaaaatctaacaagtatagctggacctctaacacttccttaaatgctatggaatcatcacttcttctaaagacagggacacctacatttagtgaatagacagttgtagcccatttgacataattgggatacggaaagcanattgtaatctaaggaaataacaagaaaaacattggaaatagaatggtcaggagatatagcaattttaccaagtcctttgaccaaaccttgatttccatccccgaatgtgatagctcgttggggatcttggtnnttctcatatgaggagaacatccttttcttcccggtcatgtg

SEQ ID NO: 22689 - DNA, 345 bp, Zea mays
tttctcatccttcttgtgacaactcaattgtaaccaatgcaagagacaccaattgtgtggtgatccttgtggggactttgtgtcccgtatgatttagaagagaaacttactctgtcctacggatcgtttgatagatggaaagggttgaaagagacccggtctttgtgaccacctcaacatggtgtaggtttgcaataaccgaacctcattataacacatcatcgtgtctcgctctatattcgctcacgaattgttatgcgccctctgtctcgaacttgatgaaatttataacgctaccggcttgtgttgtgcttaagtttataaatttcagattcgccctattca

SEQ ID NO: 22690 - DNA, 417 bp, Zea mays
  unsure (1)..(417): unsure at all n locations
agctngcacacatagctctatttttttccnttgatcatatctcctttatatgctatgactaatggctntcaagctcatatcaaaccaagtcataggtatattgaaagggaattggagtcttctgcgaaaacaaaggcttccactccgaaactcatacatcgggcttttcgccggactccatctacttcttggcgtgatctgccgccaccactccgaacaactttctcttctttgggggagaaatgagcatcaaggaaaaggacttcatccttgtgggagagagtaaaagctcaaacgcaaaaggacttcttctgtggtataatcttaactcacttatgtatgaccaacggggaagattgcactctcagcgctctaatgattcccgtttttggcgaatcatgccgaaaagggggagaa

SEQ ID NO: 22691 - DNA, 469 bp, Zea mays
  unsure (1)..(469): unsure at all n locations
ctcaagcttcgccgccgccgcctgttccttccctttattgctcttcgcttacgcacccggctccggaggctagagctgccccgtctgaaggagaaggatccctctacctctacaggcgccaccacccccgcactagagatgagcaagcgctacgcggaggtttctcggctacttatggcgggcggnggccgcatgtccggcgtcgtcaacccatcgcagctcatatgttcccctcgcaagggcgcagccttcgctaatcgcttctccatgttctcgatccgcttttcgcagatctgggacaaccttggccgctactacgcgccgaacccggacgacgacctggtcaccggctacgacgacagggacgtggtggtggagaacctgcgtaagctctgcgtgcaccgcgtcgccaacgccttcggtctaccctgtgtgtggtgggactacgttgtcgactaccacctccgct

SEQ ID NO: 22692 - DNA, 425 bp, Zea mays
  unsure (1)..(425): unsure at all n locations
tcatgaagaggaaccttcggccatcttatacaaacagcttcatccgaaagccgcttcttcctagaagaccttcggcgacgaagcatagacccaacaataaacaaaagcaaatataaagtgtaggaatgtaactactttgcaattttgacagatgtgcaaaagttacttgaatttaaaccaactgaaagtaattntaagtatatatgattgttttcttctagtttaacattttggataatccatttacatggcccgtgtgagaagaagagactaccctcgcatttatcatatcaactatatctttcttagtttgtattattattggaatcgaatgtaccaaataaagctttatatgactgtggcaccacttgtgtaatgtatttcatcaaagacgggtntctggtgttaaatatatgttagctttg

SEQ ID NO: 22693 - DNA, 420 bp, Zea mays
ggatctaagcactgagctgcaactatcttgtacaggatttttgcctttggtccaaagatggatgttccttaagcctctttaaatccttaaaggtaaatgctcgagatattataacatgctttcataagtgcttaaactgtcttgagcatcacacttatactatgacacagtgcactttacaattctctatgatgtagacatgatctcactaacctaattatgtgcacttggcatttaggaccaaatatttgtattcctctcaaagcacatatttagggggagcaatctatattatatagaattggttaagcttaattgacatatccttttaatcatatctctttcctttggtacatctgcatatttcttatctctaattatgccaagaccaagactaatatgttttcatgagcatctcat

SEQ ID NO: 22694 - DNA, 366 bp, Zea mays
tcttgaccacctcaacgttcaccaagttgttgcagctaccatcgtctatgatggtatgttcacggcagtccttgacgatgaggaacatgttgaagaggttgtggcgctgtctgttgtcatcttcactagccgtggcactcaaagctcgttgcacaatcaaggccttataggtctcggtcactgttgtaccaagaacctcttcatcaccatgataaatctctgcaatggtagctccaacagtatcttcatcttccacatcagaagcactaacacacccaccatcaccagtagcaatgtatgccccgttgcttgggcaaactcgctgaatatggccacgtccctggcagcggtggcacttaatgtctg

SEQ ID NO: 22695 - DNA, 430 bp, Zea mays
  unsure (1)..(430): unsure at all n locations
agcnttggaaagtgagcttgtttatatgattggacaaagggtgagtcgctccaatcactctatgtcgattgatggtattggtcaacaaaataaaagttcttgggagtgaagattggagtgactccaaggtcacaagattgttcatgagagcttataaagagaaggataaaagtcttgcaaggatgataagggatcgtgatgattatgaggacatgacgcctcatcaattatttgcaaaaattcaacaacacgagtccgaagaagcccccatcaagacaagagactctcatgccttgatcacaaatgaacaagacaatctcaagaagagcaaagaccacaaagcatagatagtggtcgagacctcaagtgatgaatatagctcaagtgatgaagacacagctatgttcatcaaaactgtcaagaaatttgt

SEQ ID NO: 22696 - DNA, 341 bp, Zea mays
catcgccaaggtttaaattatgcttcacaaccttgtgagcgagctatatgtgtaaactttctcggataaatcttgactggactgtgggtaagatgatgtggttttagatggccggagagcatttggcagaagagcgcttctcaccgcgcaccacttcacttgcggactctggctaacaatgaatctgagccctggtcacgtagcacactagcattatgggggaaccaccacgtccccacgggtactacagaattctacaccacctcatgttacaggcgagccccttgacctatggggtggagggtgaacaatccatctctgactgtaagacacaatcagtc

SEQ ID NO: 22697 - DNA, 402 bp, Zea mays
  unsure (1)..(402): unsure at all n locations
agcctagcagaagaaantnctattatctataatatcgagctcatgcctacagcgggntaaagactgtcatcaagtggctaggcaaagatatctgctaatcgatctttaatgataatgtgagaaatctcgatatcctcctatagttggtgatccctaagaaaatgataccgaatggctatgtgcttagtgcggctatgctcgacgggattagaggccattttcgatgcactctcattatcacatatcataaggactttggttaatttgtatccgcagtcccacagggtttgcctcatccaaagcaattgcgcgcaacaatgtgccgcggcaatgtactcggcttttgctggggatagagcgaccgaattttgattctttgaagcccaacacaccaaggatctt

SEQ ID NO: 22698 - DNA, 438 bp, Zea mays
tatgagtatggtgatgagtcccttgaaattaatcttcggtatgacgagaccactatgcaacatgcaacttggctccccatgccaattggccgaagtagaattcaaggtggtggctgggcatattggcactagagatttagtgcaggaataattggcaaacagaactttcccaacctctagcggatggggaatgccaaagaagaaggaagaaaggaaaaggtatgaacttgttcgacaccctttccgcttcaaatttcagaagacatttaaagagccatgcacggaatggttagaattgatagaaacaatgtgcaacgagattcttggaactatacgaagaaggaagaccagctgatgactgctgccttcggcacccaagcaaaatgaaggttgaattgtgttatggatgctcttaacttttgagtatttgaatatgaa

SEQ ID NO: 22699 - DNA, 466 bp, Zea mays
  unsure (1)..(466): unsure at all n locations
tttgtttcatctgcagcccattggcttcaggtgatattgtatgtgatgaatngagggcgaaattagatgtgttagagattctaaggctcacacaatttcgaaggatttgcagaagagctgggcgaagaatccctgagaaaattcttgaccatgagtaagaaagttatcccacaaatgctttaattttttcttacttcctgcagtttttttaattcatattatctttatgtcaggcgggtgatatggttaggagatctgaactaccgaatttccttgagctatgaagataccaaaaaacttctgactgaaaataactgggatgccctttttgaaaaggatcaggtgaactcctcaaaataaagcttntcttttctagaaggaagactagttacagaataagagaccaggtcaagttttattttatattacggtgaaatgatactagaatttcactgacatgttacac

SEQ ID NO: 22700 - DNA, 396 bp, Zea mays
gcgtactgcagagtcagagaacaggcgtataaatgaaggcgtgctcaacatgaacgagccgctccagaagatgaggtgccccagcagcagaacctggcgcccccgtccccgatgttgattgagcagatgtttctgatgcagactcatgcagtttaagccatcggtcagactctggccgccattcaacagcagcagcagcagcaacagcagcaagcaccaccccagcctcaaatgcctcatatgcctatagacaagcgcgctgaattcatgagaggtcatccaccaacgttcgctcactcttctgaccccatggatgctgaagattggctgcgcaccgtggagcgggagttgcatactgctcagtgcgatgactcggagaaagatctgtatgggccc

SEQ ID NO: 22701 - DNA, 458 bp, Zea mays
  unsure (1)..(458): unsure at all n locations
tatctatgttgtacttgttgcgtccaggaagttgcgccactattttcaggcacacagggttgtggtggtgacctcctacccattaagggccattctccacaactctaacaccaaaggcaacattgccaagtgggctgcggagcttgctgagttccaactagacttccaacctcgccacgctgtcaagagtcaggtcctagctgacttcatcgtggaatggactccatccccgagtgctcctgngggtccggatcccgattcggatcccacacctgtggagcccagggctccggtcttaaccgagccccactggacgctcttcttcgatggatccgcctgccagcagggtggtggcgctggagtggtcctcatcgacccaagtggagatcaagtgaagtacatggtgcaccttgagttcaaggccaccaacaacatggtagagtatgaagcactgatct

SEQ ID NO: 22702 - DNA, 425 bp, Zea mays
  unsure (1)..(425): unsure at all n locations
agcttgctgtgagtgtgcatattgttgtcaacatgaaatnttctgttgaggaatagctcctcatccatccccgcgacgataaaatttccctacacggattcccacgaatgcttacgggaggacatttcttcctcatttccgttctccacggagataaatctctgtcggggatcttcatccccgcggacatactttttttttattgatgcacaccattataacttatatacattgtcagatgtaagaagtcatcatatgtacattaaagtgaacacatttgtgcattgagtaatcttttgacaagataattatttattgttataattaactatcataaaaaaacattctcacatgtaaaattaatgtgactctcaccaggaacggngatggggaataatctactatccccgttacccccgtggaaa

SEQ ID NO: 22703 - DNA, 439 bp, Zea mays
  unsure (1)..(439): unsure at all n locations
tctnagggagaacacgtgataggttcgactaacgttcaattcgaaaaatatagaccttgtgcagcttgtcaagcatggaaacaggtgggaggagcacatcacagcaagaatgtgatgaccacttcaagacccctggagctgctgcatatggacctcttcggacccgtcgcctatctaagcatagggggaagtaagtatggcttagttattgttgatgatatttcccgcttcacttgggtgttctttttgcacgataagtctgaaacccaagggaccctcaagcgcttcctcatgagagctcataatgagtttgagctcaaagtgaaaaagataaggagcgacaacgggtccgaattcaagaaccttcaagtggaggagttccttgaagaagaatggatcaagcacgagttcttcgctccctacacaccacagcataatg

SEQ ID NO: 22704 - DNA, 388 bp, Zea mays
  unsure (1)..(388): unsure at all n locations
agcttcttctcagcgtcnatgttctactccaacgcgagcacctcgtgctagtggtgttagtacatgggttccaaccacaagacatacattcattctttggcattgtgtttatgaacaatgactccataagtcacatccattgataaaatattatggagaataaatgtcccacatgcaaaaaaaagaatttagagtgattacattattcaaaccaaagaaagtgcatgcaacgctattctttaaatactactccctcgatccaaaaatataatataataatctcggtgatacttatctaatactactcattgtgttagggtaacaggtgaggctcgggagagaagtgagatatatttttactataatagatgaaatgtaaacactcatg

SEQ ID NO: 22705 - DNA, 372 bp, Zea mays
  unsure (1)..(372): unsure at all n locations
gatgtatagaatgacatcagcttctcccatatctttcatttcgaaattgctcgatagatgaaagttgcctagaggggggtgaataggcaagttaaagctttttcaacaaatactagaagcaaactgggtaaaactgaattgatctcaaaattcacccagttaactttggaaatgagatgttctaaatgatccacaggattcaaagtantagatctgagaagggcacttctcataatccacacaccaagaagatataaacaaatctttcacggaatggtgagagaacgaagaacacacactaacacattgagcaagaacacactagacacaagatttatcccgaggttcggtcacaccactaaggtgccctac

SEQ ID NO: 22706 - DNA, 412 bp, Zea mays
aagcttgaagtattcgaaagggctatgtctttctgaactggcgacatgccaaatgggttgaggtttcgaaacatttccatacattgtgaaatataagagaggtaaggacaatgttggcgctgatgccttgtctcgaaggaatgtgttattgaatcaactagaggtaaaagatttgggtcctgaaaatttgaaagaaatgtataaagatgatcctgaattttcagaaccatacaatcattgtaaagatggaaaaggctgggaaaaatatcatatacatgatggattgttgtttagagctaacatactatgggtaccaaattctttcggtatattgcttttattgcatgagacacatggaggcgggctaacaaggcatttggacacaagaagacttatgatatgcttagtgatc

SEQ ID NO: 22707 - DNA, 428 bp, Zea mays
  unsure (1)..(428): unsure at all n locations
ggtcccatcactcctcatgctcctcctcagccgaggcaggttcccactcgactgtccaacccggtggcaagatggacgaccaagtcactccagcaaccatgtcctccagagaacctgtaaaaattatgccacaaacaaggctgagtatactaatactcagctagacttacccggtgtgaggagtctactcctctacctctaaacatgcagctgtttggctgtggggtttggttgccaaaagcactagctgagtttataaatcaagttttagctttgtcaagtttaagtgtgactctcttaaggctaaatgtgtactatctactcattcatggtatcaaacatatttagcaatcaatatcttgtgtcaactcatcccatntccacttgntactcaatgcactacaatggatcaagcagtctcattaacc

SEQ ID NO: 22708 - DNA, 403 bp, Zea mays
  unsure (1)..(403): unsure at all n locations
naacttgcaatcacaatatttcattctgaaagaatatatgatacgatccaacaggaaatgatactatgtgacacatacatagtactatcggttagcaacatatcatttacatctgacactctatatatcatgtccatctattcataagtatttttattccattaatatggcaagaagtgatccagaggaatgctttaacaacttaccccgggagaagaatacattccgcaactaatggcaaactatcaaatgtggctcagctgtctcaatgcaaaattttttctgctcctcagataccttaatcttctaaagggcaagaagcagagcctcgaaccaatggtgtgtgcatcctagacacaaaacaagtaatgctgatatgattcttcggaaagaaaagttgtgt

SEQ ID NO: 22709 - DNA, 460 bp, Zea mays
  unsure (1)..(460): unsure at all n locations
acacatcttgggactaacaaatgttcattttgagaaagacatggtttgtagcgcatgtcaagcaggatagcaagttggtgcccatcatccacacaagaacatcatgacgactgacaagccgcttgagctactccacatggatctatttggcccgatagcttacataagcatcggcgggagtaagtattgtctagctattgtggatgattattctcgcatgggtgttctttttgcaggaaaaatcacaaacccaagataccttatagggattcttgagacgggctcaaaatgagttcggattaaggatcaagaaaataagaagcgacaacgggacgaagttcaagaactctcaaattgaaggctttcttgaggaggagggcatcaagcatgagttctcttctacctacacacctcagcanaatggtgtggtagagaggaagactagaacttatttgacatt

SEQ ID NO: 22710 - DNA, 403 bp, Zea mays
agctttaccaaatggacgtgattagtgccttcctcaatggaccaatcaaggaagaggtctatgtgagcaacctccccgcttttgaagatagtgagtaccctaaccatgtgtataaactctttaaagcgctttatgggctcaagcaagccccaagagcatggtatgaatgccttatagattttcttatcactaatgggtttaaagtcggaaaggccgatcctacactctttaccaaaacacttgaaaatgacttgtttgtatgccaaatttatgttgatgatattatatgtgggtctactaacgagtctacatgtgaagaattagtaggatcatgacacaaaagttcgagatgtctatgatgggggagttgaaatatttcttatgaattcaagtaaagcaactc

SEQ ID NO: 22711 - DNA, 364 bp, Zea mays
  unsure (1)..(364): unsure at all n locations
ctaagctgggccatggaaacaaaatcttgagtctggtgttatatgttgccgntgcaactgaagttcggacgtactccgaatctcaaacttgttttccaaaaaatttctgggcagttttgatttattgtggaaacagcccttgctcgaccatttggtgaagactcgacagtacgaaggcgaattattgttccctgagcggtggcaggggcccgacaatgtcatgccccacgctggaaggccatgtgtgggcaatcaactttgtatactgcgaggggtgcttgccgatggaaaactctggaggcttccaggaccttgtgactcaattgcggcgcaacattgggccagtaaagcctgcggatactta

SEQ ID NO: 22712 - DNA, 429 bp, Zea mays
agcttatcctgtcccatatccatatcatgtggccagttaagatagtccttgatcatacaggcctcatacgcatccaatccttaattaacctgggtagaacatcacctgttcatagcccaagtcccgatttaagtacttccatccttaggattgtttgtgttccttaggatgaaaagagcattatagggaactttgcagtaagatcccaccatgctcccaatgaaaatattcttgcaggtagaagtcatccttcctcaagataacccttgagctatgcattattgcaaaagatagcctctatccacaagatctaagcagggctaagcatttttgtaaatcatattttgatacttcattaagtatctataaaggtatggatatcaaggtaagcaatgcatcaaatagtttcccagcaattcctataaactt

SEQ ID NO: 22713 - DNA, 426 bp, Zea mays
ctcacgcttatgcacaagagaggaagaaagtacacacacaagagcacacgtatcaacataacacaagttataagatcaccagtgcgcaaagtcaacagacacaagaatagctcataaacagcgcctggatctcactaaatcactataatgcgttgcagcggagtgtcggagctatgtgttgctcttggagtgcttggatgctgaaagaggtcgccatgggagtgctttttatagtcccaaaaggtcccatagccgtagtcctttccttgcaaaaacttgccaaaattggctgattgcgagcgcatcggaccgatctgatgcaccaccggaccgagtcaacatgccttgagcccgagatttgattgggcgcctttcttagctcgcgaggcaccgaacagtctggtgcaccttctgatgcgcttagct

SEQ ID NO: 22714 - DNA, 445 bp, Zea mays
cttcatccttacatgtgctaagcggcgatgctacagcctgtccatgctagtcttagctattaagcatgcatctagaccggcctcttcttttgcaaaatcaactaaataaagtgttccgtctagtacacccttaaaagctagtgaaccatcacttcttctaaagacagacacatctacatttgtgaatagacagttatatcccatattgcataattgactaacctatagcaaattatattctagagactctactaaaaacacattagagatagagcgctcattagaaattgcaattttacctaccccttttaccttgccttgattcccatcaccgaatataattgaatcttgggaatccttattcttgacgtaggaggtgaacatcttcttctcccccgtcatatggtttgtgcatccgctgtcgataatccagcttgaacccccg

SEQ ID NO: 22715 - DNA, 428 bp, Zea mays
agcttcacgcgcgcgtacccgctgcttatccatcgttgctcagcctggatgagctttgggcgtgtcgactggctacaagccgacactgttgcagctgtttggattgctgcagctgcaatccatatagagaaaaatactgtagaagccgcagccgcagccggattgcagccgcagcaagccgcagcgaacaagctgtttgtttttttcatcacccgcgcctcgatatgattgtccgtgaaaccttaaaggggtgtttggtttctagggacctaattttagtccctcaattttattccattttagtccctaaattactaaatatagaaactaaaactttattttagtttccctatttaacaatttataaactaaaatggaaaaaagtggagggagctaatgttaatccctataaactaaacaccctttaa

SEQ ID NO: 22716 - DNA, 408 bp, Zea mays
  unsure (1)..(408): unsure at all n locations
acactactgaaactcaagcttctntctgctctcacttgagggcggaggtaccacactggctatctgactggtccatgttacttttatccttgcaatccatgtccattcttctgtggatgatgtggaccacagcgctcttctggtgaaagaactctctgctcctggcttgcaagatgtagcttttgctcagaccgatggaggttgcgctatctcctgcttcgctccggctttcccggatattttcacagaaggttttctctccggcggacttgctttgggagttagacccttcttctttgcacagatgatattgtcctaacatatccccatcttggcggaagcgacttgtctggaagtgaggccatgactacttgatcattgccacccctacctgccccactgcgtgtt

SEQ ID NO: 22717 - DNA, 433 bp, Zea mays
  unsure (1)..(433): unsure at all n locations
agcttgtcaaacacaattataattagtaatgtaataggctgtgcttctgcttatacatacaaacctgctcttcaaatatcacacgcaaaagcgaccatcgcatagtcattagctatcaaagaagttaagaagtgtggtctaaaatttactgaacattcttctcagttaccacttcaaattacttttagatcagcatagtgtgngcataaattactgaacaaactttttcttcctatccgctccagacccggggatatctggacatcagagacactgtacagtgcgtggagctagcaatagccaacccagccaaacctggcgagttcagagtcttcaaccagttcaccgaacagttctctgtcaatgagctagccaaactggtgactgcggcaggagcgaagcttgggctagaagtggagaccaaatcgatacc

SEQ ID NO: 22718 - DNA, 354 bp, Zea mays
atccggatttctccaggattgtattctattataggtctactaaataatgatgccaagttcgactggacctctaaatgcatgtagccctccagcagctgaggcgttattgatcactgctccggtgttgggtcaaccggatatagataagctctttgatgtgtattgtgacacatcgagcagaggactccgatgtgtcctaatgcatgagggccgagtcatagcttatgcttcaagacaactacgccagcatgaggagcattatccaactcatgatttgaaataggccgcaattgtcatgcccttaagatatggcttcattaactgctgggaagcacgtggcatttattcactgat

SEQ ID NO: 22719 - DNA, 472 bp, Zea mays
  unsure (1)..(472): unsure at all n locations
tgtgaagattcttcatcccaacatgggctagttggcgatgccagagccaacccatgttagtcttagcaattaagcatgtgtcgagttcagctctattaaaatctactaagtatagctgaccctctaacacacccttaaatgctattgaatcatcactttttctaaagacagtgacacctatatcagtaaaaagacagttgtagcccatttgacataattgggaaacagaaagcaagttgtaatctaatgaatcaacaagaaaaacattggaaatggaatggtcaggtgaaatagcaattntacccaaacctttgaccaacccttgatttccatccccaaatgtgatagctcgttggggatctttgttnttctcatatgaggagaacatccttttctccccggtcatgtggtttgtgcacccgctgtcgagtatccaacttgagcctccggatgcataaacctacaaaacaaa

SEQ ID NO: 22720 - DNA, 366 bp, Zea mays
ctctctgattcgagttcgaagattcctgttcacacattatactctaaaaacactgttaaatcatgtttttgaggaccttcggaagccgaaggcccccaacaggtccagagtttgtcttacaataaacggtatcctcatgtatgatcctcacgaggaggacacctggaactcgattctttcctgtgcgaccactgatggcatcctttatttgcgtcaaggatttccctcaagatttatgcatgcatgtgaggcacacatttctttgctctcctaagtggtgtaattatagtgttccattgctctcaaacccgatcatgtatctatggtaggtgatgcttcaaatgttacccctattgagactgtttt

SEQ ID NO: 22721 - DNA, 470 bp, Zea mays
tcgggaaccccatacttctagccatctcccggctgacagataattctttattgtctgggaggcagtataagaagtcatcttcgtctgtgccattgaacactaaagcccctttcggatacttcagttcttgggcatagtgtttagcttcaaaaatctcttcttcagataatcattttcccgaagcgtgtcgtacaatataatcaagtacttcataagatgcttcgggagtagaagtgacagttttttcaagcagaatttgttttgcagcttctttttccgtttccttttctctggtttccaaggatttctcctttgcgggctctgaaggcccagcttcggtctcggcctggctctttgcagcttcggcttcgcgtaagtttgtcttattcttgcgttttgaagcttcggcagttttccgtggagtagaacttgaagtcttattatcttcagcacatctagtacgttgacca

SEQ ID NO: 22722 - DNA, 433 bp, Zea mays
  unsure (1)..(433): unsure at all n locations
agcttgtggacccgtancctacctattgggattgccacctcacatatcagcagttcataatgtgtccatgtatctcaactgcggaaatgtgttcgcctacccactgaagtgctgcccgaaccagacattgagatagaaccagacttgtcctatcaaaagtaccccgtcaaggtattaaaccagaaggagagatcaactcgggcaagatcaatcagaatgtataaagttcagtggagtcaccattcagtagaagaagctacatgggagacagaggattttctacgctctcgcttccccgactttctacccaaaggagttggtacgtaacccaaagaccccaccctcacctgccctgtgaattcaattataagaaacacttagataacaaggatagtctaagttgtggatctaacttaaaaagggcttccttctg

SEQ ID NO: 22723 - DNA, 392 bp, Zea mays
  unsure (1)..(392): unsure at all n locations
tangaatgaactaaatgtcttagattctcggaactttgattganatcttgcacacattgctcattntataccttngatcatggcatatctctttcatttggtacaaatgcatatttcttattcttcttgtgccaaagctaagacttatgtgcttccaagagtatttctatacttagtcttatattgaaaaggaaatggagtagtatgcaaaggcaaggcttccactacaactttgtcaataatgtataccctttgccctactcatgntattacattcatatcttgttaaaggtctctaaatttctttgtttttggtgcttaatgccaaagggggagaaattaataggccaaagcaaaaggaccgcaccaccacccttgtctatgaaaactta

SEQ ID NO: 22724 - DNA, 371 bp, Zea mays
  unsure (1)..(371): unsure at all n locations
agctngtgaaggctgcggccttttttgtcgatggcggngaggtgggcggacaggctgatgactgagcgaacgggatctactgccgcggtgtgcctgggaggccgagcgaatgggagccattgcacaggagggtgtggagaggctggtttgctagggcgacgctgggcgctactagggcacagggaggcggctgtgaaggcggcggcgccatgatccggccgcggtgaagcggacgatccgatgagggatgcgcacgggagctgttgccgcggaaactggccgaacgggagctcgtgagccgtgagcatgagtatggcagcggcgctaggggcgcttctgaccggtgggacggagttcaaccaggaagggga

SEQ ID NO: 22725 - DNA, 446 bp, Zea mays
  unsure (1)..(446): unsure at all n locations
tgacacgacacaactacttcaccatcgcgaacaccatcatttcatatatatatctaccaatattcttttcactgaaagtagtaattcaaattttagttcatatatcaacgattctttatcgtaaatatatacacatctttataagtgattaaaatattttatcatcacacaggcctactaatattctactcggtccaccaattcagctaattgactggaatagcgaaataacttgctataactgaatctggctcgataaacgcaagaacctcgaagtcgacgagagttccgtgactcgcaatttattgagcacctagtgagcatcgcgctgaacctctctttcttcttcatctaattccattcttccacattgagcgcttgcgaccttcacacaataaaaaataactaagcacaagcgacaccgattgatcctaccanactcatca

SEQ ID NO: 22726 - DNA, 447 bp, Zea mays
  unsure (1)..(447): unsure at all n locations
tcagctncatctatattgtggatggtctttgagtctgtccaatatccctcagccttcctgccagcttcctgacttccatgaattgcaataggcccttgttccgaaggtatcttcatgcataggtatgctggatgaagaattgcttctaaagcattaagtgtcccacgaccaatgattgcattgtaggggtattccatgtcaacaatatcaaaaacaacttgttcagtccttgtgttgtggacaaatccgaaagtcactagcattgtgatcttgccaagtgctacaatctgccttcctccgaagccacaaagagggtgtgtagcatcatgaatcttgtcctctggctcttgcatctgtctgaaggctttagcaaatatgatatccgctacactggctgtatcaaccagaacattgtggactataaatcccttgatgacacaagatatg

SEQ ID NO: 22727 - DNA, 405 bp, Zea mays
gtacaatctaacaaggtctaactcaaacctcgtattcataacttgtgacgtcgactagctgaattttcagaattctgtttgcacatagaaactactatgaaacactacacgatctcgcaaattctgtatcttcctaagcacattatgacaagcctgaagctcaaacatttttttcagatatttacagagcctgccttgccagaaatcaacgtgctacatcgctagtttgtgagctataaaatcagaggggattggagggactaaaatcctctactttttcaattttgaataataagaagattttagcctctctaatccctctgtgttttagactaccagagactcgaatcctcttcgcggtttaaggagattagaatggaattagtctatttcccctcaacccct

SEQ ID NO: 22728 - DNA, 397 bp, Zea mays
  unsure (1)..(397): unsure at all n locations
tatgctattgcttanacttaatcaatgaacatgatgtgattatgtatgatacgatgatgttatcccgataagggtcttgtgattactttagggggctcgggatgtttcctgagtacctctccgtaaggacttgtttggggagtgacaagccgggataacagtgcaaccatgagggtggaatgggacgcccttagctgattagttagaggaaccggaggagtagttggcttcgccgtaaggccgtcaatggggtccgagcacagtacttgctctgccgaggctggttgcagaggttctttgatttggttttgttagtcacccttcctttaggagatgtactgtgtttatcaaactggagaaacctaatgggctactatgacctctgggaaatctttgt

SEQ ID NO: 22729 - DNA, 433 bp, Zea mays
  unsure (1)..(433): unsure at all n locations
agcttcctctcttctctgccgattgtcattatcagcgcggatgtattcatccatcctcttgaacatntctccagggtctgagggggcttcctggcgaactattgggccgtgggtcctggccgaagccccttgatcatggcctcaatgacaatttcattgngcactgttggcgcttgtgccctcagacgcaagaaccttcggacatacgcctgaaggtattcttcgtgatcttgtgtgcactggaacaaagcttgagcagtaaccggcttcgtctgaaacccttggaaactggtgatcagcatgtccttcagcttctgccatgatgtgattgttcctggccgaagagaggagtaccaggtttgtgcaacattcttgactgccatgacgaaagatttcgccatgactgcagtattgcctccatatgaagatatgg

SEQ ID NO: 22730 - DNA, 477 bp, Zea mays
  unsure (1)..(477): unsure at all n locations
cgagtcggntcttctacaaagaataattgatgcacacagaattgatgaggtcatgaaacacattcatgagaaaataaaggccggtaaggcatactgttttagagaagatgatcaaagcgttgtatggtttaacaaccgcatagttgtgcccaagaatgatgaggtccgtcaacaaattttagatgaagcacatcttagtcgctattctattcatcccggatgtactaagatgtttcatgatctatagcatcattattggtggacgaagatgaagattgaaattgtacgctacgtggcgagatgtgacacttgcagacatgtcaaggccatacatatgataactgctgatccattgcaatctttacctatcccaacatggaaatgggaggatattagtatggacttcattngtgggattacccagacaacaacagggtatgattccatctgggtatatgtgatcgacttacaaagatc

SEQ ID NO: 22731 - DNA, 378 bp, Zea mays
  unsure (1)..(378): unsure at all n locations
agcttgcgtcctgcatccctttctatcgccagaagaagccgcacattngtcataccgatgaaacgatccggtcatcgtgcagtgcaagtggacgttctgttcactggaatctgaagggaaacacctcatcccttcttttttctacttctttattaatggtattggactatcggatcagtacattgtacataaacaatataaacaagtacgctcattgtgtttgcgatgtggcctaacattgtcagcccttttcttttattttcctgctgtcttgttaactgaaaaaagagcaaacattcgggacccagaaccactaccgtccaggttttccaagtttgtttatgtggtcggtcatgggtgtggtgtctacctgaaatc

SEQ ID NO: 22732 - DNA, 472 bp, Zea mays
  unsure (1)..(472): unsure at all n locations
tggaagttttctcaacttgcgttaggttntacccctataattcctatttatggttaagttccctatccaaggtcctatttgccaaacactaaaacaatacatcttgtttgaaacttttgcctattgaatgcactctaggtgtatcaaacatatgcaatgcaaatgcttatgatgccatgctcaagttttagatacagaaacaccaggggtgttacatccttcctcccataaaagaatctcgtcccgagattaaaagtcctatggtaaagttatggaaaaggaaacgcgacatacttttatttccttatttctggtacaaggcacgggtgatgtggaggtcactctcttattacacagttatacaggctttacaatntacaagaggctaaaaagcctgtgaaattcttatctaaaaagtctcgagtgtcccatgtagtctcttcttcagaatgtctggttcactgtatcttat

SEQ ID NO: 22733 - DNA, 384 bp, Zea mays
tctggatccgccactggttgctgaccctagttggcttccgccaggagaaatgatgctgcctttgcaaaacacacacgggatatcgtgccctgaccacctaatgccaacgtggtgacaagcgatatggagcttttaacactagctcaatgtcgattggacactggaacagtacaacgtatgttgggttcttccaagaaccactctaagctcaaatgtggaatttttctgagacatttaatccaacggtaaagccagctatggttcacacagaattttacctatctttatacaggaaatggcatgatcaccggcttgttgtgaagaatgcctctcttcacgtaactctgtctgagacagggtactatgttaagaccgtcggatttg

SEQ ID NO: 22734 - DNA, 440 bp, Zea mays
  unsure (1)..(440): unsure at all n locations
tctanagggaanacacgtgataggtttgactaacgtgcaattcgtaaaagatagaccttgtgcagcttgtcaagcaggtaaacaagtgggaggagcacatcacagcaagaatgtgatgaccacttcaagacctctggagctgctgcatatggacctcttcggacccgtcgcctatctgagcataggaggaagtaagtatggtctagttattgttgatgacttttcccgcttcacttgggtgttctttttgcaggataagtctgaaacccaagggaccctcaagcgcttcctaaggagagctcanaatgagtttgagctcaaggtgaagaagataagaagcgacaatgggtccgagttcaagaaccttcaagtggaggagttccttgaggaggaggggatcaagcacgagttctccgctccctacacacctcagcaaaatg

SEQ ID NO: 22735 - DNA, 398 bp, Zea mays
  unsure (1)..(398): unsure at all n locations
agctgtgaatgacttgccgattctacagatgccacaggttgattaccaacgtattctggttcgtgggagaatagcatgaagcagtatgtaagacctgctcccgctgaatctgacgcgcctctgcttcggcaatctccttatgtttctgaatggtgacctancatgttcttggaatgtggctcttgtattcaccacaaaataagcaatagagccttttgggctgatccccataccttcctccgaagcctttgccacccctgccccttggagctggtggcctgaaaaagccttgctgttgccctgaggattgtgagctatgctgtggcctttgaacctggcttcctctatcatcactctgggtggagttgaggattgatctgacatgccttggatggatc

SEQ ID NO: 22736 - DNA, 224 bp, Zea mays
taggatctggtatctccatcgtgcattcggacatcaatacactatgcatcctttatgaataactacacagagggcatgagacacgatgaatctcttactgaatcgtacatgctctgcagatgatgaatctttataacgaactgcaaacatgacacgaagagtgctactgtagacttgcacctatgatggagcaccgacctacagatgcaaatctggagcctaac

SEQ ID NO: 22737 - DNA, 323 bp, Zea mays
  unsure (1)..(323): unsure at all n locations
catgcaagcttgtccacttcagccanntttgacacnngcgtgaggacggtgatgtgtactcatccttgcttaccaccaaacaccatattgtccgcattgtcatcactgctcaggagaatgtgatactgtgcaatgaaacttgcatgaatgtcatgactactacgagacctatgtcgtgggtggcggcaacccaccatcagctgtgctgggaggctttatctttactgncgttggctagcactttgatctatctgttaagaccatgactatggggatgtctataactctgtgatgtaataagttaatactctcttatgatatta

SEQ ID NO: 22738 - DNA, 420 bp, Zea mays
  unsure (1)..(420): unsure at all n locations
ctcaagctgacaacgaggagatggcgctcatcatcaagagctgccgcatatcttttgcaaggagggggaaagactacataccccgctccaaaatagtatgctacaaatgtggtacgcccggccattttattgctaaatgtccattatctaatgatagtgacaggggcgaccactataaggggagaacaacggagaagaagatacattacgaanagaatggcggcgatgcccacgtgtgccgcgagtgggactccgacgagagctccaccgacttctcctacgacgaggacgccgacaacatcgccgtctccaatggacttctcttcctcaacagcggccacaagtgcctcatggtcaatgagggccaaaagaagaaggtaaaatcaagatcctccacttaatatgaaacctctagtgatg

SEQ ID NO: 22739 - DNA, 428 bp, Zea mays
agcttcggcgatggttaaaaattttggcaggaaaacagtgcaaatagcaatgaatgctgtggtacttcacacctactcgtctgtttatatagtgctgcaggtaagaaggcgaagcgccagagtttttacaccaggcgcacacccgcttgcgctcgctgcgcggtggaccgcagggacaaacagtaaactctgcaaggtgggaccgctgcgtgctgggaaattaaatcgtttctcggcaacgagctcagggaaggtgttttttggaccttcggctccccgaagcttaagagacttttttcacggatcaagctcgttacgaaaaacgatctatcaccgcgaaaggggctactgttgggtccatgcttcgtcgccgaaggtcttcaagggagaagcggcttaaaatgtgtgagcaggtattttcggactcg

SEQ ID NO: 22740 - DNA, 440 bp, Zea mays
  unsure (1)..(440): unsure at all n locations
ggtactactactcacaattaatggatatatatgatgttctatatatcgcatatgcattatgatattcgactatatctataggaaaataacaatatttatgatactaatttgagtctaaaatcataaaccttgtgatagatgtggttcgactacttgtatatatgatgtccaatgcattgcatatatgtcataatgacgtcgatatacctgtgaatatcaaccatcgtgctgctagtgttatttgcaggttttggaaacctccccgtgcaggggaggtgctgacgatttctttgtcgatatatgttagatagcgggagataggcacaagtagtggtaagtctgccgatggcatgcgtggacctaaggatggcggtcgttgatgtgaattcatatgaacanagtttggcaatatattttttgtattaatagacttgtgtttc

SEQ ID NO: 22741 - DNA, 429 bp, Zea mays
actttatcaaaggacgcgattttgtccttctcaatggaccaatcacagaagaggtctatgttaacaacctcccggctttgaagatagtgagtatcctaaccatcgttataaactctctaaggcgctttataggctcaagcaagccccaagagcatggtatgaatgccttagagatttccttatcactaatggattcaaagtcggaaagaccgatcctactttattcactaaaactcttaaaaatgacttgttcgtatgccaaatttatgttgataatattatatatgggtctactaacgagtctacttgtgaagaatttagtaggatcatgacacataaatctcagatatctatgatgggggagttgaagtatttcttaagatttcaatgaaagaaactccatgagggcacctttctaagccaaacaaa

SEQ ID NO: 22742 - DNA, 373 bp, Zea mays
  unsure (1)..(373): unsure at all n locations
tggataaatccaagataaatctgcggtaatagtcttccagtctaaggaaacttcgaacctgatgcacagtggttggcggtttccactctagaatatccttgacgttgctgggatcaaccgcaataccatntgcagacaatacatgtcccaaaaattggatatcctgaagccaaaatgcgcacttgctgaatttagcatataattgatgttctcttaagcgcgttaatagaatccgcagatgctgagcatgctcctcttcatggaataaatcaagatatcatcaatgaagaccaccactatattgtccaactcgggcataaataccgagttcattagatatgtgaagtgggcaggagcattcggtaatcccaaa

SEQ ID NO: 22743 - DNA, 429 bp, Zea mays
agcttctaaatggagaacacgtttattgttcgactaacgtgcattgccataaagatagaccttggcagctggatcagcatgtaaacaagggggaggagcacatcacagcaagaacccgatgaccactttcagacccctgtagctgctgcatatggaccttttcggacctgtctcctatctgagcataggaggaagcaagtatgggctatattattggtgatgacttttcccgcttcacttgggtggtctttttgcaggaaaaaatcgataaccataggactcttaaacgctttctcatgagagctcaaaatgagtttgagctctataagaataatataataactaccacggggtccaattcatgaacctttaagtggtggagtttcttgaggaggaagggatcattcacgagatcttcggtccctacac

SEQ ID NO: 22744 - DNA, 413 bp, Zea mays
  unsure (1)..(413): unsure at all n locations
gctacatgccttcttatatttctccatagcaagaaccttatcggaacactacnccacttacaaagaatgagggtagatctcttgaatcttgcggatttgaactccttgaagaacctcataacaagggtgttacggagccttcttctgctgttgctacttgagcaggttgcggataaatgactaacacatggttgattctgggagaaccttcttcttatcctctcttcacatatcttcttttcaccgaccctttctttctctttgctcttcccactggaggattctatcaaagagtattaccatcatacacaggaggaaaccgcagaagtttgaccatgctcaactagtttcaacccaagaatcaccaatcattgtgatcttatgggcgaaggagatgtgaaatgggttgcttg

SEQ ID NO: 22745 - DNA, 401 bp, Zea mays
  unsure (1)..(401): unsure at all n locations
agctttaccaaatggacgtgattagtgccttcctcaatggaccaatcaaggaagaggtctatgtnagcaacctcccggctttgaaaatagtgagtatcctaatcacgtttataaactctctaacgcgctttatgggctcaagcaagccccaagagcttggtatgaatgccttagagatntccttattgctaatggcttcaaagtcggaaaggctgatcctactctattcactaaaactcttgaaaatgatttgtttgtatgccaaatttatgttgatgatattatatttgggtctactaacgaatctacatgtgaagaatttagtaggaacatgacacagaaattctagatgtcaatgatgggggaggtgaagtatttcttatgatttcaagtgaagcaac

SEQ ID NO: 22746 - DNA, 386 bp, Zea mays
  unsure (1)..(386): unsure at all n locations
taacaatgtatccgtgttctgtcctacttcagatcctgctaaagcgtcttcgggccctccgccgataggagacgacgacatctaaaagatggctgaagatattttggacgaagtcgtcaatcggctcctatacgaggctgcagaagtcgttttgagagaagattgagtatattgtgtataaacttctggaatgtaatatactgtaatatcttgtaaccccacatgtaatatacctatctttggtagtcaattctttacgatgcatgaaactatatacgtaccgcttttgagtctttgacgaanaaaacaccttcccttcttttcatgcttcgtgaagaagaaagtttctttgcacaacaatatccagagttctgatgaataatatc

SEQ ID NO: 22747 - DNA, 415 bp, Zea mays
agctatacacatgaatttcttgttccaggcttttcaccaaaagcaaaaggcagctcatcttcataatcatctcagcgaaggcctccctaagtgcatcttgatcaaacctccaattagaaacaccttccccttgaattgcttgtaaatatccttgctttccatctttttcaaacttgttaggattatgcttgcaactttgtaggtgtctcttcaaggcagatgtaccatgtcccttagagtctgctttcatgttgcgatggcagtacttgcattttgcagctgtcataatgcctttatcatctttgatcttggtgaaatggttccacacatctgatcttggtgccatcttcttcctttcatgttgtgcacaatccttggcaaggtcaaccacatcttgatcagcagccgcttgtga

SEQ ID NO: 22748 - DNA, 331 bp, Zea mays
  unsure (1)..(331): unsure at all n locations
actcagctncatatatatattgcgaataattacaagatacatctctatcgatctatggagctacagttatcttggtcttgcaggcgggattgccataaagctagtgtccactcttaggtgagcggtaccggtgcttaatccccactggagcgggggaaccaccatccaagtgacgacgttccgcgcgctcagctcgtagcatggcgatctctacacgagccctactcagctcatctaatgcatggttcagctccgttgttatctcggcggctatgctgactgtgctgcttaccctacgattgccctcaccgacaggtgagacatatacgcc

SEQ ID NO: 22749 - DNA, 423 bp, Zea mays
  unsure (1)..(423): unsure at all n locations
agcnttgggtgcctttactttctacttactacatgggataataggccataaggttgtgcattgaccaaggccttgggtaacacctggggtgttacatggcgaagggtaaatgatacagttagagtggagtggaagccttgttttcgccgaatactccatttccctttcaatgtatgactaagtatagaaatatacttggaaacacattagtcgtatccttggtaaaataaataagacatatgcatttgtaccaagtgaaagagatatgatcaaaggtatataaatgaactatgtgtgcaattattcaatcaaaactccgagtatcaagtatatttagctcattcctaagcttgctaaaggtattctcatctaaaggcttggaaaagatatcgggttactgttctttgggctacataaacaatt

SEQ ID NO: 22750 - DNA, 406 bp, Zea mays
  unsure (1)..(406): unsure at all n locations
tgtgaagattcttcatcccaacatgggctagtcggcgatgccagagccaacccatattagtcttagcaattaagcaagtgtcgagttcagctctattaaaatcaattaagtatagctgaccctctaacactcccttaaatgctactgaatcatcacttcttctaaagatagtaacaccagtatcactaaaaagatagttgttgcccattttacataattgagatatagaaagcanattgtaatctaaagaatctacaagacaaacattggaaattgaatggtcaggtgatatagcaattttaccaagtcctttgaccaaaccttgatttccatccctgaatgtgatagctctntggggatcttcattnttctcataggaggataacatccttttctcccctatcat

SEQ ID NO: 22751 - DNA, 434 bp, Zea mays
  unsure (1)..(434): unsure at all n locations
agcttaacccagaaaaatgtgttattgtagtactcggattcattgtcagccaccgaggaattgagccaactcggagaaaatcaaagctatcatgagaatggaagcaccacgatcgcagaagaaagtatagaggcttaatggatgcatggcagctttgagcaggttcatatcggtgctaggataaaaaggcctaccgttctacaaattgctcaagaaggtagacaagttcaagtggacctcanaagctcacgaagcccttgatgcactgaagaagttcctgacaacaccgccagtattaaagccaccacgccgagccacgccgagtcagccggccgaagatctattgttgtacatctcttgcacgactcacgtggtgagcacccgtgtggtaatcgagcgagcataagaaagacatgcatatccagtacaacatt

SEQ ID NO: 22752 - DNA, 475 bp, Zea mays
  unsure (1)..(475): unsure at all n locations
tgacgacgaaggttgtcgtcggtctcccgctgacgtcgagccacctcattgacatctgcagcaatattacggcacatagagaagaaggacgcaaatccatgggccatgcgggcacccatcccacgtccacgacctcgaccacgaccacgaccacgtggtgtgggagatccgcggccagnggaagggcgcgaggcaccatcatcagcagcagctgcagcagcaccggcagacggaccagcagatgtaggaccacgagaactggagggagctttcctgagacgcccagctggattgttgggatcaatccagaacggagtgtatgactgatgtcgggtgcctttctcaaatctgaattgggtcacgacctcaatcatcttcataatgaatggngcatgaagacaccccttcanagganagcaagctgcatgaataatctcctggccaatcatgtcanagacattaatcctctctgagc

SEQ ID NO: 22753 - DNA, 460 bp, Zea mays
actcaagctagtacttcgactcaacataggctggttatattggagcgctatttcagttcatgcagacgcactcaccgttgatccgccttcgatcacgccaactgccatatctgtccccgcggctgactgtctcatggccctcatgcctggtggtttcgtcaggccacgcgcgggacgcctcgatagcgctgcattggttaaaaaattaccttctgtctttagccgcggccccgaggaggcgcactactggcgcgtgcggcggttcgctctttctacacccgggaatcgacacccaaggattatgacctgtgggcctggcccccccgtgtcatagactgtgctattgtcttttgcggcggaaatgaagaagcgcgctaccgcgtgcggtggttcgctcttcaagcgcgtgcggtggattgttccgtctgcacccgaaatccgactccaaagtgatgacttg

SEQ ID NO: 22754 - DNA, 380 bp, Zea mays
agcttagcgagttccagcaggatatcatccagctcgcctccgtgctcaacggcgaccaccacctgccaccctgcaggaccggatcaagaacgacatgaacgtcagggaaggcatcgactacatgaaggccgccgtcaaacgctacttccaggccggcgcgtccgccaaaaggatgggcgtcgacggcgaccagatcgtcaagatgagaccctccctcaccaccaggatccaacgcccatagacagactgtctaatcaaagcgggatcggttatgttcacaaacaggattggactacatatatatattctaaaaatacagatcacattcagtgctatagatatagatgtccaataagcatgagacccgcgagctcgacacg

SEQ ID NO: 22755 - DNA, 425 bp, Zea mays
tcgggactagcactatgattgtgtggaatgtgtgcatttataagctagtgagtggtgtcggaacgttggttatgcagcattaccttagaaaatcgggtggacatacagcacaatgtgagttgtgcggtattgtcaaatctcctttcgtatcatgtgcttatgttgccatccggtatctgttaccatcaatctgtatggaccatttggttaaaacatttaacggtacatctttgtgtgccatccacgtactgtcttggacagacgctataatatgaaccggagtaaaactgggtgtgataccttatgtgtgttactctacctactctacatacgttcagggataacaggaactatgctcattaacaaaaagcaaatatctattcaatgaagaatggttgttaccgtgatgtgtattgactctatca

SEQ ID NO: 22756 - DNA, 439 bp, Zea mays
  unsure (1)..(439): unsure at all n locations
ttaccctgcggactggactataagtcggttacggtaggtgtaccttattcatttgaccatttctaacatttgcgtaatgaggactctagggagaagcctcgtagtgagaccctggccattcacctcagaagtgaatacgggtctagctaacccgggctagaagggaatcgcgactcatgggtaaagatgtgccacctctgcagagtgtaaaactgatatatcagccgtgctcacggtcatgagcagcctggactcctcacatgataattgaacatgaagatggaaataaatcgagatccgatgatctgccaatggtttgcttaagtggtttcacttaagtgtttgatatactcttgtacctttgnttaatgggaatacttgggattcacacttattagtaagacgtgtgttgtaataaaatattgaccactaaatgcta

SEQ ID NO: 22757 - DNA, 373 bp, Zea mays
agcttgacatcactcagtgcatttaccgggagaaggttttgtacgcctcgggaagactcgagggtctgtgtccgactggtgggatgccttcacagcggcacaccccaatgcggatacaataacctggcaggagttctaagcgaacttccgtgctcaccatattccctcgggaattatgaagttgaagaagaaagaattcctttcccttactcaagggaatatgacggtcagtgagtattgtgatcgcttcactcagctttcacgctacgcaccagaagaagtggacacagatgagaagcgccaagagcatttcctagaaggattgatcggacctctgaactatcaacttcagagtcatacttttcccaatttc

SEQ ID NO: 22758 - DNA, 475 bp, Zea mays
  unsure (1)..(475): unsure at all n locations
ctaagctantgaagctgctngccaaaatgatttacttaagatctgagttgctgtgtctgaagctttctatgaggggatagtatatgctatatcagcgagagctgtggagatgagacagctcaattgtatgtttcagatgcatgggccttgtcttgaagccccatggggattcttataggcagtggagctagcttagcactgaactgtgcaagctttgcaacttggttagtggtcatgtgcagatcgacttttgtagcatgttttttaataaaaaccattggcgcctcgaagcatgaaagaaacatggaaaaaaacaatatgcacctgaactaaacactattatgtgggctagacctgtgttatatggatactgaaatgcctatgatgctaagacctatgcataaataccgtgcaaatggtacgttntttttactctattcgcgcttaagggcatgtgtgacatgactcctgagca

SEQ ID NO: 22759 - DNA, 411 bp, Zea mays
agcttatgaagattcttcatccctacatgtgctagtcggcgatgccagagccagcccatgttagcttagcaattaagcaagtgtcgagttcagctctatcaaaatttactaagtatagctgaccctctgatactcccttaaatgctattgaatcatcacttcttctaaagacagtgacacctacatcagtaaatagacagttgtagcccattttgcataattgagaaacggaaagcaaattgtaatctaaagagtctacaagaaaaacattggaaatggaatggtcaggtgaaatagcaattttacccagtcctttgaccaaaccttgatttccatccccgaatgtgatcgctctttggggatcttggaatttctcgtaggaggagaacatctccttcctccctgtcatat

SEQ ID NO: 22760 - DNA, 431 bp, Zea mays
  unsure (1)..(431): unsure at all n locations
tgggccttanaacaagaggatacaaggagttgtattgcttttgtgaangcttntacgaatcactcgaagcgtgagtacttttgtgaatgattttgcaaagtgtttgctaatatgtgcaaaacataataacatgtgtaggttttgtgaatgattctgttgtggtgcttgatgatggtttatgtgatgtggatctattattgtgcaatactaattaaatttgtatatttatgtgattatgtgtataaaaataggngattagtgatgcctttgtatatataaaagttgttgaatgctaattaatggtatattatcattattaacgactataactagggacaactttctgttggttgctaaatgtatattataacgactcacgattggttgctaaatctatagtacaacaacctacagctggtcgctatatatac

SEQ ID NO: 22761 - DNA, 431 bp, Zea mays
agcttctaaaggtagagcacattttattattaaccaatgttcatcttgagaaagacagggtttgttcgcatgccaatcacggaagcaagttggtgcccaccatccacacaagaacatcatgacgaccgacaggccactggagctcctacacatggacctattctgcccgattgcttacataagcatcagcgggaagtaagtctgtctaggtattgtgaatgattattctcgctttacttgggtgttctttttgcaggaaaaatcttatacccaagagaccttaaagggattcttgagatgagctcaaaatgagttcggcttaaggattaagaaaattataagcgacaacgggacagagttcaggaactcacacattgaaggctttcttgatgaagagggcatcaagcatgagttctcttctcccttcacgc

SEQ ID NO: 22762 - DNA, 378 bp, Zea mays
  unsure (1)..(378): unsure at all n locations
tcctccatgcgcctaagggtcacctttatagcctctaangcacctaagagccgttggaggccaacttggaaggccaaacttgccttctgtcgggtggtgnnntnnnnntatttatnactataattaataattaatataaaaatcatccaaaacttataaattctacaataattaataaacaatatattatgttgcacttatataatacaacaaacaaaatattctaacaaataataaacacaaaataaaaaaaggattctcattaaataatgaaaattataattaactaaaaatataataaacaaataactacatacataataacttatataaagcataacataaaaaaaatataagcaatatatagtaaataaatca

SEQ ID NO: 22763 - DNA, 411 bp, Zea mays
agcttgcactagttattaattgttacattgactctcgccaagcaccccccatgtgcgcaagtatgaagtgattgtttttctgcctacccacttctcataaggggcttgttttcccatactaatcctatgccgaacatgacacctagttccgattgcctgccccaccttgctttaaataaattgcatgtgtctaacatggcattcaccaagtcagtctacgtacagtaatcctgtttgattcagctgaatagggaggtgtcctctcatgaataatgccatgttatatacataaatctttaaagactttgggaaagtattaaccaccaccatctgatctaagacatttgatctttctctctagatgatttcacatttagccttatagattttaaaatagcctaatgcttcatc

SEQ ID NO: 22764 - DNA, 395 bp, Zea mays
  unsure (1)..(395): unsure at all n locations
tgcacgagcttgaaccgaggacccgcgccaccataatagctaaatcgtgctcgccggagttcagaaccccgccggcgcacgtggaccgggtaagtcactgcanccattttcgattcaatgcacagatagcctctacatcaccccgtgaagctcaccgtgtcattggattgaactagatcgccgtggtttgaccgaaacactcgccgccgacgagagcccccgcctacgcacgtagatcggacgattccggccacccccgccgtcgagccgtacaccgttgtgaccgtcagaacctctcggagccaaccctgcccctcaccggacctctctcgccgccggtaagccgcaccacccttttctttctcgcgggtactgtttaaacctatggagggact

SEQ ID NO: 22765 - DNA, 412 bp, Zea mays
agctttagcagatcaaggagtttacaccttccccgtcaaaaaagggagaagacacatttttacttatctcggttatgtcatcggtgtacaaatcgaatatataccatgggattagcttcgaacaagttgtgggtctgaagaaacgaatggacctcaaagagacgtatataacatgttctatgaaggaaatgacaaaattgcccccattacgtgccatagattatggtgtgaacccggtctggtcttaagaaactcggtggcgagttgacatatgcaagggttaagcgctacatatgtcgtgtgattggagatccccagctgggtattgattgattcggatcgacggtacttctcggacatgaaaaacttggtttctgacttacacgtaacaattcattgactgatgggatga

SEQ ID NO: 22766 - DNA, 433 bp, Zea mays
  unsure (1)..(433): unsure at all n locations
tctaaagggagaacacnatttaggattaacaaatgttcattttgagaaagacagggtttgtagcgcatgccaagcaagaaagcaagttggcactcatcatccacataagaacataatgacgaccgacagaccactggagctcctacacatggatctattcggcccgatcgcttacataagcatcggcgggagtaagtactgtctagttattgtggatgattattctcgcttcacttgggtagttcttttgcaggagaaatctcacacccaagagaccttaaagggattcttgagacgagcccaaaatgagttcggcttaaggatcaagaaaattagaagcgacaacggaacagagttcaagaactctcaaattgaaggcttccttgaggaggagggcatcaagcatgagttctcttctccctacacgccacaa

SEQ ID NO: 22767 - DNA, 404 bp, Zea mays
  unsure (1)..(404): unsure at all n locations
ancttatgaagattctacatcctaatatgggctagtcggcggagccagagccgacccatgttagcttagcaattaagcatgtgtcgagctcagctctatcaaaatctactaagtgtagctgaccctctaacactcccttaaatgctattgaatcatcactgtttctaaagacagggacacctacatcagtaaaaagacagttgtagcccatttgacataattgtgaaacagaaagcaagttgtaatctaaagaatctacaagaaaaacattggaaatagaatggtcaggagatatagcatttttacccaatcctttgaccaaaccttgatttccatccccgaatgtgatagctcgttggggatcttggtttttctcatatgaggagaacatcctattctcccct

SEQ ID NO: 22768 - DNA, 386 bp, Zea mays
tgcattactcgatgtcatattctatgcatggttaatctacttgttctcttgtatggtggactggtggttttctaaattcaatggatggatgtatgtatgtttgcacccgcatatagaacaatctggttgaagagcccgaggaactcgcaagagaagcccctgagcaacaactcggttgtggaagcaagtgtcccttgacctatctctgtcctattcaatctttaattcaccttccgcattacacatttatgcctaaggatttactaactgtgttatccatatcctctgttacctatttgggttggatattattgttagctttattctattgctcaactatatcaatgaacatgatgagttatttatatacactgctttccctcttc

SEQ ID NO: 22769 - DNA, 409 bp, Zea mays
agcttatgaagaatcttcattctaacatgggctaggcggcggtgccagagccaacccacgttagtttagcaattaagcaagtgtcgaggtcagctctatcaaaatctaccaagtatagctgaccctctaacattcccttaaatgctattgaatcatcacttcttctaaagacagtgacacctacatcagtaaaaagacagttgtagcccatttgacataattgcgaaataaaaagcaaattgtaatctaaagagtctgcaagaaaaacattggaaatggaatggccaggtgatatagcaattttacccaatcctttgaccaaaccttggttttcatccctgaatgtgatagctcgttgaggatcttggtttttctcataggaggagaacatcttcttctcccctgtcat

SEQ ID NO: 22770 - DNA, 389 bp, Zea mays
  unsure (1)..(389): unsure at all n locations
agctttngctaacatggtctagctattggatccacatttagggcatgttctattatgcttctgtcactccaaataggtcatttgctaactaggcaaagacatccttgttgtgaaataaaaacctttagagattaactcttgctctgaagttagctgattgccgaaaaaaaccctcttgtctgcaacatcatcacaaagaagtactgactttggctgatctaacgaagatggcttttcttttactggtttcttagattcctagatttgcgcttcagctttttctatgttataaacaatcattggctcttgtagggtcccttttgcccttcttgctgcttcttggctgccataaactgatatcactccttgattggtgggtatcttcatgc

SEQ ID NO: 22771 - DNA, 487 bp, Zea mays
  unsure (1)..(487): unsure at all n locations
tactaagctgttcgtcacacgcagcaggcccctacctggcgcgccaactgtcggcgtttcaagaccgtggggtcccttaggccgacaagtgagtgacgcgtgccccagcccatatgggtcgagcgcgtgggcgatcgcgaaggggggaaaggagcgaggcggccggagaccggcgcgagagaggtgggaatcccgcgaccttcgtgttcgttccgtgcccaggtcgggtgcgcttgcagtangggattacaagcgtccacgcgggtgagggaagcgagcggtcccaagagagcgcttgttccgtcctcgtcccgcgcggccaaccctctctaagagggccctggtccttccttttatagacgcaaggagaggatccaggtgtacaatangggtgtagcagagtgctacatgtctagcgagggagagttaatgccctgagtacatgccaatgtggcagccggagagatcttggaacctactatcgtga

SEQ ID NO: 22772 - DNA, 287 bp, Zea mays
aggacgccatatttccgattgtgtccctgcagcccaccagctgaagatgatgcccatacatggcagacataaccacgatgaacgataacgtggtaagggtgatggcgggcaattcgaattcaacttaagaaccaacagacagactgcttcctccggtcacacacttcattccgctgaggggcaggacagcaagctgttgctgccatatgagctgctgaatgaatgagccaagcaagcctggctctgccttcattccatgctacgagggctaatccatcatccagtga

SEQ ID NO: 22773 - DNA, 430 bp, Zea mays
agcttcatatcatggtacatcttggtgcttcccggatgcatagagaatttggagaggtgagcctatccaaaattttcttcttgagatcctggtccttatgaattaccaatctgcttctgaaccataacacacccttctcatcctggcggaaacaattatacttctcaaccttctgatggagattcttcttgataatctgcactcccttgtcactgagctgggccctgataatctggtcttgcaaagctggctcaacagaaatgtgagacaaagaaccagaaggaatcacttcaatttgcatcttgctcaactcatcacacaaggtgttaacacgagaatccatcagaatacagttgcatggcaactttcgactcaggcatcagctactacattaactttccctgggtgataatgtacctccaggtcataa

SEQ ID NO: 22774 - DNA, 472 bp, Zea mays
  unsure (1)..(472): unsure at all n locations
ggacattgtcttcctgttggaagccaatgccatccttaatgttcatggcgtctcccattatagagcatacttctagcagatttaaatttgtcattttcgatctcatgctcattaatcttgctagataggtgtgctatgtgatcattatgttggttaattaaagctaggtgatcatgaatagcatcaacattaatgtctctacatctcatgcaaatagaaacatgatcacaagtggatgtataggagttgcaaacatttaattcatcaatcttagcatgtaaaatagcattctcatttctaagattggaaacaatgtcattgcaaacattttaattcttagccttagtaattaatttatcattctcaatcttaaggctagaaatagattcattcaatttgtcaattctagcaattaagctatcattatcatgtttaagattaacaatagaatcatcacanacatttaacttct

SEQ ID NO: 22775 - DNA, 428 bp, Zea mays
agcttgtgagagtgataacatgtattacatgagttcatctctgttctaattgtgaggcctcaataaataaattgatctatgattatgtacttgtcaataacacttagggaaataataatctattcccaaatgaaggtatgttgtagttcatgttatatttagaattcattatcccttatgtaatagtgtgttcttttaagatgtgttccaatgtttgtacatgtttggagtgatgttcatttgtactttccaaatggattaaatgcatactcgctttatttagacaacgagtagtccgaggttccttggtgttgttgtggataccttcctgagcaacaacctggagaaggcaagtgtcctctgacctattatggtctacatactttatgattcattgtcccgctttactatatgataccttatgattg

SEQ ID NO: 22776 - DNA, 433 bp, Zea mays
aaactcaagctttacagaagaagactagcctctcgtagcgaataaggcggttgtgccttattagcgacaaatacatactgatatgcacgccactgaagaaactccactgctggcctcagcataagaaataacaccacctgccgaagttgatgcttctgccgaagctgagactgtcgaagctaccaatctggagagcacattactctgctattgataaagtgctcttggaatgggctgcggatgacactagttgtggttacataataagacctggccacagtgcctgagagaggaacgaaattgccaaagatacttccgaagaaaaaggcttctagtttgaagatctaattgttgaacaattaactaacgttgataaagacgagctgtacgagtatactatatccctgtggataacatccaggggccatgctct

SEQ ID NO: 22777 - DNA, 150 bp, Zea mays
agcttgtggagatactttcttttctcatccagacccacgttatttggagattgctagaagaagtattgtcaatatactgtatgctgctcataatgtaaacagccacgcggaaatcaactctgccgatcttccgaaaaggctccttctgcc

SEQ ID NO: 22778 - DNA, 472 bp, Zea mays
  unsure (1)..(472): unsure at all n locations
ttatttataaccttttctattaaattcttaacataatatttagttatactgtatccatttacttaataatattcattttacaacagcatagagataggacaaacatgtttgatgtaccgcgtcctgacccatgtggccatcaaaccattcacatccaactcccactgatcagagaattgatttcaagcaagctgaactagcttccatcccaccatcgacttagattcatacagaagctgtcacattatgagacggaggttggcaaggcttgttcagtgatcaaatagactctataccagattgttgagaaacagtataatctatctaatgtatttgccgagttaattgatgaggtcattcgtgctgagtcagaggagaatgaagatggttatgatgtgcagcaccattcaaaaaatcagatgatattcatcaccattaggcanggtagtcagtttactagttttacgcgact

SEQ ID NO: 22779 - DNA, 432 bp, Zea mays
  unsure (1)..(432): unsure at all n locations
agcttttgatgccttctgctttcttgtggttcgaggcctccgaatatgacggtgacctccctataacgcgcgggaaagctccacctctccccctccctattgctgaggctgcctangttcgccaggctctcctcggggctggggaggtggcggtggctggaacggtcggccgtgcccaacagagtttttgaaatctctgtagttccccagagtgtgctgcatgtccttgtgatacggacactgggagtcgaggatctcgtctagtgttcatacccctccgcggggtgcgccacgggctcgagcggcaggtggcccgacggtgtgcacctcctcgcggggtctcttctcccagcgtttgtttggttactggttcatgtcccttcgtggtgtgggcagtacgggctttgtgcctccaatgaggtcttgggctcc

SEQ ID NO: 22780 - DNA, 405 bp, Zea mays
  unsure (1)..(405): unsure at all n locations
ttggcacacatttgaacttcagctcagcttattacccgcttacagacggccagactgaaagagctaaccagatcttagaagatatgctgagagcctgtgcgttgcatgacaagtcaggatgggacaaatggttaccttatgcagaattctcctacaacaatagttaccaggccagcttgaagatgtcaccgtttcacgcactctacggacggagttgtaggactccgctgcactgagaccagcctggagagagacaggtgtntggccccgacatcttgcttgaagccgaatagaatatcaaaatggttcgggagaacctgaagacagcccagtcaatgcagcgaagctatgcggaccgaatgagaagagaactgagttttgaagtgggagactacgtctatctgg

SEQ ID NO: 22781 - DNA, 482 bp, Zea mays
  unsure (1)..(482): unsure at all n locations
atacatactcagcttgcaacacatcntggacacatcgctcgatgggttcgattatgttantctacaacaatctacgaacccgaaagtcctttgtgttagcactaagtaaactcattacctttctagcacaagttgcaattgtgggttgcctacttacatgaaaatcaactgacacagtaagagtggaattgttgccaatgggacaatccttgcattgatgtaccttctgtcggcatgtgtaccacaggcgtcctccaagtttgaagagttcttcttatcttgtttgatgcttgctacatggctagtaaaaactttcttctctaaccatatgcctttttgttttaaatgtggacaatatctaagcaagtgttccttcttggagcatttaatacagagcctatcatacttagtaataatcaagccatctttaatgcagggaccagacctactcaagtgtccctcttcaaagcattcactacacc

SEQ ID NO: 22782 - DNA, 427 bp, Zea mays
  unsure (1)..(427): unsure at all n locations
agcttcatatcttggtacccaattngaattgggtcctttgagattagtatgaagagccttgagtcccacacaatccttattgtgacctttctctttgtgtaagcacccacatatacttgacaaccatcttacatggtttcaagtcaatatttaatcacacagataaaagctagagttaaaaataggagccttttctccttttcttgatacatcattgtgttgccttcttgatgatgaacctagcttgaccttgggtgcacctagcttattaaggttagtcgcacaagcattcatatcataaagacaagttatgcatgtagtttacaacttagtgatccaattcaatatgacgcatatggatcccgactgaagtataattctaagatatcaaaataagggtttccaaaatttggagagtatggatcac

SEQ ID NO: 22783 - DNA, 455 bp, Zea mays
ttacggacctataaaactcagctgagtgacactatttaatttagaactattgatttttggctagtcttaatgctcaacttaggactagcaaatgtgattttgaataactaaaatttgctagggatgcctacacggttggtagacacccctcaattaaggatggacttggcttcaagagggaagccaagaacttaacaagccataagactcctatcttcaccaaggagaaagggaaggctcctatggctaatagtgttaagaagaatcatgctttcatgtaccatgataggagatactctagaaatgctcttagaagtaatgatgtatttgattcacatgcttatgactcttatgctatgactgcttctagttctcatgttatgcatggtagaaatgtgtttagaagaaatgttattcaccaaatgcctatgagaaatgtagttcataatgctcct

SEQ ID NO: 22784 - DNA, 417 bp, Zea mays
agctggtggaggttcttcattctcacatgtgctaagcggcgatgccacagccagcccatgcaagcttaaccattaagcatgcatctagaccggcctcttcttttgcaaaatcaactaaatacagtttgccgtctaatacacccttaaaagctagtgaaccatcacttcttctaaagacagacacatctacatttgtaaacagacagttatatcccatattgcacaattgactaacagatagtaaattatatcctagtgactctactaaaaacacattagagatagagtgctcattagaaattgcaattttacctaacccttttaccttgccttgattcccatcaccgaatatcattgaatcttgggaatccttattcttgacgtaggaggtgaacatcttcttcttccccgtcatat

SEQ ID NO: 22785 - DNA, 407 bp, Zea mays
tataagaaacatcctaagacatctagactccgctttaacgctttcggatcatcgctcttgagatttgagcactattcgagttgtaaactcctcgcgctgtgtttgtgtgctcacgttctcactagtgtgcgttgttgtgctgcggttttgagtcttgcgtgtgttgctttccccaaccttactctgtgctctgtttgtgatctcaattgtaagggcgagagactccaaattgtggatattcctcacaaacgggaaacatactctaaaggaaaagaccgtggtattcaagttgatcatcggatcacttgaaaggggttgagtgcaacccttgttcattgggacgccacaacgtggaagtaagcaagtgttgcttggccgaaccacgggataaaaatcacgtgtctctt

SEQ ID NO: 22786 - DNA, 428 bp, Zea mays
  unsure (1)..(428): unsure at all n locations
agctntagcacatcggccgtcttatgcgtctcgatctacatgtcaagaccttcactttctttgcttcgacgcgctagaagatgccgaagccgcaatttttcttttccccctttgtttccgaataggaaagcagtaatcaggataaataaacccgataacatcaaaaaccctatttagcctcttctttcctcgagcaattaaggcgactatcaaagcttcgccttcagcccttgagtagcccccaagcagctcatcacttgttgcctctataacatctaaccagtcatcatttggttcatcaaattgacttttgtatcagaaggtatactttagatagaacaggccatcttggctggagccagcgacagcctccttcggcatttcccattcacttgcaagcggccatactatgtangcaatgtgctctt

SEQ ID NO: 22787 - DNA, 405 bp, Zea mays
gtatcacacccttcgacacatattgtttcgtacggatgcctgaaggactcaagaacgtcgattcaacctttgtcttgcctcaccaagaaggtcctcgagaaccaagtaggccgcaacatcttcacttatgtagacgacattgtcgtcgcaagcaaaagcaaagaggaccacctggccaacctcgcagagacattcgccaacatgcacgacgcacgactccggttcaaccctgagaagtgtgtctttagggtacgctaggggaaaatacttggttacttagtatcgcaccgaggtctcgaagccaacccaacaaagatccaagcaattatcaacatggcacctccatagtccaccaaagacatccagcgactaacaggaagaatggtggccctgaacagattcatc

SEQ ID NO: 22788 - DNA, 425 bp, Zea mays
agcttgccaattcttatcaaagttacatcatttacccgcacagcagctacagaccatccctatacatggcatttgcatactgggggctggacatgatcggacccttcaagaaagctcagggaggttatactcacgtgttgtttgctattgacaaattcacaaaatggatagaatataagcctattgcctctttaacctcagccaaggcagtggaattcatacaagacataatattcaggtttgggataccaaatagcatcataactgacctgggatccaacttcaccagctctgaattcttcgacttctgcgagcaacggatcatccaaattaagtatgcatcagtagcacatccaagagctaatggccaagtaaaaagagccaacggaatgatactggaagcactcatgaagaaaagtgttgac

SEQ ID NO: 22789 - DNA, 408 bp, Zea mays
cgcttctctgaagctccgacacaacatactgaatctgaagctggtccttcagagcccttcaaggaagaaactttggaagccgaagcgataaaaataccagaaccaattgtagttgaagagactgacactgccatccccgaagcgcctgccagcatgtgtgattacatcatacgacatgcttcgggaaaaaagctatctgatggagaaattcatgaagctaatcattatgcataggagctgaaatattcgaagggggcagtaatattcaatggaacaaatgaagatgacttcttatactggctgcctgataacaaagagctatccgtctgccgagagatggctagaagcctatgctttccgaagcttgaagctgggttaagtgccatgacgaaagaggatctcgcagac

SEQ ID NO: 22790 - DNA, 421 bp, Zea mays
  unsure (1)..(421): unsure at all n locations
agctntgggaactatgcccgtatcctatctgactgagccagaaatataagtgcttgccagagcccctgtccggtcgaccacgaccaacacccaacataagacttccctagtttttaagccaagggcgtcccataccaccctcatggtagcactattttcctgagtggtcactccatgtcccaattaatatgcaataatcttgtttaaccatcgggttaacatcataataccaatttcatttacggaacattaatatcataaataggagtgacaattattaagttgagcggtagcatcaatttgcaaagcatagtattttcccaggctaatcaaagaatacagttggtacatctatgaaatccttaattacgtaaataccatcaaattatgcagtatatcccaaaagtaaacattattatat

SEQ ID NO: 22791 - DNA, 326 bp, Zea mays
  unsure (1)..(326): unsure at all n locations
ttctactttgatgtattatctctacgcgccaataattagttaaaaaatacattgatatggcttttacacctgatgcgttaagctcttgcattaattctggcggttatttttctgcttttatttctcgtagccgatacttagccgaaaattaaaatacatacgaaggttgtattgtgcatacttaaatcgctctaaatatttatattatgttgagttcttgactcacgtcgagcggctaaatattataggagtactccgacacactgatcaagctatgttattatccgntgagttattgcattagctgaatatttactgcgccctgc

SEQ ID NO: 22792 - DNA, 402 bp, Zea mays
cgatgccagagccagcccatgttagtcttagcacataagcaagtgtcgaagtcagctctatcaaaatctaccaagtatagctgaccctctaacactcccttaaatgctactggttcatcactccttctaaagacagtaacacctacatccgtaaaagacagatgtagcccattttacataattgagaaactgaaagcaggtatagtctaaagaattacaagaaaacattggaaaggaatggtaggtgaatagcaatttacccaacctttgaccaacctgatttcatcccgaatggatcgctcttggggactggttttctcataagagagacatttcttctcctgcataggttggccccgctatcgagaccactgagcccggagctaacctcaaacaatagtt

SEQ ID NO: 22793 - DNA, 401 bp, Zea mays
gaagagaagaataccatgtctggaccacattcttaactgccatgacgaaggtattggccatgacagctacattgcctccatatgaagatatggttgcttcatagctcatcaaaaactgcttcgggtctgaatgcccatcatacatcggaagctgaggtggcttatacgatgggggccatgggatagcctgcagttctgctgccaagggagaagcatcgtcaaaagttaaggtaccatggttagaatcatcataccatccatcatcatcgaacaagccctcttgatgaagctccctgtgttggggccttcgttcgtgttcatctttgacaagatgacgtacttcttcagtggcttcatcaatctgcctttaaggtcgctagtcagccatcttctcttcttct

SEQ ID NO: 22794 - DNA, 356 bp, Zea mays
  unsure (1)..(356): unsure at all n locations
gagtgagcacactatgatgacgacaatttcatgatattacttgaacatgagcactaacaattgccatgtgaaggtgtgtgacatatgaaccctatatttacattcatacatgatctaatgtccttgagtatgggcactaaacaattgattaaaccctaaaccatgttagagcaccctaacatggtgaaggaataattattcatacattttttggtcgtggccttcaaacttgatgcttgttaagcacattgtaaggatgcaaagtatctggactagcacatttgaaactatgagcaaatggtgacttgtattgagtgggagatcaaccanaacacctccatcccaacttatatgat

SEQ ID NO: 22795 - DNA, 410 bp, Zea mays
gctgcagctgtctcgtacacattgtatgttttatttcgactgagtggcttcccatggcgattgacaaagatttcttcaaacatgaattgcttcacagatgtagcctgtacaacaggatttatttttctgtattcaaatgtcgagatatcattccctcttttattcaagcttactattcattctgttagcaccattggtctatggttgcacgaactaattattcttatgagaaaaattatcacagaaattgattttaccacatgatagaaccttcattctaataatctatttcggacatgcgactgaatttatgaactttgattgacgccacaaaattcaattcaacatttgccttatgaagtgcataaaaataatggtatctgcttattatgttatgcgttgaaccaata

SEQ ID NO: 22796 - DNA, 377 bp, Zea mays
catgaagcttgaggcgctataggtgtctactggtgtaactcctcttcttgcctccgcaccttgatgcgacggtgagcttcgatgtggaggatcatcagctcttgatcttctccaccttcgatcatgcactcaaacttacaaatgcccgatacttctcggggtcattagtatattggataccacaattattgacttgataggtaagaaaaagaatcttaaaaaccttaacacttatggtcatccattacctccgagttgccactggtcacaagtttgatcgtgacatggtgggtctcctgaagccctaagggggggaaaggacctgataactaactataccacaaattgtaggtacacatatgccatgctaaagattc

SEQ ID NO: 22797 - DNA, 409 bp, Zea mays
  unsure (1)..(409): unsure at all n locations
gctatgaagattcttcatcccttcatgggctagtcggcgatgctagagccaacccatgttagtcttaacaattaagcaagtgtcgagttcagctctattgaaatcaactaagtatagctgaccctctaacactcccttaaatgctactgaatcatcacttcttctataaacaagaacacctatatccgtaaaaagacaattgtagcccattttacataatngagaaactgaaagcaagttatagtctaaagaatctacaagaaaaacattggaaatagaatggtcaggagatatagcaattttaccaagtcctttgaccaaacctttgatttcatccccgaatgtgatagctctttnggggtcatgggttttctcgtaagaagagaacattcttttctncccagtcatg

SEQ ID NO: 22798 - DNA, 120 bp, Zea mays
tccactcatgaatgcattattctatctttgtcaatggcttcatttcttagcgtaataactactgacacgagtgtcccaatggctggttgggatcttttatcttctgcgtgcttctatgcc

SEQ ID NO: 22799 - DNA, 454 bp, Zea mays
  unsure (1)..(454): unsure at all n locations
agcttcncacctctgatctaactctgctgcatcactcttcgctggtggccaatagaatcctgacctgaagaccttcccgactagtgttctggatgctgcatgtattccacattgcccagcatggacctcccccagaagtcgcttcccagtagatgggagaatgcacttcatgaggacgcctgatgcaccccttctgtacaatgtctccccaatgagtgtgtattgagccgactgtctggcaatgcgctcggctgaattcttgtcatctggttcctcttcattctttatatacttgatgattggccttctccagtcataagagtctgactcgggttgatctataatattacactcttctgcttgatccattgagatgctcggctgtagtatttcttgcacaaagactccangtgggacatgagttcgactggatcctaacttggacaacacatcg

SEQ ID NO: 22800 - DNA, 320 bp, Zea mays
attgagagaatagatttgctaacgaccaaagcttttataattaagtggatattcgacgaataaatgaatccatcccaaaatgagccacatcttacagcgagtggatctaaacctacctaataccgaagctgaggggaggttcgccaaaatagtgacgaaatcgcctccggcaacacgataagcatcaggcgaacatctgccgcgacttcattattgaccatttaactgctcttgtgcgctaatcagacgactggaacacatatgcacaatcacaaggtccaatgcgatagcgcaagtcatatgccgaatgtagacacact

SEQ ID NO: 22801 - DNA, 331 bp, Zea mays
tgcagaacccaattccaccgaaatatattgtgaagcgagaaaagtcaacgcgaataccgccgaaatagaaagcgaaaaagttcaaaagacgttccttatgggatgcagaacttacatccgaaaataagcggcgaagccgaaaaataaaccgcaaagagatttttgatggttcctaatgggacgcacatattgttgttcaacgagggtatgttgtttcggcattagtatcattctttgcatcatatcatcgcatcatatcgcatagcatcacatcatacatcatatcacatcaatgacatcaattgcaaacgaggccgatcttcggagaatg

SEQ ID NO: 22802 - DNA, 275 bp, Zea mays
tttcacaacatttgatatttttgtctaagcattaacttgtaatttgaacctcaaattctagaacaggctatatgtccaatggcaagccactgtatatttatagaattattggaaaatgtaatacactgttgaggtcagacctacactagaattcatatatagaatataaagaataggataaggaattatggaaatttgtgtcatgctataaccccttggtaagtgtgcactgaaatatattatggaaatacctatccactatgcttattcttaac

SEQ ID NO: 22803 - DNA, 477 bp, Zea mays
  unsure (1)..(477): unsure at all n locations
gcttatgaagaattttcattccaacgtgggctagtcggcgatgccagagccaacccatgttagtcttagcaattaagcatgtgtcgagtttagctctatcaaaatctaccaagtatagctgaccctctaacacacccttaaatgctattgaatcatcacttcttctaaagacagtgacacctacatcagtaaagagacagttgtagctcatttgacataattgagatacagaaagcaaattgtaatctaaagagtctacaagaaaaacattggaaatagtatggtcaggtgatatagcaattttacccaatcctttgaccaaaccttgatttccatctccgaatgtgatagctcgttggggatctngtgttttctcatatgaagagaacatcttcttctcccctgtcatgtggttggtgcacccgctgtcgagtatccaacttgagcccncggatgcatatacctacaaaacaattt

SEQ ID NO: 22804 - DNA, 439 bp, Zea mays
  unsure (1)..(439): unsure at all n locations
actcactgaattattgtgttcaaatcgatgcacatgaaagcttataaagaacatgcccacatattttttctcagtgatgggtttctgaccaaatcagaatagcatgcaaaataaatcaataacagggacgcatcataaatagatggatcctatttatatacatgcaaagtggtggttgtcgtgtaaagaagttgaccattactgcagcagtaactttgagaccagagcagattcatacaagtggcaagatggtataatgcaatnggaaaaacattgagagcgatagcatctatgaaagttgtatgatagacgattatcttactatgatctatgaagtctgtatgatagatgatcatctgattatggtaggcttcaactgatgcgttacatgtatctatgtgataatttgacacagagaaaatcattgaagaaaattctt

SEQ ID NO: 22805 - DNA, 464 bp, Zea mays
gcttcaactccatctatattatggattgccttggaatcagtccagcttccttcggcccttctggcagcttcctgactcccatgaatagcaataggcccttggtccgaaggtatcttcatgcagagataagctgggtgaagaattgcttcaaaagcatttagagtaccacgaccaatgatggcgttgtaggggtattccatgtcaacaatatcaaacacaatttgctcagtccttgtgttattaacaaatccgaaggttaccggcatggtaatcttcccgagtgccacaatctgccgccctctgaagccacaaagagggtgcgtagcatcatgaatcttgtcttcaagctcttgcatctgtctgaaggctttggcaaatataatgtcagctgcacttgctgtgtcaactaggacattgtgaaccagaaacccttttatcacacaagaaatgaccatagcatcatt

SEQ ID NO: 22806 - DNA, 439 bp, Zea mays
ttaagatttttcctgcatgggattattgcagatgttttagagagaattgggattcacctttatcagttaactcctaacgccattgttaggcttagtgtttacatctgggcactccgaagccaggaggcagagccacttgccgaatgtttttgccgggcacatgagcttcattaccaaacaaaagctagagaagatgggctgcatgataatttcggctgctacaatgttgcatatcggaaagatgccaagtatccagttatcagctatcgtacgaaatggccagctggctggaagagtgaatggttttatgtcaaagtggatgaaaagaaagaaaagctggttcaaagccctttaaagtaaccttcagagaactatgccccatgcgtcatggactagatagccatgccgattgactgtcgaatttgggtattgagacaca

SEQ ID NO: 22807 - DNA, 427 bp, Zea mays
  unsure (1)..(427): unsure at all n locations
gactcttccttattttcttccattgctttaaatgcaacangttgcacttccggtgtagaggtggcgccttgctccaagttgacaatatgtttggagtctttgatcattagttcaaatctcacaaacttaccaattaccttctcgggagacatctgtttatatctaggatctccatgaattaattgaacttgagtgggattacgaaagacaagagatcttataataaccttgaccatttcatggtcatcccacttggtgcttccgagattgcgcatcttgttgaccattgtcttgagccggttatacattgcttgtggctctttttctttgtgaggacgaatcgaccgagttctccctcgatcgtttcgcgcttggtgatctttgtcacatcgtccccttcatgcacagacttgatgacgatcccaat

SEQ ID NO: 22808 - DNA, 283 bp, Zea mays
  unsure (1)..(283): unsure at all n locations
agcttctggaatatcaaagcccacacttatcaagtgataacacattcaaccagcaagtgatgcatggctttctcaacctgatcacaaaagggacaagcattcagatgatggagacctcttttagccaacctgttggccatgcatcctgngataatttcctagtataacggttctgcacatctggttgcaagagtaaccgtccatagtatcccaaatatgaaggcactcaatcagaaactctactgtgagagctccttttatgtcaccaacccaacttctgttc

SEQ ID NO: 22809 - DNA, 433 bp, Zea mays
  unsure (1)..(433): unsure at all n locations
tctaagggaatacacatnttgtgactaacatatgtgtcatttgagaaagacaggatttgtatcgcatgtcatgcatggaagcaagttggtgttcatcatccgcacaaaaacattatgacaactgacaagccactcgagctactacacatggacctattcggcccgatagcttacataagcatcggcgggagtaagtactgtctagttatcgtggatgattattctcgcttcacttgggtgttctttctgcaggaaaaatctcatacccaagagaccttatagggattcttgagacaggctcaaaatgagttcgactnaatgatcaagaagattagaagcgacaacgggacggagttcaagaactgctcaaatgaagggcttcttgaggaggagggaattaagcatgagttctctcctccctacacgccacaac

SEQ ID NO: 22810 - DNA, 148 bp, Zea mays
gggtcacaccccagggtgcctctaggcgcagtactggttccgcagtctatgaagctccgtacacgtgcaatgggcggtgcaggttgctccacgttgcaaccggcgcgccagttgcatgacgcgtgggcctgtgcctacatgctagacg

SEQ ID NO: 22811 - DNA, 379 bp, Zea mays
cctatgatgcacgaatggtgtggccatgcatggacagtggtgctatccaatcgagagatgtctaaagactattctacagaaatgttgaaataaatgcaaattcgaggcttccattgctgatgcatacattctagaggaggtgtcaaaacttacaacaacttactatggtgacaaactatcgagcgtgcataatccacccactcgtacaatgatggcggcaatgaatcgaacctcatcatatgtcgaggccatctcagaagtgtaagtggctcgaccaccaagaccctgacacatgaagagtggcggcatatgaagctatatgtattgaccatccttgaatatgtaacgccatacatggaacaatttcttcatgaattct

SEQ ID NO: 22812 - DNA, 269 bp, Zea mays
ctttctcatgcattttcaccctgtcagcaggggtgaaaaacaaataactccacaccttttgtgttggtcctacacactgacatactgtttggatccttgtttttagaatccgtgatgatgtgttacgaatttactgcttcgagactggtttgtacactgttgtacttctctactctgtatttggtcccacagggttattataggaaatgcagtcatgctgtgcttctctagccaataagcctttgttgctcctgttcacttgcagcgga

SEQ ID NO: 22813 - DNA, 323 bp, Zea mays
  unsure (1)..(323): unsure at all n locations
ttgagatggttataggaatatatcaaaataaaatccatcttgtttggatataaaatgatcaaaatataaagaaaacgatgctgcatagacctattcgtaatagaaaaatgagttcccgggctgatatgaaaaattcangggcctgctggttttaattaaaagataatgtgttcaggtgctaaaaagatatgggcggacggtatgttctattatccaaaagtgtatgggctataccatatgattcaggacctatctgtaatgatcttggaactatgataattggttggtaaaaagacattaaattatggggttatttacaaaac

SEQ ID NO: 22814 - DNA, 332 bp, Zea mays
ctataccaactcacccctgttacattgggatattgccgaaccggtattggatcatcacaagtacatacaaccccatcgtaagcccagcacatttcaaaaattccccgaactacgacacaagggttgatccgcatacaacaaaaatatgacgaatcgatggtgtatcaactaatcgtaaaaaaaactagacttactttcgcttgcactacaacaccctttattacatgaccctcggaacctcttccacggtatataatacgactaacgtcggtaacaatacatacattttctcgcggagataccattacgatacccgcgcactaataatatta

SEQ ID NO: 22815 - DNA, 379 bp, Zea mays
  unsure (1)..(379): unsure at all n locations
agcttatgaagattcttcatcccaacatgggctagtcggcggtgccagagccaacccatgttagtcttatcaattaagcaagtgtcgagttcagctctatcaaaatctaccaagtatagctgaccctctaacactcccttaaatgctattgaatcatcactccttctaaagacagtgacacctacatcagtaaatagacagttgtagcccatttgacataattgggaaacggaaagcaagttatagtctaaagagtctacaagaaaaacattggaaatagaatggtcaggtgaaatagcaattttacccanacctttgaccaaaccttggtttccatccccgaatgtgatagctcgttggagaatcttggttttctcat

SEQ ID NO: 22816 - DNA, 376 bp, Zea mays
acaacatatgtgggaatcgaaatgggaagacaaaccttttggagaggtggattcatcgtttggtctccatcgttcatattcttcttcttccttgcaagggttagtatcacaaataccaaatgaagtatatacacaaaatgaactatcatgtttggactcatcagatttacgtctaattctagtccaaatatcatgcgcatcgggaatatgttcataatgatttattatgagggcatgataatcttccttgctaagagaattaactaagatgtcaaaagctatatagtttaagcgtatacatctttggtcttcatcggaaacatgtttcctatcataattaggaaggataatactcttgtctaaaattttgtctaat

SEQ ID NO: 22817 - DNA, 392 bp, Zea mays
gcttgaacccggctattccatacatgaaaagacaatcgcgcactgggagtggagagatggcgagagtggcacgtaccctcctagcaaaggaccacctaataggggtggtgtgctctctggtggcacacacctgttcatgtggtggaggatccgtgggaatggtagacatgtgcaaagagttaagagaagcatatgtcgtgtggttggagatccccagctgggtattaatcgatttggatcaccgaacttctcggatatgaagactggatctttgaccctcatcgtagataacaagcgaaacaaaagttggacttgaaaagaaagctattgttgacaattgaatgctatagattagaacaatctatattcaggaaaagtacttaacttgtgat

SEQ ID NO: 22818 - DNA, 274 bp, Zea mays
ttgctatcttcttcttgatacctatggcaatataatgttaatggggttagatgtatacacccttaacttggcggtataaaatctcttttctaatatctacaaattgcatgtgttactcttctcaggtgttcgctttcctttctcttttacctaaaaatggatatatattgggttttataatagacgttaacctatttgtacgaacaccaaaagcacatttgttgttgcattcatgtcgttgcctggtagttataattgcataatgtgtttgaaa

SEQ ID NO: 22819 - DNA, 317 bp, Zea mays
cacatatttgttaaatctcacaatgtaaatgtcccccccccctaaatctgtgctaaaagttgagtattttcagaggaatcctctctggaaatagctagaaagtcagctttcactaatactcttggacaattctaataatcatgcatgtatgggtaataaagctaaaacagtccatttaaacagcaaaaggtggagtaccatgcatttgctacataattcctcatgttcaaaggttgaaagatctgtgcattaacaaactttggcaactctgttgatactacagctgtaacttgctaccgggtagtgagtgaagcaca

SEQ ID NO: 22820 - DNA, 176 bp, Zea mays
tacctaaaaacaacgaatggataaaccctgagtatggaatactcagcaagtcttacccgactaaagaaaagactctcaatggtatgctggttatatgggagtcaaggtaaggcttttcaatattcaaagactctgtttttgcataaatgcctaactaaagtggatcccttaaaaat

SEQ ID NO: 22821 - DNA, 215 bp, Zea mays
  unsure (1)..(215): unsure at all n locations
gtttgtggtggagatcccagctggtatgatcgatttgatcaccaactttcgattgaaatggtctttacctcattgtaatacaagcgaacaaagtggcttgaaagaagctattgangcaattgaatgctttattaacaaattaattccgaaagtcttacttgtgatgtaaatttggcttaagacccttctataactttctgaaaagagcttgaact

SEQ ID NO: 22822 - DNA, 403 bp, Zea mays
  unsure (1)..(403): unsure at all n locations
ctttttcactcgctttgttggcggttatctcaactaggttagacaggccctagatgcaatacaagaaatttaaacatgcaatgcaagcttgacaacaccatttgacattttacataaaatttctgagatcaagaatatttagttcatttctcaacatgcaaaagcgggtcttatcaagtggcttagtgaaaatatccgttaattgatcttccgacctcactccttctaaaatgatatctcctttagcaacatgatctctaaggaagtgatgacggatatcaatgtgcttggtgcgagagtgttgtacagggttattagcaattttaacagcactctcattatcacacaacanaggtaccttttctagaactacgccatagtctagaagagtgtgtttcatata

SEQ ID NO: 22823 - DNA, 307 bp, Zea mays
cgagatgaatctgaagccatacaagttgttgatattattttgttcaatggcgtcaagtgcatgaacctttacactgagacactttgacactgtctgtttgttcactgacatcactaaacctttgatgatttggatcattggcatgggctcgtgtgactgatgcagaagctgatgatgctatgctcagcattgcccggatgagagcctatcaatatgactggactactgtgggtcatgccctaaattggcgcctatctgcgggtatatctgtcacatattcagatataaagttgaagacatctcccca

SEQ ID NO: 22824 - DNA, 435 bp, Zea mays
  unsure (1)..(435): unsure at all n locations
gcttagtcatggcaagtctacattatttaattgtcatccaaacatctttagtaaatagggtgaactaaacattcatttgctcacttgcagatttttggacagcaatacagccgttacttgttttaatcataacttttcaaatattaatccaaaactagcaaactaggactttctggatagctttaaaaagtgctctacaattttggtggtttcatcacagcatgattaaacacttagcaaggtcaaaaagtgcaatcacagcagctctgtccagatttggacagattcagacttgtgattttaaaaattcataactgaagattcagacatccaaacaaattgatcctaaactttctggaaagctaattaaatgttctacaaattattataaacatcccaaggtgattcaatatntaacttaggataaacatcact

SEQ ID NO: 22825 - DNA, 474 bp, Zea mays
  unsure (1)..(474): unsure at all n locations
catcagtaccttgatctcacttatcttttttacaacaggctggcatccccatgcgaattgcttgggcgaataaaacccttatccatcaactcttgcaactgcttcttcaactctgccaactcaacgggtggcattcggtaaggcctcttggaaattggggtcgttcccggttgcaactcgatggcgaattcaatatcccggtccggtggcattcctggcaattcatcatgatagacatctgcatactcacaaaccactgggatcttcttcangggtaacttcgtcatagagaaagcacatgactgataagaaccctgactatgcagaatcaaagtgaaattcccgcagaaaggagaattaacttccacaatacgacttgctatatcaagcacaacttggtgcaatgtcatccaatttgctcctagaataatgtccacattttccaatcccaacacaagaagagttgttttgaca

SEQ ID NO: 22826 - DNA, 443 bp, Zea mays
  unsure (1)..(443): unsure at all n locations
agctntatgggtctatngactcaagttccttggtggacattatcaaagtgttaatattgatgctgcaggtcatggcctgcttagagtgaggggtttaagtctctaggataaaaactcctggagcaatgctcccttcccaaataaactcttcagtcttttgaaaaaagttggctggtagtaagagatattcgaagagagactgaagctttcactgtcacttgcccacttgagtttttttaatgcttttgttaaacaactgtatgcggcctgngcttggtttccatatccggccggccctgtttagaaggatatgataaagagtgatttggggaggagtctatcaatcaagatcctgtcatatccctngattgagtaaggtttctttatccctctgacctcctnccctatatatgtacatgtatttcacctctatcaatacaatc

SEQ ID NO: 22827 - DNA, 393 bp, Zea mays
  unsure (1)..(393): unsure at all n locations
ntatcanatggacgtgatgagtgccttcctcaatggaccaatcaatgaagatgtctatgttgagcaacctcccggctctgaagatagtgagtaccctaaccatgtctataaactctccaatgcgctttatgggctcaagctagccccaagagcatggtatgaatgccttagagaatttcttatcactaatggattcaaagtcggaaaggctgatcctacactctttaccaaaacacttaaaaatgacttgtttgtatgccaaatttatgttgatgatattatatttgggtctactaacgagtctacatgtgaagagtttagtatgatcatgacacaaaagttcgagatgtctatgatgggggagtaaagtatttcttatgattcaagtaaagc

SEQ ID NO: 22828 - DNA, 353 bp, Zea mays
agactttcaagtggatgttcaatattgatttctgaaattcagatttctgaagttcagcccttgagccaaagaccaagtgtgttcaccttgatccctatctcaaatactaatgacgcccatgacgaaaatgttactaactaacccctctatcttatggtaaaagatggcatcgggacacgtgctctggacacgtaaaacccgggatcttctctctatgcacgggagtgagacaatctcaaagatttggagccaatccacgcttgaactcgacctctctctgcgttgcctcgtgctcgatgccgagccaggcgccagagcgcgcactggcattcgcccgcgcatgccccgagcac

SEQ ID NO: 22829 - DNA, 414 bp, Zea mays
  unsure (1)..(414): unsure at all n locations
agcttcttggcctcatctcccaccgtcaccaccactgtagcctacctattcccgaagccagcaaccagaagggcatcagcattcccaacaacaacatgacttcagggaggagtccgaagctcgtatagtcaatagtactgtaccagaatcaaaacacatatactaagcaatatcctgcttctgaaatacttttaccttctaggctattttactttttgaataaggaacaagcaatgaaaacttagttttaatttcttgtaatgattntgcttctatcagaatgaaatatatcttcttcgcagatttacgaagctcaaaagtcgttcctaagggaatgcagagccaacataaacgaagctacaaaagtcgttcctaaaggagcgcaacgtaagtttcgtgctcaaaagtcattcc

SEQ ID NO: 22830 - DNA, 312 bp, Zea mays
  unsure (1)..(312): unsure at all n locations
agtttggtacctggcagatgtacatctttctgatgttgaacccatcatggccatgatggatccaccatcaagtttcgttttttgaaaacatcccatccactgtgaagcatcaccttttgttntaaaacaaaacatttgttntctaaaacagcactaagcatcagaaaaccttttaataaaatatgtaatcaaggaatggaaacagttccaaggaagtaaatgcatcaatttgtttaacacccatactctatcacctaatgcatcattctagtgataaagaaattaaaaacagtaggaggtggcaaatgcacc

SEQ ID NO: 22831 - DNA, 347 bp, Zea mays
  unsure (1)..(347): unsure at all n locations
agctttaaatgaatatatctttttctatcttaggaatgaactaaaggtcttagattctcgaaactttgattgaaatcttgcacacattgctcattntatatctttgatcatgtcatatctatttcatttgatacaaatgcatatttcttattcttcttatgctaaagctaagactaatgtgtttctaagagtatttctatacttagtcttgaattgaaagggaaatgtggttgtaggcaaaggcatggcttccactccatatttgttagaatcctttgccttactcatgtatttactttcatatctttttaaaagacctctcgatttctctatatttggcgcttaat

SEQ ID NO: 22832 - DNA, 340 bp, Zea mays
ttgtgcatcttgtcaagcatgttaacaggtgtgaagctctcatcataccaaatatgtgatgaccacatctagacctctggagttgcttcatatggatctcttctgacccgtcgcctatctaaacatatgaggaagtaagtatggtctcgttatagttgatgatttttcccgcttcacttgggtatctcttttgcaagataaatctgaaacccaatggaccctcaatcgcttcctaaagagagctcaaaatgagtctgagcttaatgtgaagaaaatacgagcgaaatgggtcctatttaagaaccttcaagtggacgattaccttgaggaggaatggatc

SEQ ID NO: 22833 - DNA, 449 bp, Zea mays
  unsure (1)..(449): unsure at all n locations
aagattcttcattccaacatgtgctattcggcgatgccagatccagcccatgttagtcttagcaattaagcaagtgtcgagttcagctctatcaaaatctactaagtatagctgaccctctaacactcccttaaatgctactgaatcatcacttcttctaaagacagtaacacctatatccgtaataagacagtngtagcccattttacacaattgtgaaactgaaagcaagttataatctaaagaatctacaagaaaacatttgaaatggaatggtcaggtgatatagcaattntacccaatccttggaccaaaccttgatttccatccccgaatgtgatagctggttggggatcttggtttttctcataggaggagaacatcttcttctcccctgtcatgtggtttgtgcacccgctatcgatgatccaacttgagcccccggatgc

SEQ ID NO: 22834 - DNA, 368 bp, Zea mays
cagcttcagcagatcagccgaagcctatgctcttatgtgaggacatatcagaacagaaggtgctgttatgctctcaattatccgaagatcaagagaaaaccttgataaggtttttgttcaacaacaaagatgtttttgcatggtcagctaatgatctctgcggagtaaatagggatgttattgaacactcgctcaatgttgatccatccttcagagccaaaaagcagaggcttcggaaaatgtcaaatgataaagccgaaagtgctcgtaacgaagtcaaaagactcctcagtgcatgagtcatcagagaagtaaagtacccagaatggctagctaacactgttatggaaaaaaggccaatggcaagt

SEQ ID NO: 22835 - DNA, 387 bp, Zea mays
tgcatatcaatccaacagacactggagtatggtattactctccggcggcccgaaccactctataccctcgcgtgttcttgtgttcgtccatccatcttgcataacatgctaaacgcttatgcccctcctcatcttaagatttatggcgggtgcactctgccacccggcgggagatttcctctccgacatttggcgcgtcaagtaagggctaagctttatgtttttgcctgtgttcttattctgcatgatggtgcggatcatcgattaccgcaccgaaacgtctgaagattttgcgatggagcaagaagtcgcatcctctgcgtcgcgagtacccgaccaccctgagtctatgactacttgtgtacacgccgtgcagacggacacgtt

SEQ ID NO: 22836 - DNA, 452 bp, Zea mays
  unsure (1)..(452): unsure at all n locations
agctctgcacgctcggcggcttctttatctcgtttagcttcttcttgagcgtcgtgagattctttttcattntttctaatcgtttcatcaactatctcacggtcgcccttcatccacaccaaggagtaaaatctcccacctagtgcagaagcttcggccgaagggttcttaatgtcttctgctaagaaaataaatcctggctaagctacagccttggcgtgttcgcagccagctttttctaagatccacgtggccccccgtgcaccagcgaaggcacagaaatctcctcggtcacttaaaatctcattaaaagcttcggcttctctgttgacccactggacaactccgttagggtcgccacggatgaaattttgctcagaagaatatgccccaaccctagcaaagttatccttcaatttcttagcgcattccaaggatatttcataacactt

SEQ ID NO: 22837 - DNA, 313 bp, Zea mays
ctcgctgcaatatgacacccgtatgtccaacacaacaagcaatgagtgaattcagaattattgcagagcatatcagcacaatggacctggttcaagagtttttatcattcaaagtctttcccagtttgagagaatgggaaatgccgaagctacagggggaaaagaaagaaggtgaactcgtacgtttaccttactatttcaagtttaaaaaggactttaaagcaccttgacaagagtggctagatacgattgaagcaatgtgttatgaaatacttggcaattattccaaaaaagaagatcaattgatgaccgc

SEQ ID NO: 22838 - DNA, 337 bp, Zea mays
  unsure (1)..(337): unsure at all n locations
ctgcagctatttctaacaatggttataantattattaaactcagctntagtccaccttacattgaaattttacattagaattntagagctacaaaatgatttaaaatactctaaaatttagagaagggaatctaaacggatcctaaggacttgttcgtttgtgtcggattgcacctggaatcgttccaactaatcaaagtttatataaattagagaatcactccggttagttatcgttccgacccacatatccggcacaactaaacaaggcctaaatgtgtctcaatctccctggatctttccttgtgtgtatttctctgcaggtgtgccaaataat

SEQ ID NO: 22839 - DNA, 179 bp, Zea mays
caatcgcttgattgatgcgggcatatactgttggcactcctcatgccctgttggagccactaccatccatcagactcgaagggtaagcaacaacccctttctgtcttggtgatagccgacgacaaagcttggagggtgtcgccgatggtttccccaaacgccatgatactggggccact

SEQ ID NO: 22840 - DNA, 431 bp, Zea mays
  unsure (1)..(431): unsure at all n locations
tctatagggagaacacgtgatatggttgactaacgtactattcgtataagacagaccttgtgcagcttgtcatgcatgtaaacaggtgggatgagcgcatcacagcatgaatgtgatgaccacatcatgacccctggagctgctacatatggacctcttcggacctgtcgcctatctaagcatangaggaagtaagtatggtttaattattggtgatgactattcccgcttcacttgggtgttctctttgcaggataagtctgaaacccaatggaccctcaagcgcttnctcaggagagctcaaaatgagtttgagctcaaggtgaagaagataaggagcgacaacgggtccgagttcaagaaccttcaagtggaggagttccttgaggangaanggatcaagcacgagttcttcgctccctacacaccac

SEQ ID NO: 22841 - DNA, 294 bp, Zea mays
  unsure (1)..(294): unsure at all n locations
gcagcttgccatacctgtcaaagcaacagcacatgccagcgcagcagctgcagaccataccagtaatttggcctttcgcatgctggggactggatatgattggacctttcaagaaagctcaaggagggtatacccatgtattggtggcaattgacaaattcactaaatggatagagttccagcccatttgcttcttaacctctgctaaagccgnggaatctctaacatgttttcatttacatgatggattccgatcagtatcttattcatcatttaggtaccttttattcttat

SEQ ID NO: 22842 - DNA, 303 bp, Zea mays
  unsure (1)..(303): unsure at all n locations
gctgatcacatgaaattctgtagttttccgataggcgaaattgtaacaaccaaaattttcatgaagcccatcctttctagccctaatttggtagtgtagctcgtgtactcggcagaaaccttcggcatatggctccaccccctggcttcggagtagccaaatattaacactaagcctaacaatagcgttaggagttaagtgatgaaaatagatcccaaacttttttagcacatcagcaatcatcctattcaaggaaatctaaaccagctttgtgaaactcttgaaatcactatntatctttct

SEQ ID NO: 22843 - DNA, 410 bp, Zea mays
  unsure (1)..(410): unsure at all n locations
gcttggagtaagcatggtccctggtgggcaatcatatctgtaaccttatgacagccgcattgatcatcacccgtacccacaagggactagaatacccgaattcgcaaaattttctggtgaccaagggaaaaacacgcgcgaacatataggccagttcttagcgcaattgggagaattggccgacacagaggcatttcgcgtgccgttattttcattatctctaacaagaactgcgttcgcatggtatgccactttacctcctaattcaatttcatcatagggggatctagaacaaaaatttcatgatcattntttctccggtgactatgagttggatgtggtaaatttagtatcattgcgacagacaaaagatgaatcggttaatgactacatccngagattccgagatc

SEQ ID NO: 22844 - DNA, 425 bp, Zea mays
  unsure (1)..(425): unsure at all n locations
ttgattaatcaccacagaggagtctncataatataataatcatttgataccatgtgatgtagctagacatagcccatgcaatagaattccatatttgacttcattattggtagctcgcaagtggattagtagcatgtacttgagatgttccctatatggcaagatgaagaagacttctaatcctacccctttgagttgtaatggaccatcaaagtacattgtctaatgctttgactngcttgttgctactagctactagatttctatgtattctataagaaaacttaattgatgactaagaattgatgggcctttgtaatttatagtcaatgtggagacatcttaactcgactgtccacttgatgatgcatcatgtggcatcatggatatgcaagatgccatatagtgggtagtcgattactact

SEQ ID NO: 22845 - DNA, 388 bp, Zea mays
  unsure (1)..(388): unsure at all n locations
gcttcgcatctctgaactaactcagctgcatcgctcttcggcgtcggccgatagaatcctgacctgaaaaccttccctactagtgttctggatgccgcatgtacttcacactgccctgcatggacttgctccagatattgcttcccggtggatgggagaacgcacttcatgatgacgcctgacgcgcccctcctgtattatacctccccaatgaacgtatagtgagctgattgtctggcaatgcgctctgccgagttcttgtcatctggntcttcttcattctgtatatacttaataatcggttgcctccagtcatcagagtatgactcgggttgatctatgatggtgtactcttctatttgatccgtctagatgctcagctggagaa

SEQ ID NO: 22846 - DNA, 174 bp, Zea mays
ttacactccaatttaccctaacatgtatagattaagcttaatactagagcatcaaaactataactcatcgagaccaggctacccagtacccataatcaaagcctctcaaatcgtcagaatctgtcgattcatggcagactgattgaaccctatttgccttatcggcactttgtt

SEQ ID NO: 22847 - DNA, 434 bp, Zea mays
tgatcacccatgtgttgttgatgaagcaccataagactaatcaatgaaggaatccatgtgggagttcgcaagagaaaggcttgcgtgttggcatcatgcttcctctataatctaatcgaaacctatatgcctgattatgatctttgagtaccaaaatcagcgtttgcaatcatcaacctgatgctcctgaatggccatattatgttgaagttccatctcctcgaagagttgcaaagtgaagatatgtagctgaagtaaatctacaccctttacccttctatgccgaaactcgatgacgagattcctcttatgtggggtagatttgtagcatcccaataattcaaattttaaaatgtcctcaactggctctaattcaaaatgaattcaaatttcgttcataatgtttgttgcaagttgaatcaacatataaatat

SEQ ID NO: 22848 - DNA, 458 bp, Zea mays
cgagctgcactggatagatgtgatcataaacacgcgaccatatgggacctgcagaataagattgtgtaacgttggcctttaaacaatgtggatgccttgaaaaccttataacaccattatcagcagaaaaattaaatcttgttgctactaaggcgcctaaagaaataaaattcctcttcatcttaagaacatagcgaacattattaagagtcttgaatgtgtcagcatgaactttaatttgaatagaatcaattccacaaatgtcaagtggagactcatcaccaataataacatcaccattatgaacatgagaataatcagataaccactctcgatgtaagcaagtgtgaaaagatcaagctaaataataaacctaagacatacgtgtttatcattagaagtgatcataagaagttcttcaccattacaattttcaacaatactagcctcaacagatg

SEQ ID NO: 22849 - DNA, 423 bp, Zea mays
gatttggagatcaaccaataaaaatctactgcctattctgtggtgaatgcataggccataccaccaggatgtgccatattaccattcataagcataatgagctatcataagctgcatcgcaacagatccagccgaatcatgttatgcatactgcttcggaccattcgccttacattccaaaatatgttggcaatcaccctgcatcctctgttgcttctgcaagccaaccccaatcttcctggctacagctcccacctgcaccaccaatacaacgagctccgcagccaatatggagccatcactctcacccccagatggacttcatatatgagtccgaatctcgcacattcaatatcactgtgctatagtcgatgcacatttactgacaaaatatcctacctcgatagcaagcttttgttattt

SEQ ID NO: 22850 - DNA, 453 bp, Zea mays
aaatataataaactatttatcttttacgttttccggagaaagtagccaccgatagacacacgcatggattatcgcatacttccaatgtgcttgttttttttattattcgagaagagaggaaacgactcataaaccaaaatgagccatgtgtacgcatgcagcatcatcaacacgcgacgtgaatgatgcgataagcatcagaaaatagcagcatagggttgacgacaagaccaccaaatgggcacgaggcgacaaatcaagactggtgcgatgggacagatcggtgggcccgacctcctttacatgggagctgaactatcccatccgccttctttctatctgagcctcctgtcacctcatgtgattcatgactcccaccaccaacaccctctctctctctctctctctttctcccaattgcccatgttgctccgttaaatgctgggcgcacac

SEQ ID NO: 22851 - DNA, 449 bp, Zea mays
  unsure (1)..(449): unsure at all n locations
tctatagggagagcacatcttatgactaacatatgttcgttgtgagaaagacatgatntgtagcgcatgtcatgcatggtaacaagttggagtccaccatccacacatgaatatcatgatgactgacatgccgcttgagctactccacatggatctattctgcctgatcgcttacataagcatcggcgagagtaaatactgtctaattattgtggatgattattctcgcttcacttggttattctcgcttcacttagttattgtggagggcatcaagcaagagttctcttctccctacacacctcataataatggtgtagtggaaagaaagaatagaactctattggacatggcaaagaccatgctttatgagtacaagacaccgaaccagttttgggctgatgcgattaacaccgcctgctactccatcaatcggttatatcttcact

SEQ ID NO: 22852 - DNA, 337 bp, Zea mays
gttcaaatagatcgccgccgcccatgaactctatatattgaatccaccacacgctccgtatggtagtcaagtacctctacgttcaatattgctcccaatggtgcaccgaccagctctaattacaaatttaccccaatttcatccgccgcaccgcgaaaactaacccttccgtggccagctcgttctggtgagtcggcattcaattcctatactgtttttgtgcctatgcatgcgcgtgatgctctcggtggcgtccgatagctcaatcccgccatggctgtacaagaacgttagcttgacccccagtttccgccctgagcgtgggcagagcaatttc

SEQ ID NO: 22853 - DNA, 425 bp, Zea mays
  unsure (1)..(425): unsure at all n locations
tgaagattcttcatcccaacatgggctagtcgacgatgccagatccaacccatgttagtcttagcaattaagcaagtgtcgagttcagctttatcaaaatctaccaagtatagctgaccctctaacactcccttaaatgctattgaatcatcacttcttctaaagacagtgacaccaacatcagttaaaagacagttgtagcccatttgacataattgggaaacagaaagcaagttgtaatctaatgaatcaacaagaaaaacattggaaatggaatggtcaggtgaaataacaatnttacccaaacctttgaccaacccttgatttccatccccgaatgtgatagctcgttggggatctttgtttttctcatatgaagagaacatcttcttcttccctgtcatgtggtttgtgcacccgctgtc

SEQ ID NO: 22854 - DNA, 405 bp, Zea mays
  unsure (1)..(405): unsure at all n locations
tttatggagagaatatcttctagcctttgacatgcttcgctntgctctctcgctctttttagaagattgagcatgaccgccttatcttcttggcttatgcgagcgtaaagttgcaagaagcttctttcttcctcctcatcctcatttgtgcttctgctatcattttcattagccacacaacatatgtgggaatcgaaatgggaagacaaaccttttggagaggtggattcatcgtttggtctccatcgttcattttcttcttcttccttcaaagagttagtttcacaaataccaaaggaagtagaggcacaaaatgaactatcatgggtggaacttatcaaattgctgttaattctagtccaaatatcatgtgcatcatgaatggcttcattataatttgatatg

SEQ ID NO: 22855 - DNA, 376 bp, Zea mays
gcttatgaagattcttcattccaacatgggctaatcggcggtgccagagccaacccatgttagtcttaacaattaagcaagtgtcgagttcagctctatcaaaatctaccaagtatagctgaccctctaacactcccttaaatgctattgaatcattacttcttctaaagacagtgacacctacatcagtgaaaagacagttgtagcccattttgcataattgagatacagaaagcaaattggagtctaatgaatctacaagaaaaacatttgaaatagaatggtcaggagatatatgcaatttaccaagacctttgaccaaaccttgatttccatccccgaatgtaataagctcgtggggatcttggtttttctc

SEQ ID NO: 22856 - DNA, 186 bp, Zea mays
ggagatcaatgattggcaccagcatgcctactgtgtgccttttatgtctgcagacgatgaagatgaagaagtctatgttgatgatcgcgaggagtttgccccgcctcccttccatggggatccgggtcaatcattcttccacccaccgtcttcttacccgggtccgggacccattcctggtgaccc

SEQ ID NO: 22857 - DNA, 405 bp, Zea mays
aatctggtgtgaatctgcgataatacccagctagtccaagaaaactccggacttggtgaacagattgttgggggtttccactccagaatatctttgaccttgctaggatctaccacaattcctttatctgataacacgtgccccaaaaattgaatttcttccatccagaacgcgcacttgctgaacttggcatataactggtgttcccttaagcgcgtcaatacaatccgtaaatgctgagcatgtgcctcttcattcttataatatatcaagatatcgtcgatgaagactaccacgaatttgtccaactcgggcatgaacaccgagttcatcaagtaagtgaaatgggcaggagcatttgtgagcccgaagacatgaactgtattcaaacaatcatatcgcgta

SEQ ID NO: 22858 - DNA, 233 bp, Zea mays
ctgcacatcaatggctaaaatcgcaacggtcagcattaatggctatatcaacagctactatgcattatatgcgtcgttagatgacatataaagtattcgcgaacggtccgtaatgacgctaatattcattttaccgaacccgtcgccttcatgtttttctgattttcaccgaccggactgtccgtgattggtctcagactgtgctcgcttctccattggatggtccgtattgt

SEQ ID NO: 22859 - DNA, 391 bp, Zea mays
  unsure (1)..(391): unsure at all n locations
catgtgcttatcggcgatgccacaaccaacccatgcaagtcttagcaattaagcatgcatctagaccggcctcttcttttgcaaaatcaaccaaataaagttggacgtgtagtacgcccttaaaagctagtgaaccatcacaccttctaaagacagacacatctatatttgtgaatagacaattatatcccatattgcataattgacttacagataacaaattatatccaagcgactcaactaataacacattagaaatagagtgctcggatgaaatagcaatgttacctaaccctnttaccttgccttggttcccatcaccgaatattattgaatcttggggatcctngttcttgacgtaagaagagaacatcctctnttcccctgtcat

SEQ ID NO: 22860 - DNA, 372 bp, Zea mays
caagcttgtgaagccaatcacaagtttattaaagaatgatactataattaattggccctcaagatgcaatgaatccttcgatcagctgaaggtgttattaaccactgctccggtattaactcaaccggacattgaaaagccatttgatgtgtattgtgacacatcacgtacaggtttatgttgtgtcttgatgcaaaacagccgagttgtatcatacgtcatatacagttgtgccggcgtgaggagcattatccaactcatgacctacaattagccgctatggttcatgccctaaaaatatggcgtcattatctgctggggaatatctgtcatatctatacagatcataaaagcttgaagtacatctttacc

SEQ ID NO: 22861 - DNA, 299 bp, Zea mays
  unsure (1)..(299): unsure at all n locations
ttacattcctcatcatgtccaacattatgacacataaccacaacaaccttccgcctccaatgcttcgagcaatccttttcctggtggttggttatgacctccataccttatnctggaaccaccttcatatgaccaagttcccatctgacaaccacatgttcaagtacaggatatgtagcatcacgatagaatggagccctccatagctcgtacagttaacaacatggtcccacaaactaagcatatatatactatggcttgatgggctggaccgatggagccaaatctatcacaaaaga

SEQ ID NO: 22862 - DNA, 350 bp, Zea mays
  unsure (1)..(350): unsure at all n locations
agcttaactccatntatcttcagcacacgttccatctctctttcatcatgaacctaanatataaatcacaccataaataacaaaattaaacttagcttattgcagattatttcaattgatcacacttatgtcttctacaccctccatttgaaatngtcattttggccttcctatgtacatagcttttgctatgcacctagatatgcgcaatgtctagatacatagcaaattatgtatctagaaaagccaaaacaacttatgtaccgcaccactgcttgcaacgctgccttcccaccaagtggaaatggtgcccacaccatcgacgacccacaccatcgacgaccttgacg

SEQ ID NO: 22863 - DNA, 355 bp, Zea mays
  unsure (1)..(355): unsure at all n locations
cgtcgattggtagcctacatggtgtagactccttctttcttcttcgcactttgatgcgagggttgccctctggtgtagatgtggcgccttgctccatatgacaatatgtttggagtctttgatcataagctcaaagctcacatacttgtcaataacttcctcggtagacatctgnttatatctacggtctctactgattaattgcacttgagtgggattacaaaaaaaacaagtgatctaataataaccttgaccatttcatggtcatcccacttgttgctcccgatgttgcgcactttgttcaccatggtcattaatcggttatacatttgcttgtggctcttctcctttgttg

SEQ ID NO: 22864 - DNA, 418 bp, Zea mays
  unsure (1)..(418): unsure at all n locations
atcctcagagtcacctgctgcatgcaagcttctgcactattttcaagcattctttatatttgttccttcttcacaaccgttgaaggatattatgataaatatagaagccactggaagggttggaaaatgggtcgcacatctcaaagaattatgtattgattatgtgcatagatcttcgattcaatctcaagcattggcagacttcattgctgattggacgccatgggctcatgaagaagaaacaaattaagatgctaaagtttggacaatattttgtgatgggtcttggggaaccttcagagcaagagcatctgctgtgttgattgcaccttccaaagttaaaacttgttatgcaacaagacttgatntcagttgcacaaataatattgctgagtacgaagctttacttttgggcctt

SEQ ID NO: 22865 - DNA, 362 bp, Zea mays
taaacaggtgggaagctctcatcatgccaaaaatgtgatgacaacatcaagacccctggagttacttcatatggacctcttcggacccgtcgcctatctaagcataggaggaagtaagtaccgtcttgttatagttgatgatttttcccgcttcacttgggtattctttttgcaggataaatctgaaacccaagggaccctcaagcgcttcctaaggagagctcataacaagtttgagctcaaggtgaagaagataaggagcgacaatgggtccgaattcaagaaccttcaagtggaggagtatcatgaggaggaaggaatcaagcacgagttcttcgcttcctacacaccacagcaaaatg

SEQ ID NO: 22866 - DNA, 490 bp, Zea mays
  unsure (1)..(490): unsure at all n locations
tctatagggagatacacatttgggactaacatatgttttatttgagaaagacagaatttgtagcgcatgtcaagcatgaaagcatgttggtgctcatcatccacacaagaacatcatgacgatcgatatgccacttgagctactccacatggacttattcgacccgattgcttacataagcatcggcgggagtaagtactgtctaattattgtggatgactattctcgcttcacttgggtgttctttttgcaggataaatctcatacccaagagaccttaaagggattcttgagacgggctcaaaatgagtttggcttaaggatcaaatagattagaagtgacaacgggacagagttcaagaactcacaaatagaatgctttcttgaggatgatggcatcaagcatgagttctcttctccctacacgccacaacanaatggtgtagtggataggaagaatagaactctacttgacatggcgaggaccatg

SEQ ID NO: 22867 - DNA, 402 bp, Zea mays
atgcaagcttctaagggagtacacattgtatgactaacaaatgttctttctgagaaagataggatttgtagcgcatgtcaagcaaggaaacatagtggagtgcatcatccacacaagaacattatgacgaccgatagaccgcttgagctactccacatggatctattcggcccgaccgcttatataagcatcggcaggagtaagtattgtattaatattgtggatgattattctcgcttcacttgagtattctttttgcacgaaaaatcccaaacctaagagaccttgaataaattcttaagacgagctcacaatgagatcggattaagaattacacactgaatgattcttgaggaggagggcatcaagcatgagctctcttgtccatacacacctcaacaa

SEQ ID NO: 22868 - DNA, 393 bp, Zea mays
  unsure (1)..(393): unsure at all n locations
ctgcagcctgatgctcattcaaaaatttgccttcttttgacaacaggggttagcacatggtgatatattatctaaatgtgcacatgtgcaagaatgatgttcacatgaatntaaatttggaattacaacctcatgagcaacattgagcatgatatggtcatcatctaattcattatgagaataagatagcatatcatagttctgacgtatagcaatgttttctaaatctatcattgctacttgactcttgagcatagaattctcaagtctaagctgagcgacatcgagatactcatcatgatagtttcttgctcaattatatagatcataccgtggaccatatatcatgaatcactttaactcttatgtacttgggcatcttgtcaagctgac

SEQ ID NO: 22869 - DNA, 356 bp, Zea mays
ccgggatcttaatcacctgggctgcaacttaacccccctttgcattctttctctttttctaaccaatgaaagcgatatctatgtctactgagctattcctaattgttcctggatatgtctgttgttcccaattaaggataatgttgatgctgaatcgctataaacaccgtcgagacccaggactcccgaaaccctgacacatctgtggggagcaatgctttactatcttgcctatatttttatcacccccattcacttatcctaagatgctgctttgtatcatgactgtacctattggtggatttttacacttttgttggttacttatcataatataatattttatcctgttcctt

SEQ ID NO: 22870 - DNA, 326 bp, Zea mays
actatattattctattctagtatctaaattgtcgaatacggatactaaaatagtcgaatacgaaaactaaaataaagttatagtttctgtattcagtaatttatgagactaaaataaaataaaatagagaactaaaaattaatctgtacaaaccaaacaccatttatgaatatcaggagcatggaatacactatgcacactgtaataataataatctatctaatgttgccaactacttcatcccgttctatattaaagtctacaaaccgtctgacgttgtgaaagtacatgcggcagtattcgagatgaagtataatctgagcaca

SEQ ID NO: 22871 - DNA, 341 bp, Zea mays
  unsure (1)..(341): unsure at all n locations
agcttgncttgtcacttctcactttattgtattctcanataacatcagaattcatgtctcccagctctcatgtctgacaactgactttgctgcttcgtcaaaaacaccgaattttcaagtgctaatcatctcaaatgtcaaggaagggacgagggcgcgttcgttagttcatgtcccgggaccccactgccgtatccctcgctctatctcttcaccggctaatcgcccgtcgggaactcgctgtggccgcacgcaacatcccgagctatctcgaccggttgccggagggcacatgctgcccgagcggcggngagtttcgtgtcctcctccaccgacgaaat

SEQ ID NO: 22872 - DNA, 408 bp, Zea mays
tcgacatacttgcttgtccactcttcgtgagcccctggcgtccaatcagcgatgaaatctgctagcgcttgggattgaattgaagatctgtgcacgtagtcaatagtgaattcattaagctccgtggcccactttccaatccttccagtagcttctctattcctcacgacatccttcatgggctgtgatgaaggaacaattatgtgatatgcttgaaaataatgccgaagcttcctggacgccattaacacagcatacaacaccttctctaattctggataggttttctttgataaactcaaaacttcagagacaaagtatactgggacatggcttttatctggtccttcaagcttctcttgtacaagcgccacactcactgtagagtgcgaagctggcacatacaat

SEQ ID NO: 22873 - DNA, 298 bp, Zea mays
  unsure (1)..(298): unsure at all n locations
tagtgatgatgaagaatatganagtgagagtgatggatatatgactctatttgtaaagaaattcaacaaattcatagaggtcaacctataatatgccaaacatcaagaagaaatgctttcaatgatagaaaatgttttgagtgtggggaacccggtcacatcgccatgaattgncgtaacaagaataagaagggcaaagatggagatgataagaagaagaagaaattctacaacaagaagaaagatggctaagcctacctagttgaatgggattccgatgatagctcggatgatgatg

SEQ ID NO: 22874 - DNA, 357 bp, Zea mays
  unsure (1)..(357): unsure at all n locations
acccatgttagtcttagcaattaagcaagtgtcgagttcagctctatcaaaatctaccaagtatagctggtcctctaacactcccttaaatgctattgaatcatcacttcttctaaagacaatgacacctacatcagtgaatagacagttgtagcccatttgacataattgggaaacagaaagcaagttgtaatctaatgaatctacaagaaaaacattggaaatggaatggtcaggagaaagctatnttaccaagacctttgaccaaaccttgatttccatccncgaatgtgatagctcggtggggatcttggtgtttctcataggaggagaacatccttttctcccctgtcatat

SEQ ID NO: 22875 - DNA, 242 bp, Zea mays
  unsure (1)..(242): unsure at all n locations
tctctatgaatcaaaaagataaatgtatgtntgtagcacttattcattttgtttatgtgctaacaatggtcatctaaatgctagggaacttctcaagtcaagtcaaaatggggtgaaaaagtttggctaaatttggccaaacttgggctagtctggtcctcaccggacattcacccgggacacccttcggcgagtctggatgtgctcgagctagttgtgactgcactcgggcgagtcgtgac

SEQ ID NO: 22876 - DNA, 327 bp, Zea mays
agcttgtgaagattcttcattccaacatgtgctattcggcgatgccagagccagcccatggtagtcttagcaattaagcaagtgtcgagttcatctctatcaaaatctactaaatatagctgaccctctaacactcccttagatgctattgaatcatcacttcttttaaagacaggaacacctatatccggtaaaagacagttgtaacccattttacataattgtgaaactgaaagcaagttataatcgaaagagtatacaagaaaaacattggaaatggaatgatcagaagatatatgcaatttacccaatcctttgaccaaacct

SEQ ID NO: 22877 - DNA, 399 bp, Zea mays
  unsure (1)..(399): unsure at all n locations
ctaagcttatgccacctnttccggaaatgtggcaccgggtggcttgcattctgtcgagcgataaatccataatagccaatattgttatgatatttgtctttgcccatggccttcatctcatatacaagctcgtgcatattgcaaaagcatttcgcgcgtggctacatgccttggcttcttacatcccatacaaaaatccccattctaataatagcttcgggggttatctgatgaatgtaaatctgatatattttcagcacttcaaccaataacctgctcaatgggaaccgaagcccagctttgaaggtaatcacaacttcgtnttcctctgttgcatggacgttgttgtctccaccatctctcacaatagacatatcccgaaagtaccttcctctcata

SEQ ID NO: 22878 - DNA, 269 bp, Zea mays
aagattgaagctatcatgaaaatggaagctccacgatcacaaaataacgatcatcgacttaccggatgtatggcagccctgagtataattatatccacactgtgagagaaaagtttaccattttacaatctactctaaaaggtggacaagattcagtggactttataagcgcacgaagctctatactcactgaagaatttgttgacaacctcccccgttctgaaaccaccactgcgagccacatcgactcaacccgctgaagatctact

SEQ ID NO: 22879 - DNA, 294 bp, Zea mays
ccggacttcaccggatgctcgagatctacctcaccggacttcggtctttcgccgtcgcgcgtggacagagctaaccggtgagtctccgcccaatttcttgcacccatatcttctctggcatcccgtgaatctttcttacccgtccaattgaactatctcgccgtgagcatgccggactcctcgccagcgacgagcatccccgcctgcgcacgtggaccggccaactccggtcatccccgactgcgacccgcacaccgttgtgatccccgagacctaccctacgtgctcgaccac

SEQ ID NO: 22880 - DNA, 377 bp, Zea mays
agagttcacttgtttatctatcaatctcagctcgggcttctgtcagcgaaccctccattgtttgaatcatgaaattcttcttctccagagcaactttcggatctttatatttgccctctaagcccctaattatattctcgtttttcttgcctcgaggtcttgttgcatcttcaagggtttacttagcagtagactctaaaaaaataaccttcatcagaagcaaccttcatctcgaaaacaataaatagctaaggtaagaactctaccttataattagaataaaacaagctgccggcgatatgttgccgccggtatctgctgaagtcggcctcatgcttcggaaagccaacacctcttctatagagtgctgacaacct

SEQ ID NO: 22881 - DNA, 433 bp, Zea mays
atgcaatccctgcttctcgctcaccatatgcctgacggctctataaaccgtgtagtaatatcatgaatatgttttgctgccgactgaaatttctaacacgatatcacaacgttcctgcactgtgaacataacataataaactggcattggccatgtcgcataataaactggctacgtatgccctggcaggctgtgagcgatttttttactaccatgctagaagcctctgcccactgagccaaaaagtaaatcgatttgcaattggcaaaatatcaactgaccaatggtaccgatagatttgtttattataacgagaccacaatgtcggcattggcaacatgtaacaacaatacatggccaaaatatacccacttcaaataagttgcagtgcacgacttctgctcaaaatccaaatatgtttaaatagtgctta

SEQ ID NO: 22882 - DNA, 353 bp, Zea mays
agcttcttcacgggttgtttctgttctgattcgtccctctctcgaaccgcgctcttcatattatgtatagcttcatcccacgcccgaaagttcctatacatatattatacttgggaaacatgttagtcgtgtttttaaagaccttctgaagatgaaggcccccaacaattagtttgctcctctgtaactaattcagactgcgaaatgaacgaaagcctttatccaaaggtccaaaaaaacaccatcccttcgctagaatagtgaaacctctcatatcgtgaggcccatggcgcagtggtcccttgcatatatatatgaggggtgcgaagaaaatatttttcatgctatcaagc

SEQ ID NO: 22883 - DNA, 430 bp, Zea mays
  unsure (1)..(430): unsure at all n locations
tcaccatataactagctnttcatgaaacaaatgatgataactgcttggcaagaacgaaacaagactggtatccgcctatgatccgtcttcaacaatagatagtactgctctcatacaaagaaatcatcatgagtagcgaggatacaacaggtctctacaagatcttcatatttctatcacaaattatcatcactagtagtctagtggtcaagacatatgactcttctggctccgaggaccaaagacatgttaatgtctaatctagcttcaagctatgtggtgatgtgggatttcatagttatntgtctactcttctcacttctgttagatcggaggtagataatggtaagcatgccaaanggtggaatttagtgtagttagtctacatataccccatgtatgtgtccattcatgaccaacctttaccatt

SEQ ID NO: 22884 - DNA, 233 bp, Zea mays
tgacccccccggatctttaatgactgagctgcaaccgcccaatttcctttatctggacccccatctctaagacagcacatttcattgtaacaacggttatcctattggttttgcttcagatacaaatttttcctactctcctagaaccatttagatagaatgctcatggaattgcatttccttcccttttcctggctgattcctcccgaattttgatctgggacttggtttgc

SEQ ID NO: 22885 - DNA, 454 bp, Zea mays
cacatgcacatcattggatcctgacctcttattgcaagttgcaatagagttacaattgtatggatgatgtcatcatacatcaagacaatatgaatacttttcttaagccatatggcgaaataatagacacaccgcttattgctgccaggctccttgaagacatcattggtgttcacatatctgcccacttccacgctgcataataaaggggaatatcaattagcagttctagctgtaaatgaactttctttttcctatttgctactacctaagttcaaccaaataacatgtaatgcattgagctctacccatatggtgtagactgcattcagtaataaaataggcatcgaataacagaatcactgcatattactctgaaattagtaccatagcaagatcagtgcatacatgacagatgggaacttatatctttggctctacagtccagctttac

SEQ ID NO: 22886 - DNA, 418 bp, Zea mays
  unsure (1)..(418): unsure at all n locations
agcttgagacagacattatccgctactctacgacatcacatcgtcggtagtttattctattccaatttcaaagaaaaaacttttcttcaactttttattgtctttaacaacgaatgtgttttctaacgaaggttgcttgtgcacaaagtatgctgatgagtaaagctctgagaatgcaacaagatcttgaagataaaaaacaagaagttataattgagggtttagaaagcataataaaagatcaagcatctgctcttgaaaagaaggatttccagcttcatacaacagaaagtttatctctcgaagtcaaaaagcttcgtacaggaaaagcagaagtntaatgcaaaatttgaaactgaggttgagaaaagttaaatttgcaaaatcatgacagagcttaaaacaaatgtctggagtc

SEQ ID NO: 22887 - DNA, 386 bp, Zea mays
  unsure (1)..(386): unsure at all n locations
tcngaagataacgacttcatcatcttcagggctcggctcatttctttcttcggcatctgctctcacaatggacatatctcgaaagtatctccccttcatgttttcaaggtgactctgcccaataattgattntccgaagactgaatggcttggtcgccatggctgatcttcggaatcttcacccccgctatctgcatcgtaactgtcactctcaccagtatcctcagataaaccttctaaaatctcccttgtaatcttctccgtattcgtcttcgccattgactcaagaaaacccagatgcatctcttcagaaaggctcagcttcattccggcagcaaccttcttctcctcagacattcacttggaattcttgcctctcgctttcg

SEQ ID NO: 22888 - DNA, 317 bp, Zea mays
ccctgctcctggcacatgcaatcatcgagccatctacagcggcaccggccgcagcggcactcctccaccttgatgagtcgaaagcacgcgctttcctcggtgacggcttcaacaaggacatgatcgaaggatggtgcctcgacaccggcgccactcatcacatgaccggccgacgggagttcttcaccgagctagactctatcgtgcgaggctccgtcaagtctggggacgccttcgacgtatagatcaatggcgccggatcattcgtcttcaccggcgagtgtagagagcacatgctgatcatcggagtctactac

SEQ ID NO: 22889 - DNA, 208 bp, Zea mays
  unsure (1)..(208): unsure at all n locations
tgaaaaaccgttaatcatttaaaggtgctcaacgtgcaatacaaaaaactggtggttgacattgatatatgatttccatatattttgcaattttggctacagacactcatttacagtntacacacatttggatataagttattataatattatatggttccggtgcaacgcatgggcactcacctatgtaatagtgaataaagaatga

SEQ ID NO: 22890 - DNA, 396 bp, Zea mays
  unsure (1)..(396): unsure at all n locations
cccacatgtgctaagcggcgatgccacagncagcccatgctagtcttaactattaaacatgcatctagaccggcttcttcttttgcaaaatcaactaaataagagtttgccgtctaatacacccttaaaagctagtgaaccatcacttcttctgaagatagacacatctacatttgtaaatagacagttatatcccatattgcataattgactaaccgatagcaaattatatcccagagactcaactaataacacattagaaattgagtgttcatgtgagattgcaatttacctaacccttttaccttgctttgattccatcaccgaatataatngaatcgtgggaatccttattcttgacgtaggaggtgaacatcatcttctcccccgtcatat

SEQ ID NO: 22891 - DNA, 273 bp, Zea mays
atacaccggccctctgtggtggatggttccggcatcgctcggagtattatcgctgctgcagccaggttctggccgaccccactggaagctggaggcaaccttgccctggcatcgtctgtaatgcggtgctgaacgtcctgtgccatatgacgcgcttctccggctggtgctcggccttgccactcctgcccgatattttgccgaagctgcacaaattgtcctgcttcctcatcgagcctggcctacatcttgcggatttgctcgagctgtgcg

SEQ ID NO: 22892 - DNA, 365 bp, Zea mays
  unsure (1)..(365): unsure at all n locations
aagtcgattcaatttttagtaactcaagctatcaatcttcaatgatctatatcccagattgacccaaaggtatttcaaattgttatatctaagactcatatcatctcggagaagatatcaatgttgtaggaaataaagaattaaccctatgccgaaaagtcaaggcctacaacatggaggaaagccaaaggatggtaacatttatgcttttaagtgcaagtatcttaaattattatttcttatgtatcttggggagncacaaagaaagcgcttcanatgtttttgaattatgtcaccattcttttgagaaattcctctcatatgggtagatgcanattcatcatttctattcttttgcaatctac

SEQ ID NO: 22893 - DNA, 480 bp, Zea mays
  unsure (1)..(480): unsure at all n locations
agaaaaatctggtatgaatcagcggtaatatctagccagtccaatgaaacttctgacctgatgaacggtggtcggtggtttccactccaaaatgttcttgactntgctgggatctaccgcaatccccctggcagacagtacatgtcctaaaaactgaatttcctccagccaaaacgcgccattgctgaacttggcatataactgatgttctctcaagcgcgttaacatgatccataaatgttgtgcatgctcctcttcattcttggaatatatcanaatatcgtctatgaagaccaccacatacttgtccaactcgggcatgaataccgagttcatcaaatacgtgaagtggacaggagcatttgtcaatccgaaagacattaccaggtattcaaataatccatgccgcgtagtgaatgcggtctttggtatatcttcnggccgaatacggatctggtgatagcccgatctgagatcaat

SEQ ID NO: 22894 - DNA, 296 bp, Zea mays
  unsure (1)..(296): unsure at all n locations
cacaccacattctcatggcactgtcaacatgatgtcaagtgctgagcagcaatgtgcagntcctctcccttcgcatcaattctatgtgcctgagacttctcaattcgtggcgatgtattggtttccccagtatcttgcttgccctactcctgcaccgactactcccatgtcgtctcagtttggaactccgcgtttgcctcacccggtggctcggtggggttcttcttgtaacttcacttcgggagcttcctcttctacgagtattttcggagcctatgtgctaccctcngcggatg

SEQ ID NO: 22895 - DNA, 346 bp, Zea mays
  unsure (1)..(346): unsure at all n locations
ttctagtatttataatattgagctcatgcctaagtctggtaaaagaatgatcatcaagtggcttggtaaagatgtcggctaattgatctttagtattaatgtaagaaatctcgatatcccccttttgttggtgatccctaagaaaatgataccgaatggctatgtgcttaatgcggctatgctcgacgggattgtcggccattttaattgcactctcattatcacatagcaaagggactntggttaatttgttaccgtagtcccgcatggtttgccttaatcaaagcaattgcgcgcaacaatgtcctgcngcaatgtactcggcttcggcggtggaaagagcgac

SEQ ID NO: 22896 - DNA, 372 bp, Zea mays
ccaaaccctcttttatctacctatctgacacgagtatttcttgatctctgtcttattataaactcgcctgtggattaaagggcttaacggttatctatacctctcctaagacctgtttttgataccgccgggaaacaagcaccatgatgtggagtggaccccttactggtaatatagaaccgtgttagttcgttatccgtgtgccgtcaatgggctcgcgttgctgctccttgccaagtgattgtccttgggaaagtgcgtcattttgaacctacggatgtacactcgggaatttgtaagctactatgatcctgtagtacctggatgacaatgatgcatacatcgcaaaaggaatcacgttgtggtaaggcc

SEQ ID NO: 22897 - DNA, 427 bp, Zea mays
  unsure (1)..(427): unsure at all n locations
agctggtcttcccattgatcttattcttatcctcttgcgnttttaccctcgatggcaaggggggagaagctgctattattttaatagtggtgccatgttataattctttgcaggagctntaacatgtgactaatagtttataaatattttgatggataaagatcgagaaggggctcaaagcagcatataagatccaatttggatcagtgatcactttgatgtagattttcgaagaagtcatatatgtatttgttcttgggtttcatcttatagtgcacaaatagtcttttgatgactagttaaatgatttactataaagagaccacgatgtttagagaagaggggttaattggacaacttaaaaacctacttcttaaactagattatctaatnttcacatatgcaaaaagtaatctatctagatatg

SEQ ID NO: 22898 - DNA, 383 bp, Zea mays
  unsure (1)..(383): unsure at all n locations
atgtttcatttgataaatacatggtttgtagcgcatgtcangcatggaatcaagttggtgctcatcatccacacaataacactatgacgactgataggccactcgagctcctacacatggatctattcatccccgatgcttacataagcatcagcaggagtaagtactgtctagttattgtggatgaatattctcgcttcacttgggtgttctttttgcaggaaaaatctcatacccaagagaccttaaagggattattgagacgggtcaaaatgagttcgacttaatgatcaaaaagataagaagcgataacgggacggagttcaaaaactcacaaatcgaatgcttccttgaggaggagggcatcaagcatgagttctctt

SEQ ID NO: 22899 - DNA, 393 bp, Zea mays
  unsure (1)..(393): unsure at all n locations
agctntctcaccatatatagcatgcttaatgaatcttcgtagaatgatgcagtntaatacgaaaacttggtcatcaagcagactgttgaccttctgaccagtcagcactaaagtaggtcggctgcctttctggtagatgtggttaagtcggctttataagcattggaaactagacttcaagagctttccgaaaagtatttatggaccctcatagctgttgggaatcaaaagatatgactgtttcttctggacgggtttgtagcgctggactgactcggacatatgctcttttggtgattcgcctttgatatgttttggccctcctctttggtgaacctaagttatatcaacatacacgacttaggtagcataaaattctcattagtggttaat

SEQ ID NO: 22900 - DNA, 170 bp, Zea mays
tgcacatggagagtgactgttgaagaattcattcattccttgggtgttgtcgcgctcgcagaatcatctggccggcatggtggagaaggcgtctatcgacgacgtgatgaaagtgctgatggcgtcgcggaatcaagacctgcaccaactgtggaccacgtgctcccacc

SEQ ID NO: 22901 - DNA, 131 bp, Zea mays
tgctaacgacatactctgcaatccccttcggtcacaaacttcccaatagcatgctattattagcaaaccaagacctgatcgtctcagagaagatatgttgtctgcgggtcctccatgtcccattgccaagc

SEQ ID NO: 22902 - DNA, 372 bp, Zea mays
  unsure (1)..(372): unsure at all n locations
tagcatatcaccctcaaacagatggccatacatgataggtgaatcatattttggaagacatagtgcgagcatgtgcactacactacaggaaggattgggacaagtgtctgtacttggcggacgtttcttacaataacagttatcaatccagtctgaagatggcaacctttgaggcattatatgggagaaggtgtatgaccccactaaatnggtctcaagcaagagaatgggtaaattgtgggccagacatggtactctatgcataggcatatgtcatagttattaccaataacttggaatctgctcatgccatgcataatagctatcatgacaagatgcggaaacctctgcagattggggtgcgaaatcatg

SEQ ID NO: 22903 - DNA, 415 bp, Zea mays
  unsure (1)..(415): unsure at all n locations
gctttatntacttcctacatgctgttaatgtcttccttttcggtggttgatgccaaagggggagaagtttatgggccaaagcaaggccaaagcaatgaaaactatatcaaacaccaaacaccaccaatttaaaattntatatctactaatggctttttaaagtggttttggttatttggtccaaaaatangaagtaagtgaattatggagttagggggaggcttaagtccataatgtcacattgtggggacaatcatgcatcctagcaagtagactgcatattttcattcaaatacttgtattattngcttgctttgggtgtgttgtcatcaatcaccaaaaagggggagattgtaaggaaaatggaccccgggccttttggctaattgagtttggtgtttgataacaacacaat

SEQ ID NO: 22904 - DNA, 238 bp, Zea mays
  unsure (1)..(238): unsure at all n locations
attcttatgctggttacacatgcgcataacataatcacgtgggtattccactatgtgagtatgcctgtggatctgaacctgtgaaaaacaaacgagttaagcatagagatgggcctggggatccatgtctangaagaagatgatgatgatgtggtggatcaaaacctcccccggcgggacatgaagcattgtgcccgcttggcggtgtgatggtggtggggaggggtatgattaattt

SEQ ID NO: 22905 - DNA, 409 bp, Zea mays
  unsure (1)..(409): unsure at all n locations
gactaacgtgcaattcgaataagatagaccctgtgcagcttgtcaagcagggtaacaagtgggaggagcacatcacagcaagaatgtgatgactacttcaagacccctggagctgctgcatatggacctcttcggacccgtcgcctatctgagcataggagggagtaagtatgggctagttattggtgatgacttttcccgcttcacttgggtgttctttttgcaggataagtctgaaacccaagggaccctcaagcgcttcctcatgagagctcataatgagtttgagctcaatgtgaagaagataaagagcgacaacgggtccgagttcaagaacctctcagtggaggagtccttgaggaggaanggataancacgagttcttcgctcctacacaccacaacaaaat

SEQ ID NO: 22906 - DNA, 414 bp, Zea mays
  unsure (1)..(414): unsure at all n locations
cccacacagtaacttaaacttgctttttatattaccacataaacttcgttccacctgtgccattgttggagctatacaagaactttgaatttcgatagcaaatatacgaccaaagttgtatgtaatacatcctttctagcctttgtctggtagtgcagttcatgaactcggcgaaagctgtccgcatacggttccaccggctgtcttcggagtgcccaaatataaacactaagcctaacgattgcgttaggagttagctggtgaatataaattccaaaattattcaatatctctgcaataatgccatggaaggggaatctcaacccaacctttaagaagctgttaaaaataacaatttcatccttctccggctttggggatatctcttatacttcgaagcgtaanaacttcttt

SEQ ID NO: 22907 - DNA, 317 bp, Zea mays
gacatcacttcgagttgttagactctaatgaaacacccggctctgataccaatggatattcgcctacagggggtgaatacgcgaaacctgaacattataaaactgtgaacacacactatgcccgggattagtgttagaaataattcggagtgcggaagatagattctcttcctatgagttgctcgatcaatgcggataactaatggagcgaactcaaaaagatgtgagcaatagaactttagagagagaggagagggaagaaacatatcgagtgaagttcaacacaaatgaacacgacgatttgttaccgaagttcg

SEQ ID NO: 22908 - DNA, 454 bp, Zea mays
  unsure (1)..(454): unsure at all n locations
acatcttanataanatttctgagatcaagtatatttaattcattcctcaacatgcaaaagcgggtcttatcaagtggcttagtgaanatatccgctaattgatcttccgacctcactccttctaaaatgatatctcctttcgcaacatgatctctaaggaagtgatgacggatatcaatgtgcttggtgcgagagtgttgtacatgattattggcaattttaacaacactctcattgtcacacaacatatgtaccttttctagaactacgccatagtctagaagagtttgtttcatatataaaatttgtgtgcaacaagcacccacgacaatgtattccgcttcggcgattgacaatgcaacactattttgctttttggatgtccatgataatagtgatctctgagagcacctagaggggggatgaataggtgatcctgtataatcaaacacta

SEQ ID NO: 22909 - DNA, 485 bp, Zea mays
  unsure (1)..(485): unsure at all n locations
tctcaacanaggcatttctggtttcattctgcatctcatacagcttatctctgcaggcaccacactctttcttcttcaaaggcatgcacaaagtccaacagaaaagaaactctgcttctatttcaacgtttctgctcaatgcgtcgtaaacactgctgaactgaaaccaagagtttctgctgaattatttatacctatagttgcttgtctctctggctcaagtgcttacttatcaatagactgatcagattcaaacgttctgtttgcaggattcataacagttgcttcctccaccttataaacttgcctacgaatgcatgttggaaacgatgatatgagcgctgaattcttcttttccgatgctgattcttcttacctgactaccctgtttgttacaactgatgccccgcctataagcaggtagcttgtgagctatcgatcaattgtgaatgttctcatagaaatggatcttattcacataagtc

SEQ ID NO: 22910 - DNA, 483 bp, Zea mays
actcccccggatcttaagtcactgagctgcaactttctgtgcactgttatgtataaaatgttattggctgttcgcgcaaaccatgtctagccttccattcttttttggaaaccctgtcccaaaatcctcattaaattctcctctgctcaacccagaagccatctaggttgatgacctctcttttcacctggatctggtaatcttttctctgtgaatcatgatgtggccttagcatccgaatctctagatccttcattgattctgcctcgttatctggttatctgctataacctgttttcaagtattgaatgttgatctgcctaaatatctcaattcgggtcattctcatacccccttttccgaggatcatgacgtttgtttattcaatttatctttaaacagtgtatccatttaggtcaatggatgttgctgttggctttggttctctgatgtctctaaaatctcattcatcctcgtctcatg

SEQ ID NO: 22911 - DNA, 454 bp, Zea mays
  unsure (1)..(454): unsure at all n locations
tcgttattctttcttcatctcgagcccctggtgtccaatcatcaatgaagtacgctaacgcctgatactatatcgaagaactatgaacataatcaatggtaaattcgttgagttcaacagcccattttccgactcttcttgtagcttctctggtcctcattatacccntntagagggtngtgatataggtacgattatgtggtatgcctggaagtaacgccgaagctttctggatgccattaatacagcatacaataccttctccaactctgtgtaattcttcattgatggaatgggtacttcggagacgatgtataccggtgctttgctttttacttggccatcttatttctcttgtacaatcgctgcactaactgcaacatgggtngcagccacatatagaagaaatggngatcctgacaanggtggngttagagttgttagatctatcaaa

SEQ ID NO: 22912 - DNA, 329 bp, Zea mays
gggacctctaagcacgcagcatcaacttccttcagtcttgtatctttatgcacaaaataaatcaatcctcaccctgaagataagctctcctctcacgtcgaggtaatgcttaatgcacaaattctcctctttgacatcaaacaccataaccatattctagcaagaacatatgatgatgtcatgggacatcaaagtatctagcatggaaaatgcaacacactaacattactcccccttacacattaaacatatgcaacacaagcattggaggaaaattaaagtacaaatacggtaaaaggtcaatacctccttttgtacctgtaccatgt

SEQ ID NO: 22913 - DNA, 346 bp, Zea mays
  unsure (1)..(346): unsure at all n locations
tctccatattcatggtgtgccaatntatctctttacttgatggattaatttgtttgtggtccagtactctttgtaaaaaaattcccatcgcccattttacgttacgaatgtaaaaacaaaattactggcattcatatctccaactaccacggaatctcatatacacctcatgacgaaattgttctattccctatcaaacatcttattttttatgcttctatgggctcctttggattgtaactatttttatcgcttaccgcgttttcctgcgaaaatgaactgatttctggtaaaattcaatatcattcctctggaatttctgcatcactaaaggaccctatatttt

SEQ ID NO: 22914 - DNA, 290 bp, Zea mays
  unsure (1)..(290): unsure at all n locations
catattaattacctctttatccttattctttatagntatcttgactaaagagacttccttaatcaagacatctagcatttcatctttattgtgaatcaactctggaagctctaagtttctttccctttcaaggataagcaagtcttcttgagcatcaagaagtgcttttcttttatctagcttctccattaaattggtgataacattgtatccattcaagcccaaattcttaatcattttatgtttcatggcaatntgttcatcatcatcatcatttggaaaatcattac

SEQ ID NO: 22915 - DNA, 280 bp, Zea mays
  unsure (1)..(280): unsure at all n locations
agcttctagcaacttcatcttgagttttcccattgatatgcaagagctgtcctttagggtctacagatagggcaacaaaagtaaaatgatatttaattcatctccacatcaccattattccaaanaaaactgcactgaggctcctttagaatgtacttttgatgagctactcaaatcacactggttntattcattccttgtggcatctatggatgcacttacgaataattaagtacatgccaatttagggcttgttcgtttaagagtggattggagggga

SEQ ID NO: 22916 - DNA, 358 bp, Zea mays
  unsure (1)..(358): unsure at all n locations
agctaaatatacttaactcctatgattctncttctatntatttcattaaatgaaaaaatactttaatcctatattctaagtgtaaaattaaagtatacatattatagttggtcatattttatatggacagagaataattctgtgaatattttgcaatttgaaccactaatattggagttcatatgaaaagatatggaataaacaagtttttaagtttgaaatatgaaattagggatagatctatgattaaataaaagtacagggggctattcaaaagaaaccaagggcctgcgcgctaaaacagaggacgacggagtgatttcctaaaactaggggggctcttaagcaaaactcacac

SEQ ID NO: 22917 - DNA, 341 bp, Zea mays
ctagaccttatcaactgcgccaatcgaactaggtgactctatcagagatgtgggactaatccgtaagacagggtcgctctatggagattcaacactttatcagttcatgagctatcttcatccttgagataccaactcatcggcacttgttcatgagtgctgtctgcaatgccattcatatttgaacatttaaatatcttgcacaccatattataaaaatatgtaacactgacatctgaatgtgttagtgcatacaatatgttaccacttaccaagcatgtgatctgcaagtgagccaagtgccttgtactcgtacaccataagcacttgatctccatctg

SEQ ID NO: 22918 - DNA, 387 bp, Zea mays
  unsure (1)..(387): unsure at all n locations
ctcacaaccattaccagtaaaggggtgtaaacgatatggatattatccgaacgtccgaagaggtcaattatttgactggatagtgttttaggatatccattgaatatccggattttaaatccgaattcggatactacagtntggataacggatacaaatatgatatgattaatatctgtcggatatcagatatccggatatcttttcgtatatattcgactcagcatccgagtattatccgactttatcccaacaggcaaaggcccacgcgagacgacccacggtccacccaccgctcatacctacacgggcacggggatccctctcccacttccttctcgagctnctctttcctttctctatgatcgattcggcccaaccggaaac

SEQ ID NO: 22919 - DNA, 401 bp, Zea mays
  unsure (1)..(401): unsure at all n locations
tgagcgcgagacanacagaggtataaagcagcgattaagtcgcagtctgtttctgtttcaacatgttaccatacatagatgtgcgacatagtatatcgatcagtcccatcacagtatcgagctgatccataataacgtgacatgatctaagtctacatcatgcgtcgcaacgttggacacatcacattgggatgtatatacatggtattgctaaacatatcttggctgatcaatccacacagttttgtcatatgacgtcaactaacacatgtatgttcacttaatccacagagctatacaaattatcctccagctaagaaatcatctgtatagtgtctactcaaattgtggagctgcaacaagaaataatgaatgtgagcataaatcgtcatgattttcat

SEQ ID NO: 22920 - DNA, 349 bp, Zea mays
cggatcttaatgactgcgctcactgttacgcatatcttggaaaacacttcgaatcaacaaccctctctatggagactacaacaaagtgtgtggctccattatcaaaacagaaaaacttatagttttgtcacaacaaatgtttgctggcagcatgatttgcgagtacaggagtatgacatcctaagtgaccctctcaacccaaagaagctttgaaatgttaaacaagccaagactcgaagagtcaaagactccctgcagattttaaaagtaagacccaatgtcctacactgttggaaaagccagcaatggatggtttatttcaatctacagccgtcaaacattccttgca

SEQ ID NO: 22921 - DNA, 431 bp, Zea mays
  unsure (1)..(431): unsure at all n locations
aatgaactatggttcagctcttcagactacaggctaatatgatgtatacgaaggctacctataataataattacctagtaatctttgctcaggggctcggtgacatgcctcctgatgcaactgtgatgacacgagcatctggtgccgctntctccaatgactgcataactagctctgttaaagtgtatgtcgcaactacattgacagcaaaattgaactccaacctgttgccaaaataagggaaaagaagagagcatggatatgattttagtgataaaactattcatatgatgtataaattaattggctggttgaaaccaacatatcacttacccttctgctgaatctcatgctcggctctagtagccagcatagttacctagatggaaataatagtttatatcaaatctggcatctgattagagaaactt

SEQ ID NO: 22922 - DNA, 223 bp, Zea mays
aattcatgctgtgaagtctcattctgtttgccatcatgcttttatgtacaagaatgacgcatctatctctaggcattctacccatgtttaaacgcctaaaaagaaaactcctactgcatcaaatgaatctaatatttcatttaagactgttgatgctgcttatgttttaactaacatattatgcatagtagttgccaaatatgttgggggcaaccacaaaggc

SEQ ID NO: 22923 - DNA, 420 bp, Zea mays
gcttatatggacgacgatgtcgttctcctgctaattggtctgaacctggtgaaaggtacttcttcacgcctgatatggtgaaagagactgaaataagagttcaaagaataattcataatttgaagaaagctcaagctcgtcagaagagttatgcagacaaacgacgaatgcccttatatttccttgagggagactatgtctacctaaaggtttcgccaatgaaaggcgtgtcgcgttttggggttaaaggaaagcttgcaccacgatatattggtccttttcttattcttgaaagatatgggccagtggcataccgacttcagttacccgaaactttgtctgctgtacataatgtgttccacgtgtcacaattgaagaagtgtcttcgggttcccgatcgcaccattgaagtgacagatg

SEQ ID NO: 22924 - DNA, 359 bp, Zea mays
cacaactgtcaaaaagatgctcctcgacgaataaaagggcatgtgggccgatatgttacccgaggcggtctgggcgcttaacacgactgagtgcatggcgaccgggttcacccctttccgccttctatatggatcagaggccatgaccccacaagatataaaacatgggtccccgcatacagtttcatcatctgtccccgacgtggacgaacccacttcgaaggatctcatcgatggagatcgggtcttcgctctacaggctctatataaataccaagcccatacaaaatcatggcgcgaccacgcagtcatcccgagggaattcagcgaatgggacctcgtactcgtccgaacagctc

SEQ ID NO: 22925 - DNA, 307 bp, Zea mays
  unsure (1)..(307): unsure at all n locations
ccccacgtcatttagagattcctaggagaagttattatcaaaatagtgaaagctgcgcagaagtcaaacagccacacggaattcatctctgcagatctcccgaagaggcccctacacattatcacgttaaaatactttcttttcgtgtttatacctctctaaagctggntgtttctagtataaatacgcccatatgtctatgatgtaagacaacttttggataatataaaaacataacccttttgttcagctgtgtgctaacaaatattgagagtgatctctacccctttgctcttgtgaattcctt

SEQ ID NO: 22926 - DNA, 281 bp, Zea mays
tatgaagattcttcatcacaacatgggctagtctgtggtgccattaccaacccatgttagtcttagcaattaaacatgtgtcgagttcagctctatcgaaatctaccatgtatagctgaccctctaacacaaccttatatgctattgaatcatcacttgttctaatgacagagacacctacatcagtaaacggacagttgtatcccattttgcataattgagatactgatagcacctacaggggggggggtgaataagtgatactgtaataactttactta

SEQ ID NO: 22927 - DNA, 340 bp, Zea mays
  unsure (1)..(340): unsure at all n locations
aatcctatgatatagtctcctccccctaaatatgtgcatttcagaaaataacacttttgtactcaaatgccaaaagcacatatttgggtcaaagtatggagacaacttatatcatactattcatgggctgcagtgtatcataaaataaacgtgatgctcatgacatagaatgcacttatcaactntctacatcttatgtttttcttatgattccctccttttgttaattatatctccccttcttaaaagacttctaacacttagttacataatactgaagggtaagcttaatgcaaaatttctcccccttggtatatatctctataaagatacaaaaata

SEQ ID NO: 22928 - DNA, 380 bp, Zea mays
gctagcatgtggtacccatataagagtatattagtctgggtggctccatgataatgacaccaatctatagttctgtattgcacctgctatagtccaatgaatcaagcttaccaaagttttagtttaaaacagacagtgtaaccttcattcagaaatcagaagcactgaacccagtaacagttcttctgaagattttttctctcatacaggaaatattggcaaacattcatttcaggttatcaaacatctaaggaatacaatgctatgaatcttgctaccaagcagatagagaattgttatgaccgaaaaataggttattctaaatgcagcatgtgattcagtccaacgataggaaaaaatccaggcacacttttttcata

SEQ ID NO: 22929 - DNA, 176 bp, Zea mays
agcacatcacagcatgaatgtgatgaccacttcaatacccctggagctgctgcatatggacctcttctgacccgtcgcctatctaagcatatggggaagtaagtatggtttacttattggtgatgatatttcccgcttcacttgggtgttcttcttgcaggataagtctgaaaccc

SEQ ID NO: 22930 - DNA, 355 bp, Zea mays
cttcgccggcgggcaatagaatactgacctgaaaaccttcccgactagtgttctggatgctgcatgtactccacactgtcctgcatggacttcctccagaagttgcttcccggtggatgggagaacgcacttcatgaggacgcctgacgcgcccctcctgtataataccttcccaatgagtgtataatgagctgattgtctggcaatgcgttctgccgagatcttggcatctggatcttcttcattctttatatacttaataatcggctgtctccatcgtcagagttgactcggttgatctatgatgttgcactcttctattgatccgtcgaaatactcggctggagaaattttt

SEQ ID NO: 22931 - DNA, 397 bp, Zea mays
  unsure (1)..(397): unsure at all n locations
gacatgatgggatcagtgacattagtgtgaatntgatcacgaaagtcagaatattcagagttgagcgcatcccagttgctgtcaaagcgagactgcatgtcatcgatgcggtgatccacatgtgacatcaacccctcaaatcgagtatcaatatgagtctccagcccttgctgcatgtnttgaaaatatggatcaaaatatcctggagcaagctcccaataatgctgatgctgatgaagatgtggaggatgatgcatctgctgttcctcaacattatgcgctgctccaccctcatagccagggtcttcctcatcatcggngaatggagtgagtggcctggtgagaaaccctatctcattcttaatagggcctgaatggagtgtgaacaatcttacat

SEQ ID NO: 22932 - DNA, 397 bp, Zea mays
  unsure (1)..(397): unsure at all n locations
agcttatgaagattcttcatcccaacatgtgctattcggcggngccagagccaacccatgttagtcttagcaattaagcatgtgtcgagctcaactctatcaaaatctactaagtttagctgaccctctaacacacnccttaatgctattgaatcatcacttcttctaaagacagtgacacttacatcagtaaaaagacagttggtacccatttgacataattgggagacataaagcaagttgtaatctaatgaatcaacaagaaaaacattggaaatagaatggtcaggagatatagcaaatttaccaaatcctatgaccaaaccttgatttccatccncgaatgtgatagctctgttgggatcttggtttttctcatatgaagagaacatccttt

SEQ ID NO: 22933 - DNA, 348 bp, Zea mays
  unsure (1)..(348): unsure at all n locations
tgtgcttcctangacgctctggtgcaacaccattattcttttcttcaattatgtcgccggacaggacagcaagcaataactgtatatgaccgttcaaatcaactgtgatgctgtcaagatcaaggatattgacctctaacctgccgtctcaccatccgtggaagagagcgagcgcgtcatcgtggcggaccttgatcttgaggatgcggacaaatgtgatcatggacacctcattatgcgcgacaccccgggtccgcatgtggcggagcacgatgagggctccctacgccaaccccgcctaggcgagtgcgttagcgacggctgcttattcctggttggatggtggga

SEQ ID NO: 22934 - DNA, 273 bp, Zea mays
  unsure (1)..(273): unsure at all n locations
aacaccttcattataatagaacaaactaacgatgatntgctgccgtccgtagcgactgatgtcagtcttcagcatctggaaaccaaactcttcacagagaccgataccttcgctctggttggctcgagacagctaagcttctcgcacacgcaagagtacccctatctaccgagaggactgctctcatcttcttttaccttcaaatcttgtccattaagtttgaaaattgagattttcctctttcaaagcatcttcagctatttctttctcttt

SEQ ID NO: 22935 - DNA, 349 bp, Zea mays
ctggagatcttattcacatggcgcgtttttttttttacctcccacgtaggcgtagcaacgaatcaagtgtcgagttcagctctatcaagaactactaagtaatgctgaccctctaacacgtcctttaaatgctgttgaatcatcacttcttctaagagacagtaaccacctttatctcgtaataagacagttgtagccccatcttacatatattgagaaacgggaaaccaaattgtaattctaaggaatctacaagaaaaacattggaaatggaaaggccacgagatattacaatattacccaaacctatgaccaaaccttgggttccatcctcaaatgtgaaggctcg

SEQ ID NO: 22936 - DNA, 226 bp, Zea mays
cgagctgcaactcgggtcatacagtctttttgctcttcccttgtcttagtccagggcttaagggaagtttgaatcactcaaaaattactgttattctgtcagaaacaggccttccccagatgtcccttctttctaacaaagaatactaacacgcctacaatcaccaacagtatgcatctgttctatatccctatttcaatattagcacccctcttgttgtgttttg

SEQ ID NO: 22937 - DNA, 293 bp, Zea mays
ttttttttggttttgcgccagggcccttaaagtggaactgctccatccgctgactatgtgtcaaaaaaagcaaatccaagccattgtgggctacgtgatcaggacaggaaaaaaggccttctaaacactttcaagtatgtgtgcatatcaacaagtcaagaggaacccaatgaaaattcttatcattcgaggtggggcttctcaaggttttgttgaaaattccgagagaatggcagctagcgctgcccatcacgcacaggctcctctaccatgagatttttaacaataaccct

SEQ ID NO: 22938 - DNA, 431 bp, Zea mays
  unsure (1)..(431): unsure at all n locations
agctntaccaaatggacgtgaagagtgtcttcttttggaccaattaaagaagaggtctatgttgagcaacctcccggttttgaagatagtgagtatcctaaccatgtttataaactctctaaggcgctttatgggctcaagcaagccccaagagcatggtatgaatgccttagagaattccttatcactaatggattcaaagtcggaaaggccgatcctacactctttaccaaaacacttganaatgatttgtttgtataccaaatttatgttgatgatattatatttgggtctactaacaaatctacatgtgaagagtttagtacgatcatgacataaaaattcaagatgtcaatgatgggggagttgaagtattttttgggatttaagtaaagcaactccaagagggcacctttattatccaaacaaag

SEQ ID NO: 22939 - DNA, 365 bp, Zea mays
  unsure (1)..(365): unsure at all n locations
ctagctataaatcacaataatagcgggaatattttttttttaggaaacatcngactcgaggtacacgggttggggtgttacactacaaaatatcctagaatttgctggggtccaccgcaatcccgctagcagactaaacgtgcccccaaacttggatcttcttctagccagaacgcgcattttctaaacttagccatatatttggtgctcccttagacacgttaaaacgaaccgcaaatgccgagcatgcctcctttcttttctagaatatatcaagatatcatcaatgtaaaccaccacaaatttatccaactcgtgcatgaataccgagttcatagaaatgagaagtgggcaggagcatttgt

SEQ ID NO: 22940 - DNA, 390 bp, Zea mays
cacctgagctgcagcttctccatttgactcttgttcctctctattagagaggtaagtggctccaccaacttggaaaaaccttcaatatatcctctatagaatcctgcttatccacaaaaacttttgatcttggacgcatccttgggttgcttccaattcactatctcacttatctttcctgggtccacttttattccaccatctgtaacaatatgcccttagaaatgcaccttttttaacacaaaattacactttcagaatttagcgtacaagtggttgtcactaaacttctgtagactaaccttacatgatcttcgtgtgcttcttcatacggagaatatatcactttgtcgtcaatgaataccaccacacactgattccgatatttca

SEQ ID NO: 22941 - DNA, 90 bp, Zea mays
caagcaaatatatcctttggaaaatgattttaattcgctttgttcgaaagattgaacgcactcaattctggcctttaaatctccgaccaa

SEQ ID NO: 22942 - DNA, 389 bp, Zea mays
tggtgaagatatggctaattggttgtgggtgctaacataagcaatattgatatgcccttttgttggtgatctctctaaaagtgataccggatgtctatgtgcttagtacggttgtgttcaacgggattattcgccatgccgattgcactctcattataacataggagagggactttgctcaacttgtagccatagtccctaaaggtttgcctcatccagaataattgtgcacaatagtgtcctgcaacaatataaatcgttttggtggtggatagagcgactgagttttgtttttttaagctcaagacaccagggatctccccagaaacctgacagtccctgatgtgctatttctatcaatttaacgtctggcataattgggcatcaaa

SEQ ID NO: 22943 - DNA, 427 bp, Zea mays
  unsure (1)..(427): unsure at all n locations
agcttggtaggaggtggtgccggctttggagctcggcccgagacgaagatgaggaggaggcacatcaggattgatctaaggcccagctgatggtggttgacagtggatctggcagtgaaggatctgctgtcaccgtgcacggaggcggaggcgatgatggcgagtggcgcgtccgattctgtgttgtgtgcacgcatggatgtgggctggattctgtggaaggaggagggaagaaaataaggcggagatagagaatcaatctggtccttctattntatgtccaaaggctgaaaaaaacaagtgatgggtgcctttggattaatcagttgttgcatataaagactaaataatacctttagggagtgaagtagtgtgtaacgacactacaatggctgctgcaattggcatttgttttcctttatatgaa

SEQ ID NO: 22944 - DNA, 312 bp, Zea mays
ctacgatcatggagcttcggcgccgttttctttttataacaaagcggtctaaggaagatagatgactcatgagaaggtaagctacaggtacaagtttaataccgggcttggatgacttcgagctaccatcaccagctaagtcacgccctcccttctaccacagtgtggttataatctattccaatgctttcgtacacacaggggaggacagtaaaataccatggtgattggcctgagatagtcctgtttacgatctttcttgcgtgcaaccagtctttatgaaagcaacaactgtgcagctagaagctatca

SEQ ID NO: 22945 - DNA, 412 bp, Zea mays
agcttgtgaagatactttattccacttgggcttatcagcgaagccaaagccaacccatattattcttagcaatcaagcaagtttcatgttcggctctatttaaataaactaagtatagctgaccctctaacactcccttaaatgctattgaatcatcacttcttctgaagacagtatctcctttatccgtaaaaagacaattggagcccattttacattattgagaaactgtatgcaaattgttatctaaagaatctataagaaacacattggaaatagaatggtccagtgatttaacaattttactaagctctttgaccgaaccttgatttccattcccaaatgtgatagctctttgtggatcttgggtttctaataagaagaaaacatttttttttccagtcatgtggtt

SEQ ID NO: 22946 - DNA, 299 bp, Zea mays
tacgacgagcgagctcagactgtccggtgcacaccggaccgttctgtgcgccatgtccggggcgccatcttccgaagctcctacggcttcttttatcgggataatacacctgggcttgttctgggcaccatcgaacatattcggtgcacctggttcgggcgcccgcgtgaagcagcagaactgctttcctaccgatatattagagttggggccttttatactttcactccaccggccatttggatgtgtgggagcccatacaacttaccaaggcttattatatacatttcctagcgctc

SEQ ID NO: 22947 - DNA, 369 bp, Zea mays
atttgaaatcatgcttatctatgcgtgtggtttaatgataataataataattggaagaattatcgttcaaattggtcagtccgaataagaatgattttgcctgtgaagtgaggtggtgacaatgcccaagtagtcatcactttccctatgtttataagtcgagtcaatgcacattaaggggtcataaaatttcacatctcacatagtgtatggttgtgtcataacttccaatgatgtttctgagtgacaagtaatttgtaatgcacgcgtgtgatgatgatattctgatttagtagatgtctgtaattgtgtaggaagcttatgtatactccagcatgtgggaatatttggtaagaatatttaaatgtg

SEQ ID NO: 22948 - DNA, 275 bp, Zea mays
ataaaactagcttataagaaaagtgagagttatttttatttcaggagatatggcagggtggcaacatggccataagaaaatataagaattaattggaatatctatcatgagaaagttgagcaaagttatatatcaagagatattgctaagatggtatcaatggcatgaacaaaagtttagaagcagggtatattcaatttagggatagaaaccactatataaaatatatcgcctttcatctatcaaatctatactaaaacatctataacctacta

SEQ ID NO: 22949 - DNA, 413 bp, Zea mays
gcaacttggtctctcacttgtgtgatgtgcgagcaccacgctttctcgagaacagaagctgcatcttaggacctaatcatagcataataatccctctgggttctcataacttaatcaaaggcatcaacctcctctttaatccattctatggctctgacactgtccctactggtgaaattggtttcactggaagttgtgccaataaaagcaaaacgtcttttatgcacttacatcatcgttaagctaaactgaagcactactcgcggaatatttgaaaagagctactaagaatgtctttctactgtattgtttttcaagctccttttcgcatattcaagccttaagcaaagctgagacatttcgtcattgtacttctcctccgatttctttgtctccaccctcaatttcttaat

SEQ ID NO: 22950 - DNA, 410 bp, Zea mays
agcttcattctctgtttattcatgttatatttatgaacggatgtccttcataactttcatctttagaacattatatcctaagggaagtaatgcttcctaagacaaaagacattaacatttaacattttgtgttgccttgctcttaactcataacatttgaaaacacagccctcaccaggatctagctctattccatgaagaagaaagatcaagaagatgagttcccttcagaggaggacaatgatcaagggggagatgaccatgaccaattccccgaagatgagcaagaaattcaggatcaaagtcccgcaccccaatagtccaccaaccatttaaagagatcaccccgctaactccattattgctgatattcataagggggtacaactcaatctcaaatgctcattttt

SEQ ID NO: 22951 - DNA, 352 bp, Zea mays
  unsure (1)..(352): unsure at all n locations
tgtgaacagtacanatttataatgtataaatctttttcagcagatcagccgaagcccatgctcttatgtgaggacatagcagagctaaacgtgctgttgggctctcaattatccgaagaacatgagaaaaccttgataatgttttatgttcaacacaaaaaatggttttgaatggtcatccaatgatctctgcaaagtaaatagggatgttatgaacatcccttaatgtgacccttcttcaaactaaaaagataggcttggaaatgtctgatgataaggccaagggctcgtatgaatcaaaaactcctcatgcggagtttcgagaagtaagtccccaatggctactacactg

SEQ ID NO: 22952 - DNA, 431 bp, Zea mays
  unsure (1)..(431): unsure at all n locations
agcttataaagattcttcatcccaacatgggctattcggcggtgccagagccaacccatgttagtcttagcaattaagcaagtgtcgagttcagctctatcaaaatctactaagtatagctgaccctctaacactcccttaaatgctattgaatcatcacttcttctaaagacagtgacacctacatcagtaaatagacagttgtagcccattntacataattgagaaacggaaagcaaattgttatctaatgaatctacaagaaaaacattagaaatagaatggtcaggagatatagcaattttacccaatcctttgaccaaaccttgatttctatccccgaatgtgatagcttgttggggatcttgggttttctcgtaagaggagaacatcctcttctcccctgtcatgtggtttgtgcacccgctgtc

SEQ ID NO: 22953 - DNA, 344 bp, Zea mays
atgggaagcaagagtagggggagattgttagattacttatcttctcagttacgctcctggcgggaatttctgttgtacagtcagtggttagcgtgagccaaggacctgtcctgcgctgcgcagtgtccaatgtgagtgtgtgtcatctggggagagtgctcctagcatcctaggtctggggtatggcgatcgtgggaagttttggagctgtgttatcggaacgcgttgagtaatccaccgaatatatttaaaaacacaaaaaggaggcaggctcacccgttttgggctgtgcaaagaaaatcctctggtttcactgttcttcttcaatactcgactgattgatc

SEQ ID NO: 22954 - DNA, 411 bp, Zea mays
  unsure (1)..(411): unsure at all n locations
actagctgagtctgggatgcaagcagtatattgaangactaagcctactacggggcataggttcaccgaaatccaaaccttcaacttgtgaataccctctggccacaagtcgcgccttattccttgtcactacaccatgctcgtctttgttgttgcggaagacctacttggttcctacaacatttttgttatgatgtggaactaagtgccttccctatttcctcttgaaattgttgagctcctcttgcatcgccaatacccaatccgaatcttgaagtgcttcctctaccctgtgtggctcaatagaggaaacaaacgagtagtgttcacaaaaatgagcaacacgagatcgagtagttacccccttatgaatatctcctaggatggtgttcacggggtgatctcattgaa

SEQ ID NO: 22955 - DNA, 422 bp, Zea mays
  unsure (1)..(422): unsure at all n locations
tcagagncacctgaagcatgcangcttataccacagataagtattgaagtgctattttattacgtttcagacacagagtcacgattctatctaaacagagcacacagactcaaagatttatcctcaggttcggccaagccctgatatgcttgcctattactctttggagttagccacacctgggcttggagattatttcaactccttcctccgtttgctcagatctgtcaatatgacagatagaagcctttactattgagatgggttacaacaacatcttggctgcttacaaacttctctgcagcaccctctgtagagtaactatacgcttaagaccttgctcttgctcttatcagctctttatcactctctaaaggcttatagctgtgccttctacacaaactatatatgtacacacaaga

SEQ ID NO: 22956 - DNA, 403 bp, Zea mays
tctaagggagaacacattataggattaacaatatgttcatttgagaataacaggatttgtagcgcatgccaagcagggaaagcaaagttggcactcatcatccgcataaaaacataatgacaaccgacaggccactagagctcctacacatggacctattcgcccgattgttacataagcatcgccggagtaagactgttgatgatcaagacaccgctagaggggggggaaagactgtttgactaaaatcacacactaaatgatttaatcatacacagaggaataattatctagtgcaatagtaacaatgtatgaaaacaactctgagatgaatactgtagacaatagcgaatcactaatcattcaatgtataagtatgcttaaggaagagaaccgaatttat

SEQ ID NO: 22957 - DNA, 423 bp, Zea mays
  unsure (1)..(423): unsure at all n locations
cagcttcnggaaaccaacactctgtgatagagtgccgattatcttcgctccaaggtgatctcggacgcagcctaactttttatcgtctacaccaccgaagagcagggcccctggttgatatccgcaagatatggcatattcttttaactcatctttcttagcctttgtcaactcttggccaattaagttttgaaaaggtaaagttttcactttttgagcattttcaactatttacttcttcttcttagtactggagccattagttcttcagcggctgcagcagcttcttctgtggccatattcaaaagtatcttatcaatgttagaaaagtgctttctaaaggacatcttccggtgtggtagcttctggagctacagcttcagtaagtgcagcttctggtgaagttgcgctctaacagctggt

SEQ ID NO: 22958 - DNA, 433 bp, Zea mays
tctccaagctggaactgaggcattgcctcacctgacaatcttaatcgccctcatcggacttcggtcgcccgccaccgcgcgtaagccgagctattcggtgagccattctccaatttctcgcgcccatgccttccttaacacctagttgagctcactgaccgcgttaattgaactctacctcactggataggccggagccctcgccggcgacgagcttccccgactactcaacgtggactggcctactccgactttccccaaagacgatccgcacatcggcgtgaccattacgccctcccctacgcccttgaccacctaaacggagcaaatctcgccaccggtaagcccctccgcctttcctccaccgcgggtactggttaattgcgagaaggatctctggttatggttatcaaaaccccaatgcgtttctgaa

SEQ ID NO: 22959 - DNA, 393 bp, Zea mays
tcaagcctagctaccggttgtgacaccccaggtgtctatttcgcgttatgtcgggagatatatcctaatctcgggtgctcagtgaaaaatttctatttctccatcggggatatctctgtctatcacgctttttcatggagagtcatcgagttctgagttattcgatcgcgagaaacaaccaattttggagcgtgttaagacttttatatctcggaacaaatgcgaactccaaaatcattcttcgattataaatctcctctgaggctctttatatcataccctcgaccattggtaattgatctgagcccgagtctaatttctcgaacttcgatcgatgtccgactatttaatccgagtctgtttctcagacaaatactcgaagggcgtcctcta

SEQ ID NO: 22960 - DNA, 450 bp, Zea mays
tccaccactttgttctcgcggtctttgcatgtttgtcctcgtggacacttacatgaaaacaaaagtccaccaccacaaacttgtgtagagggacaacacactccctagggcccaggtatcaccttacaatctaagcaagcatgtctatcctccctccttgcaaggataaagtcgatctggctcgagtgttgtccattatgaaaggtcactagatgagaatccctcttcctaaaaaaggaattcgctatcaacagagcataggctaacgtgaagttcaaaacatcgggcctgtttggttcagctcttttctgaccagcttttctgaaaatctggctgtggagataatctggctgtggagagaatctgagtatcattacgattacgtgtggaggaagataaagttgttcatacggctcaggatctataaagtgacagatttctactattaaa

SEQ ID NO: 22961 - DNA, 434 bp, Zea mays
  unsure (1)..(434): unsure at all n locations
tagcttctaaagggagaacacgtgatatgtctaactaatggtactctcgaaaaagatagaccttgtgcagcttgtcaagcacgtaaacaagtgggaggagcgcatcacagcatgaatgtgatgaccacatcaagacctcatgagctgctacatatggacctctttggacccgtcgcctatctaagcataagaggaagtaagtatggactagttatttnttatgacttttcccgcttcacttgggtattctttttgcaggataaatctgaaacccaagggaccctcaagcgctttctaaagagagctcaaaacgagtttgagctcaaggtgaaaaagataaagagcgacaatgggttcgagttcaagaaccttcttgtggaagagtaccttgaggaggaagggatctagcacgaattctccgctccctacacacc

SEQ ID NO: 22962 - DNA, 418 bp, Zea mays
  unsure (1)..(418): unsure at all n locations
ggacacttnaaactaagcttgccctatatactaagtatacctctttaattttttcatttcaagattaagccctaccttattaaagtgatcattcaccatccaagtntaattgctaaattgcatatcataccatgcatatatttactcattgcattatagattcaatctcctgacgggagtacgtgttatccccagcaggagctgtcacgaggagaccagagcaagctccgacactgcatcgaggatctcccgcaccctgctattgaggtaaccccggtttatgcataccgtatctatatatgttactttactgcactaagttgaggattgaatggcactaagtgacgagttgttgaacctctattgatgaataggattcttttgagaggaactgtatgctcgtcaagtactgtttgta

SEQ ID NO: 22963 - DNA, 365 bp, Zea mays
agcttcttgaccacctgaacgttcacctttttgttgtagctaccaccggccatgatggtatgtacacggcagtccttgacgatgaggaacatgttgaagaggttgtggcgctgtctgttgtcgttgtcactagccgtggcactcaaagctcgttgcacaatcaaggtcttataagtctcggtcgctgttgtaccaagaacctcttcatcaccatcataagtctctgcaatgttagctccaacaatatcttcatcttccacatcagaagcactaacatacccaccatcaccagtagcaatgtatgcccgtttgctggggcaatctcgctgaatatggccaagtccctggcagcggtggcacttatg

SEQ ID NO: 22964 - DNA, 435 bp, Zea mays
  unsure (1)..(435): unsure at all n locations
ttggaccaggaagtcgctttagaggtcatcgtttccgctgaccgagtnttgggctctgttgacggcactgaattggtccctgctggttcgttgcaagctgcttcgggtggcgaccttatgcccggtcatcaattgatctctcatgatttgggagtcccttcgntcttttccaaccttcaagtacttgtgatattnttagcttgaatttaactccacgtgaactgctatcattacactcatttgttttccttatcaggctttggtggacgggatggctaaccagctgagggtgcagggtgctcctgttccaaaagaagctttgtctcttgcacgttggaatccagtgttactccgacatcgtgtctctgacttggaggcgaccaatgctggttagtgcattatttgattctctttgtcttcattattgaactgcct

SEQ ID NO: 22965 - DNA, 354 bp, Zea mays
gactgtgaaatacttatttccacatgtgctatcggcgatgccagagccagcccatgatattcgtagcaattaagcacgtgtccagttcagctctattaaaatctactcaatatagctgaccctctaacactcccttaaatgctactgaatcattcactctctttaaagacagcttcacctatattctgtaaaagacaagtgtcacccattatgcataattgagaaacagaaagcaagttgtaatctacggccctacagaaaaacttggaattggatggccggtgacatacaatttacccaatcttgaccaaccttgatcccatcccaatgtataactgttgagacttggttttt

SEQ ID NO: 22966 - DNA, 408 bp, Zea mays
  unsure (1)..(408): unsure at all n locations
tgccatangtgctggcgagggacctatctgttttgccgcattcataagcatagcagaaggctagtacaggtgcaaagatgtggtaccacttgatctgagggataatgagagggagacagccgatcgatttatctgccagaacataacatagccacccaatgcaactgccttgggaatctggtccttaacgaatagcttattgccacgcttgtcatcaaatgaccagtttcatttgggccggaggtggtgtccattgtccgacacgcaagtgtgttggcatgtttttccatacattgatcctacaatggcataatacttcaaaagtgtcaggccgtcccagaatacggcttggtattaaccctgcatgttatcctcgcagttttactcatattagtgcaaaggcaaatc

SEQ ID NO: 22967 - DNA, 361 bp, Zea mays
  unsure (1)..(361): unsure at all n locations
agctgtaccttgaattcctatagccatcatattcttgagaggctttttccttaaacgggtaaaactcgcgaacgtacacttcgtactaagggtgtttgaacccatgttgttgccaggactatggttgtgctgctatggatggtgttaaccgccggtgggcacgaccttcttataaatcaagaacctctattatacttcttgtgaagattgncactaagctcacctatattttaaacttattaataatatataacacttcaaagtatattcctttgaaacacttttgttaccactccgataaacataatgtaaaatttggtgtgacctgtaagattttttgaataaagaaattccgctgcta

SEQ ID NO: 22968 - DNA, 427 bp, Zea mays
  unsure (1)..(427): unsure at all n locations
tctaaagggagaacacattatgngactaaccattgntcatattgagaaagacagggtttgtagcgcatgtcaagcangatagcaagttgttacccaccatccacacaaaaacatcatgacaacggacaggccactggaactactccacatagatctattcggtccgatagcttacataagcatcggcgggagtaagtactatctaatcattgtggatgactattctcgcttcatatgggtggtctttttgcaggaaaaatcacaaacccaagagaccttaaagggattcttgagacgagctcaaaatgagttcggattgagaatcaagaagataagaagcgataatgggacggagttcaagaactctgaaatagaatgatttcttgaggaggagggcatcaagcatgatttctcttctccctacaca

SEQ ID NO: 22969 - DNA, 401 bp, Zea mays
agcttgccattacttgtcaaagcaacttcatctaccagcacagcaactgcagaccataccagtaacctggccctttccatgctggggactggatatgattggaccggtcaagaaagctcaaggaggatacactcacgtactggtagcaatcgacaaattcactaaatggatagagttcaaacccattgcttctttaacctcagctaaggcccgggaattcatacaagacataatattcaggttcgggataccgaacaatatcataactgacctaggattccactccacaagtcagagttctttgatttctgcgagcaaaaaagcattcagatcaagtatgcttcagtagcacacctcaaagccaacgggcaggttgaacgagctaacgggatgatattgga

SEQ ID NO: 22970 - DNA, 436 bp, Zea mays
  unsure (1)..(436): unsure at all n locations
tctaaagggagaacacgtgatatgtctaaccatatgttcatttcgaaaaagatagaccttgtgcagcttgtcaagcagggaaacaggtgggaggctctcatcacaccaaatatgtgatgacaacatcaagacccctggagctgctgcatatggacctcttcggacccgtcgcctatctgagcataggaagggagtagtatggtctagttattgtggatgacttttcttgcttcacttgggtgttctttttgcaggataagtctgaaacccaagggaccctcaagcacttcctcaggagagctcaaaatgagtttgagctcaaggtgaagaagataaggagcgacaacgggtccgagttcaagaaccttcaagtggaagagttcctcgaggaggaanggatcanacacgagttcttcgctccctacacaccacagca

SEQ ID NO: 22971 - DNA, 283 bp, Zea mays
ggacttatataggtaatgtcagacatacacaacggatttgatgtgtattgcgatgcatcacaccttggacttggatgaggtctatgcaaaaagaaagagatatacttattccttaaaggctgtgagaaaacatgagaaaaaatatcctacacatgatttggaacttaactggcgcagtgcgtgctttggaaatttggatgcactatcttattggaaacaattgcagaaatttcatggatcacaaaagctctgaattattatattatctcacaaagaactcaac

SEQ ID NO: 22972 - DNA, 339 bp, Zea mays
tgaagcggatatcagccgctaccgtcgacagtttattgtcggcagtttattctattctaatatcaaggtaaacattttgtgtctaactcttattactcggggtacgaaaatattttctaacgaacgctatttgtacacagagcatgcttttgagccaggcattaaaaatgcaacaagattataggataaaaggccagagttttaattgaaaatttagaaacaaaataaagaccatctgctgccatgagaaaaagactcagctacaacagccgaagctattagggatgctgaagccaaatacagaataaatttgagcttctttccagcaggaattttgac

SEQ ID NO: 22973 - DNA, 438 bp, Zea mays
  unsure (1)..(438): unsure at all n locations
agcttctaaagggagaacacattntattgatttctaatgttcatttngagaaagacaggatttgtagcgcatgccatgctaggaagcatgttggaacccatcatccacacaagagcatcatgacgaccgacaggccgcttgagctactccacatggatctattcggcccgattgcttacataagcatcggtgggagtaaatattgtcttgtaatagtggatgattattctcgcttcacttgggtattctttttacaggaaanatctcaaacccaagagaccttaataggattcttgaaacgggctcaaaatgagttcggcttaaggatcaagaaaataagatgcgacaacgggatggagttcaagaactctcaattcaaggctttcttgggaggagggaatcaagcatgagttctcttctccctacacccacaacaaa

SEQ ID NO: 22974 - DNA, 448 bp, Zea mays
  unsure (1)..(448): unsure at all n locations
tcttgttaagtcaatcttgtcagcacaaacacatcatttttcagcatgtacctattgtgggagatgttgtggctggcagcacatatgaactcaaatgagtctcnaacttttacagctgttagcagacttattcaagcacatctccaccaattttcgtggtcataggatctgtacatcaaaatttataaatgtttcttttgagtataccgaaatttgtcataagtgacaaggatttgaaatattgaaagtcactttgattggaaggctctcatataggataaatcacataagttgtttgagagaccatagtttggttttgaattgatcgataatcatggaaaatgaaggggtacaaggatatttgttgagaaatattttggcacttatcttgcgactccaagttgaanatcaagaccaaagatgatctaaattgaggttatcatataac

SEQ ID NO: 22975 - DNA, 415 bp, Zea mays
  unsure (1)..(415): unsure at all n locations
nagcttgcacccangtacattggtccattatctattcttgatcaangnggaccaatggcatatcgacttcaactacccgaaactttgtctgctgtacataatgtggtccacgtgtcccaattgaaaaaatgtcttcggattcccgatcgaaccgttgaagtgacagatgttgtccttgaaccagacttgacatattccgaacatcccattcgggtcttggatcaaaaggacagggttaccccgaaaaagactctcttgttctataaaataccagggaaccaacattcttgagatgaggcttcatgggaaacttcaaactttttagataagaatatcccaagctttttagcctcatgttatttgtaaagtgtgttttataaggtgtgtttagttgtcgtaataaagagtgaacccc

SEQ ID NO: 22976 - DNA, 450 bp, Zea mays
  unsure (1)..(450): unsure at all n locations
cacacataaatactcaactttcaaatatattacataaaacctatcctctctttgactttttctgnaatttcgttcagtaatttgtcgacgacttcgtcgacaatggattcagccatatttatggtatccaatgattccctcatctctggatcagctaggggatcgtacggcttccgtggcggggatagttcagctgaaatatgttaataccattattcaaacttataaccaaataccgagctaaataatcaagaaacaacacatatactccttcgcgttctgcagcttctttagctcgcttcgcttctgcccgggcgtcgtgggtgtctttttcactcttttttcaatctcgtggcccagctctcggccaccgttcacccaaacatcgttataaaatttcccgcccattaaagttgcttcgactgaaggatccttcgtatcatctacaga

SEQ ID NO: 22977 - DNA, 436 bp, Zea mays
agcttgtatagctgttgtaataaagaagtaacccccacatcatccctgtcttgtaccaaaaataaagaaataaaaatgtgatgtgtttcctttaccattacctaccctaggaattttaatctcgggacgagattcttttatggggggaaggatgtaacacccctggtgttactataactaaaacttgaccatgacatcataagcattggcattgcatatgtttgacacacctaaagtgcattcactaggcaaaaatttcaaacaagttgtattgttttaatggttttgcaaatgaaaccctggttaatggacttaaccctaaatagtggtaaaggggtaaaacttaacccaagttaagaaaacctaatagctttagggtaaaagtcataaaatgaccccaaaaataaacttgaatcacttttatacccctgggata

SEQ ID NO: 22978 - DNA, 438 bp, Zea mays
tcatcccgagagacgaattatgctggaccccgttccctgtcttcgtggtgacgccgtatgttacgacgcctattctagcgtcgacgtgtgttacgttggggggctcctcccccggtatggtgggctcgtcgtcggaaacaggtgcatcctccttcttctctgaatgaagaggatgtccgagaaaaggagcttggtgtgatgctccggctcccttcatcttctttgagggtggagtggtcgaaatggtcctcaattgtgccttcgaggttgcgctagacctagaggcacatgcttctcttcaccgagtgatccgagtccatgcccgactgggtgatgtgggcaagggagttcgccgtggcggaggcgtggcctctgtcggccgagccgcaggcgtcacaacgtccctgtgctcgcccgacgttggtgcgatcttgtgtg

SEQ ID NO: 22979 - DNA, 373 bp, Zea mays
  unsure (1)..(373): unsure at all n locations
ttaaggtaggtttaccccttattctattatatgcttaagggataaggaaatagaaaatgtgattttattaatggacccgagagtaccctcttttnttgtaaggtacttattcaatattgttcactggaaaaatatatcataccctgttttagtgtaaaaataagaagatctcttttggtttaataaaacaagtggaacttataaaaactctacaaaaataaccccaaggttaaaacacccccaccctcgggataactttgggttattagaaagaacttaggaaaaatattgaatctgctggttgacatttttcaaataataatggagtagaaagtggctttttgacattaaacttaagaaaatataacttaat

SEQ ID NO: 22980 - DNA, 441 bp, Zea mays
  unsure (1)..(441): unsure at all n locations
tgttcccaactgcggttattgcaccgcgaagatgtttgttatgagccacctgngttttgttgtcgtggtgggaaggttgagctatctccagtggagacccctccccaactcaagaggttgtgggatagtgcagactctgatgctatgcactcttgtgataacattaaggtttttaaatggcctttctctttcacttcctatactggtgtctccatagtatgacaactaatgtaaggggttctggtatatacacgtttcgagcacagggcatgatgtaccataatatcaagtcatttggtagggaaggtggggcagagcataaacaccttgagctttacttttacgatgacgatcccagcctcgagcatcggtatcgtaagtgccgtgaagagcatcaacagaaagacaaggaggttatcaaacagatagtcgacatactac

SEQ ID NO: 22981 - DNA, 441 bp, Zea mays
  unsure (1)..(441): unsure at all n locations
gcttcngatctcctggcttgcaactcttggtgacatgaccanaaataacttgagagtcgggtttaaagattgcccttcttattcccattgcctttaactttcggagcccacaaagtaaaagcttcgtattcatcaataatatttgtacaactgaaatcaagccttgctgcgtagcatagtctgactttggaaggtgcaactaggaccagcaccgctcctgcaccaaaagttctccaggaaccgtcgcaatcactgttcacgcttcaacatctttgtttgcttcaacttcctatacccctggcgttcaaataacaataaaaactgctcacgcctgtgactgtattgaggatctatgcacatagtcaatactgaattcgttaagcttcgcagaccactttccaatcctttcagtacctattctgtttctcaaaatatccttca

SEQ ID NO: 22982 - DNA, 453 bp, Zea mays
  unsure (1)..(453): unsure at all n locations
tatcanagaaaatggttaaagctgagcattgcttttaatgttggtcaaacttttattagcaattactagatgtaagtaaataccaaaccataataaataatagaacaaaaattaataaataatcccatgcaaatgcaaatgacaaattgaatttaagttccataaattaatcatgtgagggtccgagccgctcatgaccgtgagcacggctagtatactagttttacactctgcagaggttgcgcatctttacccacaagccgtgttacccatctgccaaggggtcatgaatcccatacacctctatcaaggaagcgaggcagggtaacactacgaggcctttacaaagttccactagcttcagaaatcccgctacagtttatatgaagctccaatgcagggttcttgcctgaccgccatcgcagcaaagtcaacccaaggttctccctacac

SEQ ID NO: 22983 - DNA, 435 bp, Zea mays
cggaccttaagcacctgagctgcagcttggtctcagatttttgcttttttaatggattaggtatcctgcatgataagagcctcatagattgagtgatggatgtccaaaggcatggagagaggattatcctattttaacctattttgggggatatagtcttgaacattattagtgcatatgcctcctcacagttggtctcaatgagagtgaagaaggtctgggaagacttatatgacattggcttaagcagtctcccccaatgagaaacttctcataatctcaatggtcatgtacgttcaacaaatgcagtctatgaaatggctcatggaggtttcatgtatgtgagtaggaatcaaggagaggatattttccactttgtcgagcctaccacctaatgatagccaacactatcttcaaaaagagagattctcattt

SEQ ID NO: 22984 - DNA, 424 bp, Zea mays
  unsure (1)..(424): unsure at all n locations
tctaaagggagagcacattataggattatcatttgttcattttgagaaagacaggatttgtagcgcatgcctagcagggaagcaagttggtgcccatcatccacataagaacatcatgacgaccgacaggccactggagctcctacacatggatctattcggcccgattgcttacataagcatcggccggagtaagtactgcctagttatcatggatgataattctcgcttcactcgggtattctttntgcaggagaaatctcatacccaagagaccttaaagggattcttgagatgggctcaaaatgagtttggcttgaggatcaagaaaattagaagcgacaacgggacggagttcaagaactcacaaatcgaaggctttnttgtggaggacggcatcaagcatgagttctattttcctaca

SEQ ID NO: 22985 - DNA, 391 bp, Zea mays
gctctcaagaaaggtacaaagacttcgcctgctaaccaatacacctcatgttctgttatgttttacaaaggatcaatattttttatataattatacgtataaacagcgcctgcccacggtgggcggttgccatgctcgtaacgatcggcaacctgtcttttctcttttcgtgcaaagaacaacctccaacttgtccagcgactttcctggaatatcacattgaggcatgcaccttctggtcctgtggcttcaaactctgctcttcattgtcacgcacgttcgcgtcccgatcataaaaacacactgctagcccgcaaaatccctttcttttgcgtttaatttttataacgttcaaaagacgggccgttggatttaatggaattaacctaaa

SEQ ID NO: 22986 - DNA, 432 bp, Zea mays
  unsure (1)..(432): unsure at all n locations
tctaaagggagaacacgtgataggattaactattgtgcaattcgaanaagatagaccttgtgcagcttgtcaggcaggtaaacaagtgggaggagcacatcacagcatgaatgtgatgaccacatcaagaccactggagctgctacatatggacctcttcggacccgtcgcctatctaagcatagggggaagtaagaattggttagtaattggggaatgaacctttccgcttcacttgggtattatatttgcaggataagtctgaaacccaagggaccctcaagcgcttcctaaggagagctcaaaacgagtttgagctcaaggtgaaaaagataaggagcgacaatgggtccgagttcaaaaaccttcaagtggaggagtacctcgaggaggaagggatctagcacgagttctccgctccctacacaccac

SEQ ID NO: 22987 - DNA, 437 bp, Zea mays
  unsure (1)..(437): unsure at all n locations
agcttgacattgnctnccttttggatattctatgccatcctaaggccagggccgtcttccattatagagcatgcttctagcaaatttaaatttttcattctctatctcatgctcattaattatactagttagttgcgctatgtgatcatttttgtttttaattaaagctatgtgatcatgaatagcatcaacattaatgtctctacatctagtacaaatagtaacatgatcaacactagatgtagagggtttgcaagcatttaattcatcaatcttagcatgtaacatggcattctcatttctaatattggaaatagagacattgtaaacatttaaatccttaacccttacaattaatttattattctcaatcttaagactagaacttgattcattcaatttgtcaaatcttacaatcaaactagcatttatatttt

SEQ ID NO: 22988 - DNA, 440 bp, Zea mays
tacttagactgtgagatgatgggataacaattttttaattcccatcttgttcctgagcagcatagggttagacaagccactagtgaatttagagattttgctatcatttggtggaatgaacttgtaacacacgtgctgcaccacaaacatggaatacgttaaaagaggagatgcgagctcgctttgttccccctctcttatagacgtgatcttcgaaaaaattgcaacgcttatatcagggagacatgtcggtacaggaatactaccaagagcttcagaaaggtatgctacgatgtggggtagatgaggatccggacgatcaaatggttaggttttatgggggattgagacgggagattcaggatattgttgattataaagaatatcattctatacaatgcttgttccatctttctattgtggcagaaaaagaattatag

SEQ ID NO: 22989 - DNA, 439 bp, Zea mays
  unsure (1)..(439): unsure at all n locations
ggacctnagagtcgcctgcagctgcaacttcattttaggacgctattttttcttttcttagaaaagatgtctcaagacataaaagttgctgctgatccgaagctgagcatagaggataagctccttgaggagaatactgctatatttgttgagtaaatagcatatactaattcagataagattacttaagagatagtataaggcttgtctgaagatactgatgatagcgacaactatgatgtggaaagtgaaggcgaatatttttaatatcggccctggcgaccaagtcatgtagtcttcgggaaatcaacattcaaacagagtcattttgacttttgagaaagaggtattttctagatatgactattgtgagggctgacctatacatggtcgttcctgctcctgaagaaaacaagttgtgatcttctcaagcttttta

SEQ ID NO: 22990 - DNA, 419 bp, Zea mays
tcttagggagaccacgtgataggattatctaatgtgcaattcgaaaaagaaagaccgtgtgcagcatgtcaagcatgtaaacaggtgggaggagcacatcacagtaagaatgtgatgaccacatcaaggcccctggaactgctacacatggacctctttcgacccaatcgctatttaacataagaggaagtaaggttgatgacttttcccgcttacttgggtattcttttgtcaggataagtctgaaacccagggaccctcaagcgcttcctaaggagagctcaaaacgagtttgagctcaaggtgaaaaagataaggagcgacaatgggttcgagttcaagaaccttcaagtggaggagtaccttgaggaggaagggatcaagcacgagttcttcgctccctacacaccacaacaaaa

SEQ ID NO: 22991 - DNA, 351 bp, Zea mays
agctagttactcacgagcttgatgcctttcccctcaatatcaaagcctcggaggatgaccgcgctctttatgaaagccatgtgcgacaacgccatggattaggttgttcgtgccgcgggatcctaatgaggaggcccggcattccggtgcccgaaaatattgtcgctgatgttcttgccgcgcttgctgtcacacgccgaccattcttttctgctacttctgcagcccatacttcctgcaaaaatgctccaccgtatgattctcttgaaccgagaacacttttttattgagttaagccgcttaaaagaataatgtatcgtgaattctatgtgtatgtcattgctatgtttg

SEQ ID NO: 22992 - DNA, 434 bp, Zea mays
  unsure (1)..(434): unsure at all n locations
gacactctanaacctctagcttctcaatgcttacaacggtccagctttgttatttccttaaagaataacatgcaactgatgggacacacgtcgatcctctcatatgtcatcccaagaccagccaacatattctttgtgaagtacatattctttggctacttatgattcttcgggagaacctcagccatcaggtggaccatgtcgttgtaagcactgtttcacaggttgtgctccgactttatcgccattaaccttgtgagagtcccaagaactgacatttgagtgtgctcgtgcagactctcttctcccgcggcgagtattcagatgaattcctgagcatcgtgtggaagctgccccggctcctaatcgttcattttaacattcctagcacgatcatgcggcgatgtcgatcatcctatcatgtacatcatcaa

SEQ ID NO: 22993 - DNA, 445 bp, Zea mays
  unsure (1)..(445): unsure at all n locations
ccggatcttaagcaccgcggctgcaacttaactctccgagacctttttcatttctttctaaccatggtaaggtcattatcgtatgtgatattctatgcatatatacttcatttgttctcttgtatggtgtactgtttgttccctaatttgaatggatggatgtatgtatgcttgttatcgcatatagaacgatccggtcgaagagcccgaggaacttccatgagaagcccctgagcaacaatcggttggtggaggcaagngtcccttgacctatctctgtcctattcattctttaattcacctcccggattacacatttatgcctaaagattgactagctttgatatccatgtccttgttacctatttgggttggattataattgtttagctttatgctattgctcaaactctaatacatgaacatgatgagattatttatgata

SEQ ID NO: 22994 - DNA, 438 bp, Zea mays
ctgggacaatattttgtgatgggtcatggggaacatttggcgcaggagcagatgctattttaatttcaccatcaaagatcaaaagctgctatgcagcaagaatggacttcaaatgcacaaataacattgcagattacgaagcccttctcttggggcttcgaaagcttaaggcaatgggaattagaagggcaatactcaattcgactaacaagtcatttcaggtcacattgacaaaagtagtaaagtaagggacccgaagctagaaaaatatctagacgcagtccgaaggatggaagtctcttttgaaggcttctctgtaaaaaacatcccgagaggaaaaaacgagcacgccaaattgttagctaaattagcggcacaggggcttccgttacctttggaggtgttcttcgagacaataaaagcaccttcggacgagct

SEQ ID NO: 22995 - DNA, 403 bp, Zea mays
acagcttgagattgactctcttaagcattttatactgcagggtgagtgcccacatactctgggatgtatggcgagtgatacaaagctgtatgcctgacctgcttccgatgagcttgttgtgctgcggcttccgctattttcttttgcttctggatgggaacatgacacatcctagtagtatggcccttgttctcaccacagaataagcaaaagattcttttctgttgatcgccaaatcttccttcgaagcccctaaccactctgccttttggagctggtggtcggaaaggaacttgctgttgccccgaagcctgtgaggaatattgggcccttgctggtggctccccttattctcactttgtggagagatataaatgatcttacggcctgggttaaacatcct

SEQ ID NO: 22996 - DNA, 427 bp, Zea mays
ggacaacatcaaattcttctttaccaacattgatatcacgtctcagttttgcagcagcatccacttcaccataccaatcagtaaactccctgccttctccagcacatggcaaacccaaaatcagatgaactgtatcttttgttatcttcagttccttgcagcccctgggcgtatggtcatgtcatgtggatccaatttatccatcaaccacctgatgagtgatctgctctttaggcatcagttcgcaaatcaaatatgcttgaaaatcccaacctagcgacagcatcacgctgccgatcgctcattatccaagatgatacaataacatcatagggaatgcagcggatattcagtttctggaagcataaatgaatatgcattaatacacaaagtatatatatggttagaactaatgatacaatattta

SEQ ID NO: 22997 - DNA, 433 bp, Zea mays
  unsure (1)..(433): unsure at all n locations
acctgcggcatgcagcttcaatanggtcaaagcttatgtataattttgtgcttttctcggatagactggtgcttgatgattataagctcgttgccttctatccgggtcaccatcactgtgaaatcgcaacttcgggcagatgttcggcatggtcccgctcgggaccacaaactgtgaagaaatataattatggggggtttggcaattgtcagcgacacatataaacagtgtgggggttctattctggtttttcaaattcctcggggcctttgcgcaaaatcgcatgggcgggcacgcgccggcacattttttcctaaacactggccgacttgtgcttgttttctacccaacaccgttcattattttccttttttcttttctgccacacttagggaatttatagagaattcttgaataaaactaaaaatatgag

SEQ ID NO: 22998 - DNA, 407 bp, Zea mays
tctgttttactccaatagtaaggtgaaatacttttagcctaggttaccgttatcattgtaatgaatcaaaattttctgatggtagcttatatcccatagtatgctactacttaaagcattgatgatgcaacaagacctcgaggacaagtaaatttgaatcataattcctggctttggaaggaaaaattaaggattgcgaagcttcccttgaaaataaggacttcttgtcttaggctacagagggtttccttgcagaactttaagctaaaaatgctagattaagcgaggagcttctccaaactcaaccagctgtaacatggaaatcaaagagctttgaacactaaaagaatgaactgcaagcaaaatatgaagccgaggctaatataaacacaatgctgcagagaatc

SEQ ID NO: 22999 - DNA, 439 bp, Zea mays
  unsure (1)..(439): unsure at all n locations
acctgagctgcagctctaagggaaaccanatagactcacttgttcatttgaaagacagatctgttcgcatggtcaacatgaaaataagttggaatccaccatcctcacaagaacatcatgacgacggacatcccgcttgagctactccacatggacctattcgacctgatagcttatataagcatcggcaggagtaagtaatgtctagatatcgtggaagaatattcttgcttcactcgggtattctttttgcaggaaaaaacacacacccaagagactntaaagagattcttaagacgggctccaaatgagttcggattgagaatcacaaagattagaagcgacaatgggacggagttcacaaattcacaaatcgaaggttctcttgaggaggagggcatcaatcatgagttctcttctccctcacaccttaacaaaa

SEQ ID NO: 23000 - DNA, 411 bp, Zea mays
tctgccatatacatgaattatcatatgaaacatttacctttggttatgaacagtatcacaacaagtttggctgctatagttatcgttctcggtccgggtcaaagctgcccacgtgcccaacctattctggtaagaagatgtgtctcggatgacttggattgacaataaattggttctattgtgaaggaaatgactcctgacattatcgagaaagaatttcagtgggtatatattatgccccctctattgggcaatgctttggccttctgaggccgaaggttgaaatgaatgaagctgtcgaagaatgccaaagggccttcggcgcagtgtgctctttcattggaacaagagacttagttcaagagcatattgccttcagggtatggccactcgcggagaaatgggatatgc

SEQ ID NO: 23001 - DNA, 336 bp, Zea mays
  unsure (1)..(336): unsure at all n locations
agctntgccggtgaacttaagactggttccaaccgtgtgctgcgggcacggctgcaccagtaactgcaaagcaactggccgttggcgcggagcacgtagcggtggttggcgtggcactggccctggtgctggcgatggtgaaactgggaggcaatgccgtactaattttggtttgacgaaaatgcaggcgggggtagttttgctgcggtcaagaacctgatgcaactgcggtgaaacggctcgcctattgactcgtgccctatggcctatgggtggtggtggtggttggcttggctgaccgacgaggcgacgagcctgacgtcgttttcagcatgt

SEQ ID NO: 23002 - DNA, 418 bp, Zea mays
  unsure (1)..(418): unsure at all n locations
tatcatagaattattagttgtattgatttatcacttccgctttatttgaaagctatactctttaccaacaagaactatagttttatactcccataattgttcatcttgttctaactactaatcaaaggatctagttggggataaaagtntaaattttcaggtttcgcctatccaccccccctctatgcgactatcaatatgagtccttctaggaactcatgacggaacttcaaaatcctattaactgcatattttaattcatgccatttgccagatatattacatagcggaacagtgtttattcaacacatacgtgggatgggtctctcacgagaccacttgaaccatcgcattcaccacacattatttcaatagtgcccataaatgtccgaacttcgagctcgcgacttttcatttg

SEQ ID NO: 23003 - DNA, 364 bp, Zea mays
agctttaatgcattgggtttgtgtactattgtacttgtctcagtgttaaaaacacgagaaaacgagtgagataagagtttgctgtgtacatcctaaaggctgtttctgtctggggcacccgactgtctggtggtgcttctgtctattttttgtgctccttccttctctggcgtatttttcctctttagtattcttcctcactctccgattatataccttttcattatatctatctcttctcatccttcttttcgctctcccttctttttctttcattttttctcactatatccttctactggctcctcttttcttcctctttcccttttctatatttgtctcctatttttccttctatttactt

SEQ ID NO: 23004 - DNA, 418 bp, Zea mays
  unsure (1)..(418): unsure at all n locations
tgtggaggttcttcatccacacatgtgctaatcggcgatgccacaaccagctccatgcaagtcttagctattaagcatgcatctagaccggcctcttcttttgcaaaatcaactaaataaagttttgccgtctaatacacccttaaatgctagtgaaccatcacaccttctaaagacagacacatctacatttgtgaatagacagttatatcccatattgcataattgactaaccgatagcaaattatatccaagagactctactaaaaacacattagagatagagtgctcattagaaattgcaattttacctaatccttttaccttgccttgattcccatcaccgaatattattgaatcttgggaatccttgtttntgacgtaggaggtgaacatcttcttctcccccgtcatatgg

SEQ ID NO: 23005 - DNA, 374 bp, Zea mays
atcatttcatttcctctcccgtgcttgattacactatattcatatcttacgcttaccatgtggctataaatgcatatgttgtccatatatattttttacctatgcatagggggaggtagtctaatcaaatcatatcttgcatctgcctttctcatgtgctcttcctaagtagaagaactccacataggggagtatatcttcgcctatgacaaaggagagaatatcttttctagggggagaacactctttcatggggagtaatcctctagcccttcacttggtatcttttagaggacaaggcttatttgcttactatatgcttataatatcttacttttcggcgcttgattccaaaggggagaagttttattgac

SEQ ID NO: 23006 - DNA, 439 bp, Zea mays
tctgaaggttctacaccccaaatcttgtttgatttctatcgctagatttgcgtacttgaaaaaaagggactgacaggttcaatacttgttaggatggtcgtgaagtagcaccaaactttgagcctggaggttctagtggtatggtagatatcaacatggtatccgcatacttgttgtggtgattgcatcatgcttcttgataacactctaccaactgatgcaccttgttttgtggagctactggtggttatcttatgcataggtggtgtggaggtgtgtaccaattcattatctttctggtattgcatctgtctgaactgtgcttttgtgcttccaaaaaatcaaatcgcccaaatggtcaaatcccgatgtcccttgataatatactctcacttttgagagaacacttgaacacttccatctttatctgtaattcatt

SEQ ID NO: 23007 - DNA, 402 bp, Zea mays
agcttctgaggaagttcatcatctctcttactattagcagaacagaacgcctcatcagaaagacctccatcaggagggcttcgtcaacgaagacgactggtatgataatttccatcagggaaattttgcttttgatgatgcttctcctctgtctgctgagctgcaggctacaccttggcctccatcctataagccaccccagctccccatgtttgacggccactccgacccgaagcaattcttgatgagctactaagcaacagtgtcttcgtacgggggcaaccctgcaatcatggcgaaaactttcgtcatggccgtcacgaatgttgctcacacctggtatttctcccttctgcccagaacaatcacttcatggcagaaactgaaagatatgttactgac

SEQ ID NO: 23008 - DNA, 445 bp, Zea mays
  unsure (1)..(445): unsure at all n locations
taatgccggaattgccataaaggattctccctctctcttctcatcccccattgactcatggcacagggagatggttaggtaaaaatcatcaccgatttaaatgatataaaagatgatgatgatatcgatgatgttgatgatgatggctattcatatgatgatcttgttagaatgttangtgaggccgatgacttcatgcacaaagaaaaagaataaatttagaaccttgacggaattgtataaaaaccttcaagtgtcttttgaggagctcaagacctctcacaatgacctaaaagaaaattgtgagaagcttgcggatgctcaaaaatcatctattgtgcatgaagttaaggtggtcactaatgatattggagtcacttgtgacttacttgatggtatcacaagtgaatcactatctactaactctatntgtgataaatgcaaa

SEQ ID NO: 23009 - DNA, 427 bp, Zea mays
  unsure (1)..(427): unsure at all n locations
agcttcgtgaaatattcttcgaagctgtaaaaaagttttgggttgcgtttccgatgaggctacacttcatctcgatttgtcttgtgccttaacatgattntctcttttccaaaatatgttccgaaggtcaacactgtatccccttcttgttccagatgcattatgctgtatgatgcttatgttatgcaaaaatgatgtgatgatgttatgttatgcaaaatgatatttgtgccgcagatacatatccctgtaataaagcacacacactttttatatcagcgctgacttttcgctgtaagtctcccttaggagcttcttcgccttttactttcagcggaatcagcgtttatttttcgctgtaagcctcccttaagagcttcttcgccttttactttcagcggaatcagcgtttatttttcgctgtaag

SEQ ID NO: 23010 - DNA, 416 bp, Zea mays
  unsure (1)..(416): unsure at all n locations
tggctaanatagtttgttaaaaactccaaacattccattcaagtggaggttcaatgggaaaaactgaaattcagatttctgaattttcagcctttgaaccaaaactgagcgcgttcaccttgatctctatctcanaactctaagctcccattgacaaanatgtgtctaactaacccctctacctcataccnaaagatggcatcgggacacgtgctctggacacgttaaacccgggatcttctctctgtgctcggcagtgagacaaacccaacttcacccctccatatctcttgatctagtcagcaaaacctgcaagcctccacacacaaacgacaaaggaatgttaggggaagagatctctcaacgggatcatggccataatctcaaagaattggagccaatccgcccttgaacac

SEQ ID NO: 23011 - DNA, 420 bp, Zea mays
  unsure (1)..(420): unsure at all n locations
taaggaaacgtacttgcattagttatcggccatcggtttaactatggggcatcgcggtcacgggcgcaataatgcacgcaaccttgaggttgtgagttcgagtacattatattattggagtcttagagtccaaaatataaatatacttgcattggttaacggccaccggtttagctaggataaattttaattaatattaaaaagtattaatctcgaatacattagataattggagttttagagtccaaaatataaatttacttaataaacaaaaaaaaattataattagagtccaaaatataaatatactaggtataaataaagagtgacttgatgatattataaagtactccgtacttctatagagtgggttacttatgtgcatggtacttgcgtcacggagttngaataaacaaaaac

SEQ ID NO: 23012 - DNA, 377 bp, Zea mays
  unsure (1)..(377): unsure at all n locations
agcttttgtaaagggaagatagttgtgtctcatcattttgcaaaagctgcaatggctgctggtgcgtttaaccccgatgttgaatttgcatctccattatacngcgatggtcatggaaggtcatgatcccgacaaatcttttattttttttaatattcggtgctctgaatggtcactatgataaccaagtatggaagttcaaaatgtttttgcttgcaatatccaaaactttactgttgatatcaagatgcctggcctgcaagacaatctgcttgtttctcttgtnttttgggatagcaacaagacttatttggtgcatgtatgggctttttccttcaacaaccacacaccttgcattgctgttggaaacaatggga

SEQ ID NO: 23013 - DNA, 427 bp, Zea mays
  unsure (1)..(427): unsure at all n locations
tcggcatcttntgttgcttcttcattctaagtccctggcgtccaatcagcaatgaagtctgctaacgcctgagattgtattgaggatctgtgcatgtaatcaatggtgaattagttatgtttcgcggcccatttctcgatccttcctatagcttctctgttcctcattatgtccttcaggggttgcgatgaaggcactattatgtgatatgcttgaaagtaatgccgaagctttctggaggccatcaatacagcatacagtaccttctccaactctatgtaatttttctttgaagggttgagtacttcagaaacgaagtataccggtgcttgctttnttacctagccctcttgtttgtcttgtacaagtgctgcactaaccacagcatgggaagtagctacatagagaagtaacggagctccaaatg

SEQ ID NO: 23014 - DNA, 431 bp, Zea mays
  unsure (1)..(431): unsure at all n locations
tctaaagggagaacacattttgtgactaacaaatgttcattttgagaaagacaagatatgtagcgcatgtcatgcaggaaagcaagttggtgttcatcatccacacaagaacatcatgacgactgataggccactcgagctcctacacatggacctattcggcccgatagcttacataagcatcgacaggagtaagtattgtctggtatttgtgaatgattttctcgcttacttgggtgttcttttgcaggaaaaattcatacccaagagaccttaagggattcttgagacgtgctcaaaatgagttcagcttaaggatcaaaaagattagaagcgataacggaacagagttcaagatctcacaaattgaaggcttcttgangagganggcataagcatgagttctcttctccctacacgccacaacaaat

SEQ ID NO: 23015 - DNA, 414 bp, Zea mays
  unsure (1)..(414): unsure at all n locations
agctttgataagtctggtataaatctgcggtaatatcccgccagtccaaggaaacttcggacttgatgaacagtggtcgagggtttccactccaaaatgtccttgactttgctggggtctaccgcaatccctctggcagatagaacatgtcccagaaattgaatttcctccagccaaaacgcgcatttgctgaacttggcatacaactgatgttccctcaagcgcgttaacacgatccgtaaatgttgggcgtgctcctcttcattcttggaatatatcanaatgtcatcaatgaagaccaccacaaacttgtctagctcgggcatgaacaccgagttcatcaaataagtgaagtgggccggagcattggttaacccgaaagacattaccagatattcaaacaactcataccgc

SEQ ID NO: 23016 - DNA, 372 bp, Zea mays
  unsure (1)..(372): unsure at all n locations
tggaacacaggtttccttgattcgtgcaggtgcagcttaattagacttctgtatgcgacgggatagaagcatccatcctgtgaactggtagttcgtgtttggtgatcgaagcgccgcatgtccttccttcggttcttgcctaaaaaatgatgcatgtaaattttaatattgtccgatcaatataaattgagacggaaattaaactaatttacatcttcatccacctcaataaatataaattaagatcaataatactaattatccaaacaagatagtagagaagaagaaattatgctgcgagggcaggtatgttcgatgcagctcaactccaaagtaaaacaattntttgttntacttctataaagcagcttc

SEQ ID NO: 23017 - DNA, 430 bp, Zea mays
cttaccacctgtctttaagtgattaaccctggacctctcttgaacccctatctcctataaccaaggttgaaggggggggggagagattaatcaaatgtgcaaaccatgacctaacctttggcaaaagtttagtaacatattcatcaacaaatatagagaggaaacattgcaaaagaaacccttaagaaacccccaatcccttccctaagtagagaaagagctagagctctttaattctctctaagtcaaaaactacacctaatctaaagatccaccgtgttcaccttgaagatggcaccaaaaccacctaagttttataccaaaaatgtggcataccacctaaggcaccccctggaaaaagttgagaccgagcccttgacgtttgacatgtcttggcatcactattgtcgcgcaccggacagggagacaa

SEQ ID NO: 23018 - DNA, 442 bp, Zea mays
tgagtcagtcctcctgcaaggataattgatgttcatatggataatgatggtatgaaacacattcgtgagaagataagggctggaaaagccaaatgtttcatagaatatgatcaaggcattgtatggtttaataaccgcatagtggtgccgaagaagaagaggtccgctatcaaattcttgatgaaacacatcttagtccctattctatttcttcccggaagcactaggatgtaccaagatctgaaacaatattattggtggacaaaaatgaagatcgagattgcacgctatgtggctagatgtgacacctgtagacgtgtcaaggccatacacttgaaagctgccggtccattacagtctctaccaataccgacatggaaatgggaagacataagtatggactttattgtgggattgcccaggaccgcaaaagggtatgact

SEQ ID NO: 23019 - DNA, 215 bp, Zea mays
ttccctatgggctttgtgtgcactggaacaaggcctgagctgtgactggcttcgtctgaaagccttgaaaactgtgaaccagcatgtccttgagtttctaccatgacgtgattgtccctggccggagagaagagtaccatgtctgggccacacttttgactgccatgacgaatgactttgccatgacagctgtgttgccttcatatgaggatatt

SEQ ID NO: 23020 - DNA, 452 bp, Zea mays
  unsure (1)..(452): unsure at all n locations
actatananaactcanactngcaagaataattctgatatgagaatgcactctgcatattgtcataaacatgcgcagacgaggaaggcgtgctcaataggagcatgcaaccccacgcgaagaggcaccccgtctgtagctgaaacccccacccccgatgccattcgagcagatgtttctaatgcaaacacaggctcatcaagccattggtcaaactctagctggctttagcagcaacaataacaaaatcccccaccttatccttagatgcctcatataccccaggaacagcgtgctgaattcatgagaggtcaatccctagtgttcgctcactcatctgaacccatggatgatgaagactggctgcgcactgtggagcgggagttgcacaccgctcagtgtgatgatatggagaaagtcttgatggtcctcgtctgttgagaggagcaaccta

SEQ ID NO: 23021 - DNA, 426 bp, Zea mays
  unsure (1)..(426): unsure at all n locations
agcctcnggaatgtgnacnccgaccttctgcacattgtcctcctaataacaactctgcgatctaagatcgttatgaaacaacaaagctctcccacaacgggctactgttgggggcctacatctgaaatatttgattacataattgcgtatcaagagtacaataaaaggcatgccgataatcaatttgtnacgaagaaacgatcatctgtctaacatataactttggcgctaattaatgtatttcacgaacatttccacttgcagacgaagctaaccttcaattaaagcaatgaacaacgacaattcgtttatgtgcaagatacaaagaccatggccggaggcaataactctggcacgaaccgaatatggtatctctgaacacaaagggtgagacccgcaaactcgagacagagaaaatatgttatt

SEQ ID NO: 23022 - DNA, 418 bp, Zea mays
tgaaacttgaatgtaaatcaatttacattcggtggctgtataagctcttgcattatcgatatggactatgactacagtttatcgttctgtcctcgaaagctatattttctgctactcccaagtttttcagttgtagaagcagtacggaaggccctactgtattgattattaagaatattatgtacataaactggtatgaccctactgatggataaacagattgtgtaacatgcccaaatctggtatgtttttcggagcattgtaacagtgtgatttagttccatgtcatccttgtcccaactaatatgagtgcttctctcaaatgcttaaatgcagcacaagtcaaccagtgatgtgactgtataatcatgcaaaaatctagtttcttgttagatcctctataagctattcaactagc

SEQ ID NO: 23023 - DNA, 330 bp, Zea mays
gcctcaaagagaatccctactcattcactttggaggtgctaatagtctaactatccgtggctaaactggagacactttttgtggctaaagatgttcaacctctgcttagtgttaaactagtttattatctatgctcacgggcgaaagcaacataagaccctcgcatgattaacctttgggattaaacctaatattgtcatatgcattggcttcaggattttattatcaatgtctagcccttattaattggggtcggttctacttatacttagtaactgctaatataaatttggccaactcttaaagctatgcgcagctttatccatttta

SEQ ID NO: 23024 - DNA, 356 bp, Zea mays
tagctctacttaaccacaaaagagtgaggcttatttttttttctttagaccgcagaactatgtcggcgataatcacgactaattgcatgcctagctctctatccgattttacacgaatatcgcgcgtgcagtaaaagttctgcaaactgcggctacctatcataaaatattgcctggcctactaattgatgatcatttgaaaaccctagatcatgcaacagtgatgtgcacgccgtgtatgcgggctgcgtcgcgccttccaatgatctgtctttccccctcgccatgatagcgaaacgaaaacagcttaattccatcacttcctttgtcatcacataattactttgttgcccgtt

SEQ ID NO: 23025 - DNA, 282 bp, Zea mays
taactcgctgaagtctatcccattttttttttagccgtcgcagctgtctacaatgcagcttaacgcccctttttgaaacactaatagttgcgctgtcccctaagcaagacatcctttttagactcctcacttggataacgtttccattaacatgtctcaacacagtattcacgattccaaacacttaaaaggccgagaaacatttcactttcgcttgctgtcctacaaagatgattgggacctgttgctagaaaaatctttcccgctgggtggctcgtgcat

SEQ ID NO: 23026 - DNA, 292 bp, Zea mays
cctgacacgacccttatgtaacatgctactcgggtccccctgcgagttggccgaagtggatattatagttgtggcggagcatattattactctatacttggtgcgcaaatattctgccaacaaaacattttcaacttttggtgggtgggggatgcctgaaaataagggggaagagaattaatttgaacttgttcgacttccctacctgtttaaatttctgaaaagctttatcaagacctgtgccgtatgggtggaatttatagaaacattctcaattgagattcttggaaat

SEQ ID NO: 23027 - DNA, 434 bp, Zea mays
  unsure (1)..(434): unsure at all n locations
tcagctccatctatgttatggattgctnttgattcaatccagtttccctcggcccttctggcagcttcctgacttccatgaatagcaatgggtccttgatccgaaggtatcttcatgcaaaggtaagcacgatgaagaattgcttctaaagcattgagggtaccacgaccaataattgcattgtaagggtattccatgtcaacaatgtcaaacacaacttgctcagatctggtgttgttgatgaatccgaaggtcactggcatggtgatcttgcccagtgctacaatctgtcttcctccgaagccacagagagggtgtgtagcatcatgaatcttatcttctggctcttgcatttgtctgaaggccttagcaaatatgatatcagctgcactgcctgtgtcaaccaagacattgtggaccagaaaccctttgat

SEQ ID NO: 23028 - DNA, 438 bp, Zea mays
  unsure (1)..(438): unsure at all n locations
agcttactcctacctgtgtatggcctttcatcatcgncaagattntgaagcccggaacatacaagctggccaacgatcgaggcgaggtctattgcaacgcttggaacatccaacagctgtgtcgcttctacccttaagatgtttcaagtcgttcatatacctcactttctttacatacataaataaagtctaactgtcaaggaaggatcagccttgcctcggcaaagcccgaccctccctcggggctagaaggggggaaccccctctacgtcttcctcggaaaaaattttctactaagaaaagattttctaccaaaacgacttttgtgccttctcgactatatcgataacagaatcctgcanacgggtaagagtgcgcgtaagcggcaaggtcgactgagccgagggactcctatgccatccggatacggatacctca

SEQ ID NO: 23029 - DNA, 430 bp, Zea mays
  unsure (1)..(430): unsure at all n locations
ntcagagatttctgtgatcaaattggtacgattatccattttgcatcagccaggcattcggagtcaaacagactcgttgatagagccaatggcattataatgacaggaattatgaagttaatcttcaatcaacctacgggaaagtggccagatcaattaatcaaagtggtatggatccacaacacaacaatgtcaaggtcaacaggctttactccattcaaactattggttggtgacgaagcaataactccggaggaagccaaaactggatcaataagagtagtagcttctgcagagtcagattctgaagctgtttattctgtggaaaaagatgctatagaagggatcaggcttcaagctgtggagaacatcaataagtatcaagccgaaacaatcaaatggcgtgataggaaggttcggcttaagaata

SEQ ID NO: 23030 - DNA, 391 bp, Zea mays
tagcttctaagggagaacatgtgatatgtctaacctttgttcatttcgaaaaagataaaccttgtgcagcttgtcaagcacggaaacaagtgggaggagcgcatcacaacaagaatgtgatgaccacttcaagacccctggagctgctgcatatggatctcttcggacccgtcgcctatctaagcatatggggaagtaagtatgggctaattattggtgatgacttttcccgcttcacttgggtgttctttttgcacgataagtctgaaacccaagggaccctcaagcgctttcttaagagggctcaaaatgagtttgagctcaaagtgaagaagataaggagcgacaacgggttcgaagttaataacctttaagtggaggagtttcttga

SEQ ID NO: 23031 - DNA, 412 bp, Zea mays
  unsure (1)..(412): unsure at all n locations
tagttcaccaccatctgggtttggatgtcatcttatggtatctccatacaactaacagaccttggatgctgattgtgctgtcttgatagtgacgggattccactgacagaattaagcatatgattacacttaaagggcgtgtaaatgtactatagctaatatatagttggctaaaaatatttnttaaatagctagctagcgagcatctccagaaactaattaatgacttaacagtcacatttagttgctaacaacaaaataactcttcaataggttagcatccaactgacaagttatttgtcctgtctctctaccaaaatagttagccactgactgccaaactaaataaataatgtggagtggatgctgtatgaaatgagtgtctataagagcaaaatgaagtctctctgga

SEQ ID NO: 23032 - DNA, 219 bp, Zea mays
ccggggctgtcattaaattgaaaaaaagatatgcttactgagtgctcgatccggtgtctacattacatgcgattaaccgtttgggaaaaaaatctgagcaggacactccttaagagggagagagagacttcttttccacaaaggacgtaccaatgggccacagtatctcagacgcacccatcatggttcaactacctgggctggagttaagatagacct

SEQ ID NO: 23033 - DNA, 443 bp, Zea mays
  unsure (1)..(443): unsure at all n locations
nttcccttttcttcttctatgagacnttggatatccgtataaaattgtagaaaaatgataaaaatgtcaaatcaattttcctagattcctaattttccatggtatttaataaaatagtttcatgatttttaggtcaaatagggaattttggagtatttaaaatagcctaaaacattgtttctggatttttagaaaatagataataattccaaaaatccccaaactttttatttgaactctaaacattatttagaagccttgggtagaatttgatttgatttggaccttggttgataactagaacccaaaaccctaccccctgccctttgaattcctttactgactccggaaaccctagcttcttatagaaccgtgaagganaattgtattcaagaccttagataataaactcattatatttgcattctcatgagtattacatg

SEQ ID NO: 23034 - DNA, 352 bp, Zea mays
tggggggcgagtcctcctactccttttctactcgagtgaacgcaacagcacaactgttgaaatacctttagaaccctccgggcaaatcgcttgtattgcaccactaaagataccagttctccatgctgttggaagccccagaaccaatgcaaatctaatgaagaaaaagctagatctgagagcaagagaagggaattgaacaaattcggagtgccccttaccttgtcgaatgccggtctctaatcggcctcgctcgcgggactttccggatccgagtgctcccttcttaggcagggatttggggaacgacttgatcatccaatgaaaatatcttattctcgttgacgtgtgg

SEQ ID NO: 23035 - DNA, 103 bp, Zea mays
gtgacactgtatacttctccatctacgcttggagacaacgatgttgctccatgccttatctagagaggctgtcactgctcatcggagacacctgtacctgctg

SEQ ID NO: 23036 - DNA, 410 bp, Zea mays
  unsure (1)..(410): unsure at all n locations
agcttccactacgggtatgccctntgttcctcgctcgcctgacgtgcatgcatgcatggctctgaagccataaacttttntaatgatgtgatgagatgtgatatcattattgtaataacacgagtaacttttcatatcttatgctatgcaataatgagctctgatgtgtaattttactctttctatcatcacactctataattatgttacatccctcattggtttgtgtatggtgttgattgttcactctctctaatatgttgcaaattgacatatcaagtcaatattaatatcacaaaactcatgcacatatttagggggagctacacatacacaaatgttgttatctcgcaagtattcgtaattttaaattttttctctactctaggttggtttggcatcaatcacca

SEQ ID NO: 23037 - DNA, 433 bp, Zea mays
ttaatatgtttcttgtcattatatgttgtcactagatgcacaaaataaaatcccaacatgatgcactttattctattttagtatcatttgttttgattaatccctcttaattacatgtatgctcttttcatgatgtaaatatgacacataaaataaggagacctctctatattcttggtaatcaaatttgagtattacagcttcgcatttggaaccaccttggagaggttctccacgtcggcgatgagggtctcggattcggcgagggccttggcgtacttgaaagtcgcctagagggggggtgaatagggcgaaactgatatttacaaagttaatcacaactacaaaccgggttagagttagaaatataatcaagtccgcgagagagggcgcaaaacaaatcgcatgcaaataagaagtgtgacacgcggat

SEQ ID NO: 23038 - DNA, 398 bp, Zea mays
  unsure (1)..(398): unsure at all n locations
cgcagcatgcagctgcttaactagggngnacttagtttttcatactcactctngaaggagagctatgggaggctcgagggtagatttgaggccagtcggttatactagttcaaatcggagccctagtctagtgcagtgtcgatcatggtattgtttggaacatgttatagctaggtgctcgtgttaagttgtggaaatatgcgatgatgtttggatgggggttgtnctgcccttttgtagcccaatgatatacgtcacaatgaggactagtattctactaccgggagattggccttcctcttcttggcctcgttagccccgtggtctcattcatgtgtcatgctatcaggcctcatagtcactatggagtcgtctgccgaggcgtgcgctgctgtacc

SEQ ID NO: 23039 - DNA, 420 bp, Zea mays
tgcccgagcttgagccgatgaccagccccaccataatagtctaatcgcgctggccggagttcgtgaacccgccggagcacgtggaccgggtaaccttctgcaccatttctcaatttgttgcgcgcatggcctctacataaccccgggaagctctcgtgccttattgaccctccgctggttggcgacagaacgcgacacctcccgctggctcgtggtaaggagcttcgaccacctctgacgccgacccgcacaccaacgtgaccgccgtgacctccccgacaccactgaccaccccgctggagctctactgccgccggtaagccttgccgccgtaatctttgtcgtgagttctgtttaagccagctagggagcgcgggttagatttagactaagtccagggggttatgtgcaaggtcagtg

SEQ ID NO: 23040 - DNA, 349 bp, Zea mays
cgagctaagctagggatatcaattcagatctgctggtgatatactgaagtttggtctattaacgattttcccatgcgtgcagccagttttatgaaagcaacagttgtgccccgagaagctagcacggcacaaaaatcgacgtgcctactataacttcgtcaagagcatcaattactcctcaatgtgatcgaaagtccctggcaggtcttatactgaaggttcaaatcttctcagaactggccccaactgatttgaagacctgtttcattccctgcacacattcgggtgttgaaatctacacatttattctgaagctctttcagtgatttctgtatattgtgatactttt

SEQ ID NO: 23041 - DNA, 421 bp, Zea mays
tgtggaggacccgatcatccaagcatataagtttctggattagaagtggtcacccaagttccgttgatgaagcaccataagaccaatcaaggaaggaatccatgtgggagttcacaagaagaaggtttgcgtgttggcatcgatgcttcctcaataagctagctgccaagccaaacctaaaagcctgaagatgatcttggagttacccgattcagtgtttgcaatcaacaaccagatgcccctcacaggccagattatgttgaagttccatctcctcgaagagtctgctaagtgaagatatgtttctgaagtaaagctatacccataacccttttaagtcgaatctcgaggacgagattccttttatgtggtgtagatttgtagcatcctaaaaattcaaatcctgagattctatcaaact

SEQ ID NO: 23042 - DNA, 382 bp, Zea mays
agatagacctctgtgcagctctgtccagcatggttaacaatgtgggacagtgctcatacactaccaagaacattgatgactacatcatagacctcctggagcctattacataatggaccttctatggacccggttgtctaccttagcatctggggaaaggaggatgggcctcctaatggttgatgatcttcctgcttcacttgggttttcttcttgcatgaaaaattagaaactctagggaccctctagcgctttctaaggcgagctcaaatgaaatttgactctatgtgaaaagaatataaacaacacgggtccgattcaagaaccttaagtggagagtccttgggaggaagatcaagccgagtctccgttcctacacaca

SEQ ID NO: 23043 - DNA, 423 bp, Zea mays
taagatgtcgggccccaacggtgtcatcaccgtctgctccacgtaccgacacgcgtacgaatgcgatgtggagtgcatggagtacgcctaggccctcgccgaatctgaggccctcatcgccgacctggagagcgtctccaaggaagcgccagatgcgaaacgccacgccggcaacttcgagccaactgagacggttaagttcgtacctctcgaccccagcaacgacgcctccaagcatatccggatcggcgccgagctcgacccctaataggaagcagtgctcgtcgactttctccgcgcgaacgccgaagtttatgcgtggagtccctcggacatgccttgcataccgagggatgtcgccgagcactcgctggatatccgagccggagcctgacccgtgaagcagcctctgcgccgattcta

SEQ ID NO: 23044 - DNA, 415 bp, Zea mays
agcttgtggagattcttcatcccaacatgggcaattctgcgatgccacagccaactcatattagtcttaaccaataagcaagtgtcaagttcagctttgttatcattaaaatcaacttaatatagctgaccctttaacactcccttaaatgctattgaattatcactttttctaaagaaaggtaccaccatatcattaaaaagacaggtgtagcccattttacataattgagatacggaaagcaaattgtaatctaaagaatctacaagataaatattggaaatagaatagtcaggagatatagcaattttacccaatcctttaaccaaaccttgatttccatcctcatatgtgatagcttcgtggggatcttcgttttctcggagaggagaacatactttttcccatgtcatgt

SEQ ID NO: 23045 - DNA, 429 bp, Zea mays
  unsure (1)..(429): unsure at all n locations
tcgtgagagagggaaacggacccaggtctcttgatgagtctattgttgcggagcggagttcgatgtttgagtgagttcgtctccatcgtactttccacccccttctcttgggaaggccctgcgtatccccttttatacatacaaggcgatggtccagctgtacatatgtgggtgtagctatgtgctaacgtggccggcggagaaatgcttgagccctgtagaaacatagctggcggtgcagccctgngtcctgctgacgtttctttgctttcgtagagagcttgagaacaatcgacatcatggacgcatgcagggaaccatcattaccttacctgctgccagagtaatctagatgtgacaccggtcttgttccttcgtagcttgaggcgtgtagctagaggtacggtaatgatgtatcccctgtagcgt

SEQ ID NO: 23046 - DNA, 440 bp, Zea mays
agcttaaccctgtaacgaggataagctttcttttatttcaaaggtggatggtccttaagtctccttgaaatacttaagggtaaatgctcgagatatttataacatgctttcataagtgcataaaatgtcataagcatcacacttatactatgacacaatgcactttacactctttatgatatagacatgggctcattaacctaaatatgtgcacttggcattttataccaaaaaaatgttttcctctctttgcacatatttagggggagcaatctatattgtatagaaatggttaatcttaattgacatatcaattttaatcatggctctttcctttggtacatttgcatatttcttatcttcattgagtgccaacgctaagactaataatgtttcatgagcatctcatgtattaaggtctaaattgaaagggaatggag

SEQ ID NO: 23047 - DNA, 452 bp, Zea mays
  unsure (1)..(452): unsure at all n locations
tctactgaagcttcngctcaacaagctatagctgaagctgttccttcanagccctggcaggagcaaccttttgaagccgaagcaataaaaattccagaacaagtattagttgaagaaactgacaccgccatccccgaagcacctgccagcatgcgtgattacatgatacgacatgcttcggggaagaagctatctgaagaagaaactcatgaagccatccattatgcaaaggaactaaaatatccgaagggggcagtaatattcaatggaacgaatgaagatgacttcttatactgcctgcctgacaacaaagagctatctgtctgccgagaaatggccagaagtattggctttccgaagcttgaagctgggttaagcgccatgacgaaagaggatctcgcagacagcctcgcgtacaacagcctgaatgtataggaattaaacacttgaaa

SEQ ID NO: 23048 - DNA, 162 bp, Zea mays
ccggccttaacacgagctcacttagcactttttttctaccgaccaacttgtataaaaaatcccagtgaagctgtgctttatgctcaaagtcgatattttagctcatatattcttttcaccgtgagtttataaataaaactcggaggtgaaatggcccgctaa

SEQ ID NO: 23049 - DNA, 427 bp, Zea mays
  unsure (1)..(427): unsure at all n locations
tatgaagattcttcatcccaacatggtctagtctgcggtgccagagccaacccatgttagtcttagcaattaagcaagtgtcgagttcagctctatcaaaatctactaagtgtagttgaccctctaacactcctttaaatgctattgaatcatcatttcttctaaagacagtaacacctatatccataaaaagacagtggtaacccaatttacataattgaaagacggaaagcaaattgtaatctaaagaatctacaagaaaaacattggaaatagagtggtcaggagatatagcaattttaccaagtcctttgaccaaaccttgatttctatccccgaatgcaatagctctttggggatctttgattttctcataggaggagaacatcctttntctccccagtcatgtggttcgtgcacccgctat

SEQ ID NO: 23050 - DNA, 139 bp, Zea mays
cttaggaccttgaatactagcttttgggtaaactgaccgttgtttgttatttgaaggaagcttggcgctttcgcagaaacggtgtagaactcaatattaagttagctagtcaaccctggctcttataggactttctgac

SEQ ID NO: 23051 - DNA, 420 bp, Zea mays
tctcgtacaagggatgagtacagtgcaccatgtatcacgggcgtactgtatcagcaacggactggacaggtgcgccgtctgcaaggtggccctgtcaccgcctgccagcggaatggacatgatgcaataaatgccgtgggggcacatcgcctgtcacaagggtgggcaggcggtgtgtcctctccgcaataaatgccgaggccgcgcggtctaaagcccttacgttatgctctgcccgctggcctacgtcacggacaataagccatgtggcagcattataccctcgactgggtggaggcgctccggatagagcctggacatgcgtcaataccggacctatgcctatgacatggtacttcctctcccgggaccatgttatgggtggtccggagctcacttggtggggtccggaccctatcc

SEQ ID NO: 23052 - DNA, 408 bp, Zea mays
gcttgtcaaatgatctcacagtttcttgttcttcattggtccacaggccaacacaccttgtatttgtcgaattcgaatcattctaccttatctattcgatcttcagtgaaatcgtattcgatcttcagtgaaattgtatttaatcttctatgaaactggattcgaactgcacatctctattatttaaaccccatggggggttaacgccttctcacactcttcggacactccatcactctcgcgtggacgcgtggcggcgtgcccgacctgaatattttcttcgattcatcagagccggcgccgagctgcgactgttaatcctctgatttccagtctgtaaagaaccgggtgcggtttctacgttcacgcattgcccggttcaccttcatacgtccagatcttcacccc

SEQ ID NO: 23053 - DNA, 441 bp, Zea mays
tctaaagggagaacacgtgataggtttgactatcgttcatttcgaaaaagatagaccttgtgcagcttgtcaagcaggtaaacaagtgggaggagcgcatcacagcaagaacgtgatgaccacttcaagacccctggagctgctgcatatggacctcttcggacctgtcgcctatctgagcatatgagggagtaagtatggcttagttattgttgatgatttttcccgcttcactagtgtgttcttttgcaggataagtctgaaacccaagggaccctcatgcgcttcctcaggagaactcaaaatgagtttgagctctaagtgaagaagataaggagcgacaacggatccgagttcaagaaccttcaagtggaggagttccttgaagaagaagggatcaagcacgagttctccgctccctacacaccacaacaaaatggg

SEQ ID NO: 23054 - DNA, 419 bp, Zea mays
agcttgctattacaagataatcaaatatattattttgattacatttgctggagataagcctttagcgctagttttctttgagtgtaatggtgtgacccgaattattataggaccaaatttgtgatgacataaatcccaccggaaaaattgctttaggatacgacacgtatatccttgcccatcaaacagaccaagtgtattttttgacatatccatgcaaaaagttgtctaaatggagggttgtgtacaatgtaaatccccgggaacgcctatacactcctggtgaggacgaatatcaaattggtcaccttgagcaggttgatgaggtgtttcaaaaagaagagttgcccactagtttttctattgatcctgcacccacattttatttactatttgcagacgttaatgacttaactttt

SEQ ID NO: 23055 - DNA, 406 bp, Zea mays
  unsure (1)..(406): unsure at all n locations
ngcacctcggtacattggtccttttcctatccttgaaagatatggaccagtggcataccgactccagttacccgaaacattgtctgctgtacataatgtgttccacgtgtctcaattaaagaagtgtcttcggattcccgatcgaaccattgaagtaacggatgttgccttataaccagacttgacatattctgaacatcctattcgagtcttggatcaaaaggacagaattacccgaaggagaactctcaagttttacaagatacagtggaaccaacatacagaagatgaagctacttgggaaactcaagactttttagataagaatttcccagactttntagcgtcgtgtaaattataagatgtgtacacttgttgtaatagaggaatgaaccccataccaccc

SEQ ID NO: 23056 - DNA, 365 bp, Zea mays
  unsure (1)..(365): unsure at all n locations
cagctcngcataccccactccttttgtgttgtgaaaaccccgctggctaggtattcttgaactaaatccgcagtaccaatatgttcagattcaactctaaattcccccacagcatctaggcatggttccccccgcgtcatattgcactgaggcctagtcaactcgaaaggtagctccagcgggctctaaactagcttctcttttctctcatcaatcttaacatagaaccattcagtcttccaaccagttggccacttggtacggtagctgaccaccagtgtcttcattgtcttgcggtatgcaaaattattacaaccaaaaatctcgtgcaatcatactctctagccctcgtctgtaagaaagtc

SEQ ID NO: 23057 - DNA, 437 bp, Zea mays
  unsure (1)..(437): unsure at all n locations
tctagcagaaaacataaaaatggtgaataatatctcanaagagcatctccaatagttatgtaaaaaactccctaaatatgaatttaagaagttttcaagaaaaactctccttcaatagttatgtaaagcaggtccctgaatttacaaactccctacaaaactcaatttcatccctacatttaccaacctcgttgtgactcccgaaatcaacgttggtgctaagtcatacgcgaaaaagcatactccagccaccgctttgcgccgtcccaccaccccgtgaccccaaatccatctccaccgcctcagacgcattgacgccgctactgccagacaacctcttgtgccaaggtgctgcaagagcacctactgtgctgccttcacgccgtcgccacaaggacctatgtggatggcgtgtgcctgtcgccgagaccgtctgg

SEQ ID NO: 23058 - DNA, 402 bp, Zea mays
  unsure (1)..(402): unsure at all n locations
agctttaccatatgttatcttatatctatcatacacattctccacaatcctcatgggtatcctaaccttcatattnggtttcgactatagtattcccataagctgcttcccaatgaggatagaggtcaattggcgatgcttcatcgttaactcatgttcggcacaggtgtgtggccccataacttttgttatcttccactttgcggtgatcttctgtatcctaacacagacccttcatgcacacttatccttatcgcatacaaccatgtaacgacgcttcttgtatgaatgaagcactctatacgacctcttacgtaagacgacataatgctgcaaccaccactttaaggcaatcaagtccttgaanacccgacactttttaatcatcatgctaggactgac

SEQ ID NO: 23059 - DNA, 432 bp, Zea mays
  unsure (1)..(432): unsure at all n locations
tatggacttggaaatgaagtcttttattctcacgctaatcctttanttcgtttttgcagggcttaatccttagcaacgcccagagggcgcaaaagaacaccgaagacgagagctgcactatagctctcagcaaccttcgatcagaggtcaataggctgagaaacgaagccatggaaaaagacaaaattctactttcattggtggataaagcaaaagaagatgaagcannaattaatactcaatctgaagcttataaagccaaagttgaagatcttcgtaaaaaacttgccgaaggcaatgaaaattgtgcggtcgcaaaggctagccaagaaattggtgaatggtggaagaccaagctagagaaaaatattgaggagcttcgcaaatccaaggaaagatgttttgaaaaatccttggattgtgtgaataaat

SEQ ID NO: 23060 - DNA, 427 bp, Zea mays
tgctcctcggcgcctgagaaatgtgagccacctgtcgctgtctgagtttgagaagcacccagtccccaacggcatatgagacctgtcggtgagctatgtcgtaaaagcgcttctggattgcctgtgcctgctctatgcggtgacggacgtctgccaacaattcttcacgttcggccattgattgggccacatcagccacccgtgtggcccctacttattataactgacggtgggcggtcccggccgataccacccgaaatggtgtttctgtaaaaagactggatgctgtgtgtatgtatattctgcccaggcagacaccgcaaccagtcccgcgtcggtcgccggaaaacactgaggacatgggatgaccggttggcgcctctgactgttcatcgactgcggatggaacgctgtggcatatgagctt

SEQ ID NO: 23061 - DNA, 404 bp, Zea mays
atcagactatcagaatcagactgtccagctatattagtcttgtgtctgataccagactgactgctccactttgagggcatgaaaggctgatatgtgtatctatgtgcccatgtgtataccacaaagcgggagaggaaacatcgatgataaaaaattgattaatggaacactgccttgacactacacaacgttggaagataacaagtgaccacaaacggcctctcgttagaaaaatataggtacaacctgaacaaagactgaaggaaagggaaaatgccgcacaactctgaaatatatgctgagcagctttgataccttgcatggaccgacctatgcgactaggtgccacgttgatctaaacaaaaccggaaagcatgattcatgagcaagtattattaaaaaac

SEQ ID NO: 23062 - DNA, 284 bp, Zea mays
ccgagctgcacttgaatcacaccacttgtctttcggctttacccccccttgtcttcaggttcatctgatttcgttgtaaatactgttagtgtccttatcgtaatatgttggaacttatttacatatcgtccctctttgaaaaaaagtggtcttctgctgtagatagaagcagtaaatcttatctcaaaaacatgaataatggcgggtattcatttaaaacttacaccttgactcatcctcatggaagccttgggtatcttctcttgaggaaaactttttcccta

SEQ ID NO: 23063 - DNA, 362 bp, Zea mays
caaataagcgagtgcacaatcagctctgtatgcttaaaatcctactaaatacagctgaccatctataactccctgtaatgctattgaatcatcacttcttctaaagacaggagcccctatatcaggaaaaaaatatcttgaacccattttgcataattgagaatcagaacagcaaattgtttattcagaatctactagaaatacattacagatggaatggtcaggggatatagcaattttacccaaacctatgaccaaaccttgatttctcattcacgaatgtgatagctctttggggatcttcatttctctcatatgtggagaacatccttttctcccctgcatgtggctaggcatcgcta

SEQ ID NO: 23064 - DNA, 392 bp, Zea mays
gcttgagagaatccattcaattgttatcaactcaagctatcaatcttcaatgatctatatccgagatagacccaaggttatatatcaaattgctatgtcttaaactcatatcatctcgaggaagatattatttgtcgttggaagtgaagagatatcatatgcgaaaaatcaaggcctacaacattggaggaaaaccaaaggatgggaaacctccatttttcaggacaagtatttagaaatccttccttatgagtctgcggagtcactagaaaaatgaagcacttaaacgcctctaatatatttacccttctttgaaaatttcctactcatatggagagtgcgtactcaccattaccctcctatggaaactacaagcttaaattggcgaaaga

SEQ ID NO: 23065 - DNA, 440 bp, Zea mays
tatcagcagtataagcacaaaagagagaaggctgcttctttatatcagccgaagcttatgctcttgtgtgaagacatagcatagcaaaaagtattgctgggatctcacctatctggtgaacatggaaatactttgctgagattcttgttcaacaacaaagatgtctttgcttggacaactaatgatctttgtggtgtcaatagagacgtcattgagcattaactcatgtggacccgtccttcataccaagaagcaagaggcttcagaaaatgtccgatgataaagctgaaggtgcacgaaatgaagtgaagagacttctaagtgccgatgtcataagagaagtaacatacccagagtggctggccaacattgtcatggtgaaaaaagctaatggaaaatggagaatttgcattgatttcatagatctaaacaacgtatgt

SEQ ID NO: 23066 - DNA, 173 bp, Zea mays
cagaaccaaacacgcgcccaaagagaacacctcccatatcaccgaaacaaaccgcgggacgacagagaaacaccaacgacagcaaaaagaacccaccgcacacagaaaaagagaacggcccagccaaaaactgttcatcaacgatgccaaacaaaagactgtaaatcaacagg

SEQ ID NO: 23067 - DNA, 347 bp, Zea mays
actttaaatggagagcacattatgcgatttacttttgatcattatgagaaagacagggtttgtatcgcattgtcaagcacggaagcaagttggtgttcatcatccacaccataacatcatgacgactgataggccacttgagctacttcacatggacctattccggcccatagcttacatatgcatctgacgggagtaagtactgtctaataaatgtgaatagttaatctcgcttcacttgggggttcttttagtggataaatcttaaactctaaaacacttaatgattctttgtacggctcaaaatgatttcgactttagatcaatagatagaagcgacactggat

SEQ ID NO: 23068 - DNA, 408 bp, Zea mays
  unsure (1)..(408): unsure at all n locations
agctcgacgtctatgngatctccaatcttaaaatcttgcaccaaacgccggggttggggttacttaaacaagatgggagggaggttagcaaatgaaacaaatttctgacatattgtcacatcgtcagccttggtcaatgccaaggaccctaaccagtcttatgcgcttaaagtgaagtcctatgtgaagacacggtgtaacccacaccttacaaaacatgtgtttcctctcttttgccctcattccttcgctatctggaacattgcgacgtgggctacttatccccaaattctttcaagcaggcatttgtgcatcattgtagaagtgaggggatggggaattctatacatggacactgaggggtggggatgacacaggccttcctttctgtaagcaataagctattct

SEQ ID NO: 23069 - DNA, 439 bp, Zea mays
tctaaagggagaacacgtgataggtctaaccattgttcatttcgaaaaagatagaccttgtgcagcttgtcaagcagggaaacaggtgggaagctctcatcacaccaaaaatgtgatgacaacatcaagacccctggagctgctacatatggacctcttcggacccgtcgcctatctgagcatatgaggaagtaagtatggtctaattattcgtgatgaccttttcccgcttcacttgggtgttctttttgaggataagtctgaaacccaagggaccctcaagcgcttcctcatgagagctcaaaatgagtttgagctcaaggtgaagaagattatgagcgacaacgggtccgagttcaagaaccttcaagtggaggagttccttgaggaggaagggatcaagcacgagttcttcgctccctacacaccacagcaaaat

SEQ ID NO: 23070 - DNA, 342 bp, Zea mays
ccgggatcctaaagaccgctgccgcaacttggaagaactttttctacttgcaaacgggagccaagcagccatatagcttacaagtaacagcgtcagtcaactttggtcatatataacaactaggacaatacccccaaaagcatgatatacttctctaagacggtacaccaatatcagttaaagacagctgtgcccattttcttaatgaaacaaaacaaatgtagctaagaatctacaagaaaaacatttaaatggaatggttaggggatataactatcttacccacacctttgaccaaaccttgattccatacctgatgtgatagctctttggggatatcat

SEQ ID NO: 23071 - DNA, 434 bp, Zea mays
  unsure (1)..(434): unsure at all n locations
ntgtgaatagtacatattcagaaggtataaagtttcttcagcagatcagccgaagcttatgctcttatgtgaggacatagcagagcaaaaggtgctgttaggctctcaattatccgaagagcacgagaaaaccttgataaggtttttgttcaataacaaagatgtatttgcatggtcagccaatgatctctgcggagttaatagagatgttattgaccactcgctcaatgtcgatccatccttcatacccagaaagcaaatgcttcggaaaatgtcagatgataangccgaaggtgctcgcaacgaagtcaaaagactcctcagtgcacgagttatcatagaagtgaagtacccataatggctagctaacactgttatggtaaaaaaaggccaatggcaagtggcgaatgtgcatcgatttacagatcttaaca

SEQ ID NO: 23072 - DNA, 290 bp, Zea mays
tgtagaccttccccactagtgttctggatgctgcctgtattccacaatggccagcttggacctcccttcaaagtagctttccagtggatgggagtatgctcttcatgaggactcccgaagccccccttctgtaaatatccccccaatgagtgttaaatgagccaactgtctggcgatgcgctctaccatattcttgtcgtccgggtcctctctcattttatatacttaattgattgccttctctagatttcagaatctgccctctgttgatctctgatggtgccctctta

SEQ ID NO: 23073 - DNA, 381 bp, Zea mays
  unsure (1)..(381): unsure at all n locations
tatagtggagatgntcattgtgttgattggattccccttgatgataactatatcttaactgggtatgatgacattaaggttcagcataatcgttgaaacaaattcgatctctatcagatccttatacgttcaagtaatgaatctttcaattgatttaaattacaaaaattcatgtatggctaagatcacaaatggattacaaaacattttctcataatgctttaacacacatttatacataagttatcgtgttattacatgtttccggtgcaacgcacgggcatttacctagtatactatatatatatatatatatatctgtgtgtgtgtgtgtaaatatgtgcccaccggtatgggtagcatattgtacccatcgtgggt

SEQ ID NO: 23074 - DNA, 420 bp, Zea mays
  unsure (1)..(420): unsure at all n locations
tgatgctaggagtcttcaaccatgtaaatagttataaacattnagaggcgtataacatctgatacaataataaagaagagaaaatgcttacacatgcatgatagttatttagccatggtgaccaccttcttaagaaaacaaatgaatattatgagactgtaataaacttgtcgcaataaaataataaatggatagtatgtaatcaaatacgttagtgaatgagaaggttctatgtgatccaatgaggttgcaattgtaacaaaactatcaaaagaatatgtaatgctcatgtgtacttaaagaatatttcacaagttataattaaagtagtacctgagaaatatttcatatgacaagttattattaaaaagtgtgcttattcgaaattagctacttacaagtcttctttgaaaggttaca

SEQ ID NO: 23075 - DNA, 434 bp, Zea mays
tcagctccatctatattatggattacttttgattcagtccaattaccttcggcccttcttgcggcttcctgacttccatggatagcaatgggtccctgatccgaaggtatcttcatgcaaagataagcaagatgaaggattgcttccaaggcattaagagtaccacgaccaataattgcattgtaaggatattccatgtcaacaatgtcaaacacaacttgctcagttcttatgttgttgatgaatccgaacgtcactgacatggtgatcttgcccagtgctacaatctgtcttcctccgaaaccacagagaggatgtgtagcatcatgaatcttatcttctggctcttgcatttgtctgaaggctttagcaaatatgatgccagctgcactgcctgtgtcaaccaagacattgtggaccataaatcctttgat

SEQ ID NO: 23076 - DNA, 450 bp, Zea mays
  unsure (1)..(450): unsure at all n locations
ggacctctaaacaccgcagctgcaagcttgaattacctccctgtnggaattcaatgccatccttaatgcctgngcgtctcccactatatagcatgcttctagcaaaattaaaatttttaatttctaaggcatgctcattaatcttagcactaagttgagctatgagatcattttggtgttaattaaagctaggcgatcatgaatagcatcaatattaatatctctacatctagtgcaaatgagaacatgctcaatggtagatgtagagggtttgcaaacatttaattcatcaaacttaacatgtaacatgaccatctcatttctaagaatggaaacaatatcattgcaaacatttaaatctttagccttatgaatcaatttttcatattctatcttaagcgctagaaattgattcattcaactcgcaaatctacaaattaattagcactg

SEQ ID NO: 23077 - DNA, 374 bp, Zea mays
  unsure (1)..(374): unsure at all n locations
tatcgttgtaacccctgtattcttattctgaactcataccgagttaagccaagacaacgaggtccacgagcattgtgctccttccaattcaaactatcaggctttatttggcttggtatgacaaatcgcaaatataagaggctgctttcaaataccgatccaagatattactttggcaccaaaaagtatgatagtctgacaacctctgaatccaaaaatgcgtgtgctccttataaaaaaatggaggggttgttatagagcacccattnggcaccttttcagtttttatagaaatattcctgaagagactgattttgatatcgtgaagttagtcttttccagtctgtaggagaaccatttttgtgtgtatgtgt

SEQ ID NO: 23078 - DNA, 382 bp, Zea mays
gcttaccctgtagtctggactatatgttggttatggtaagtgtaccttatgcagctgaccatttccaacatttgcgtaatgaggactctaaggaagaacctcgtattgagaccctggccattcacctccgaagtgaatactggtctatcttacccctggctaaaaaggaatcgcgactcatgggttatgactctccccctcttgttagtggaaaacttatattttatctcgtgctccggttttgagcagtcttgactcttcacttgataattgaaccttaagatggaaatataatcgaatcagatgatcctccaatggtttctttagtggttcacctacgctgttttagatactcttgtccctctttttatgggaaaccttg

SEQ ID NO: 23079 - DNA, 446 bp, Zea mays
tgccagaagttctctccacgttctggcaacctctcgtctttataaagctgatcgcccacacatggccactttaacgctgggggctagacattgtctggccactacccacggctcaagggaacctcaagttcaccttcgtcgccgacgagtattttacccaagtggatcgaggcaagggcagttatccacattaccgtctaagactgcccataaatttttttgacaaaacttattctgccgattcggagtcccgtctgagctcacagtctacaatggcaaacagttcgatagccagcacttcaaggatatttgcttctccattggcaccaagctagccttcgcctcagtatatcacccacaatccaacggcgtcgtggagcgcgccaaccgcaagaatattactgccatcaagaaaatgcttctcgacgacaagatgggtaaatggg

SEQ ID NO: 23080 - DNA, 422 bp, Zea mays
  unsure (1)..(422): unsure at all n locations
tactcaagcttangcatttcccttgaagtaccttcaacgatatttgcattatttaatttctatccatctcacgtcctaaggcttgcttcatggagatttcttttcttgctcaaattcttctgattgtttcagcaattcattctttaaattgtcgttctctgcttggactttacccaaagagccttctatatactggataacaaatctttctttctaatgcaccttcgtgcctcttaaccataattcaaggtcttggaaggtgaaaaccttctttttatatcagcttccaatttcaactttatcagccaatcttggatgatggctttgtcttctctcctccagatcttgtgcattttaaaaccttacttccaatatgctctgtcaaacaatcttctttcaaaaacgacctaataatataatat

SEQ ID NO: 23081 - DNA, 442 bp, Zea mays
  unsure (1)..(442): unsure at all n locations
cgcttcagctgagggagactttgtatcatccactgagaatgcancttcngcctgagccacgggtttgacatgatcgcaacccgccttctccaggatggctgaaattcctcttgcaccggataacgcgcagacatccccgcgagcatttaaaatttcttcaatagcctgcagcccctccgcttatctactcgataacacactcagggtcgccttgtatgaagttattattcgttgataggcgcccaattggcaagctagccttcatcttctcacgcagcccatagatttttcaaaacatctttccttggatgcgcgaagctcttcaactgcttttttaaatagtttatccaatattcgctggcctctcggttagcttctgcgagagcgcatttttctttggcctctgccagttgtttccgaatgtcctcgatctcattctttc

SEQ ID NO: 23082 - DNA, 353 bp, Zea mays
caaccaacccatgcaagtcttatccattaaacatgcattaacaccgcgctcgttttttcaaaaccaacataaaaagattgcccacaatacaccctttaaagcttaggaacactctcaactttcaaagacagacacatctacacttgtaaataaacaatcatatcccctattacataattgaccgacagaaagaaaatatttcccaaaacccacctcaaacaccatagaatagagtgctcattagatattgtaatttgcctaaacctttaccttggcttgggccccctcaccaaaaagaatgaaacttgtgaatcctattctcgacgaggaagggaacatcttcttctccccgc

SEQ ID NO: 23083 - DNA, 345 bp, Zea mays
attaaacgccgtcttgaatcttttgatgatgaaggccatctctttataaataagtccgctggctcaatttgtgccacctcactacgtagagcctccttgcttcttgtagccttgagagcaacgggatgcggttcgatgatcggaccattcaaagcgttgtccacgtacctcgcctactcgatcatcatccgcccgcttacaaaattatcaaggacttcttccggcgacattttggtggacctgtgattcttacgaatattatttaccaaatgacgatcaagaacgggtaaggaccttaacatcagtctgccaacgtgtggtccgccatcatgtgcttcgtatttc

SEQ ID NO: 23084 - DNA, 392 bp, Zea mays
aaacatgcccttgagtggccaccgtgaagtgatagctccctggcttatgagatgagtactaattattatctcttcttctgactgccatgacaaaagacttgccaatactttcatgttgcctccatatgacgaattcgcacctctgcaacccatcaaataatgtttcaggtctgactaatcatgaaacattggtagttagggaggctagataacggtaaccatggcgtggcttgcacatctggattcaacggagaagcatctctatttatgaaatcatctaaaccctcgtccttcatagcactagtagtcctgaaggtgtggcttcctttaccgtcaacatgtggtgtaggttgtgtactgctctgatgcttatcacttagctactaaactga

SEQ ID NO: 23085 - DNA, 326 bp, Zea mays
tctaagggagaacacgtgagacgtttgacttttgtacaattcgaaagagatagactctgtgcatcttgtcatgcaggtaaacaggtgggaagagcgcatcacatcatgaatgtgatgaccacattaagacccctggaactgctacatatggacctcttcggacccgtcgtctatctaagcatatgagggagtaactatggtttaattgttgttgatgacttttccggctcacttgggcgttctttttgcaggataagattgaaacacaagggaccctgaaacgctttctcttgagagctcaaaatgattttgagctcacggtgaat

SEQ ID NO: 23086 - DNA, 399 bp, Zea mays
  unsure (1)..(399): unsure at all n locations
agcntaaacatttatgagggatcgttcactnttatcatcgcacgcaagaacatatatgcaatatgaacaagtagaacattaagaatggcattcacacaacagntgtgattcggtatggcttgctgtcacatggtgatccccatcttcaataatctgtccatcatgatgatctccatctccatgatataggtatgccatccttcatgtgatgagtccttcaagacctatctaacgtatgctggtaaacaaattacatatacgctttggatcatcacatgttgacacgcaggtcattacattatatttggacaatacatgtggctccagccgtattgccctggtcacgacacacaggtcatgaataaattattaatatgcatcatatacacacaatagcga

SEQ ID NO: 23087 - DNA, 439 bp, Zea mays
  unsure (1)..(439): unsure at all n locations
tagccaaaataactcanataaatcctcaaatcatcccttgtactatgaacccttagagaaattcagatttctgaatttctgaatttcagacctcttcccaaagatcatctgcgttctctgttttttganactcaaagccaggagatccaaatttcaaagatgtgccacattcccttgaacacatcctggaaaagtttgaactcaaaccaaattcttttacacggttttggcgcagtttgaccttgggaccaggcattctgacactggcaccttggtgacgctacaactccctgtccctagcctaaaaccgcgcgacgtccatacacaaaagacaaagcttggtcaggtgaacaaatccttcacagcgatcttgcccaaattcacgaagatttgcacccattcggcgcttgaacatgggcagaggcaaccggaacacgtg

SEQ ID NO: 23088 - DNA, 326 bp, Zea mays
  unsure (1)..(326): unsure at all n locations
tgcaagcttgtgaacagtactatatttntattgttgacagcatcttccactgatcagccgaagcctatgctcttatgtgaggacataccatatcacaacgtgcctttaggctctcaataattcgaagagcatgaaaaaaccttgatatggtatttggtcaataaccaagatggttctgcatggtctccccatgatctatgccgagttaataaggatgttattgaacactctctcaatgttgattcattcttcacaccctaaaggcaaggctttcgaaattgcagatgataagccctatgggctcgcaccaaatcaaaatactcctc

SEQ ID NO: 23089 - DNA, 410 bp, Zea mays
  unsure (1)..(410): unsure at all n locations
tctaaagggagaacacattgtgngactaacatatgttcattttgagaaagacagggtatgtagcgcatgtcaagtaggaaagcaagttggcgcccaccatccacacaagaacatcatgacgacggacaggccactcgagttactccacatggatttattctgcccgataccttacataagcatcggtgggagtaaatactggctaaatatgggggaagaataatctcgcttcacttgggtatttctttttgcaggaaaaatctcaaacccaagagaccttatagggattcttaagacgggctcaaaacgagtttggactaagaataaaaaagataagaagtgacaatgggtcggaatttaagaactcacaaaatcaaggcttccttgaggatgagggcatcaagcatgtg

SEQ ID NO: 23090 - DNA, 354 bp, Zea mays
gcataggcaccaacggtgcccaatgtaaatgttattgaggccatgatcaaggggctttcgccaggacctaccggctcattcttcaccacgaaaccacctcagaccctggaaaagctgcttctaaagatggatgaacacatccacactgataatgattttcgtcaaaaaaaagaagaagcttacatgttcttcgaaatgacccacggctctttgaggagaattcacccacgacatgtgagatcaaatccttccactcaacatgatgatagaggaaatagcaccacggccatatactcctttaggcttcgcgcaacacaaactattttctgcgcaattccatgggcagagcgccat

SEQ ID NO: 23091 - DNA, 164 bp, Zea mays
  unsure (1)..(164): unsure at all n locations
tctntaccgagtgttgtggccatggcactctttaaataatcaagctatgccgagtgcctccaagagcactcggcaaagaatctgacgccgggccccactagtggacctcgttgccgagtgcaggctggagacacttggcaaagaggtaacttctttgtcgagtg

SEQ ID NO: 23092 - DNA, 435 bp, Zea mays
cagcatgcaagcttctatggcttacatactaaactcttctcagctcaggctctgtttcaatgcatgccagatcatgaggagtatctccacacataccttcgaatgttctttgcgttgaagcacacacgcctacagtgcccaatgaaatagtcattgaggccatgatcaaggggcttctcctaagacctactgcctagtattttgctataaaaccctcacacactttggagaagctgcttcaaaagaaggatgaatacatcccgctgataatgactttcttcaaaaagggaggaagcctacacgctttctgagatgaccagcggcttcggagggagatatcacccaaggcacgttatatcaatccactccaccctaaatgacgacagaagaagtctgcaacaaagggcacaacattcctctcaagcttctgggcaa

SEQ ID NO: 23093 - DNA, 433 bp, Zea mays
  unsure (1)..(433): unsure at all n locations
tataagtttctggatgagatgtggtcacccatagtttgttgatgaagcaccagaagaccaatcaaggaaggaatccatgtgggagttcgcaagagaagggtttgtgtgttggcatctatgctccttcaataagcaagctgccaagcaaaagctagaagcctgaagatgattcttgagtagccagaactagcgtttgcaatcaacaaccggatgcccctcataggccagaatttgttgaagttccatctcctcgaagagtctgcaaagtgaagatatgtagctgaagtaaagccatacccataacccttctaaaccgaatctcgaggacgagattccttttaagtgggatagatttgtagcatcccanaaattcaaattctgaaatttctcanactcgcctatatcaaaatgaattcaatttcatttaaaatgt

SEQ ID NO: 23094 - DNA, 402 bp, Zea mays
  unsure (1)..(402): unsure at all n locations
tggccccctcgccagctgggccgaccggcgagtttcgctctggctcccctgcccatgcgcctgggccccatgcgcctgggtccccgtccacagctgggccgcctccaccgcgtgagcactcctggcaactccgcccgtgccctgggctcggagcctgtgccccgttcccagttgggtcatcttcgcccagatcgtcgggcacttcgcccctgggctgttttgaaatggaaatgtgcctttgggccatttctaagtatatttggtgattaaagtgtcaacacaagtgcttaaatgtgaatcaatacccatggatgaacaaagtgcaaatctagagcaaaggtatgtttctaagtcttagtacattggttntgtgtactaatatacatgtctaagtattacaaa

SEQ ID NO: 23095 - DNA, 349 bp, Zea mays
agcttctatatggagaacatgtgatatgtctaacaaacgtacatttcgaaaaagatagaccttgtgcagcttgtcaggcaggtaaacaggtaggaggagcgcatcacagcaagaatgtgatgaccacgtcaagacccctggagctactgcatatggacctcttcggacccgtcgcctatcttagcatatgaggaagtaagtatggtttagttatcgttgatgacatttcccgcttcacttgggtgttctttttgcaggataaatccgaaacccaagggactctcatacgctttctcatgagagctcaaaatgagtttgagctcacagtgaaaaagataaaaaacgacaa

SEQ ID NO: 23096 - DNA, 424 bp, Zea mays
  unsure (1)..(424): unsure at all n locations
tcaacgcatatcaatccacaaacaatgtaccatcgacctgcgaggaagagtgcgagggagtgctgagtgcatacctgagagccttgagaggggggcgaacccggtgttgaccctgttgtcatgacggcggcgaggtggcacaggcgatataggcgatgcggtgaatgggaaacggccgggctccatatttctctatattaaagcaggtccgtgcgtggccattcaatgtgtccacgtattctggaaatgctctgccgtctgatgacccgcaggatttcaaatccagccgtccaaagccaatattatttcctccactctgcctttcacgtgctcttttcctctgtagccgctctatatntaagcanggtccgtgcgtggccattcaatgtgtccacgtattcttgaaatgctctgccgtctgatg

SEQ ID NO: 23097 - DNA, 397 bp, Zea mays
  unsure (1)..(397): unsure at all n locations
agcttctactntcattatgatatactgagatgatgaaggtacgtgcttcataaccttcgtctgaagatcattatatcctaagggagataatgtttcgaaggacgaaggtctttaaccactaacattntgtgttgttgtgttcttaactcatagcacttgagaacaagttcccaacattggcgcccacctccggtgaactcacttccactcgtgagctgatggcttcgttaactaccaagttgagcacattcgactaccaagatggtgctcccaatcacgggcagttcaagttctgagccagccaacaagatacagatgaatgaaacgcagagaagagtgcagcatgtttgtgtcaaggacccttcgtcatgccaagtggctcacattccaatcacct

SEQ ID NO: 23098 - DNA, 417 bp, Zea mays
  unsure (1)..(417): unsure at all n locations
agctntcactaatcattctaaggcatcaagactctgctcccgcgcatttgctttgttgtgttagatatttgagctctattcgagtcgagaactccctatgtgtcatttgagctcaagtcttcacttgtgtgcgttggtgtgctgcgtttntgagtcttgtgtgcattgctcttctcaaccttactcttgtggttctttttgtcaatcttgaagggcgagaggctcaacttgggagattctcgcaacggaaaagaataggaagaaagccgggattaagtgacattggacattgaagggtgaggcactctcgtcatggacccacacgggagaggcagtgtactggcaacacgataaactcggcttggtgactttggatgttgcccagactgcttactcgagcgctactttataccaatg

SEQ ID NO: 23099 - DNA, 414 bp, Zea mays
  unsure (1)..(414): unsure at all n locations
agcttcatgtaattgctgtcagaagtgagaagngaattgggtacctctgtcaaatactatcttctttggaacaccatgcagacacataatctgagacatgtatagntgtgccaacactgcactattggaggtggtctcgactggtatgaaatgggccgcctttcttaaacggtccactactacccagatggagccataactagctcgagtgcgaggcagaccaactataaagtccatcccaatctcatgccatttccactaaggaatctgtaatggctgcaacaagcctgcgggcctctggtgctctaccttgatcctctgacaactgtcgcatatagccacatactctgctatctcccttntcattccgtaccaccagaatctnttcttcaggttntggtacatcttctcact

SEQ ID NO: 23100 - DNA, 309 bp, Zea mays
  unsure (1)..(309): unsure at all n locations
agcttgtgaagggtcttcattctcacatgtgctaggcggcgatgccacaggcagcccatgctagtcttagcaattaagcatgcatctagatcggccttctcttttgcgaaatcaactaaacaaaagttgtcgtctaatacacccttaaaagctaatgaaccatcacttcttctaaagacagacacatctatatttggtaatagacaattatatcccatattacataattgactaccagatagtaaattatatccaagagactcaactaanaacacattagagatagagtggtcatttgatattgcaatc

SEQ ID NO: 23101 - DNA, 421 bp, Zea mays
  unsure (1)..(421): unsure at all n locations
agcttgcacttactactaaaccgcacccgcatccatatcacattcaatggctcaacaatagtggtaaggtcaaggtaaccaagctggtacgaattaattntgctattggntcatatcgtgatgttgttgactgtgatgttgtgcctatggatgcttgaatattctgctaggtagaccatggcaatttgattcagaatgtatgcatcatggtagatcaaatcaatattctctcatataccatgataagaaaattattttgcttcccatgtccnctgaggctattgtgcgtgatgatgttgctaaagctaccanagctaanactgagaacaacaagaatattataagtgttggctataacaaagatgggataaaatnganaggacattgcttgcttgaacaaaaactgatggtaatgaattat

SEQ ID NO: 23102 - DNA, 342 bp, Zea mays
  unsure (1)..(342): unsure at all n locations
agcttagaataatctggtatgaatctgcgataatacccagctagtccaagaaaactccggacttggtgaacagatgttgggggtttccactccagaatatctttgaccttgctaggatctaccgcaattcctttagccgataacacatgccccaaaaattgaatttctttcaaccagaacgcgcacttgctgaacttggcatatagctgatgttccctcaggcgcgtcaatacaatccgtagatgctgagcatggtcctcttcatttttcgaatatatcanaatatcgtcgatgaagaccaccacgaaccttgtcacactcggcatgaacaccgagttcatc

SEQ ID NO: 23103 - DNA, 218 bp, Zea mays
  unsure (1)..(218): unsure at all n locations
cagcttcttcttatctatgttatggattgctcttgaggctgtccagatttcttcagcccttctgacagcttcctgactttcatgaatagcaatgggcccttgggccgaaagtatcttcatgccaagatatgctggatgaagaattgcttcanaagcattgagagtaccacgacccatgattgcattgtgagggtatttcatgtcaacaatatcaaaca

SEQ ID NO: 23104 - DNA, 399 bp, Zea mays
  unsure (1)..(399): unsure at all n locations
agcttgtggtttaccagcagttgcaatccaacatgtttctatgcagntacaagttcccaatagctattataatcatttcctataatcgattntggtgtttgcatcacaaaccacatgaactaactagtttgtctagtcatcatttatctcaagtgcataaagttcaacataaaccaagaaaaaaaactaagttggggaatcaacaaagtacatagcaaagattagcattggtgcggccagtggcacaccgggcactgttcggtgcccaggccgagcaccccatcaactggccgcactcgggttttccctgaagtcgctccgctataatttaccggactgtccggtgtgtaccagacatgtcggatgagccaacggagcaacggtcaactgagctcaacg

SEQ ID NO: 23105 - DNA, 404 bp, Zea mays
  unsure (1)..(404): unsure at all n locations
agctctacttagtttgatttgctnaagaagaggccggtctagatgcatgcttaatggctaagacttgcatgggctggctatggcatcgccgcttaacacatgtggggatgaagaaccttcacaagcttctaaagggagaacacgtgataggtctaaccaatggtcatttcgaanaagatagaccttgtgcagcttgtcaagcacggaaacaggtgggaagctctcatcacaccaaanatgtgatgacaacatcaagaccccttgagctgctacatatggacctcttctgacccgtcgcctatctgagcatangagggaagtagtatgggctagttatcgttgatgactnttcccgcttcacttgggtggtcttttgcaggataagtctgaactcaagggacctc

SEQ ID NO: 23106 - DNA, 449 bp, Zea mays
  unsure (1)..(449): unsure at all n locations
agcttcatatcatatgtgggtacctgcaaaacttatcaagtacattntggtacccatctttggatgggtccaccaaggttaactaacaagtacttaagcacccaaatggcctttgtgctagttttaggtgaactaattacctttctagcacaagtgtcatatttgggtctcctaagcgaatatgaatgaatngacatggtagacttaagatacttactcatgggacattccttgcaaaggtgtccctttcttcggcacgtgtagcaaatatgatttttaattttgcaagactccttcttgccttgcttcttgtttgctacatggttagtgagcctctctcttttcaaaggtaaaccactatcttttatgtaaggacatgacttaatctcatgtcccttctcatgacattgataacactttctagtgcatcttctcttatttggaagagt

SEQ ID NO: 23107 - DNA, 356 bp, Zea mays
  unsure (1)..(356): unsure at all n locations
agcctggatgttcttactaagtactgatattttcacgaagcatggatctttntctttacgaagcatgaaaagaagggaaggtgttttttcgccgaaggctcaaaaacggtatgtatataagagtttcatgcatcacaaagaagtgaattacaaataatttacatattagattcaaaactatacacatcaaaaattacagtcttattacagcaaagttacattgatcgtctaanaatgtttttacaataactactagtcttccttcacgaccttctncgaacttcattagcaatttgntacgacctcgcaacaacagatcagctatttaataatctcagtgcttcttcgcttggatc

SEQ ID NO: 23108 - DNA, 298 bp, Zea mays
agctttcctgctcttatcttccgcgctgtatcaaccttcgtattaggcttcttctactgcaattccgactcgggtccgagggtacctgttcacacattatgcttcaggaatactggtaaatcctgtttttgaggaccttcgtaagccgaaggcccccaacacactctattactttccggtccattaggcaaaccacctatgtttgatggtgaagattattctatgtggagtgataaaatgaatgcatcacctacctcactccacaaaagcatatgggaatattgtgagtatggagcgc

SEQ ID NO: 23109 - DNA, 460 bp, Zea mays
  unsure (1)..(460): unsure at all n locations
agcntttgaggatattctctgtgatagaggagacttctgcgccttcgccagcgcccgcggagctgtatcggtccttgagaaagttggttgcgaacatgccaaggttgtggttcaaccaggattcccgctctcagccaacgacattaggaacccttctgccgaagctgccgcactaagtggaaaggtttattctgaagtctggttgagaggtggccgagagatatctgacgaagctatcaaagagaacgagaaagagcctcatcatgccttggaagagggcagataaactaaagaaggtgctgaacctgcaaaacttataggtatatctatcgtgtcttaacttcgacattttttagctttggactacagaccttgatatggngctctgactcttcccctccgggcatatacctgagtcattatcttgaagagcgttgcgaattaatacttacaaatgtgc

SEQ ID NO: 23110 - DNA, 322 bp, Zea mays
  unsure (1)..(322): unsure at all n locations
agcttctaataggagaacacgtgatangtctaaccaatggtcatttcgaataagatagaccttgtgcagcttgtcaagcacggaaacacgtgggtggctctcatcacaccaaaaatgtgatgacaacatctagacccctggagctgctacatatggacctcttcggacccgtcgcctatctgagcatangaggaagtaagtatggtctagttatcgttgatgacatttcccgcttcacttgggtgttctttctgcaggataagtctgaaacccaagggaccctcaagcgcttcctcaggagagctcaaaatgagtttgagct

SEQ ID NO: 23111 - DNA, 199 bp, Zea mays
acaagatttacaccaggatacaaatatacacaaacatatatcaatgtttttcaaagcacttatctctcctaagactaatctgcagcttcgtcaccctcgatcgacacctgaccatgatagctctgccatcttttatatcgtcgcatcttatgtgaggcccgcaatctcttatgactgagcgagacggaatatacatact

SEQ ID NO: 23112 - DNA, 374 bp, Zea mays
  unsure (1)..(374): unsure at all n locations
agcttgtcatactgacatgatattattgaanaaaacatctgtcttacatatgcattgcaggtaacgttttcccgcctaaagctattgtattatttcttataaattccgacttcatttgcttgcatttaccaccggagatgcacttgtgatcaattcatttttcattgaatnttccttttttatacatttagttttcgtagtaagctgcagttttcatactactcaatgaatatcccttctgatttacaaagcagcctaattatgtgcacgtgttaaaagaactaatttctgggtaattccgacttcatttgcttgcatataccagctgcttaggttattcattccaaacagcacaagtgggcctggatttgaat

SEQ ID NO: 23113 - DNA, 379 bp, Zea mays
  unsure (1)..(379): unsure at all n locations
agctttattatattgacgtgataagagccttcctctatggaccaatcaaagaagaggtctatggtgagcaacctccccgctttgaagatagtgagtaccctaaccatgtgtataaactctctaaagcgctttatgggctcaagcaagccccaagaacatggtatgaatgcctgagagaattccctatcactaatggcttcaaagtcgggaaagctgatcctactctctttactataaccattgcgaaagaattgtttgtatgcccaaattatggtgatgatatcattattgggtctactaacaaatctacttgtgaagagttcagtaggatcatgattcanaaatttgagatgttatgatgggggagttgaagtttttt

SEQ ID NO: 23114 - DNA, 430 bp, Zea mays
agcttatcttggcgtgctgccgcattttggcttatggaagtatctgtatcactgccgtcctgtgatggcgcgggggcaacatcaattggtcggaggtgccagcttatagatgcgtcgggggcggaagaccgagtatctcgagataccccttaaagacagcattaaaggttggcgtctggagtggtttataatggataattatggaaattctcttcctacccgctcgggaagacaggcagacgttcgtactccgagttggactgaatctcccacggaccaggaagtagccgaagcgggcgtgttgcttactgaagttgattactgaaagaagaggctgactgccgagccgtggcacagatttgtgtcaaaacattcagcgtgaagacaggcctatcggctatcttaccgaggtggcgactacccagtacta

SEQ ID NO: 23115 - DNA, 481 bp, Zea mays
  unsure (1)..(481): unsure at all n locations
agcttcatatcttggtacccaatttgaattgngtcctttgagattagtagtaagagccttgagtacccacacaatccttattgtggcctttctctttgtgtaggcacccacatatacttgacaaccatcttacatggtttcaagtcaatatttaatcacatagataaaaactagagttaagaataggagccttttctcctttntcttagtacatcnngtgtgtgccttcttgatgatgaacctagcttgaccttgggtgcacctagcttatcaaggttagttgcacaagcattcatatcatgaagacaagttatgcatgaaatttacaacttagtgatccaattcaatgtgaagcatatggatatcgattgaagtatatntctaagatatcaaaatatgggtttccaaaaattagagagtatggatcactaantgtaccttntacagnttaaaaatcatatncatattagtgcatatgtat

SEQ ID NO: 23116 - DNA, 429 bp, Zea mays
  unsure (1)..(429): unsure at all n locations
agcttggaggcgtttattggttgtctacttggtgtagactcctccttcttctcttccgtcgccttgaatgcgacgggttgagcttccgatgtagatggatcatcaagctcgttgatcttcctcgagccttcgatcatgcactcaaaacttacaaaatgcccgattacttcctcgggggtcattagtgtatatcttgggttgccacgaattaattgaacttgagtggggttaaggaaaataagagatcttagaataaccttaaccacctcgtggccatcccactttttgctcccgagggtgcgcacttggttcaccanagtcttgagccggttgtacatgtgttgtggctcttccnctttgcgaagccggaaccgaccgagctcccnctcgatcgtttcccgcttggtgatctttgtgagctcatctccc

SEQ ID NO: 23117 - DNA, 422 bp, Zea mays
  unsure (1)..(422): unsure at all n locations
agcttcggctccatctatattatggattgcttntgaatctggccagtttcctttagcctttctggcagcttcctgacttacatgaatagcaataggcccttgatccgaaggtatcttcatgcatagatatgctggatgaagaattgcttcaaaagcattgagtgtcccacgaccaatgattgcattataaggatattccatgtcgacaatatcaaacacaatttgctcagaccttgtattgctgacaaatccgaaggtcactggcatcgtgatcttgccaagtgctatgatctgccttcctccgaagccacaaagagggtgtgtagcatcatgaatcttatcctctggctctcgcatctgtctgaaggccttagcaaatataatatccgttgcactgcctatatcaactaanacattgtgga

SEQ ID NO: 23118 - DNA, 293 bp, Zea mays
  unsure (1)..(293): unsure at all n locations
agcttattagtaataatcataaaatgtcaccattaatggactgatgtggtatttaaaccctagaagtgccagaaaccctaaatagacccctagaaaaccctggactgaaaccctatggggttatatgcaaatgtggcacatttttggacctaagtgcaaaaaccatggaattagggaaccttaagtcatatagtgcagatgtttaaagaattgcanaagaaaccttgagatttgggccacattgcaaaagggccactctaatgatcattggtaaagtctgaaatacagttgag

SEQ ID NO: 23119 - DNA, 369 bp, Zea mays
  unsure (1)..(369): unsure at all n locations
aagcttgtattgtaatcacatttangactaaccaatgttcttttgagatagacaggattagtaacgcatgccacgcacgaaagcaagttggagcccatcatctacacgagaacataatgactaccgacaggccgcttgagcttctccacatggatctattccgtccgattggttacataatcatcggcgggagtaagtattgtcattgaataatggatgagtattctcgcttcacttgggtgctctttttgcaggagagatatgcaacgcaagaaaccttaaatggattcttaagacgagctcgaaacgagttcggcctaaggatcaagaagattacaagcgactacgggacggagttcaagaactctc

SEQ ID NO: 23120 - DNA, 378 bp, Zea mays
  unsure (1)..(378): unsure at all n locations
agcttctaaagggataacacgtgataggtctaaccaatgttcatttcgaaaaagatagaccttgtgcagcttgtcaagcatggaaacaagtgggaggctctcatcacaccacaaatgtgatgacaacatcaagacccctagagctgctacatatggacctcttcggacccgncgcctatctgagcatangagggagtaagtatgggttaagtattggtgatgacttttctcgcttcacttgggtgttctttttgcaggataagtctgaaacccaagggaccctcaagcgcttcctcaagagagctcaatatgagttngagctcaaggtgaagaagatgaggagcgacaacgggtccgagttcaagaaccttcaagtgg

SEQ ID NO: 23121 - DNA, 383 bp, Zea mays
  unsure (1)..(383): unsure at all n locations
agcttcatcaactattggtgcagctctgcaaccgctggatcccaatcatgagactctctcccttctggaggcccgaagccagataaggaaggctgtcagccccacaccgccagaggatgagctttaccaacaaatcatagacatggagatgcttcatcaacaggtgcagaggaagaatgaaaagatggccatgctatctgaactgctaaggcagatagacgaagcctctgaagaagttcgtcatcttactcaggatgagcacaaccgaaggcctcagcataaagacctttatcangagggtttcttcaaccaagatgactggtatgagaatttcaccatggaaattttgcttatgatgatgcttctcctctgtccgctgagct

SEQ ID NO: 23122 - DNA, 237 bp, Zea mays
  unsure (1)..(237): unsure at all n locations
agcttaaagccatggtaagtagcataggcaagtaatattcgaattgactcaagcctagctacgggtgcatangtttcaccacaatccaaaccttcgacttgtgaataccccttggtcacaagtccggctttgttccttgtcaccacaccatgctcaatctgctttttgtagaagacccactttggctctacaacatttttgttaggacgtggaactaaatgccatacctcattccta

SEQ ID NO: 23123 - DNA, 362 bp, Zea mays
  unsure (1)..(362): unsure at all n locations
agcttataactttggagacaaagtatactggggcttgctttttgatttgtccttctaatttctcctacacaagcaccgcactcactgaagagtgcgaagctgccacatataatagtaacggagcccctgccgcaggtggagttaatgttgttagatcaatcaggtattgcttcagctcttcgaaggctctatgttgagctgggccccactgaaagacttcggctgactttagtatttcaaagaatggcaagtttctttctgctgatctagatataaatctgttcaatgaagtcaatcttcctgccaactggtgggcccncttcttcgtacttggcgggtccattcgaagtatggcttcgatc

SEQ ID NO: 23124 - DNA, 362 bp, Zea mays
agcttctaaagggagaacacactttacgactaacaaatgttcattttgaggaagacaaggtttgtagcgcatgccaggcaagaaagcaagttggagcccatcatccacacaagaacatcatgacgaccgacagggccgttgagctacttcacatggatctatttggcctgagtgcttacataagcatctgtgggagtaagtattgtcttgtaatagtggatgattattctcgcttcacttgggtgctctgtttgcaagaaaaatctcaaacccaagaaaccttacagggattcttgagacgggctcaaaatgagttcggcttaaggatcaagaagataagaagcgacaactgaacggagttc

SEQ ID NO: 23125 - DNA, 261 bp, Zea mays
  unsure (1)..(261): unsure at all n locations
agcttgatcacatactctttncactgctgctaccttatagcatcttgccaaanagaatattgttcatcaacgatctttaacagatgctatttcgtattctctccagacctaaaagattatcgaccaaaattgttactgtgtatgcaactatgttcttgaatgtcactgaaactaccctataaattcgcacaccgtatgcatttgacttgacgtaaaacaatcagcttaactcaccggtctttcatggatctgcacccaatc

SEQ ID NO: 23126 - DNA, 414 bp, Zea mays
agcttacctgactccttctctaccggcacaatattggagacccactctgagtctctgcatggtgtaataaaatcagcttctagccatccgcggagtctgtccttgattcctgggagaagacccggacgacatgttctatctctctgcttgaaacgtctgcaaccggacttaatgggcagtcgaggttctacgatctctcaggctatgccagcatctcatggtaagttcaagcacagcaatccgaatatggcttcaatacaccgatcatctcattgttaggatcggactccaacggcctgtttacaaaagtcggccttggagctttacctcttctatgtcgatctcctccacaggatccgccgatgaaacccctgtctagttatcgagactctgactcctcatcatgtccccaca

SEQ ID NO: 23127 - DNA, 340 bp, Zea mays
actctacagtggagctgtgagcatgcaagctgagctatgatctacttgtttactttctaacaaccacgaagtgcgcgttgaccaacccctcaagagagggcgctccttgctaagtctgagtcgccaactctacctgtgtgcactgccactccgttcgttaaccgagatatctattaccatattcactgaaccaatcctccgagaccagactagttctaacttgaacccgcgagatgcattggaggacacaacagctgtgctgagacgccgacgagtgtgatcggatatatctgtcgtcgacgcatgtcacgaacctctaggggatcacggctatcattct

SEQ ID NO: 23128 - DNA, 422 bp, Zea mays
agcttgaaggaaaaaagtatgaatgggaacttattcggttgccttaccattacaaattcaagggacatttcaaagtgccttgccaagaatggctggatgtaaggaaaatggaccccgggccatttggctaattgagttttggtgtttgatgaacaacacaatccgtgaactaataagttttctagtgtttgtgtttgtagttcacaggatgcgaagagaattggaccaaggcaatgaggatgcaacacctcataagaagacataaaaagatgcataggagtccaatactcaagaacaaagaagcccgaagaaatcagcgaagaaatccaagataagggctgtcagccagcgcctggtggcgcaccggacattggtgtccggtgtgcaccggactgtctggtgagacaccggacagtctgcgt

SEQ ID NO: 23129 - DNA, 430 bp, Zea mays
  unsure (1)..(430): unsure at all n locations
agcttttcgagcttctgtttaaggacgtgtttcaccatgtctggtgagaagatgactgatgaaaagaaaatgactgcagaaatgaagcttacttaggagacgaagttgtttgaagaaaagaaaactgtggatccttttatcgacgggttttgtgagtctatgtcaaaaacaaacacagagaagattactaaagagattctagaacggttgtctgaagatactgataataatgantagtatgatgtggagagtggagacgaagattctgaagatcggccgtggcgaccaagccatactatcttcggaaaatcgactattaaacatattcatcttgagaacatgagaggaaggtactttcacgacatgtctatcgtgagaagtggcggagacaacacttgccctgcctctgaagaaaatgaagtttgtatct

SEQ ID NO: 23130 - DNA, 411 bp, Zea mays
  unsure (1)..(411): unsure at all n locations
tggtacgaagatccattttgcatcagttatgcactccggagtcaaatggactcgttgaaagagccaacggcattataatgacaggaataatgaagttaatcttcaatcaacccatgggatagtggccagatcagttaaccaaaggggtgtggagccacaacacgacaacatcaaggtctacaggcttcactccattcaagttattattcggtgacgaagcaataactccagaggaagctaaaaccggatcaataaggatagtagcttcggcagaatcagattccgaagctgcttattctatagaacaagatgctntataagggatcagacttgcagccgtcgagaatatcaataaatatcaagccgatacatgtaaatggcgggatagaaaggttcggctataaatattga

SEQ ID NO: 23131 - DNA, 395 bp, Zea mays
  unsure (1)..(395): unsure at all n locations
agcttgcattgcttgttttaatttcttgtattgcatctagggcttgtctaacctagttgagataaccgccaacaaagcgagtgaaaaagcttaactcggatcaaacttgacaagtcttagttttaagcttttagcacttaaattcttactttttatgcaattgttggttcttgaaatacgcatgaggtactgcacttanggggagtattcaaaactcanatcactcatganaacccctagtgcaaggccaaaatggcaaattcaccatttgcctatnttctctaaaaattatctagcctatggcaaaatattctgaanattatgagaaaagtatatgagggtgccaatacctgtcccaacaagtgttattttgtgtgttataagttgggatttgg

SEQ ID NO: 23132 - DNA, 228 bp, Zea mays
  unsure (1)..(228): unsure at all n locations
acaacaaatgttactttgggaaaacacgatatgtatcgcatgccaagttgggaaacaagttggtgttcatcatccacaccaaaacattatgaccactgacaggccactggagcttctacacatggatttattcngcccgaacgcttacatatagcatcgacgggagtaaagactggctagttattgtggatgaatattctcgcttcacttgggtcattcttttgcggg

SEQ ID NO: 23133 - DNA, 425 bp, Zea mays
  unsure (1)..(425): unsure at all n locations
agcttatgaagattcttcatcccaacatgggctagtcggcggtgccagagccaacccatgttagtcttagcaattaaacatgtgtcgagctcagctctattaaaatctactaagtatagctgaccctctaacacacccttaaatgctattgaatcatcacttcttctaaagacagtgacacctatatcagtaaaaagacagttgtagcccatttgacataattgggaaacagaaagcaagtggtatctaatgaatcacaagaaaaacattggaatggaatggcaaggaaatncaatttacccaaccttgaccaaccctgatttcatcccaatgtgaagctcgtgggggctttgntttctatatgaaggaacaatctttctcccggcatgtggttgtgcacccgtgcgagatccactgacccccga

SEQ ID NO: 23134 - DNA, 479 bp, Zea mays
  unsure (1)..(479): unsure at all n locations
agcttctaaagggagagcacattntacgattaacaaatgttcattntgagaaagacaggatttgtagcgcatgccacgcatggaagcaagttggagtccatcatccacacaagaacatcatgacgaccgacaggccgctcgagctactccacatggatctattcggcccgattgcttacataagcatcggcgggagtaagtattgtcttgtaatagtggatgattattctcgcttcacttgggtattctttntacaggaaacatctcaaacccaagagaccttatagggattcttgagacgagctcaaaatgagttcggcttaaggatcaagaaaataagaagcgacaacgggacggagttcaagaattctcanactgaaggctttcttgatgagganggcatcaagcatgagttcttctctcctacacaccacaacaaaatggtgtagtggagaagaagaatcgaactctattgacat

SEQ ID NO: 23135 - DNA, 446 bp, Zea mays
  unsure (1)..(446): unsure at all n locations
agcttaaggacatgctgtgttccagtttccaaggctttcaaatgaagccagtcacagctcaggccctattccaatgcacacaagaccacgaagaataccttcaggcatatgtacaaaggttcttgcgactgagggcacaagcgcctacagtgcccaatgaaattgtcattgaggtcatgatcaagggtcttaagccaggacctactgctcagtatttcaccagaaagcccccacaaaccctggagaagctgcttcaaaagatggatgagtacattcgggctgataacgatttccgccaaagaagggagtaagcatacagattctctgagatgaccaggggcttcggaggacgaatccacccgaggcatgtcaggtcgattcatagcttcagtcagaacgacgaacaanggagccagcttcagaggtcacaatacacctcataatat

SEQ ID NO: 23136 - DNA, 380 bp, Zea mays
  unsure (1)..(380): unsure at all n locations
agcttagtcccctattttgcccacanaggcctccanaaatgactaagaaatntagcatcacgatcagaaacgattgtgttgggcacaccatgcaagcgaacaatttcacgaaagaacaaatcagcaatatgagtagcatcgtcagttttatgacatggtatgaaatgtgccatcttagaaaatctatcaacaaccacaaacacactatcacgtcccttcctagtcctaggcaatcccagcacaaaatccatagaaatatcttcccaaggagcactaggaacgggtagaggcaaatacaaaccgtgtggatttaaccgtgacttcgccttttggcatgtcgtgcaacgagcaaccaatctcaccacatctcttctcatctt

SEQ ID NO: 23137 - DNA, 244 bp, Zea mays
agctttaggttgatcatctctgtgggctacgccgcggacgtaaaagcgtgcactgtgtttccgtaaaggatccgataatttaaaactgcggtgagaggcaattaagatggagcgacttcattccaattattaagaatggactgcatctattctgagtatggcaagcagaatatagtcgctccattttttgtatggagtaagagcaacatagaacgaagtcgctctggtctttatttgggtggaa

SEQ ID NO: 23138 - DNA, 358 bp, Zea mays
agcttctaaagggagaactcgtgatatgtcttaccaatgttactttcgagaaagatagaccttgtgcagcttgtccagcacgtaaacaagtgggaggagcgcttcacagcaagaatgtgatgaccacattaagacctcctgagctactacatatggacctcttttgacccgtcgcctacctaagcatatgaggaagtaagtatggtctagttattggtgatgactttatccgcttcacttgggtgttctttatgcaagataagtctgaaacccaagggaccctcaagcacttcctatagagagctcataatgagttcgagctcaaagtgaagacaataagaagcgagcacgtgtctga

SEQ ID NO: 23139 - DNA, 445 bp, Zea mays
  unsure (1)..(445): unsure at all n locations
agcttcagttttttattggtaatgtatgggttcctaatctaacacatattccaggtttgtggactcaagtggtcttatgacaatcgtcagcttgcatcgggtggcaatgacaacagagtaagatgcttgtctatgtgtttctgttagtntggaaagcactgttcttaagtttcctcattgctgntttcttgtaccaatatttcccccttgtccagcttttcgtttggaatccacattcagtacagccagtactgaagtatactgagcacacagcagctgtcaaagctattgcctggtcacctcatctccatgggctgcttgcatctggtggaggaactgcagatagatgcatcccgatttggaatacgaccacanatgcacacttgagctgtgtggcactggcagcaggtaggttcaatgtgtcatacctgcatctttgtggctc

SEQ ID NO: 23140 - DNA, 337 bp, Zea mays
tatcaacaatctatttagtcaaacgaaatattctcatattgccccctttatataagtatgacctttgaatgtgcgccaagatcaaaggttaataaatattcgttgcctattttagaatgaacaaaatgttaaactttacttttggagatgtgtaatttaatatacaatccaccaaataacattaaaagaatcctttactaatgacataaaagcatgttatttagcatcgagcttctacaatgaactctacataacgattccattataatcgtggagaagtaatacattctaaacactaacataatatattatttatatttcatctgtctctctgaac

SEQ ID NO: 23141 - DNA, 373 bp, Zea mays
  unsure (1)..(373): unsure at all n locations
agcttcatagataggaactggttaccacgttcacttaaggcaggacagagagcttctgtaatatgtagctgaacctcaagcccaagtggattattctgttctgtccgctggaccgtgatctgacgttcaaagcaaagtgtgagccaagaaaccaagaaacccaggaaaagggaagttcagcaaaaatgaacaagttaataagttacacaacatgttataaaaataaaactcanaccactaacattagcctctccagatattccttccaaaaatctttcaccaccaaaaaacattcgttttgaccatcaaaagcattcattttgcaccaaaacacattcgttntgcaccatcaaaagcgtatatgttcagaaat

SEQ ID NO: 23142 - DNA, 289 bp, Zea mays
agcctgtatattaatcttacaaaactccactccacccagtggacgctgataatgacattgactgctggtcgtaaaacatataatagaagaatggtggacattgaccaatgggcgttaactaagaactagactgagatttcatcttaaggtccactgggccggtccattgagaactagactgattctgatgcgaccgccgattctggtaatatgatcttccatatattgacgtgttgctgccgacggctaggaaatcaacatctccaccagcacctggcggcgctttggg

SEQ ID NO: 23143 - DNA, 342 bp, Zea mays
  unsure (1)..(342): unsure at all n locations
agctggctggacgtcgtcctcttacctgagacggcggtgcagtcagtccccgacgtgactntatcgccgctcgtcgaccaagaggtaccgatcgattcccatcccacgtcatttggattcagcctcaacccgcctagcgaacccgctttggcgggcgctctcgtagaggcgagtccaaacccactagggtttcgtatgcggtcaccttgggaccggctgattgacgtctcgacctacgggccctccgggttcgaggaagacgacgagcccaacttctgttgtgatntctctgggactagcaaccncagtgccatgcnggacttcatgaccgcatgtgactac

SEQ ID NO: 23144 - DNA, 452 bp, Zea mays
  unsure (1)..(452): unsure at all n locations
tgcttgaactccttctatgagctttaaacaaggagcaactaagcaagaatagagagctcagactgaggataaagaaatctagctaatatatatttgatccttaagtattggttggagccaacaatgtagacaaaagactttggtccaatggctatggtcattgagtcgtagttgatggcaccgtccaagactaatggtaaacctcttgttctggttcgagccaccaaccgcgtctaanagacatgatacctttaataccgattggtggctccaatatggactaaagagtgaactttaatcttggttggtgtggttctaaccaggactaaaggccggtttattgcaaagtagctgtgangcgatgatttagtcatgtttggtggtccaacangactaatgctatatanngctgatacacattgtcggactaaggaaaaacgatgtctgtccat

SEQ ID NO: 23145 - DNA, 262 bp, Zea mays
ctgcattgtccttgaaaacaacagcatcggagctcgagggatactgcctcatgtgggatctacgcccgttcattgatgaccacgtgatgcgtcttgcgtggaacatgtgttcttgaagcattggggctttgagttgtttctgctgggatggatggctgggctggtcattattttcttatgtatgacaacgtggttgtgtgtggacatggtcgtcttctggagacgagaaacacatgggtgttgtttggttcacattcattgg

SEQ ID NO: 23146 - DNA, 390 bp, Zea mays
ctgcagcatgcaacttgctattttttaattgaagaatgagaattgacgacccacatcttcatcgttaaacaaaaagaagctactgtctaatgtttgcaagatgaatcttacatgaatctgaattctacatgacaccacgcaatgatatagagcataaacttgtacaaaaaaagcttctgagcatataatactgtaattattaaattacgagaggacaccgcacaattgatgcattattgaagaaaattccctgccacctttaatcgctatcgtatagtatggtcatccctgttgaagtaccatcaatacatcatcaattctcaacttgtgatgcataaacaataatatatatatatatatatatatagccacccacaaggctaaatgtct

SEQ ID NO: 23147 - DNA, 420 bp, Zea mays
  unsure (1)..(420): unsure at all n locations
agctggtcctttatgctcttatatgaagaaacaatccatgcgtatcttataagtatttatattggctcaattccaagcaacctttgcacttacaatcttgcaactagttcaatttatgtatttcatacttgctttggtttgtggtggcatcaatcaccaaaaagggggagattgaaagggaattangcttacacctatttcctaaatgaatttggtggttgaagcgcccaacacaaataaattggactaacaagtttgctctaatgtataagttatacaggtgccaaaggttcacacttagccaataataagtccaagaattgggttcaacaaagagaagcagggatnaccgaagtgtgcccttgtctggggcacccgacagtgtcccgtgcaccagnggacttagcgctgaactcttca

SEQ ID NO: 23148 - DNA, 365 bp, Zea mays
  unsure (1)..(365): unsure at all n locations
agcttatgaagattctttcattcaacatgggctagtcggcggtggcagagcctacccaagttagtcttatcaaccaagcaagtgtcgagttcagctctatcaaaatctaccaagtatagctgaccctctaacactcccttgaatgctattgaatcgtcactttttctaaagacagtaacacctacatcagtaaatagacaggtggagcccatttgacataattgggatacagaaagcaaattgtaatctaatgaatcaacaagagaaacattggaaatagtatggtcaggtgatatagcaantttacccaatcctttgaccaaaccatgatttccatccccgaatgtgatagttcgttggggatc

SEQ ID NO: 23149 - DNA, 62 bp, Zea mays
caggatatctattctacggtctaccaaatgtctcatgtggtaactgctcgatttgtcacgct

SEQ ID NO: 23150 - DNA, 408 bp, Zea mays
  unsure (1)..(408): unsure at all n locations
agctttacatttatgaaggatctgcctacttatatcatcgcacgccaagacatatatgcaatatgaacaaggttaacatttagaatgacattcacacaacaattgtgattccgtatggcttgctttcacatggtgatccccatctccaataatctgtccatcacgatgatctccatcttcatgatataggtatgccatcctccaggtgatgagtccttcaagacctatctaacgtatgccggtaaacaaattacatatacagcttggatcatcacatgttgacacgcacgtcattacattaaatttggacaatacatgtggctccagccgtattgcccttgtcacgacatgcangtcatgaaataattactaacatgcatcatatacacaatagccataccgatcaca

SEQ ID NO: 23151 - DNA, 383 bp, Zea mays
  unsure (1)..(383): unsure at all n locations
gcattgattacatcattcgtcatgcttctgggaagagactttctcaagaagaaaagctagaagcgctacattatgcccaaaaattaaaataccccgaaggggcattattgtttaatggcagtggggaaaaagattttctgtactggtctccgaataataaagagatatctgtctgcccggagatacgtagaagcatcagattcccgacgctagaagatggccttntcatattatcaaaggatgagcttactgatagtttggcgtataatagcataaacgtataataagctatatttgtattttgaaacgaaatatttatttgttattcttaatctggcctctcttggcgggttattcttaacatgccttagacacagaaaaca

SEQ ID NO: 23152 - DNA, 412 bp, Zea mays
  unsure (1)..(412): unsure at all n locations
agcttccttcgaatggtgttctgtcaagaatatccctcgaggacaaaatgagcatgctgatctgctagctaagtcagcagcacaggggctgcctttaccttccgatgtgttctttgaaacaataaaagcaccttctgtggaactccttgaaagagcagatcttaatatatctcctgtttttagtgaagattggagaactgagatcatctcttaccttcaaggtaaaattctttcagatgacgaagcttataacaagagaatagaggcaagagctcgtccatatgtcatgatagaaggggagttgtacaaacatggagtntgtgcttccgtgctcaaatgcttattcagaaccgaaggtatagaggtaatgaaagaaatacatgcaggcctgctgtgatctcacatccgatct

SEQ ID NO: 23153 - DNA, 271 bp, Zea mays
cttcagcaacaaatgcttcatgttgcacttcggaagctctaacaaagtttcttccgaggtgtgcttgaagacttaattgtctccaaaacatccaacacattaaccatcctttctcttttccgggtcactgctggccccttttggctttttactgcctcaacatttgctgaaagtattaaaacttctgatgtttttgtttggtcagtccctcggtcttctatctattctggtgctggcacttcggccagctcttcgatatttggcagtggag

SEQ ID NO: 23154 - DNA, 391 bp, Zea mays
  unsure (1)..(391): unsure at all n locations
cagcttgaaatcgagcactcatgcatacactaaacataacatcgggcctagatgcgcgtgtataaagcaaactaccaattattgaacgataaagttttggatcaaccatagtacctccttcatcttagtctagatgaccatctgttgccattggagtcttgataggcttaacattntctaaaccaaacttcttgagcatgtncttcaaatattttgattggcttatagaaaatccatctttcaattggttgattntgaggccaagaaagaagctcaattcttctatcatagacatttcacattctgttgacatcattnttccgaacttctcacacaataattcattagtagattcgaaaataatatcatccacggagatttgacaaacaaa

SEQ ID NO: 23155 - DNA, 206 bp, Zea mays
gaggcatggacataacagtatctctcttctactgactaccaaatgtctcaagtgggaactgctccatttatcacgcttgcctgtattctctgccgctgttggttataccaccaaaacaggatcaattctggcccttttaaccccatagtctcaccggacctatttgttcagagcacatgcgtatgagatttcatgagatgagactg

SEQ ID NO: 23156 - DNA, 386 bp, Zea mays
  unsure (1)..(386): unsure at all n locations
ctaaatttcagtttgcaagtggagtatcgcgtcgacggttccatctcctcgcggcaagaagacagaaacgcgaatggcaatggggagttccaagctctccttgcnttgtctcagacccttccttctcctcgccggcggcgacacgcttaccacattcatcgtgcacgtgcagcgcccggagtcagaggagaaccagaccaccggcgaccgggaggatggtacaggttgtcctgcccgaagacggtctgctgtacacgcgtaccccacgttgatgcggcttccggcccggctgaacaggaggaggcgacgcgctgttcgcatgcccggttcgtggggcggtccggaaagatgtacaactgacacacgcacatcctctgttctcggct

SEQ ID NO: 23157 - DNA, 338 bp, Zea mays
  unsure (1)..(338): unsure at all n locations
agcttgtattgttcctatactctgctgcagacaaccaatcctttcacttttttggacaagcactggtgtaacagcgttaaaagggttccaaacattgattgacacgctccgtcttgccatcttgtttgtggtggtaagacaaactgagtttcaaatcggtttccatgattttgaatagatgctggcagaagttgttggtaaagactggattcccgtctgagataatggcagaatgaagaccatcgagcttgtacacgttgacgaagaacactttagcaacaaaactggcagtgttaggatgtgatatanggataaagtgagcatacttggtgaactta

SEQ ID NO: 23158 - DNA, 420 bp, Zea mays
  unsure (1)..(420): unsure at all n locations
aaacttccttcacattatggggtccacacaaatatgtggtcttttctgagaagatctgtcattggtcttgctatgctggagaatcctttgatgaagcggcgggaataccctgccattcctatgaagcttcgaacttcactgacgttggttggttgccttcattttgacactgcttctatattggaagggtgcacttctattccttctgccgntaagatatgcccaaggaaggctatcttttccaacccagaattcacattactgagtttggataaaagtggttgctctgaagtttccaggacgatccgaaagtgacgcttatggtcttcgcggttctttgagtaaataaggatgtcgtcgatgaagactaccaccaacttatctagctctttcataacactttattcatganggtcatga

SEQ ID NO: 23159 - DNA, 395 bp, Zea mays
  unsure (1)..(395): unsure at all n locations
tagcttataactatagaattgagacaagagctcgaccatatgtttaatagaaggggaactatatcaacatggagtctgatctgcactacttanatgtttatccacagccgaaggtttataacttatgaaggaaatacacgcacgcctgtgtggatcttactatggatctaggcctttgctgggaaaacgtttttgtcaaggattttattgagcataaaacagcttcggatgcaacggaagtattccaaaagtgcgaaggctgtcagacatgtgcaagagattaaaaaacaaccatcgtctttaactctatttatacaacccactttggcaattgcaaggtggtgccttgtattgtatgtgcgctaccacagcacaagggaactaatatatgttgt

SEQ ID NO: 23160 - DNA, 332 bp, Zea mays
agcttgtttatcttctctccttgtgagcacatcccacacactaggttgactaggataattctatcttcctaccttttgacgcacaccactccattcttgaggatcttatcaatcaggatacctactccatttttgtttgccattgattctgagtaccatagattgaaaccagagatctcccactccttccgttattggcctttccattttggctcctggacacataagatactaactacgctcctactttgtgcatcaaattacattcttatcttacctgtaagggaacctatattccaactaatctaacagattctagtcggctcaactag

SEQ ID NO: 23161 - DNA, 443 bp, Zea mays
  unsure (1)..(443): unsure at all n locations
agcttctcccattttgtttgcttctcttcagcaactggtttcttgtcttgagacatcttatcttcggaactgacgaacatatgtccttaaatccgaagcttagaaaatttaagaaactaagcaattgttggaaagcaagagcttagaaatcaagcaagtcaaagcaggcataccaaatgtgctcggggtacgttcttatttacacgcccagcacgctccaagttggagggccccgtctgtcattgactgttgctattctagcaaagggaatgtgttttttggaccttcagcttagggccttcgtccatatcgcaatctgaattcgttattctaacaaattaaccttgtgaggggctattgttgggggcttcgtcttctgaaggtctcaaaacatggnttaacatgttctggagatatacatgacaagtacttcgactcgatca

SEQ ID NO: 23162 - DNA, 469 bp, Zea mays
  unsure (1)..(469): unsure at all n locations
agctttcttgcgtatcttcgtagctggttcaaccttcgtccaaccatgcttntcatattgtggacaacttcattccgagtccgaaggttcctgtacatatattacacttgggaaacattgntaatcatgtgtttgaggaccttcgaaagacgaatgcccncaacagtgttcctttcgacttaaggcatctgcaaccaaatttgccttgcccgggtgatagtgaatctccaaatcataatccttaataaggtccaaccaacggcattgcctaaggttgagaatcctttgagtgaatatataatacacactcttatgatccgtgtacacttggcacttagtacccataatgtaatgtctccgtgtcttaagtgcatgcactacagctgccagttctaagtcatgagtggggagntcaactcatgtttccgtactgacgagacgcgtangcatcacgtgtcttcttgataac

SEQ ID NO: 23163 - DNA, 304 bp, Zea mays
  unsure (1)..(304): unsure at all n locations
agcttacatgattctttctaagacttccagacttcgactccacgcatttgattctccgtgttagcgatttgagctccatttgagtagtgaacttcgtgtgttgtgtttcgagctcaagtcgtgacttgtgtgcgtggttgtgctgcggatatgagtcttgcgtgtgttgctctacccaaccttactctgtgccttctttgtgatcccaattataagggcaagagactcctaattgtggagaattctcgcagatgggataaatactctataagaaaagaccatggtatncaagatgatcattgga

SEQ ID NO: 23164 - DNA, 328 bp, Zea mays
cgattagtcgacccgggatccttaagcgactcgagctgcagcttgtctattttggacattttgcacccattgttcggatctaaagactccgggcacagatatttaaatgattttagattgtggcctataattatgggtcaaaaaacctgcttctaacagagtggggccgtcggttaaacaagttaggccgtcggtattgcggacggagcctgaactttacatcaaatgttctctattatgtagtttgatactaaatattctgtgtatctggcaacgacaggacttatgaatgttatctacgaggagcttctacattaatacgaagact

SEQ ID NO: 23165 - DNA, 303 bp, Zea mays
  unsure (1)..(303): unsure at all n locations
agcttgtgaatgttcttcatccncacatgtgctaagcggcgatgccacagccagcccatgctagtcttagctattaagcatgcatctagaccggcttcttcttttgcaaaatcaactaagtaaagattgccgtctaatacacccttaaaagctagtgaaccatcacttcttctaaatacagacacatctacatttgtaaatagacagttataccccatgttgcataattgactaacagatagcaaattataaccaagagactctactaaaaacacattagagatagagtgctcattagaaatt

SEQ ID NO: 23166 - DNA, 274 bp, Zea mays
  unsure (1)..(274): unsure at all n locations
tactccaccgatgaaggagactagcctctggacaagcggngcatgcccttcttatcagatctcgaatacgaacgcggcgctgactacctgagtagtcacgggtacgtagatcaagagggcttctcccgcggcggagggcaccacgatgggtgttttcgtaaagagcgccttaacgatttcgagagacttctcggccttggaggctcagtgaagcactcgacctttcttaagaggcggtacagaggcaagcctttctcgccgaagcgtgagatga

SEQ ID NO: 23167 - DNA, 305 bp, Zea mays
  unsure (1)..(305): unsure at all n locations
ncaagcttcacaagcttgccctagtggtcggctaagcatgtctgaatggctctctggtaagtcgctccagagnttttgaggccaaacgacatggaggtatagcacaaagccccgaacggcgtgatgaatgttcgtttttcctcgtcttcttttgccaagctgatttgatgatacccagaatagcaatctaagaaggacaacacagaacacccggcggtcgagtccaccacctggtctattctatgaagtccgaacggatccttccgatagtgttggttagatccgtatagtccacgcacatgcgc

SEQ ID NO: 23168 - DNA, 387 bp, Zea mays
agcttcagacaaaatcttatgccaacgcttatgattaccagatatcttcttttttatcaagttaatcaatgtcctattactggactcggcctgtccattggcctgagcataatatggagataaattgagcaacttaattctatataattcggcaaactcacatacctcttttgacataaaagaagtcccttgatctgtagtcaaggtctggggaatgtcgaatctatgaataatatgttcagttatgaactcaattacctccttatgtgtcatgtttttcagagcaacggcttcagtccatttggtaaagtagtcagtggcaactaacacgaacctatgcccctttgatgataaaggatgaatttctcctataaagtacaatcctca

SEQ ID NO: 23169 - DNA, 440 bp, Zea mays
  unsure (1)..(440): unsure at all n locations
tcagctccatctatgttatggattgctnttgagtcagtccaattgccttctgcccttcttgcagcttcttgacttccatggatagcaatgggtccctgatccgaaggtatcttcatgcaaagataggcaggatgaaggattgcttcaaaggcattgagagtaccacgaccaataattgcattgtaagggtattccatgtcaacaatgtcaaacataacttgctcagttctagtgttgttgatgaatccgaaagtcactgacatggtgatcttgcccagtgctacaatctgtctttctccnaagccacagagaggatgtgtagcatcatgaatcttatcttctggctcttgcatttgtctgaaggccttatcaaatatgatgtcagctgcactgcctgtgtcaaccaagacattgtggaccagatatcctttgataacaca

SEQ ID NO: 23170 - DNA, 430 bp, Zea mays
  unsure (1)..(430): unsure at all n locations
agctcgacctgcatattcagggtcatcacaacttttgttgtttttccttatgagaataagcttattatttttccctgatgagaatatgcttattattttcggctaaaagggattaccattgaagatttgtcctcatgttaaatatatcccctttctgtttattgagtctaatttgttatactatacaatcataagtcatttgaactaataattcaaagggaactctcaaggaggatgttttcctgtagaggtgtagatgcttctactggccatgtcggngtaagtactactgaacttttaccttaagtgcctccatgtgtntaaatcatctttgcctttatccctgttaagagtaatatctgttctatttgaaactgagagtcactgccngtgaaccatctatgtatgttatcctacattctctatgata

SEQ ID NO: 23171 - DNA, 358 bp, Zea mays
ttgcctgtggcggagggcgggtggccgggtggtggtgtatctggtatagccccctagacagctaccgcagcccggctgcgcgtgccgctgccaaaaagccggacaccaaacggcctgagcgagccggcgccacctcgactgtcgacgccgttgacagacgagcggcacacgcttggcgcgcgccatggatgcctggaaccgccctgctgtcctcatcgacaacggcaacgagtacgccccttccactctctagatctgcgcgccgaggcgagacggcggtgagccacactgctgatctgtttcggctctcgcgggcgggacaccaagattgggttcgcggggaacgtggagccctgct

SEQ ID NO: 23172 - DNA, 436 bp, Zea mays
  unsure (1)..(436): unsure at all n locations
agcttagataaacaagggtggcgaaaagtggtacctctcggacttcatggtagatcgccactagaaggtcgtcaatgagagggaagtaaagtatgattcactctcagcctgctgcatgagctccccattgtaagtaacaccacgccattagtcgatattgaatttgttaaaatttcttttgatatcagattaaaattataatggaggatatagataatatgacacatgtattagaaaatactcatacacctaattttttatcacataaattgggcactaaaataactgcgtcaaaatcatcggcaacaaatggggattcttagtcccagccatattatggtgtgtcgatgaactcatatccggngaagatggcgtcaccatcaccactgcatgatagatcggctctgggcacgacgggacagtctgcacacgatca

SEQ ID NO: 23173 - DNA, 387 bp, Zea mays
  unsure (1)..(387): unsure at all n locations
catttgtaactgagatattttntggatatgacagtnnannanggcattgataattcattctcgggcttggttccacatgttgcacaggtatgctcgaggaacacatttgataccaaattccctttacttttccataactgtatacctgaatttcattaccatggcaacgaaattacaaagttcacagttttagagttgtaacatgaagaaaaaaccacccgtgctacttcccatagtgatcaccaagggatcatgcactataccataccaaattcctttcactgctctactaaatctgtgttttgactcatggtcaattttgcagtggttgcttgctgtgcataacactcagatactcttgagtgtatttttggctatattagcact

SEQ ID NO: 23174 - DNA, 468 bp, Zea mays
  unsure (1)..(468): unsure at all n locations
agcttatcanatntcanagactcattcttgcagtttatcttactagtagcggatccttatgccaagcttttacttcaccagttaagtaattgtcctgaatctagattttcctaatctagatcattcgcttgtcctacactagattcattttagcagctttagtttcacttgttatctacgatgagggtcgaagatccagtcttcatatccgagaagttcggcgatccgaatcgattaatacccagctggggatctccaaccacacgacatatgcttcccttaactcttttgcacatgtctaccattcccacggatcctccaccacatgaacaggtctgcgccacccgagagcacaccaccccttataggcggtcggttgccaggagggtacgtgccactcttcgcatctctccactcccagtgcgcgattgtcttttcatgtatggaatagccgggttcaagcttacc

SEQ ID NO: 23175 - DNA, 447 bp, Zea mays
tcgcacctctggactaactcggctgcatcactatatgctggtggctagtataaaccagacctgaagaccttcccaaccagagtcctggatgctacgtgtatcccgcattgccaagcgtggacctcatctagcagttgcttcccagtagccgaaagaatgcatttcatgaggactcctgtcgcgccccttctgtatagtgtttccccaatgagagtgtaatgagttgactgtcttgcgacgcactctgttgcatttttgtcatccggctcctcctcattctttatgtatctgatgattggctccctgcagtcatcagaatctaactctggttggctcagaatattgcactcttctacccgatctaatgaaatgcttgggcgtagtacttcttggacgaaaactccaggcaggagctgagtccgactggatcccagctttgacaatgca

SEQ ID NO: 23176 - DNA, 495 bp, Zea mays
  unsure (1)..(495): unsure at all n locations
gatctctatagcacctgcggcatgcaagcttgtgaagattcttcattccaatatgggctagtcggcgatgccagagccaacccatattagtcttagcacttaagcaagtatcgggtttagctttgttaaaatcaactaagtataactgaccctctaatactcccttaaatgctattaaatcatcacttcttctaaagacagtaacaactaatcctaaatccgtaaaaagagagttgtagcccattttacataattgagaaacagaaagcaaattgtaatcttaagaatctacaagaaaaacattggaaatagaatggtcaggtgaatatagcaatttaccaagtcctttgaccaaaccttgaattccatccccgaatgttatagctcttttgggatcttcgttnttctcgtaggaggagaacatccttttcttcctagtcatgtggtttgtgcacccgctatcaattatccaacttgagcccncggatgcataat

SEQ ID NO: 23177 - DNA, 413 bp, Zea mays
  unsure (1)..(413): unsure at all n locations
ccacaaccagcccatgctagtcttagcaattaagcatgcatctagaccggcctcctcttttgcaaaatcaactaaataaagtttgccgtctagtgcacccttaaaggctaatgaaccatcacttcttctaaagacagacacatctacatttgtgaataaatagttatatcccatattacaaagttgactcacagataacaagttatatccaagcgactcaactaagaacacattataaatagagtgctcggatgaaatagcaatttttcctaaccctttcaccttgccttggatcccatcaccaaatatgattgaatcttgnggatccttgttcttgacgtaggaagagaacatcctcttttcccccgtcatgtggtttgtgcatccgctatcgataatccagcttgagcccc

SEQ ID NO: 23178 - DNA, 445 bp, Zea mays
  unsure (1)..(445): unsure at all n locations
atcctgttgggaatatctacggtattccagatattcgatttttatagctgtagatgaacctttggcacatatataacatataatctagagcaaactagttagtccaatcatctgtgttggacaattcaaccaccaaaatcaattagaaaaaaggtgtaagcctaattccctttcaaaaatagaagatgtgataggaagttcgtcggagattaatgctgaaatctttcgcttctcgtggtcagtggccttctagccataaagtctcaagtgtggtgaccattccatcataagcctacgtctaactcctttggcgaggatccttacacgtgtacaatcgaaggtatgctattcttccggtgttgacaccagcattgaaagtgcttggtntgcaccatcagtggcttctacaaattattgatgagcacttaatgaatctatagagttc

SEQ ID NO: 23179 - DNA, 440 bp, Zea mays
  unsure (1)..(440): unsure at all n locations
agcttgacaacgaggagatggcgctaatcatcaaaagctttcgccaaatcctcaaacaaaggaaggggagagactacaaaccccgttccaagaaggtttgctacaagtgtggtaagcccggtcatttcattgctaaatgtccattatcaagtgatagtgataggggcgacgacaagaagggaagaaggaaggagaagaagaagtactacaagaagaaggacagcgatgcccacgtgtgtcgggaatgggactccgatgagagctccactgactcctcctctgatgagtacgccgccaacatcgccgtcagcaaaggcctcctcttccccaacgtcggccacaagtgtcttatggcaaaagatggcaagaanaagaaggtacaagctagaaccacacccaagtatactacatctagtgatgagggtagttctagtgatgat

SEQ ID NO: 23180 - DNA, 485 bp, Zea mays
  unsure (1)..(485): unsure at all n locations
tattacggacctatgaaactcagcttgtaaggttcttcatcctcacatgagctaagcggcgatgccacagccagcccatgctagtcttagcaattaagcatgcatctagaccagcctcctcttttgcaaaatcaactaagtaaagtttgccgtctaatacacccttaaaggctaatgaaccatcacttcttctgaagacagacacatctacattagtgaataaacagttatatcccatattgcataatcgactaacatatagcaaattatatccaagagactcaactaaaaatacattagaaatagagtgctcatttgagattgcaattttgcctaagcctttcaccttgccttgattcccatcaccgaatatgattgaatcttgnggatccttgttcttgacgtangatgtgaacatcttcttctcccccgtcatatggtttgtgcatccgctgtcgataatccagcttgaacccccggatgca

SEQ ID NO: 23181 - DNA, 424 bp, Zea mays
  unsure (1)..(424): unsure at all n locations
agcttcgagggatcaaggatccaactttatctaccaagtgatcaggctcttcgagttccacaaagttgaagaccatgggcatctgtttggtgaaggcaagtatcctctgacccattatgtcctatctatttataattcattgtcccgcattacttaattgaaacctaaggattgactagctttctatttatcttatctttgtttaccttttgggttatcatggttagcttatgctattgtttcaacttaatcaatgaacatgatgtgaatattatgatacgatgatgttatcccgatgatgttcttgtgttactntanggggctcatgttgtttcctgagtacctctccgtaaggacctgtttggngagtgacaacccgggataacagtgcagccatgagggtggaatgggacgcccttagctg

SEQ ID NO: 23182 - DNA, 439 bp, Zea mays
  unsure (1)..(439): unsure at all n locations
gttatgttattacagaccagactataagtgagtgccgagtagttatattatacaaaccaggggaggcacagacttctgccgataagttcttaagcgagagatcctaagtggaggaccgagtactcccgcacttcagtcttgattatcttcttttggaaccaccttggcacagaagcagcaaaagtctgctacttcctcacctaaaaacaacgaagggataaaccctgagtatggaattactcagcaagtcttacccgactaaagaaaagactctcaagggtatgctggctatatgggagtcaaggtaaggcttttcaataatcaaagactctgttntgcagaaatgcttactaaagtggatccttaaaaatgcaatcttatttgtcaagttaagtaacattacctgcactagagttctttctaccctagttcaatcact

SEQ ID NO: 23183 - DNA, 417 bp, Zea mays
  unsure (1)..(417): unsure at all n locations
agctgtagaaccacaacttctttctttatatgatgacactaangcatgcattcaaacaaccacgctagataggcttggatggatttgtttttgatgaactcatattgatctctatgcacaatatgttgaataaccggttgaagtctaccattaatttagttatcaacttgatagatgtgttcaataaagagatgagcctaaaatcagagatcttgatgggggtattgacctttgggttcagagtaatgaatgaattgttgattccatcaagagtaatgttaccctcatgaaagtcacgggaaagcttatagaaatcatgtttgataatatgtcagcacgtcttgatcaagttgccattaaagccatcaggtccatgtgctttattangcggcatacatctgataacattatctattt

SEQ ID NO: 23184 - DNA, 434 bp, Zea mays
  unsure (1)..(434): unsure at all n locations
tctaaagggagaacacgtgataggttngactaatgtacaattctattaagatagaccttgtgcagcttgtcaagcaggtaaacaagtgggaggagcacatcacagcaagaatgtgatgaccacttcaagaccactggagctgctgcatatggacctcttcggacccgtcgcctatctgagcataggagggagtaagtatggtttagttattgttgatgacttttcccgcttcacttgggtgttctttttgcaggataagtctgaaacccaagggaccctcaagcgcttcctcaggagagctcaaaatgagtttgagctcaaggtgaagaagataagaagcgacaacgggtccgagttcaagaaccttcaagtggaggagtttcttgaggaggaagggatcaagcatgagttctccgctccctacacaccacagc

SEQ ID NO: 23185 - DNA, 254 bp, Zea mays
ccatacaccaacgacgcttgtgggtgctatatatccctgatataaagatgctcttcggcggcctactctcttgatagctgctttcctgaagcatgccgaacaatgaattctaactctttaaacggtgcttcaggagcaagagaattggatttctcggaaacactctctttctctatagttatcggtccacttttcgaaggtctagctatggcaggagcttctgaaggtccagcttcagcaggagtgtgggctat

SEQ ID NO: 23186 - DNA, 407 bp, Zea mays
ctactggccgagctagccgaagcactggcttgttctgaacatggctgtggtgggctggccacggtggccgaagctctggcggctatggcgggcggaaattaactcgccggactaagggaagatcttgtcgtggagggtgagtttggggcgaactggggcgcgcctgggaaggctttatatgcgcggcgcggtgcacgggcggtcgtggaccggcgaatgctctcgggcgtgcactgggaaggcgcggtgcgcgaaccggcgtgaaccgggggtgtcagccgcggtcgaacatgtgttcccgttgcctctgtctctgttcaagcgccgattgggagcaaatctttgcgaatttggcaagatcactgcaagggatattgtcaccacaccaagctttgtcttttgtgtat

SEQ ID NO: 23187 - DNA, 438 bp, Zea mays
  unsure (1)..(438): unsure at all n locations
agcttctaaagggagaacacgtgatangattatctaatgtgcaattcgaaaaagatagaccttgtgcagcttgtcaagcaggtaaccaagtgggaggagcgcatcacagcaagaatgtgatgaccacatcaagacccctggagctgctacatatggacctcttcggacctgtcgcctatctaagcatacgaggaagtaagtatggtctagttattgttgatgacttttcccgcttcacttgggtattctttttgcaggataagtctaanacccaagggaccctcaagcgctttctaaggagagctcanaatgagtttgggctcaaggtgaagaagataaggagcgacaacgggtccaagttcaagaaccttcaagtggaggagttccttgaggaggaagggatcaagcacgagttctccgcttcctacacaccacaac

SEQ ID NO: 23188 - DNA, 425 bp, Zea mays
tgtcgaggaccagatcatcgaagcttataagtttctggatgataagtggtcacccaagttttgttgatgaagcaccagaagaccaatcaaggaaggaatccatgtgggagttcgcaagagaaaggtttgcgtgttggcatcgatgcttcctcaataagctagctgccaagcgaaagctgaagcctgaagatgatccttgagtagccagaatcagtgttgcaatcggcaaccggatgctcctgcaaggccaaattttgttgaagttccatctcctcgaagagttgcaaagtgaaaatatgtagctgaagtaaatctatacccataacccttctaagccgaatctcgaggacgagattccttttaagtggggtagatttgtagcatcccaaaaattcaaattctgaattatttctcaaactccctct

SEQ ID NO: 23189 - DNA, 477 bp, Zea mays
  unsure (1)..(477): unsure at all n locations
atagtcacctgcngcatgcaagctngatgttgtgtggcgacgcggtaccctttattccttctcgtctaagggcccagattatgccttgtggagatatggatcctaatcgcattggttcggtcatgtggcagtggcagacctctcctggctcgagatctggatggcacacgcaaggtccggaaccgatctcacatccgcagagtgccttttctccacggtcgtggggttcccttggaccccttttttcaaggatccgatgggccacttgtagaggtccgggttccacgtttgggaaccactcttacggtcgtgatggcggtcgagtccagagaccagtctagctggaccgcgacttcttatggcgggcgtcaacctagagccgggctagcttttngacgaactcatggctatggcagccatatgggtctcatcttgatccagtatgaatagacagatattgttctacatgtaatatat

SEQ ID NO: 23190 - DNA, 423 bp, Zea mays
  unsure (1)..(423): unsure at all n locations
actcagcttaggtaanattatgtaccagtggattttttttttgtcttgatctgctaaacttgtactgcctctttccagggtgctagaagaatagttccggagtggactggtcttgacagtgaagcacggcagttcactgcacgaatcttgggtgatgatgtcgagcctgcagatgccacacctccgccatcggaggcaccgaagcctgaagatgatcaggatgtgaaagatgagctatgatcgcaagatgtttccaggcttggtcttactgaatgaaagtttggtgactcgacagtcatcagttcagaacacaggcacacagctagtggagcgcagagggatagtttaacgcaggtgcaaatttgtcaaaacactacacctggaatcctagactacgttgattcaggtatttcgtttacagta

SEQ ID NO: 23191 - DNA, 440 bp, Zea mays
  unsure (1)..(440): unsure at all n locations
agcttgtacacgctngccccagtgatcggctaagcatgtctgaatggctttctggtaagtcgctccagtgtttttgaggccaaacgacatggaggtatagcagaaagccccaaacggggtgatgaatgcagttttttcctcatcttcttttgccaagctgatctgatggtacccagagtagcaatccaagaaggacaacacagaacacccggcggtcgagtctaccacctagtctattctaggaagtccgaagacatccttcggacaatgtttgttgagatccgtatagtcgacgcacatgcgccaatccactttattctttntgagtacaagaataggatttgctaaccactcaggatgcagtacttctctaataaatcctgctgtgactaagcgagctagctcagcatggatggcttctctcttgtcgggcgtgaaac

SEQ ID NO: 23192 - DNA, 452 bp, Zea mays
  unsure (1)..(452): unsure at all n locations
tgagcaaggctcacggcttcaccaggaagctatctgggggcttgaatcgaacggaggaggacgggagaggggtcggccacggcggttgctcttggtcggcactggcgggctgcggggaggtcgccggaggcaatggctggctcgggcaagacaggcgaggtacggaggagacaatggggaaggcaaccgagcgctggggcgggttttataggcgcggacgcggccggggcgtcggttcgaccgtttggcgcgacgcgggcacgcanggcgcgcgcgcgggcgtgctctggcgagctcagagcgcgtcgaacacgtggcgcgttgcttctgcccgtgttcttcgctctgctgagcgaccaggcgtacgaatctcgccctaccgccagtgggagatctcttccctgcacctagggctacctagttcatgtaagttccaagagtagatgtggtct

SEQ ID NO: 23193 - DNA, 472 bp, Zea mays
  unsure (1)..(472): unsure at all n locations
gatcctctaagcacctgaggcatgcaagccggngtcagtggagcattgtatgccaaggctgtgaggcctgtacgcgaacggngaatcgatggggacagttgtcttgtgtggggtcggagtaccctgacatgacgtgtgtttaggtttaccttgcaaggttaaaactcgatttgaatcgtctgcttctcgcagctaatgagactgcttgattccttgtactgcatcgagtaagaagtgaaatgtggattatatgagataatttgatgattgaactaatgattgttaccatgtatgcttagaaggagcaaatctagctaagttaatgatggtagaatttgaaaagctaaaaattgattctagaaacagctagtgctttggcaaaccaaacccctcagccaaacacctgcatagtctagaggtagaggagtagactcctcacaccggttaagtctagctgagtattagtatactc

SEQ ID NO: 23194 - DNA, 462 bp, Zea mays
  unsure (1)..(462): unsure at all n locations
tcaacatcttaggcacatcaccttcagcaatagcagacttcccaaactctaggtggctcagtttagatggcgtggcaccgtactcatcttcatattcatcttcttcagcatcaacctgctcagcttcggcagcaggtacaccttcgtcggaagcttcctccggtaccaccagccctgaccgcttcatcacttctgaaatgggaacggtctcagcagcttcggcttcatctccctcgcgaccaaccctggcagtggagcgtactctcgccatttgatgatgaattccttacaattttttgaagttggtgacttttttggtttccccaaagctcttcctcttgtgatgaagcagaaacaaaagcgatgcttcgtttgcgtgcgatgaacaagcgttggctatgtttaattnttggcagcaaaacagtgcaatagcaatgaatgctgtggtaacttcacacatac

SEQ ID NO: 23195 - DNA, 450 bp, Zea mays
  unsure (1)..(450): unsure at all n locations
agctngtggaggaccagatcttccaagcatatatgtttctggatgagaagtggtcacccaagttttgttgatgaagcaccagaagaccaatcaaggaaggaatccatgtgggagtttgcaagagaaaggtttgcgtgttggcatcgatgcttcctcaataagctaagcgaaacctagatgcctgaagatgatctttgagtagccagaatcagcgtttgcaatcagcaaccggatgctcctgaaaggccagatttcgttgaagctccatctcctcgaagagtctgcaaagtgaagatatgtagctgaagtaaagctatacccataacccttctaagccgaatctcgaggacgagattccttttaactggggtagaattgtagcatcccaaaaattcaaatcctgaaattttatcaaacttgctctaaattcaaaatgaatttacatttcat

SEQ ID NO: 23196 - DNA, 461 bp, Zea mays
  unsure (1)..(461): unsure at all n locations
ggctcaacttggaaatcatgttgccatataattgggcatccctcgcgcaactgcaagcttaatactagattcagcaactcacaggcagttggtatttctatacatttcttcttatcctatgaggaaagataatcattgtgaaaaatcacaaaaatagcagtcatcttgatcactttgctttggagcgttataatttacaatagaaaccagccatacctgtgaggcaataacgaaatgcatatatgtagaaatcctggaaattggatggccttgtaacctggatttataaatagatgaaagtggtcagcaacgttacacttcaacaaaaaaatatcaacaattaatggtagctcattgtccattacagtcacaaggtggcaatatatcatgatatatcntgtagatggaaagtcttcactccgtanattaaatctctgatatgcatggctcactttgacata

SEQ ID NO: 23197 - DNA, 413 bp, Zea mays
  unsure (1)..(413): unsure at all n locations
agcttctaaagggagaacacattntangactaacaaatgttcattntgagaaagacaggatttgtagcgcatgtcaagcagggaagcaagttggtgttcatcatccacacaagaatatcatgatgactgacaagccgctcgagctacttcacatggatctatttggcccgatagcttacataagcatcgacaggagtaaggattgtctagttattgtggatgattattacaggataaatcacaaacccaagagaccttaaagggattcttgagacgggctcaaaatgagttcggcttaaggataaaaaagattagaagcgacaatgggacggagttcaagaactcacaaatagaaggctttcttgaggatgagggaatcaagcatgagttctcttcttcctacacgccacaac

SEQ ID NO: 23198 - DNA, 111 bp, Zea mays
  unsure (1)..(111): unsure at all n locations
ttatgttgatgatatcatatttgggtctactaacaaatctacatgtgaagaagttagtangatcatggtacagaaattctagatgtctatgatggnggagttgaagtattt

SEQ ID NO: 23199 - DNA, 456 bp, Zea mays
  unsure (1)..(456): unsure at all n locations
agcttgtacgctgctgcaccaatctggtccatttccgtataaggaccataaaatcgaaacgccaatttgggacatggacgatccaccagtgaagtttgcatgtacggctgaagctttaataggacttgctcacccactgcaaactgacggtctgaacgtttgcgatcagcctgcaacttcatgcggttctgtgctacgaccaacatctgcttgagcaaagtggtgtgggcttgctgctcctgaatccactgatcaacggaaggatgagctgggcatgcagtggttggtagagcagtgagtggtggatcgtaaccatacaatgctttgaatggggaacaaccgangcccgagtgaagagaagaattgcaccaaaactgcgcgagaggcagccacttacgccactgnttangggaatgatgcactgaacagcgaagatacatctccaaacattggttg

SEQ ID NO: 23200 - DNA, 377 bp, Zea mays
  unsure (1)..(377): unsure at all n locations
tgttgaggaattcacgagactgaacttgtgaatatttgctcacactgaaggagtcactattgaagtggaacctaccttggagcaagaaatctgcactggtcagattcgtgataataaaatccaagaaatcaaagatctaattactgaaggtagaggtctagaatttatggaggatgagcaaggcacaatatggtttaagaatcggatatgtgttctagaaattgacagccttcgtgagactatattgaaggaagcccatgactctaattattctattcatcccggtagcactaggatgtatcanngattgaagcaaaagtactggtggtatgggatgaaaagagatagtggtgcgcatgtggttatgtgtgatgtgt

SEQ ID NO: 23201 - DNA, 441 bp, Zea mays
  unsure (1)..(441): unsure at all n locations
agctntaagtgggacatggactcccataggtaagacatccataatgaagacgcgaccacttgagcccttgaccctttacgaacaattggcaagacctgtctgaaatctccaccgaagaccatggttttaccaccaaatggtattgcagggcgacccattatatcgcgcatgctattgtccagtgcctccacgacttgtctcttagtcatagaagcctcatcccagataatgagagatgctttccgtagcaactctgctgttccactctgcttcgtgaagctacatacagcgccatcgtcaatagtgagtggtatcttgaagcgtgaatgggcggttcttcctccaggcattatggaagccgcaacgccagatgtagctgttgccactgcaatcttgccctggttgcgtagcgtcgcgagcaacactctgtatagataagtc

SEQ ID NO: 23202 - DNA, 373 bp, Zea mays
tgtgaagattcttcattccaacgtgggctagtctgcgatgccagagccaaacaatattagtcttagcaattaagcaagtgtccagttcagctctattaaaatcaactaagtatagctgaccctctaacacccccttaaatgctattgaatcatcacttcttctaaagacagtaacacctacatccgtaaaaagacaattgtagcccattttgcataattgagaaacagaaagcaagttgtaatctaaagaatctacaagaaaagcattggaaatagaatggtcaggtaatataacaattttaccaagtcctttgaccaaaccttgatttctatccccgaatgtgatagctctttggggatctttggtttttcg

SEQ ID NO: 23203 - DNA, 423 bp, Zea mays
  unsure (1)..(423): unsure at all n locations
agcttgatatttntttgaaggggttntgtgcatgctactattngccncttctcaagctttttcaccatattatcacggttatcttgagaaggttgagcatgacactttcccttcaattgaatcaagctcctttttagcctctcattttcttccttgagctcattgttttcttttgcataggaaacattacttgttcctaaaagttttagatcaatggaagattggctttcttgagagcaacatttgttagcacatgataatatagtttctgcttgagtacatgtgcataagtgaggttggtatgatttcaaattagttaacacaacctcatgagccatttctaacatgatatgtgaatccataaatttattatgagagcacacaagcatatcantgttttcttgcaaagctagaatttaatat

SEQ ID NO: 23204 - DNA, 459 bp, Zea mays
  unsure (1)..(459): unsure at all n locations
tctaatgggtgagcatattntaggactagcaaatgtttcttttaagaaagacaaaccttgcgtagcttgtcaagtaggaaagcgggttggctagagtcatcatccaaaaacataatgacgacatcaaaacagttggagcttctacatatggatcttttcggtcatgtttcttatttagcatcggctggagtaagtatggtgttgttattgttgatgactttactcacttatttgggtatttttcttgtaggataaaagtgaaatccaagggactctaaagcgatctttaagtcgagctcaaaatgagttcgacttgaggatcaagaagatctgaagcgacaacgacacanagttctagaacttgcaggtagaagggtaccttgagaaggaaggcatcaaacatgagttcatcaccacttacacaccacaacagaatgacatgacagaaagaaagaacat

SEQ ID NO: 23205 - DNA, 399 bp, Zea mays
  unsure (1)..(399): unsure at all n locations
gcagcttaagaaaacaaacaaatgtgttaagtactatgcatgagtacaacattcacatttacatcagattttagaattataccaatgaggcaccccatgatgtcctgatgtagtaattccaaccactgagaagcaacagtggccgctgatcatcagaatagcaagaagaagtattgagacagatatttccataagtagtacccaatgcaaatttgaacaaaatggttgattaaataagcaaggaaggataccttttactgacagtacaatcatgtaatcatgattagttgttggatcatcagctgatgtattgcangccctgtctaaagacatagtgactgctgatgagagtngcagtttgagcctatcgccatcctgtgcaaggaactgtgatgtggt

SEQ ID NO: 23206 - DNA, 445 bp, Zea mays
  unsure (1)..(445): unsure at all n locations
tcgatgatctggtcgtacacaagcttgctataggccttcttctctttctccatagcaggaaccttgctagaacactaccccacttaaaaagaatgagggtagaactcttgaatcttggggatttgaactccttgaagtacctcataacaagggtgttatggggccttcttctgctgttgttgcttgagcacgctgcggagaaatgactgacgcagggttgattctgggacaaccttcttctcatcttctcttcgctatcttcttttcccttctcacttttcactgcctctatctttctctttgctcttcccactggaggattctatcaaagagtattaccatcacacaaaggaggaaaccgaagactatgaaccatgtacaatagtcttcaacccaagaataaccaagcattgtgatcttatgggcgagggagtggaanatggag

SEQ ID NO: 23207 - DNA, 390 bp, Zea mays
gctgcagcttaagcctggtaggagcatatgcttattatatgcgaattgactcaagcctagctacgggtgcataggtttcaccgaaatccaaaccttcgacttgggagtatcccttggccacaagtcgagctttgttccttggcaccacaccatgctcgtcttgcttgttgcggaagacccatttggttcctacaacattttgattatgacgtggaactaaatgccatacctcattcctagtgaagttgttgagctcctcttgcattgccaccacccaatccgaatcttggagtgcttcctctaccctgtgcggctcaatagaggaaacaaaagagtaatgttcacaaaaatgtgcaacacgagatctagtagttacccccttatgaatat

SEQ ID NO: 23208 - DNA, 452 bp, Zea mays
  unsure (1)..(452): unsure at all n locations
tataacatgagaatctagtgattatgctacttgaataatgaaagttgcaatcctagataaaagtgatacttctttaccaaattggattgagttgtagtagcatacttcataagaaacttattctcatacatgagactacatgagattactaagagaaagtgttagtctcaatattatcaagatatagaaatgggctccccctaaagatgtgcatcaagtatttgaatgacttggttagatgcattttctattaaagacaaataggggaattcattgaacatcttgataaaggcatataaaatttgcaataatcagcttatgcttggtattctcaaaatgaaaaggtttagaatacttacaaccacaccactgattgatttgaagatcttactgtctaagtggtggttgtattcttgacatcttctttttcatttgagtgccctcactntata

SEQ ID NO: 23209 - DNA, 451 bp, Zea mays
  unsure (1)..(451): unsure at all n locations
agcttctaaagggttagcacantttgggactaaccaatgttcgttttgagaaagacagggtttgtagcgcatgtcaagcaggaaagcaagttggtgttcatcatccacacatgaacatcatgacgatgacaggccactcgagctactccacatggacctattcgacccgatagcttacataagcatcggcgggagtaagtactgtctagttattgtggatgattattctcgcttcacttgggtgttctttttgcaggataaatcacaaacccaagagaccttanagggattgttgagatgggctcaaaatgagttcggcttaaggataaaaaagattacaagcgacaacgggacagagttcaagaactcacaaatagaaggctttcttgaggaggagggaatcaagcatgagttctctctctctacacgccacaacaaaatggtgtagtgg

SEQ ID NO: 23210 - DNA, 401 bp, Zea mays
  unsure (1)..(401): unsure at all n locations
tcggctatgggttaaaatttggacagcacaacagtacaatagcaatgaatgttgtggtaacttcacacctacccgtctgtttatatagcaccgcaggtgggaaggtgaatcgtcaaggtcttccgcaccgggaaaacagccacccacactcattgaccggtgggccacaaggtccgcgagggtgaatcgccaggacgcgcgcaactactacaagatggggccacctcgcgcgcggattattttaatcgtttctcgtcaacgagctaagggaagatgttttttcggatcttcggcatcccaaagccaagaagacttttttcacggatcaagctcgttacgaaaaacgatctagcaccgtgaaggggctactattgngggtatgcttcgtagccgaagatcct

SEQ ID NO: 23211 - DNA, 383 bp, Zea mays
  unsure (1)..(383): unsure at all n locations
agcttcatatcatctctgggtacctgcaaaacttattaagtacattttggtacccatctcatgatgggtccatcaagggtagccaataaggacttaggcacccaaacagccttggtcctagaatgtggtgaactcatcacctttctagcacaagagtcaaatttgggtctcctaagcatatttgaatgtattgacaagttaggcttacgagttntaccatttggacaaaccttgaatagatgaccttttttacgacaattgtagcaaatgcggtgcttgtccttgcaacgcatttgccttttgctttcatctttcttgatgatcatctttcttgattgtgcaaggtcttggttcttcatgtggnggcatgaaccaatttcatg

SEQ ID NO: 23212 - DNA, 395 bp, Zea mays
  unsure (1)..(395): unsure at all n locations
tgcattgcatgtttaaatntcttgtattgcatctagggcttgtctaacctagttgagataaccgccaacaaagcgagtgaaaaagcttaactcggatcaaacttgacaagtcttagttttaagcttttagcacttaaattcttactttttatgcaattgttggttcttgaaatatgcatgaggtactgcacttaaggggagtattgaaagggaaatgtgccattgggccatttctaagtattttggtgattgagtgccaacacaagtgcttaaatgtgaatttatgctcatggatggacaaagtgcaaatcaagagtaaaggtatgtttctaagccttagtacattggttntgtgtactaatatacttgtctaagtgttagaaacagaaagaaga

SEQ ID NO: 23213 - DNA, 462 bp, Zea mays
  unsure (1)..(462): unsure at all n locations
agctntanaatagagtcaatatagtcatgttgttataataaaattctntgactcatacgacctgtattcccatatatctagggatccaaaatggaagcaatttcaagccgcaataatgttccatgtttcgatgccttactcacacaaggatgcacatatacattgtatagagtgggattctgtctaaatagggaggggattcaatttcggaatattggacatgggctagagatcggactgataacacatactattgtggagccattcattaagccaatccaatttcctccatttccaaagtatcttatgccattccataaggtgtatcaacaaccacataagtcgttcgtaggtaatgatcattccttccatatggnttatatatatatagtactaatggctgatgtataagttattcanagataactaatcacatgtgaattgctcagacattattggcat

SEQ ID NO: 23214 - DNA, 465 bp, Zea mays
  unsure (1)..(465): unsure at all n locations
tgtgcgttgcatcttccttgatagtatagcgggtcatatgcccaattttaaacgataaaacaaatctaaatgtcctttaagtctgtcgtcgtgtcgtttttgtagtcacgtgttctaccattttaaatagcatcttcattcttatataacctgattgtcatatcgataagtcttattaatcctataatcatatggatattatcatggaaacacaagttagagcttaattgcacctacacaagtcatgtgataagctcttattattattattattattattattattattattattattattattattattattattattattattattattattattattattattattattattattattattattattattattattattattattattattatttgctttttntgaagggactttaatgggataactatgattataattaatttcttacgggatacatgaag

SEQ ID NO: 23215 - DNA, 464 bp, Zea mays
  unsure (1)..(464): unsure at all n locations
agctnttcgtttgaacgccgccggatcgttggttaaccctgtccgtggccacctcacctcgccgtcgcgttccaggtccaaatcggtagcgagtaggttcaagtcccgatttgcttcgcggtgagctccatgcgctctccatatgttttgctagtgcagcgggttagtggtggagccgtgtcggcgtcgaagtagacgcagcgccgccgccggcgtacgcggggaaagcagcgcgaacgcacacgagttctggaacctgngttgtcagcgcagcttttgttcctggtaattgggctggctgggcgaattttggcccagtctattatgaaatttctttattaattaactgataacttgtaaactaggttaaaaattgtagaannaatggaaaaatgtgaaacaaatttgtggnggtcattaaatggtgtagtttctggtacaattaattttggaatttttacaac

SEQ ID NO: 23216 - DNA, 442 bp, Zea mays
  unsure (1)..(442): unsure at all n locations
cgggatatctaacaaatctgaagctgacaagctgaagtttggtctgttcacaatgtttccatgtctgcagccagccttcaaaaaagcagcagctgtgccccgagaagctaccagggcgcagaagtcagcgtgcccaccaataacttcgtcaagggcatcaacttcgccttcaatatgttctaatgttcttggcagattttcagctgaaggtgtaaatttcgaagagctagctccgacagagtgaaacacgtccttcagccgctgcacacatcggatgctgaagcttaagcatttctcctgaagttctgtaaaggatttctgcaaatttgagtatttatccacttcagccttcaggcttgcttcaaaatatttcttttcttgctcgaatttttctgattgacggagcaattcattctttaatttgtcattntcagtttggact

SEQ ID NO: 23217 - DNA, 471 bp, Zea mays
agcttgagcaaggctcacggtctcaccaggaagctacctgaggcttgaatcgaacggaggggggactggagaggggttggccactgcggtggttcttggtcggcactggcgggctgcggggaggtcgccggaggcaacggctggctcgggcgagtccggcgaggtacggaggaagaaatggggaaggcaaccgagcgctgggcgggttttataggcgcggacgcggccggggcgtcggttcgaccgtttggcgcgacgcgggcacgcggggcgcgcgcgcgggcgtgctctggcgagctcagagcgcgtcgaacacgtggcgcgttgcttctgcccgtgttcttcgctctgctgagcggccaggcgtacgaatcttgccctaccgcctgtgggagatctcttccctgcacctagagctacctagttcatgtgagttccaagagtagatgtggtctgggtgaggagatatgg

SEQ ID NO: 23218 - DNA, 428 bp, Zea mays
  unsure (1)..(428): unsure at all n locations
nggtcattntattgctaactgtcccgacaatgatagtgatcatgatcaagggaacaagagggaaaagaagaagaactattagaaggcaaagggcgaggcgcatctatgcaaggagtgggattcggactgctcctcttccgactccgacaatgaaggactcgccgccaccgccttcaacaagtcatccctcttccccaacgaacgtcacacttgcctcatggcaagagagaagaaggtaatcactcgtaatgatgtcacttatgattcttctagtgacgttgagtctagtgatgatgaagtagattattcatgtttgttcaagggcttagatagatctaagatagacaaaattaatgaattaattgatgccttgaatgaaaagaatatacttttagaaaagcaagaggatttgttgtatgaagaacatg

SEQ ID NO: 23219 - DNA, 466 bp, Zea mays
  unsure (1)..(466): unsure at all n locations
agctngngtatgtatatccactctattgggtatggtaaaagatgtctttaaagcatagagaggtttgggtaagaaagagtacggtaaagaaaggctccatcccggattgtggatcttgattcctttgaagatctggcttgaatcttatccttccttgattgatgaggtcgatcatcttcgatcttcgttcttgaagttgtcatccgaattagggacatgtagttaggataacttgtaggtaaggatagatggttaacaggttggtggcataagataagtgtatcatggcaacatctaggatgggatggatggtcaccatgaatatgctggtaagttatttgttcatgggtggtttggtgtgatgtactaatttaagttaaaacatggccaacagggtctaatctatttcactagtccgttaagtaactcactttagattagatcatattangttagatgggatcta

SEQ ID NO: 23220 - DNA, 455 bp, Zea mays
  unsure (1)..(455): unsure at all n locations
ntnggacgctgataaaattatttttaagtgcccgtaaataaatatatttctctaatttcaagagaaggcaacatcaagaccaattagcaaacaaaaaatgtgctccagcatgagatgcaacaatcaaaactcatgtagggtttattttgataaacttaacacacacatatatatctaataactatacacattttaggaaaaagagaaaagaggagaataaagagagggttacacctaaattttgagtatagtgcaaagaaatttttataccctaaactctaggatgttacgactatgtgagccaatcgctctgaaccagttatttgtcgcaaggatcatgtgggagttggaactaagggcctatttggttcaatgggactaagctttagtccctaatttgccaaacatanggactaaaagaggataaaccatatgttttcctctcttttagtcct

SEQ ID NO: 23221 - DNA, 374 bp, Zea mays
  unsure (1)..(374): unsure at all n locations
agcttatagcccatacaagggagggaggtatctctataaaccttcccaaggacaccactacgaacaagtgatgacaaacgagacccacgcatgtgaccaagatgatggtgccactgagtgaagctaactaagtggtggcggtaaaagcagtggcatcaatggtggaggaggactggcaatgagtggaagctgaaggaagaaacgaccggtcaagctcccaaagacgaggaggatcatggagccggtggccattatcaactaaggtccccgtatgatgatccttaacaaagcaagagtcagactcaacgacaattatgattagtgatctgaccagcagacaataactacaaattaagattagaanattgagaaac

SEQ ID NO: 23222 - DNA, 438 bp, Zea mays
  unsure (1)..(438): unsure at all n locations
agcttctaaagggagaacacgtgatatgtctaactaatgttaccttcgaaaaagatagaccttgtgcaacttgtcaagcaggaaaacaggtgggaagctctcatcataccaaaaatgtgatgaccgcatcaagacctttggagatgcttcatatggacctcttcggacccgtcgcctatctaagcatagaaggaagtaagtatggtattgttatagttgatgatttttcccgcttcacttgggtattctttttgcaggataaatctaanacccaagggaccctcaagcgcttcctcaggagagctcaaaatgagtttgagctcaaggtgaagaagataaggagcgacaacgggtccgagttcaagaaccttcaagtggaggaataccttgaggaggaanggatcaagcacgagttctccgctccctacactccacaac

SEQ ID NO: 23223 - DNA, 417 bp, Zea mays
  unsure (1)..(417): unsure at all n locations
tgaaccagtataacccactatctcaatcccatcactcaagtcccggtggctcaccattcggagtgagtccacactagctttctctacgaacacanatctcattgtcccccttcttaaactatgacagttaggttaggataaccacacatgagatacataatctcgcctaagttaatctgatcgtggaccatccggccgtaccaggtgccaaatatggtgctcaacacatgcctccccggccttttggtgaagcatggtgaaccaaaaccacctggtacgatccgcctctttcggtaaacgatagatcccgcaacttgccttgttcccgaaataggaactctagcccaatgcaagtcactggttcttgtgataaggcaatataactatttgatagaactctaatgcacanggggagtt

SEQ ID NO: 23224 - DNA, 455 bp, Zea mays
  unsure (1)..(455): unsure at all n locations
agcttactcctctcggggaagggtctttcattatcgtcaagattttgaagcccggaacatacaagctggccaacgatcaaggcgaggtctacagcaacacttggaacattcaacagctacgtcgcttttacccttaagatgtttcaagtcgttcatatacatcgttctctttacatacataaataaagtctaaccgtcaaggaagggtcagccttgcctcggcaaagcccgaccctccctcgagggctagaaggggggaaccccctctgcgtcaaattcttcctcggtaaattnttctaccaagaaagattttctaccaaaacgactttcgtgccttctcgactatatcgataacagaatcctgcaaataggtaagagtgcgcgtaagcggcaaggtcgaccgagccgagggactcctacgcctncgggatatggatacctcactcatcaccttc

SEQ ID NO: 23225 - DNA, 419 bp, Zea mays
  unsure (1)..(419): unsure at all n locations
tgagtgataattcctcctgagggcccgtcggcggtgttagatttgaagttcctgacatttggtggaaggaaggtacgtgtcggcgtttctgaccccggnggaccctcaaccgggccgaccagtgaattttatcgctgcgtgcccctgtccacatgggttggcgcaagatggaacacaaggggaaatgcggcctatattatctcgcgccaaggggtgctcgtagtaggggttacaagcgttcgagagagagagagtgagcctgttcgtttgctcgtccctccgcgcgaccctcccacaggaaggccctggacctcccttttatagacgcaaggagagggtctaggtgtacaatgggggtgtagctatgcgctaacgtgtcttggcagagaagtgcctgagccctgtgtacatgccaacgt

SEQ ID NO: 23226 - DNA, 449 bp, Zea mays
  unsure (1)..(449): unsure at all n locations
agcttcngcatgacaatagagaatgtgaaccgtcttatagatgaaaagccaaattagaccctaaagaattactgtagagttattgataaatgtaaatgacattaatgtaattttacacgggctgcgtctcgtgcctataaatagatgaacaatattcccgtactgttcacgctgacttgacattcgcatcacgcttgtacctttgcttatcttcggaccgaaggtacatttgtaatttgccatcgtttatacaagtaaaaacgaaataaaagtaaaatcaaggataatgtttaaaataatcatgttattctctntatttcgtgcataaatcttttcttgtcttttattatgactatgaacgtatgatcttcataaccttcgtccgaaattcattatacccaangggaaataatgntagaacgaccaaaggctttgatattaatattcta

SEQ ID NO: 23227 - DNA, 450 bp, Zea mays
ttgagctaattccttgcagagagtctataccttatttatctctcttaacacacctcattctaagttattttaggtcgatccctacctctttttccattattgactcgctctaaaacccctctacgcaccaacgtctcagtaggtcttctttggatatgtccaaaccatctcaactgattttgaatcaatttcttttcaattggtgccaccccaatcctattccaaacatcttcccttcttgtgtgcccataaaaccaatgtaacatacgtatgtctgctacaatcgtttgttggatgccatataacatcgtcaagcgaatcactataaaccgaatgcccaagcatgtatacagtcgtcaccacacgtggaggggaggcatggatgttgtgcccctacagtcgtcaccacaatgacatgtagaatggataatgcatgatcgtgtcggcagt

SEQ ID NO: 23228 - DNA, 387 bp, Zea mays
agcttgaagccatggtaagtagcatatgctaataatatatgaattgactcaagcctagctacgggtgcataggtttcaccgaaatccaaaccttcgacttgtgaataccccttggccacaagtcgggctttgttccttgtcaccacaccatgctcgtcttgcttgttgcggaacacccacttggttcctacaacattttgattaggacgtggaaccaaatgccatacctcattcctagtgaagttgttgagctcctcttgcattgccaccacccaatccgaatcctgtagtgcttcctctaccctgtgtggctcaatagaggaaacaaaagagtaatgctcacaaaaatgtgcaacacgagatctagtggtacccccttatgaatat

SEQ ID NO: 23229 - DNA, 427 bp, Zea mays
  unsure (1)..(427): unsure at all n locations
ngacaatgaggaaatggcgctcgtcatcaagagctttcgctagattctcaagcanaggagagggaaagactacaagttccgctccaagaaagtttgctacaagtgtggtaagcccggtcactttattgctaaatgtccattatcaagtgacagtgacagggattacgacaagaagggcaagaggagagaaaagaagaggtactacaaatagaagggcggcgatgcgcatgtttgtcgggaatgggattccgacgaaagttcaagcgactcctccgacgacgaggacgccgccaacatcgccgtcaccaagggactcctcttccccaacgtctgccacaagtgcctcatggcaaaggacggcaaanagaaggtaaaatcaagatcctccactaaatatgaaacctctagtgatgataatgctagtgat

SEQ ID NO: 23230 - DNA, 472 bp, Zea mays
atcctctgagggacctgaggctgcagcttgtaatgcacaagatgatttatatatattgaatgaaattcttgtcaaggtttcgaagataaaatcaagaaactttaagattctctaaaagaaaatgatgatttgatgtattcagtcgaatgatcgcttgccgaagcgcatgcttagaataaaaaattgagcaaggagctgagagaagctcaaacgcttttggaagagaactccacctgattcaaccgtgaaaccgaagctctgaacatgacactcaaggttgaggctgagaaaaacctgaagctcagtgaagcactcaaatctctcaaggataaatgttataactttgcaagccaatgcactgctcgattaaagagtatattcaattcatttggagttgcatccgaagaagctagcctctctgccgaagatgtcctcggagcacttgaatgcgtcaagaaagaaggtgatgtgc

SEQ ID NO: 23231 - DNA, 382 bp, Zea mays
  unsure (1)..(382): unsure at all n locations
tgccatgagcaagtaatgtcctatcacgcatctctagaattgggagaactgaggctatccgcagaggttttctctaaatttttctccctataccattttttgtgtcacatcatcaacatttcatcccctacttttttattccccgcagcgggtcttcctatattctccccctatacactactacaaccataaaatatcattttctatacctacttttcatctactatcaatttttctttatctaataaatattcacgtgtgtacaaaaccacgcaagaggagcggctgacgttactctgcatctggcaggtcactatgcatcacgcttgtactgtagcagntatagtggtgagcgctgcagcatatatggttgctctacaca

SEQ ID NO: 23232 - DNA, 417 bp, Zea mays
  unsure (1)..(417): unsure at all n locations
agcttgtggacctgttgcctatcaactgaaattgccacccagcatgtcagctgttcacgatgtgttccatgtatctcagctgcggaaatgtgttcagacacccactgaagtgctaccgaaactggacattgagatagaaccagacttgtcttaccaagagtaccccgtcaaggtattggaccagaaggagagatcaacttgggcaagatcagttagaatgtataaggttcagtggagtcaccattcagtagaagaagctacatgggagactgaggattntctacgctctcgcttccccgactttctacccaaaggagtcggtatgtaaccncgaaaccccacccccacctgccctttgaattcaattataagaaaaacttaaataacaaggatagtctaagttgtgcgattaactta

SEQ ID NO: 23233 - DNA, 451 bp, Zea mays
  unsure (1)..(451): unsure at all n locations
tagctagaccaataaacgcanagccaaagggcagaacaatcaaagggagtgaacaaaaagatcttaagttgggtgcgaaaggtacaaagaagaagaaccgaaagtgcaaaagatgtggcattgctgatggtacaacagtcgtacttgtctatctatataggagaatatggttcgattggctcaccttgttgtgcgcaagagagggcgacctcctatatctaagaacaaaattggaagtgcagctactcattggaatgagatggcaacttaaaaaaacacagtggatgatgttgacagtgattcatccagtggagagtagataacacgagtgtgatatcatgagatatgcataacataaattntatatgtctatgttgtcaacgttatatatgcaataatagttatgattaacctggatgattagtatcggatatttgcatacaacgaaaaa

SEQ ID NO: 23234 - DNA, 327 bp, Zea mays
  unsure (1)..(327): unsure at all n locations
agcttggcgnctttatttgcttcttcttcttgagcccttggcgtccagtcagcgatgaagtctgctaacgcttgggactaaattgaagatctatgcacatagtcaatactgaattcgttaagctccacatcccactttccaatccttccagtagcttctctgttcctcataatatccttcagaggctgtgatgaaggaacaattatgtggaatgcttgaaaataatgctgaagcttcctggaggccattaagacagcatacaacaccttctccaattatgtataattnttctttgataaacttagaacttcggagacaaagtaaact

SEQ ID NO: 23235 - DNA, 423 bp, Zea mays
  unsure (1)..(423): unsure at all n locations
agttttcttaacttgngttaagttttaccccattaatttctatttanggttaagtttcctatccagggtcctatttgcaaaacacttaaaacaatacaacttgtttgaaatttttgcctagtgaatgcactctatgtgtgtcaaacatatgcaatgccaatgctatgatgccatgctcaagttttagttacagtaacaccaggggtgttacaccggacatgtacccggaccgtccgtgattatatgcagaccgcctgtcgttgtatgcggacggtccgactgggtagtttagattctgtgccatatgtggtggctcgggtgcctgtctgggtaactcattaaaagtaggtccggctattgttggcccggacggtccgcgctcacgtgcggacggtccgggcatgtgcagatcggctggttact

SEQ ID NO: 23236 - DNA, 440 bp, Zea mays
  unsure (1)..(440): unsure at all n locations
agctngagaagatatttccacccggcttcttctatccaatgcagcatttgattcttcatctcccgtatgaggcacgaatggngggcccgtgcagggacgttggtgctatccaatcgagagatgtctaaagactattcgaaagaaatgtagaaataaatgcaaaattgaggcttccattgcagaggcatacaatctagaggaggtgtcaaacttcacaacaacatattatggtgacaaactgccgagtgtgcataatccaccccctcgttacaatgatggcgacaatgaatcgaaccttagcatatttcgaggccaactcggaagcgcaagtggctcgaccaccaagaccctgacacatgaagagtggcggcatatcatgctatatgtattgaccaaccttaaagaggtgatgccatacatggaacaatttcttcatgaat

SEQ ID NO: 23237 - DNA, 464 bp, Zea mays
  unsure (1)..(464): unsure at all n locations
tcttctcgcattgatgagcgacgacaacgcgaatgcctnctgctcatggagtttgttcanggtttgaagtaggaaacatggattcatgtttggcgttggtttatgaaaatgactcacaagtctgatccatggaaaaaaatattacgaagaacaaatttcacacatgcaaaaaagggaatttaagtataatgcattattcaaacaaaagaaatagcatgcaaagctcttctttaaataatattacctccatccaaaaatataattcaagaatatcggtgatacttatctactactacgcattgtgcaatggtagcaagtgagcttggagagagatgtagtagatgtgtttcctgtcatagatgtagacataaacacatataggtgggtgcccgtgcgttgcaacagaaacatttaatatcatgataacttatgaacaaatgtgtgttatactgttatgtgaaaat

SEQ ID NO: 23238 - DNA, 457 bp, Zea mays
agcttgccgtctattacacccttaaaggctagtgttccatcacttcttctaaagacagacacatctacatttgtaaaaaggcaattatatcccatattgcatagttgactaacagatagcaaattgtaaccaagagactcaactaaaaacacattggagatagagtgctcattagaaattgcaattttacctaacccttttaccttgccttgattcccatcaccgaatataattgaatcttgggaatccttattcttgacgtaggaggtgaacatcttcttctcccccgtcatatggtttgtgcatccgctgtcgataatccagcttgaacccccggatgcataaacctgcaaggcaaatttaggcttgggtcttatgtacccaacttatgttgggtcctacaaggttagtgcaaatatccttagggacccaaatgcaagttttgtcttccttgcat

SEQ ID NO: 23239 - DNA, 454 bp, Zea mays
  unsure (1)..(454): unsure at all n locations
atgaccccaaatgtggaggtccnctcccttngtgatcacataaatatggatagtagtgtccatgatgattctgacctgaatattgatcacgacttacttgatgtgatggttttacgaaaaggtaggaaaattaagcatcggaaaaaaacgattaaaaaaaaggcttccccaaaaagtagaggttcatctacgaaaaaaggggagtctgtctgttctgacctccctcctgatccgttttaaatcatgagaggccttatttggaattgtcagggtttgggtcgcgacactaagtttgatttcctgagggaaatcattatggaagagaaanatgacttcgttggtttacaagaaactaaanaagaacattttaatgactctcttctgtcctcgcttgcgggtagcaagctttntgcctggatctcctctcctcccaatgggagatcgggaggtcttt

SEQ ID NO: 23240 - DNA, 462 bp, Zea mays
  unsure (1)..(462): unsure at all n locations
agctngcaccccggtacattggtcctttntctattcttgaacaatgtggaccagtggcatactgactccaattacccgaaacattgtctacggtgcacaatgtgttccacgtatctcaattgaagaagtgtctccgggttccagatcgaactgttgaagtgacggatgttgccctagaaccagacttgacatattcagaacatcctgttggggacttgttctcaaatgctatgaattaagaacaaggcaacataaaatgttaagtattaatgcccttcgtccgctgaagcattatttccccaaggatctaatgagcttcggacgaaggccatgagcaaaatatcacgaaggttacaccttcatgatcagactcataaaacaatatgaaataaaatgtaaaacatgaaacattatagacagatatattaaaaatagataaaattgctcacatantttattata

SEQ ID NO: 23241 - DNA, 451 bp, Zea mays
  unsure (1)..(451): unsure at all n locations
accggacattccggtgcccctctgaccttctgctctgacttttgccacgttactatgatgtactgttcattcattagagtcgaccgttgcgcgcagataaccgttgttccgctggcacaccggacagtccggtgattnttagcagagtacgcctagagaaacccgagagtggccagtttgatctgctcggtcctggtgcaccggacactgtccagtggcacaccggatagtccggtgcgccagaccaaggaacacttcggtttccttttgctccttgcttttgaaccctaacttattctttntattggtttgtgttgaacctttggcacctgtagaacatataatctagagcaaactagttagtccaattatttgtggtgggcattcaaccaccaaaatcatttaggaaaagggttaaggcctatntccctttcaatctccccctttttgg

SEQ ID NO: 23242 - DNA, 467 bp, Zea mays
agcttgcagcataagaaaagagtatagaattctctatcagcactgaacagatgagcatcttcactgatctccaacacagaccatacagcttctcagataaagaggaaaggagaataatgggtttcccaactatataactaactttattgacatagtatgtaaaccaaaatgcaggggatacccacactctggtgacaatcattacaaagatccaaaccaaacatagttcatcatgacaaacataaatgcacaggatatagcaaactgccctgtctaactaaaactaactaagaccgagactaacgctaagactgaagcttccatgtatatttttatttcgtattaattacaagatccaactctaacgatctatggttctaggtttatcttggtcttgcaggcgggattgccataagactggtgtccacgctgaggtgagcggtacgggtgctgagtcccaacgggag

SEQ ID NO: 23243 - DNA, 431 bp, Zea mays
  unsure (1)..(431): unsure at all n locations
ctacttcgttgattntgcaaaagaagaggccggtctagatgcatgcttaattgctaagactagcatgggctggctgtggcatcgccgcttagcacatgtggggatgaagaaccttcacaagcttctaaagggagaacacgtgatagggttgactaacgtacaattcgaaaaagacagaccttgtgcagcttgtcaagcaagtaaacaagtgggaagctctcatcacaccaaaaatgtgatgacaacatcaagacccctggagctgctacatatggacctcttcggacccgtcgcctatctaagcatangaggaagtaagtatggtttagttattgttgatgacttttcccgcttcacttgggtgttctttttgcaggataagtctgaaacccaagggaccctcaagcgcttcctcangagagctcaaaatg

SEQ ID NO: 23244 - DNA, 428 bp, Zea mays
  unsure (1)..(428): unsure at all n locations
agcttaacaattattacgttctactatgattgtattgaatgtaattatagttggtaatgtgttgcataatgttgtgaaaatatatgatttcagatcaagatccagcaatgccagttgcactaggcagggtatttccaaacacaatccatcgtttgtgtttgtggcatgttcagaacaggtatatgccgtatttaaacgagttgtacgctagatttgaggaagaggatttcaaaacaaggttccaatctataatacatcatcctttaactgtaactgagtttgagactgcctgggcaatgctgattgatgatttccatctacatgataacatcagtctttccagaatgtatgaaattcgtaaagattggataccagctnnttttaaacatgaatattgtgggttgatggtctctacacagcgtagcgag

SEQ ID NO: 23245 - DNA, 425 bp, Zea mays
ggatggtcgctcccgcgctgcttttgtgaggatcttcttaacgcgtttcttctatactggatcttcagcgacgaagcatacccccaacagtagccccttcgcggtgttagatcatttttcgtaacgagcttgatccgtgaaaaagtcttctaggcttcggaaagccgaagatctgaaaaaacaccttccctgagctcgttgtcgagaaacgattaaaatattccgagcgcggaatggtcccaccatgcggcgagtacgcgtgtccttacgattcaccttctcgagttccgtggtccaccgctcagtgggtgtgggcgactgttgactcggtgcggaagacttgacgattcaactttccacctacagcactatataaacagacgagtatgtgtgaagttaccacagcattcattactattgcactg

SEQ ID NO: 23246 - DNA, 459 bp, Zea mays
agcttgtcccatcactcctcatgcttctcctctgtcgagggtagggcccactcaactgtccaacccggtggcaagatggacggccaagtcactctagcaaccatgtcctccagagaacctgtaaaattatgccacaagcaaggctgagtatactaatactcagctagacttacctggtgtgaggagtcaactcctctacctctagacatgcaactgtttggctgaggggtttgcttgccaaaagcactacctgagtctaaaaatcaagttttagctttttcaagttttagtgtgactcccttaagactaaatgtgtagctatctaatcatacatggtatcaaacatttagcaatcaacaacttttgccaagtcatcacatttccacttgttactcaatgtagcagcatggatcaagcagtctcattagctgcgagaagcagacgattcgaatcgagttt

SEQ ID NO: 23247 - DNA, 438 bp, Zea mays
  unsure (1)..(438): unsure at all n locations
tctncaccatgtcgctgctagccaagattgtgcagctacctccatcaatgatcaaacgacatgaacgctccttaatgacacactttgtttgaaacaacgtatgtcgctgattctgctctgccttctccatttgtgcactaagcacacgctgtacaatgaggctctcataatgctctgcatcatctgcaccaatctgttcttcgggtggttccttagtgcctacatcatcagccgcaagcaaagcaagtgtagcttcatccaaatcactagcagaggaatacccaccatcgtcttttaccaccaaaacacgctgattaggacaataacgctgcacgtgtccatagcccttgcatcgataacacagaacatctcttgttctacctgcgggtttctgggcagatntggttgctgaatttgtggaagatgcacgtggtttgt

SEQ ID NO: 23248 - DNA, 433 bp, Zea mays
agcttctaaagggagaacacgtgatatgtttgactaacgtgcaattcgaaaaagatagaccttgtgcagcttgtcaagcaggtaaacaagtaggaggagcacaccacagcaagaatgtgatgaccacttcaagacctctggagctgctgcatatggacctcttcggacccgtcgcctatctgagcataggaggaagtaagtatggtctagttattgttgatgacttttcccgctttacttgggtgttctttttgcaggataagtctgaaacccaagggaccctcaagcgcttcctcaggagagctcaaaatgagtttgagctcaaggtgaagaagataaggagcgacaacgggtccgaattcaagaatcttcaagtggaggagtttcttgaggaggaggggatcaagcacgagttctccgcttcctacacacc

SEQ ID NO: 23249 - DNA, 450 bp, Zea mays
tggacatgaagagtgccttcctaaatggaccaatcaatgaagaggtctatgttgagcaacctcccggctttgaagacagtgagtaccctaaccatgtctataagctctctaaggcgctttatgggctcaagcaagcccctagagcatggtatgaatgccttatagattttcttatcactaatggattcaaagtcggaaaagccgatcctacactcttcactaaaactcttgaaaatgacttgttcgtatgccaaatttatgttgatgatattatatttggatctactaacgagtctacatgtgaagaatttagtaggatcatgatacaaaaattcgagatgtctatgatgggggagttgaagtatttcttaagatttcaagtgaagcaactccaagagggcaccttccttatccaaacaaagtatactcaagatattctaaagcaagttg

SEQ ID NO: 23250 - DNA, 391 bp, Zea mays
  unsure (1)..(391): unsure at all n locations
agcttccttgcgcgtagcttcagatctggttcatccttcgtcctgaccatgcttttcatattgtgtacagcttcattccgagtccgaaagttcctgtacatatatcacacttgggaaacattgttaatcttgtatttgaggaccttcagaagacgaaggcccccaacaaatggctatatatcaatgattcatttattattatcctcattaaacataaataaacattaacaatattcatattacaatggtaccttcggcttgccaaaaggtgagagagcgagaagggcgcgagagtgattacaatccatcgtgaacaatatgtggcactgttcatctatttataggcacgagacatagcctgngtaaaattacatccatgcccttgaacaat

SEQ ID NO: 23251 - DNA, 373 bp, Zea mays
  unsure (1)..(373): unsure at all n locations
tctaagggagaacacattntaggattaacaaatgttcattttgagaaagacaggatttgtagcgcatgtcaagcanggaagcaagttggagtccatcatccacacaagaacatcatgacgaccgacaggccgcttgagctactccacatggatctattccgcccgattgcttacataagcatcggcgggagtaagtattgtcttgtaatagtggatgattattctcgcttcacttgggtattctttttacaggaaaaatctcaaacccaagagaccttaaagggattcttgagacgggctcaaaatgagttcggcctaaggatcaagaaaatgagaagcgacaatgggacggagttcaagaactcacaaatcg

SEQ ID NO: 23252 - DNA, 418 bp, Zea mays
agcttctaaagggagagcacattttatgattaactaatgttcattttgagaaagacgggatttgtagcgcgtgccaagcatggaagcaagttggtgcccatcatccacataagaacatcatgacgaccgacaggccactagagctcctacacatggatctattcggcccgaatgcttacataagcatcggcgggagtaaagactgtctagttatcgtggatgattattctcgcttcatgatgaggacatcactgccatcaatacaaccacaccagcaacccccttcaccatttaatcatggaccagtgaaacgagtccgtgcatgtcaatttaattatcaggtgacactcgttcttgttgttgaagctaatcattccttatatgacggactaataccttgtgactactttattatgct

SEQ ID NO: 23253 - DNA, 370 bp, Zea mays
  unsure (1)..(370): unsure at all n locations
tcggaaatcccatgtttttggccatctnccggcagacggatatttctttattgtccgggagacagtataagaaatcatattcttcagtggtgttgaacactaaggccccctatcggtatttcagttcccgggcatagtgtatggcttctgcaatttcttcttcaaatagtctttttcccgaagcatgtcaaataataaagtcaatatcttctgacggtgcttcaggagcagcagatttagcttttttggccacattcttctctatagccatgccaacatctagagattcttgctcaaccctatcctctgttgtggcaggctccgtctcagcacgcactgagggcccagctttggtttcagcgcgacttat

SEQ ID NO: 23254 - DNA, 458 bp, Zea mays
  unsure (1)..(458): unsure at all n locations
agctntaagtgatttgaagttccatgctgaatcattcccaggttcaacttctccatttcttggcataaagtaatgtcagaagtcttcatggtaagacaatgacagaaagccttacgacttaacacatctgccactacattagctttgcctgggtgatagtgaatctctaattcataatccttgatcaactcaagccatctcctttgtctcatattaagctctgattgggtaaagatgtaatttaagatcttatgatctgtactagtataatacccgtgcgttgcgacggcacacaaattattcgataaaatgacgcaacacanattattcgataaaatatttatgcacgttaaaatgaacaacatatatgatcactgactttaatatctaacaaatttaatttgcagattaattcattctggtggtactatntctctatttaaaactgagcacggata

SEQ ID NO: 23255 - DNA, 456 bp, Zea mays
  unsure (1)..(456): unsure at all n locations
cgagaggaatactgtggcctttggtgctgacttcccctatcgtcagtttgagtagaatggatagatctgacgtgcctagggtggattctccctccgaagcccctggtcatttcagagaacttgtaagcttcctccctcctttgccgaaagtcattatctgctcggatatattcatccatcttctgaagcagtttctctagggtctgagggggtttcctagcgaattattgggctgtaggtcctggccgaagccccttaatcatggcctcgataacaatttcattaggcactgttggcgcctgcgcccttaatcgtaagaaccttcggacatacgcctgaaggtattcttcatgatcctgagtgcactggaacaaagcttgagcagtgaccggcttcgtttgaaaccctttgaagctggtgatgagcatgtnncttcagctttgccacgatgtgatc

SEQ ID NO: 23256 - DNA, 308 bp, Zea mays
agcttaataggcggaaaatttttcactgatatctatgaaaatggcgggcgagggatggcccatgaaataatgaaaaagagcaaaaaatatattcatgacactcgagaagcagcgaaaggagctgaaaaagctgcggaacttgaaagacggatatgtattacttaatgtcttttaactttattggtggttatttttgtgactttgaactaattcatggctcctaccgtagctgaactatctcgtcccccagagccattcgacccactggccgacccagagacaaaggaagcaatagaaattattaatat

SEQ ID NO: 23257 - DNA, 447 bp, Zea mays
  unsure (1)..(447): unsure at all n locations
tcggcatgacagtagaaaaggggaaccgacttaaagatgattagcccaatcagaccctgaagaattactgtagagttattgataaatataaagggcactaatgtaattttacacgggctgcgtcccgtgcctataaatagatgaacagtactcccgtactgttcacgctgacttggcattcgcttttggcgtcacacttgtattctcactccttcaagccgaaggtacatttgtaatctaatattgtttgtacaaataatataaatggaaatagattaataataatgtttacaaaagattatattactttctgtactttgtatgaatgttcttcatctctcatcatggtcataaaggcatgtctttcataaccttcgtcctagattcattatatccgaaaggaaataatgacccaaaggacgaanggctttgcatttaacattttat

SEQ ID NO: 23258 - DNA, 394 bp, Zea mays
  unsure (1)..(394): unsure at all n locations
agctntatcgtatctggcgccaacgtgtgtgctaccatcagggctatcgcatcatagcaagccttcgtaataagcgcgacaggcgcaattgtggcttaatagtcatggtataagataagtccacgcaacatgcgcaacagacacaattgtggctcgataataatgactgacgaacaatgcctacagggcatgcaaaaaatacgcgactcgatgatggcatccgactcaacaggagtggtccgattaagcgagagtgcgatatagcaatcaaatgacacagccaggttcgtacgacacanataatgtgttgtgtttgcagggcgcagccaatgctcagccaataccataactcaatcgataataatgtatctgatcgggcatctgagtaccacta

SEQ ID NO: 23259 - DNA, 387 bp, Zea mays
  unsure (1)..(387): unsure at all n locations
tctcctcaattggcgccactcctactctctcgtatatcattattccggactcganctctccttgtgtggccacatatccagcacaacatacgcatctctgccataccatacatgaatattaatttatgaacactacccacaaattcaaaggtactccaactcctctcacaaccggatgatgaagcacatagactaaccacacgctttgcaaacctttgcaattcgaaggcacaaccaccatacgaaagccaccaatcaactataataacatgtcacatgacacatacatattgtggagattaaaacatgtagcatgctgaaattaacaaaagcacatagacttacgagggctttttgnttcaatgtttgcaagtgccaaattgtttg

SEQ ID NO: 23260 - DNA, 452 bp, Zea mays
  unsure (1)..(452): unsure at all n locations
agcttggtcactntattgctaactgtcctgattatgatagtgaccaggatcaagaaaagaagagggaaaagaagaagacttacaagaaagcgaagggcgaggcacaccttggcaaagagtgggactcggattgctcttcatccaacgacgaaggacttgctgcctcggccttcaataaatcatcccttttccccaacgagcatcacacctgcctcatggcaaaggaaaagaaggtatgcactangaatactattacatatgcttcttcaagtgatgatgaatctagcgatgatgaaatagactatgcaagttgattcaaaggtttagatagaactaaaattgataaaatcaatgaattaattgacgctttgaatgacaagaatagattgttagaaaagcaagatgatcttttgtatgaagaagcatgataaattgtagatgtccaanaatct

SEQ ID NO: 23261 - DNA, 381 bp, Zea mays
  unsure (1)..(381): unsure at all n locations
ctcactttcgtctctgtagtcctcagctacctcgtgcggtctgggactctggggacatcgttgccgttcccgggctcggcagccgcaatgcttgcgcaggtgctcctcgtgcaccttcttctnctnctncccgccacgtactcagccgaccaccaccgccattaccggggcagaaggtcgctgcacgagccgctgttccctctggagagcacgcccgcgctgccgctcgcaaccgccgcgccgtttttnccgttcttgccaggcgccgcggcgccaccgacgccggaggttggctcggcctccgccccggcggacaccggtgcggctgacgcgtcatcgtnctcctcgtcgccgcaccccacggcgccggccaacatttcg

SEQ ID NO: 23262 - DNA, 465 bp, Zea mays
  unsure (1)..(465): unsure at all n locations
agcttctaaagggagaacacgtgataggtttgtctaacgtgcttttcgaaaaagatagaccttgtgcagcttgtcaagcaggtaaacaagtgggaggagcgcatcacagcaagaatgtaatgaccacttcaagacccctggagctgctgcatatggacctcttcggacccgtcgcctatctgagcataggagggagtaagtatggtttagttattattgatgacttttcccgcttcacttgggtgttctttntgcaggataagtctgaaacccaagggaccctcaagcgcttcctcaggagagctcaaaatgagtttgagctcaaagtgaagaagataaggagcgacaacgggtccgagttcaagaaccttcaagtggaggagttccttgaggaggaagggatcaagcacgagttctccgctccctacacaccacagcanaatggtgtggtagagaggaagaaca

SEQ ID NO: 23263 - DNA, 448 bp, Zea mays
  unsure (1)..(448): unsure at all n locations
tataatggggcgcagttctcctgcgcgttctagaaatataactatagcctaagagagaggacaaatgaccaaattttccttgcacgagcaaacaatcgcaatctaacaagtctggggtaatttagactttgtataagcgacaacgaaggtagaggtctctataaatactcttgatatgtactgttcacgggtatgaaattgatatgtaattgagcctatcgatacgattccgccgtttgagcgaactcattgtaattaagaagaaaaggattataaaaaaccccaaacccaacatctgcagtgcagtttttcttgctgtggcctctgatttatcagctctggttctcagctctagtggagactgcagtattactgcanggcagattgtgtgtgggtgtgttgccttcttaggctttgaccttggtccatttggaccttttcttctcta

SEQ ID NO: 23264 - DNA, 461 bp, Zea mays
  unsure (1)..(461): unsure at all n locations
agcttaatataataatcaaatcccttgggtaaatgttggtatgttttggacattgtttgatcccagaaccccaaaaccctagcttcctaagatagaatttgtctaaccctaatagggtactaactcaggaaaccctagtgacttaggagtaccgtgaaggaaagttatattccagatataacttaatgtgttctatcataactgcatatttatagcatcacatgggcatttatgtatgtatattgttatgtttagaaaacaaagaagtagttgaagaggaagttgcaccaccgactgaaattccacatgacggngacagtttctactttgacatttgtggaacagatcccgagtcccctacgacacaaggcaagccccggtgcatttacccctgtcttgttgtntaaattcttatcacttgaaatgatcattaaatgatngagttgagtgctacacaattg

SEQ ID NO: 23265 - DNA, 438 bp, Zea mays
  unsure (1)..(438): unsure at all n locations
tgacatcttacataaaaatnccgagaacatgaatatttagttcatttctcaacacgccaaaatgagtcttatcaagtggcttaatgaaaatatccgctaattgatcttccgacctcactccttctaaaatgatatctcctttagcaacatgatctctaaggaagtgatgacagatatcaatgtgcttggtgcgagagttgtgtacaggattattagcaattttaacagcactctcattatcacacaacaaaggtaccttttctagaactacgccatagtctagaagagtttgttcatatacaaaatttgtgtgcaacaagcacctgcggcaatgtattccgcttctgcagntgacagggcacactattttgctttttggatgtgcatgaaactagtgatctaccaagcagatggcatcccccagaagtacttttccta

SEQ ID NO: 23266 - DNA, 470 bp, Zea mays
  unsure (1)..(470): unsure at all n locations
agcttccctcanactcaccgacgcatgcaattgtattgagaatcctctggtcgccgggaacgcgaccacctagccgcaatactcacggttgccgtggtcagggcaaattanggcaccattcttcaaattaacctaggggaaacattcgctaggttatgaatttggtttaggccgcagctgagcaccggtcgtggccccgctcggccggtctacgcgctcgccggagctcctccgtgcgctgccgtcgtcagggacctcacctatggagaaatagaacctcagggaccccggtgcaatttgtcagtgactgatacaaatagtaactgaactcgttcacagttagtcaaaaactcggggccctttctgcaaagccgccagggcgcgggcgcgcgtgggcgcctttcctctctggactgggccgctgagctgaaaccagcccaacactgttcaacccttttcccttttctttt

SEQ ID NO: 23267 - DNA, 394 bp, Zea mays
  unsure (1)..(394): unsure at all n locations
ctataagctgtgcatgtgttaacacacganggctagaaaacaccaacaccatcatgattttttaagagggttcacttgctaaactcaaggttgtttggattggggtctttttatgaacagaacaaacaacatttttttttgtaaaaaggttgaacaattacaataccacctagatagcaagacaagagaaacacataacacgacctaacaagacttaccaattcgacgtgaggtaaaacagttcttatagttcccaacatagtagtacatcacactattcacacgttcttattattggaataaaggtgagagaagcatgttgatgacaagagacaattattcgacaatcatgatgcatgctcattctagtcgtcttcttagaccttactacttt

SEQ ID NO: 23268 - DNA, 462 bp, Zea mays
  unsure (1)..(462): unsure at all n locations
agctntctcaacctttcttgttgctcaataaatatactntaattnttataattggctcaagacataattntaaacttttcattccctttttcttattttcttgaattttgctcatggggctcacttatggtttttaattagggttgcacattcttatcttttcaagactcaattgttttgatcatgatacttttaagtatatccttggtgacttctttattacttaagttattttgatgctcacgcttactttggctcacataaaataatggttcttggtttggcatttgagataaaccctangtgacactggggtgtcacagccttccccccttaaaggaatctcgtcccgagattcgggccagagtccttcctaggtgaagcgaanggtgagacttatangaaatgggtgattattgtattattatggtaaaactgctcttcgaatgtcattctctttgc

SEQ ID NO: 23269 - DNA, 391 bp, Zea mays
  unsure (1)..(391): unsure at all n locations
aactctaatattntagcctcagtttcagccagcaagccttcggtcgattggagctcgaagtctttcttttcaatgatggcagattgctcttttattttgctttcccaggtttcaattatagcttcgtgctttttgtcctcccagtcctggtgcatcttcagagctttgctcagtagcatgctctgaacagaaacaacttatgttaagtaatattttcattgttaacgggcataaaaaccagagaaaaaggttggttacctttgaagtagaataaaacaagctgccgacgatatgttgtcgtcggtagcggctgatgtctgtctctagcttctgaaaaccgatactcttcgatagagtacggattaccttagctccagtctggtctcgaata

SEQ ID NO: 23270 - DNA, 444 bp, Zea mays
  unsure (1)..(444): unsure at all n locations
agcttctcngccggagcctgcttgccgtttttggcgggactgacgccggagtcaggttgccgaggccacgagctgggctgacgtcctcgggggacagctggttgaggctacagagcgaccggttgagccgtctggtcaggccgggttcccggaggagaccctagcggcgatggcccaggcgcggtgccgacaggttccttcgaggtggagatcctacgaccgtgtcatcgtccgtggccgggtcggattccgccgaaggtggagtcgacgccgagggtgctgctgctcccccactgttgtctgatcctgcaggaacagtttatcttgtagtgtgcgtatgttttttgcggccgccgaggcccaaacatatcgtcgtcgtgttgtaagctgcgtttcttttccctttgttcgagtatctggacttatttgtcggtaatagaattg

SEQ ID NO: 23271 - DNA, 372 bp, Zea mays
  unsure (1)..(372): unsure at all n locations
cgagataactcttttgcacaaagctggtgaaagaaatagctcaactctgaaagcgctagccagacatgctcagggacatagcctcgaaccatagcaggaagaatctgttcaatccatatgtggaagtcatgactcttcatccctaagactcgcagagtagataaattcaccccctactcaggttagctgcatatccatcanggaacatcaacatcttgatccactgaagtacttccttcctctgggccctgcttatgacgaaatcagccttaggccttctccatgtcttttcagcactaggcggcttcatcttttggttgatctatcacataacgctgcagatcactcttgctttacgtatccttgactatc

SEQ ID NO: 23272 - DNA, 458 bp, Zea mays
  unsure (1)..(458): unsure at all n locations
agcttacccctccctgggaagggccgttcattattgtcaagattntgaagcccggaacatacaagctggccaacgatcaaggcgaggtctacagcaacgcttggaacatccaacagctacgtcgcttctacccttaagatgtttcaagtcattcatatacctcgttttttctttacatacacgaataaagtccaaccgtcaaggaaggatcagccttacctcggcaaagcccgaccctccctcgggggctagaagggggaaccccctctgcgtcaaaattttcctcgaaaaagtcttttgccagaacgtctttcgcacttttcgactgcttcgatagcggggtcctaaaaacaacgagagtacatgtaagcggcatggccgaccgagccgagggactcctacccctccgggatacggatacctcactcatcaccttncgcgataagtaactcacactc

SEQ ID NO: 23273 - DNA, 444 bp, Zea mays
  unsure (1)..(444): unsure at all n locations
ctctctcgactacttgtaacctctactatgagtttgatcatcaatggtgtcggtagcgcaaaccaccaatgataggatgtagggacattctgttcgaactagtantaaatttgcacccttcacgcacacccttcggagctcagagcatgcacaataaatttaattgttgaagtgaggtacgaaacaccgatagttggcatgtcaggtaggggccttatgcattccgcgacgagattctctgagctctagatgtctggaaatgatgttggcatagcacgggctcttggagcaaccaaacgcttcgagaactcatgcaatgccctgagcaacgaagaaaagatgaacagggccccggaagcccagactcccctaacgagcgagtcgcttgacatcattngtagccttcaccacctctactntgatcccttggaaggtgggagcatg

SEQ ID NO: 23274 - DNA, 463 bp, Zea mays
  unsure (1)..(463): unsure at all n locations
agcttgtccataaatcataggggatgtcgcatcaaacttgaaagtcgcctagagggggggtgaatagggcaaatctgaaatttataaacttaagcacaactacaagccgagttagcgttagaaatatgaacgagtccgagagacagggcgaaaaacaaatcgtgagcaaataaagagtgagacacgatgatttgttttaccgaggttcggttcttgcaaacctactccccgttgaggtggtcacaaagaccgggtctctttcaaccctttccctctctcanacggtcacttagaccgagtgagcttctcttctcaatcaaacgggacacaaagtccccgcaaggaccaccacacaattggtgtctcttgcctcggttacaattgagttggatcacaagaaagaatgacaaanagaagcaatccaagcgtaagagctcatatgaacacaagtcactctctcact

SEQ ID NO: 23275 - DNA, 389 bp, Zea mays
  unsure (1)..(389): unsure at all n locations
tatgaattggagattcactatcacccaagcaaagctaatgtattggcagatgcgttaagtcgtaaggctttctatcatttgcttaccattaagacttctgacattatgttatgccaagaaatggataagttgaacctatgaatgattcaacatggaacttcaaatcacttgaagcttgagtcagtcctccagcaaagaataattgatgcacaaagaaaggatgagggaatgaaacacattcatgagaaaatggaggccgganaaaccaactgcttcatgaaagatgatcaaggtgttgtatgggttaacaactgcatagttgtgcccaaaaatgatgagatccgccagcaaattcttgatgaagcacatcttagtcgctattctattca

SEQ ID NO: 23276 - DNA, 461 bp, Zea mays
agcttgtgactagcatatccttcatcttctaccatgatgtaattgttcccggccgaagagcacaataccaagtctgagccacactcctgactgccatgacaaaggactttgccatgacagcagtgttgccaccatatgatgatatggttgcttcgtagctcatgaggaattgcttcaggtcggagtgcccatcatacatggggagctgtggcggcttgtatgaaggtggccatggggtagcctgcaactctgctgccaggggagaagcatcatcaaaagaaaaattaccatggtatagatcatcataccatccatcatcgttgattggagtttcttgacgaagctctctgtgttgaggccctcgtccttcatcgtcctgcgtgatgtggcgcatttcttcagctgcttcgtcgatcttcctttgaagttcggctaaccgaagcatcttttcccttttcctc

SEQ ID NO: 23277 - DNA, 447 bp, Zea mays
  unsure (1)..(447): unsure at all n locations
tggacgtgaaaagtgtcttcctcaatggaccaatcaaagaagaggtctatgttgagcaacctcccggctttgaagatagtgagtaccctaactatgtttacaaactctctaaggcgctttatgggctcaagcaagccccaagagcatggtatgaatgcctatgagattttcttatcactaatggcttcaaagtcggaaaggccgatcctactctattcactaaaactcttgacaatgatttgtttgtatgccaaatttatgttgatgatattatatttgggtctactaacgaatctacatgtgaggaatttagtaggatcatgacaaagaaattcgagatgtctatgantgggggagtgaagtacttcttaggatttcaagtgaagcaactccaagagggcaccttcattagccaaacaaagtatactcaagacatttctataacag

SEQ ID NO: 23278 - DNA, 117 bp, Zea mays
ctgcttgccggtgtcaactgttagctcggacggtacttcgaagcggcaaacaatgttttgcccgaagaatttctgggcagtctttgatgttattgtagagacagccctcgcttcgat

SEQ ID NO: 23279 - DNA, 320 bp, Zea mays
gataagatgagtatagcacgccgctcggcacgggcgcactgtttgccagcagacccagcagatgcgccgcctgctggatgaccttgacgtcgcctgccagcggatgggacgggacgcattaaatgctgaatgggcacgtcgcccgtcagcgcagtggcaagcggcgcgtcttttcctcaataaatgcaagggctgcacgacttctcgtcaggtctggcccggtagcttatgtcatgggccacaagcagcgggtctccgcctgagcgagaagtggagggcaaggcctgcacacatgttagcaccggacccctgcacatacc

SEQ ID NO: 23280 - DNA, 444 bp, Zea mays
  unsure (1)..(444): unsure at all n locations
agcttgtgcaaagcccgctggaactaatcttctgagaaacccgacctcgctgcaacatgacacctgaaggtccaacacaacaagcaatgagtgaattcagaattattgcagagcatatcagcacaagggacctggttcaagagtttttagctttcaaaatttttcccagtttgaaagaatgggaaatgccgaagctacagggggaaaagaaagaaggtgaacttgtacgtttaccttactatttcaagtttaaaaagtactttaaaacaccttgccaagagtggctagatacaattgaagtaatgtgcaatgaaatacttggcaattattccaaaaaagaagatcaattgatgaccgcagccttcggcacccgtccgaagcgaaggctaaatcgagtgctggacgccttgngctntgattaccctgattatgaaaatctgaaca

SEQ ID NO: 23281 - DNA, 178 bp, Zea mays
gcaaaccatgctagtcttagcgtttaagcatgcatctagaccggcactctcttttgcaaaatcaactaaagaaaagatgtcgtctaatacacccttaaatgctaaagaaccatctcttcttctaaagacagacacatctgcatttgttaaaagacaattatacgccatgttgcataat

SEQ ID NO: 23282 - DNA, 410 bp, Zea mays
  unsure (1)..(410): unsure at all n locations
ggatcttaacgacgagctgcactgattatgtgcctgtaaagatttattattaaatgaagctcgtgagcttgaggaccttcggctaaaagcactctcccaatagctccaaactctaaaataaactagaccttcagaaactatatatatatatggagttgagttgctaaaaacggaggagttgaggtgtttggcctaacaatgaagtgatctctactatataaagcgtcagtttgagctgtccttttccgcttaatgcaaaaataaaggaaaatgtagacaagcggggttataaatctcagttgttgcctctacattcacaactgcataaccattaaaacacacatattttttatattttatatagaacatacatatntttgtcttatacaacgaagaaatgcacgggcaag

SEQ ID NO: 23283 - DNA, 453 bp, Zea mays
aagggagaacacgtgataggttggactaacgtgcaattctaaaaagatagaccttgtgcagcttgtcaagcaggtaaacaagtgggaggagcgcatcacagcaagaatgtgatgaccacttcaagacccctggagctgctgcatatggacctcttcggacccgtcgcctatctgagcataggagggagtaagtatggtctaattattgttgatgacttttcccgcttcacttgggtgttctttttgcaggataagtctgaaacccaatgggccctcaagcgcttcctcaggagagctcaaaatgagtttgagctcaaggtgaagaagataaggagcgacaacgggtccgagttcaagaaccttcaagtggaggagttccttgaggaggaagggatcaagcacgagttctcctctccctacacaccacagcaaaatggtgtggtagagaggaag

SEQ ID NO: 23284 - DNA, 428 bp, Zea mays
  unsure (1)..(428): unsure at all n locations
agcttattacatggattcaacacaagggtntcaacccaggacattntctataaagttgtggccaccaagtgaaaggctcatgcttgttgagaggatgacaaagactatgtccacagagtccattttctctcgcaaatatggtcttttgggcaagcaagaggctcatgagaatgcaaaaaggattgaagaactttgctttgcatcggctgatgagcatttcaaaaatgagccagatggtgatgggagttctgttgtccagctatatgcaaaggaatcaagcaagatgatgttggaagttctgagaaaaggcccaaggtctgctgcagaattggagacacctatagctgatacatctcttgtgtctgctgatgcacctcgtgtgcttgctgatactgtactggatatatctggtggngagcgtgctttta

SEQ ID NO: 23285 - DNA, 389 bp, Zea mays
  unsure (1)..(389): unsure at all n locations
aaatccttggaatcttggctgtcaaactgcttgccgttgtcaactgttagctcggacggtactccgaagcggcaaacaatgttttgccttatgaattattgggcagtctttgatgttattgtagaaacagccctcggttcgagccatttggtgtagtattcgacgactacgaaggcgaacttgaggttcccctgagcggcgggcaggggcccgacaatgtccaggccccagcgctggagaggccatgtatgggcaaacagctttgtatactgcgaggggctgcctgaccgangagaaaacttctggcaggcttcgcaagaccttgtgacccgatttgcggcgcagatcattgcgggccagtaaaacccttggcggatcaccttggcagc

SEQ ID NO: 23286 - DNA, 452 bp, Zea mays
agcttgagcggtaactggcttcgtctgaaacccttgataactggtgaccaacatgtccttcagcttttgccatgatgtgattgttcctagccgaagagaggagtaccaggtttgtgcaacatttttgattgccatgccgaaagatttcgccgtgaccgctgtgttgccgccataggaagatattgttgcttcgtaactcatcagaaactgcttcggatctgagtgtccgtcatacatggggagctggggtggcttgtaagacggaggccaaggtgtagcctgcagttctgctgacagaggagaagcatcatcaaaagcaaaatttccatgatggaaatcctcataccagtcatcctcgttgaagaagccctcttgatgaagctctctgtgctgaggccttcggttttgctcatcttgagcaagatgacgaacttcttcagaggcttcgtcta

SEQ ID NO: 23287 - DNA, 496 bp, Zea mays
  unsure (1)..(496): unsure at all n locations
gatcctcttagtcacctgcggcatgcaagcttgtgaagattcttcatcccaacatgggccattcggcggtgccagagccaacccatgttagtcttagcaattaagcatgtgtcgagttcagctctatcaaaatctactaagtatagctgaccctccaacacacctttaaatgctattgaatcatcactccttctaaagacagtgacacctatatcagtaaagagacagttgtagcccatttgacataattgagaaacggaaagcaaattgtaatctaaagagtctacaagaaaaacattggaaatagaatggtcaggagatatagcaattttaccaagacctttgaccaaaccttgatttccatccccgaatgtgatagctcgttggggatcttggtttttctcataggaggagaacatncttttctcccctgtcatatggtttgtgcacccgctgtcgagtatccaacttgagcccccggatngcataaacctac

SEQ ID NO: 23288 - DNA, 373 bp, Zea mays
  unsure (1)..(373): unsure at all n locations
gtagcataggcaagtaatatgccgaatgactcaagcctagctatgggtgcataggtttcaccgaaacctaaacctttgacttgtgaatatcccttggccacaaagtgggctttgttccttgtcaccacaccatgctcatctttgttgttgcggaaaacccacttggttcctacaacattttggttaggacgtggaactaaatgacatacctcattcctcgtgaagntgttgagttcgtcttgcattgccaacacctaatctaaatgccttaatgtgtcttccaccctgtatggctcaatagaagacacaaaagagtaatgttcacaaaaatgagcgacacgagaccgagtggttacccccttatgaatatcgt

SEQ ID NO: 23289 - DNA, 469 bp, Zea mays
  unsure (1)..(469): unsure at all n locations
agcttgtgcctgatggngaagcctagttntgacatgacgagtccatcaacttctggaaatggtcgccaccattctaggctggtggcctgngtggtcgatctgcggtggtgaattcctgttcatcaagccgaggacgatggttccttcggtgcttgtcggggtgctctcaatgctccctcctttctccactgggctcgccagcgtcccgcgggccctttcccatgtggaaaatggctcccacagcgtcctccctgttagcgaacttggtcgctatgtcaagtaggtccatcgttgttcttggtcttccctggccaagctcggngacaaacgcttcatcagtggtgccataggtgaaggcacttactatgtctgcgtcggtggtgtcggngagctcgttcctcatctgggagatcctncgaatgtagtcccttaggctctccctgcttctctaggtgcctagaatgttttc

SEQ ID NO: 23290 - DNA, 367 bp, Zea mays
  unsure (1)..(367): unsure at all n locations
agcttggatagtgcgatttctaaaggacacaacctgcacgctatagatattntgggagctgtaggaagactgcactttatagcaaggattatcacaatcaatcagcaaatgtaaagttgaataagggtgcaaacacgtagctaatgcttgtggaaccaagtaaaaccgaacagaacaaaggcaaggaggggcgtgtaaaggaggtgtgcaaaaggtgaacgatggacacacaagatagcttcccaaaatgtctgggcacaccaaatccctaaacgaggaaacaagggttgctttccaaattcgaatagcctgaattagaaagcttgggcacaccaaatatggaggtgttgcttgccaaaaaaaagtg

SEQ ID NO: 23291 - DNA, 404 bp, Zea mays
  unsure (1)..(404): unsure at all n locations
gaccaagagagtacagattttctaattataacaacttaacaatagaataggaaagagtcttaaaagactgtgaaatcattgacatataaactaaaatgtttaaataagtagcagagtttttaaaggtaagtatttgaaacaagagtattgaagaatccggggataaaaacatgtcaataccaaaggaatagagatggtcaaatggtagcaatntaataatggaaaaagaatcccaaaagacaaggctatggttagggtcatctacaaagatgtcataagcacaagggtgagatcagatctaatggaatgaatgagttaagaatagacaatactagaataaaaatacatttagcaaggtgatatatagaagcatagcatagaattagtcgaggtgactaatattt

SEQ ID NO: 23292 - DNA, 374 bp, Zea mays
  unsure (1)..(374): unsure at all n locations
agcttcggcgatggttaaaaatttttgcagtatatcaatgcanatagcaatgaatgctgtggtaacttcacacctactcgtctgtttatatagtactgcaggtaagaaggcgaagcgccaggatttttacaccaggcggacacctgcttgcactcgctgcgtggtggaccgcagagaccaaacagtaactctgcaaggtgggaccgctacgcgctgggaaactgaatcgtttctcgacaacgagctcagggaaggtgttntttggaccttcggctccccgaagcttaagagactattttcacggatcaagctcgttacgaanaacgatctatcaccgcgaaaggggctactgttgggactatgcttcgtcgccg

SEQ ID NO: 23293 - DNA, 264 bp, Zea mays
tcttgaaactagaattgcctgatctagagcattcacttgtcctaaactagctttcttttaaaataaaaattttgtttcgcttgttatctacgatgaaggtcgaagatccagtcttcatatctgagaagttccgcgatccaaatcgattaatacccagctggggagctccaacccaacgacatatgcttcccttaactcttttgcatgtctatcattctcacggattcttcaccacatgaacaagtccgcgccaccccagaacac

SEQ ID NO: 23294 - DNA, 431 bp, Zea mays
  unsure (1)..(431): unsure at all n locations
agcttctaaagggagaacacattttatgactaacaaatattcattttgataaagataggatttgtagcgcatgtcaagtagggaagcaagttggagctcatcatccacataagaagatcatgacgaccgacaggccgctggagctactccatatggatctatttggcccaatcgcttatataagcatcgacgagagtaagtattgtcttgttattgtgggtgattattatcgcttcacttgggtattctttttacaggaaaaatctcaaacccaagagaacttaaagagattcttgagacgagctcaaaatgagttcggattgagaatcaagaagattagaagtggtagtggaacagagttcaagaactctcacatngaagtatttcttgaggagganggcatcaagcacgagttctcttctccctacaca

SEQ ID NO: 23295 - DNA, 387 bp, Zea mays
agcttaatgcccctcctaaaagattatctaactttgttaagggcaagactcccatgcctcaggataacgagggttacattttataccctgccggttatcccgagcacaaaattaggagaattcattctaggaagtctcactctggctctcatcatgcttttatatataagagtgaggcatctagttctaggtgaaagtcgcctagaggggggtgaatagggcgaatccgaaatttacaaacttaagcacacactacaagccgggttagcgttagaattaaatgtgagtccgaaagagagggcgaaaaacaaatcacaagcaaataaggcggatgacacggtgatttgttttaccgaggttcggttcttgcaaacctactctcccgtg

SEQ ID NO: 23296 - DNA, 429 bp, Zea mays
  unsure (1)..(429): unsure at all n locations
gaacacgtgataggtttgactaacgtgccattcttataagatagaccttgtgcagcttggcaagcaggtaaacaagtgtgaggagcacatcacagcaagaatgtaatgaccacttcaagacctctggagctgctgcatatggacctcttcngacccgtcgcctatctgagcataggaggaagtaagtatggtctagttattgttgatgacttttcccgcttcacttgggtgttctttttgcaggacaagtctgaaacccaagggaccctcaagcgctttctaaggagagctcanaatgagtttgagctcaaggtgaagaagataangagcgacaatgggtctgaattcaagaatcttcaagtggaagagttccttgaggaggangggatcaagcacgagttctncgctccctacacacctcaacaaaat

SEQ ID NO: 23297 - DNA, 435 bp, Zea mays
  unsure (1)..(435): unsure at all n locations
agcttctaaagggagagcacatnctatgactattttatgttcattttgagaaagacagggtttgtagcgcatgccaagcatgaaagcaagatggtgttcatcatccacacaagaacatcatgactactaacaggccacttgagctactccacatggatctattcggcccgatagcttacataagcatcggcgggagtaagtattgtcttgtaattgtggatgactattctcgcttcacttgggtgttctttttacaggataaatctcaaacccaagagaccttaaagggattcttgagacgggctaaaaatgagttcggtttaaggatcaaaaagattagaagcgacaatgggacgaaagtcaagaactctcagattgaaggctctcttgaggatgagggcatcaagcatgagttctcttcttcctacgcaccac

SEQ ID NO: 23298 - DNA, 370 bp, Zea mays
  unsure (1)..(370): unsure at all n locations
gagtagtggcagaaagggtggggtagcatgcagacttcattacatgaagatggtcggagaaggaaatggtatctaatagaacaaagtgggtgtgggggcacgaatcgtcgtagtaaaaagacacatgangtaagtggcggtatcgaggctctcaacctanagcgagtaagaacggatgcctgaaagagcaaggagcgcatgatgttggtagtagtgtgaataatgcgctcaaccttgccattctgagaagtgtangggcaggacatctagagttgaacaccatgggaggagaacgaccgagataagttatcaaactcacgatcattgtcacactggacggtcttaattcacgaccaaagtgagtgaaacc

SEQ ID NO: 23299 - DNA, 436 bp, Zea mays
  unsure (1)..(436): unsure at all n locations
agcttctaaagggagaacacgtgatatgtttgactaacgtacaattcgaaaaagatagaccttgtgcagcttgtcaagcaggtaaacaggtgggaggagcgcatcacagcaagaatgtgatgaccacttcaagacctctggagctgctgcatatggacctcttccgacccgtcgcctatctaagcatangaggaagtaagtatggtctagttatcgttgatgacttttcccgcttcacttgggtgttctttttgcaggataagtctgaaacccaagggaccctcaagcgcttcctcaggagagctcaaaattgagttgagctcaaggtgaanaagataaggagcgataacgggtccgagttcaagaaccttcaagtggaggagtttcttgaggangaanggatcaagcacgagttcttcgctcctacacaccacac

SEQ ID NO: 23300 - DNA, 392 bp, Zea mays
  unsure (1)..(392): unsure at all n locations
acatgtgctaagcggtgatgctactatcaacccatgctaggcttagcaattaagcatgcatctatacctggctcctcttttgcaaaatcgactaagtaaagtttgccgtctaatacacccttaaaggctaatgaaccatcacttcttctaaagacagacacatctacattagtgaataaacagttatatcccatattgcataatngactaacagatagcaaattatatccaagagactcaactaaaaacacattagaaatagagtgctcatttgagattgcaattttgcctaagcctttcaccttgccttgattcccatcaccgaatatgattgaatcttggggatccttgttcttgacgtaggaggtgaacatcttcttcttccccgtcat

SEQ ID NO: 23301 - DNA, 403 bp, Zea mays
  unsure (1)..(403): unsure at all n locations
agcttaacaacctactgtgtaaaagataataatttattatgtcggcaacccacctcgctntgatgaaaataactatgattattggaagaagtgtttgcatttgaaggcatggtccaaaaaaagtagactgttgtgcatggttcttttctagtgctaaatataaagaacccagcaccaagagaaaaggaaattttgcaactaagtgatcaatctctcaatgttatctatgaagctcttcatccaaagatttttgagccgattgaagatttggaatttgcagatgaggtttgaaaatgacttgaagattcaacaatgtcacatatgctcaacgtcattgtgaatgagataaggaacttaggtcacaagacaaacgatggtgacttttctcatcgattcttgatat

SEQ ID NO: 23302 - DNA, 421 bp, Zea mays
tgaacctgctattacggatcataggtactcagcttacatgtcgatctgctagcttacggctgtaataagccactggatgcccttcttggtggagcactgctccaatccccgtactagaggcgtcacattcaaccacaaaaagaatattgaagtctggaagacggaggactggagcagtttggagagcatgcttcaggcgctggaaggctgctgccgcctcatcagaccagtggaatttttgacggcgaagccgagtagtgagaggttctgcgatcgatgcataatgatgaatgaagcgccggtaataccccgctaaacccaagaaactccgtatatctgccactgacatgggaataggccatcgctccacatcctgaatcttgtttgggtcagcttccacaccttctgctgaaatgacatg

SEQ ID NO: 23303 - DNA, 418 bp, Zea mays
agcttgtggaggttcttcatcctcacatgtgctaagcggcgatgccacagccagcccatgctagtcttagcaattaagcatgcatctagaccggcctcttcttttgcaaaatcaactaagtagagcttgccgtctaatacacccttaaaagctagtgaaccatcacttcttctaaagacagacacatctatatttgtaaatagacagttatatcccatatgacataattgactaacagataacaaattatatccaagagactctactaaaaacacattagagatagagtgctcattagaaatggcaattttacctaacccttttaccttgccttgattcccatcaccgaatataattgaatcttgggaatccttattcttgacgtaggaggtgaacatcttcttctcccccgtcatat

SEQ ID NO: 23304 - DNA, 334 bp, Zea mays
  unsure (1)..(334): unsure at all n locations
tctcccggcgtcgncatcgncccttgccaggtccggcgcatgcccctgcctggntggaaccgccctgtcgccctccccttcctctccttcgatggatccgtcgctgccgcggccttcccggccggatccacgttgctgcgtccttctcggctcgatccgccgtccctttggctggatcgcgtcttcccgtccggatccgtcgctgccgtggccttctcggccggatccgacattccccttcttttctgccgcgggcgcggacaccttgaccagcgcagccgcgtgcgctgctgtcggcctccctggcggggctccttgacgtctggtcgatcga

SEQ ID NO: 23305 - DNA, 457 bp, Zea mays
  unsure (1)..(457): unsure at all n locations
agcttcctggaggccatcaagacagcatacagtatcttctccaactctgtataattnttctttgatgaactaaggacttcggaaacaaaatatattggggcctgccttctgacttgaccatcaagcttctcttggacaagcgctgcacttaccgctgagtgcgaagctgccacatataataataaaggagcccctggcattggtggagtcagtgttgttagatctatcaaatactgtttcagttcttcgaaagccttctgctggattggtccccattgaaagacatcggccgacttcagcacttcgaagaatggtaaatttctctctgctgatctggatatgaatctattgagagatgccaatcttcctgtcaatctttgagcccncttctttgtagttggtggctccatccgaagtatagcttcaattttacttgggttggcttcaattccctttg

SEQ ID NO: 23306 - DNA, 448 bp, Zea mays
  unsure (1)..(448): unsure at all n locations
aaactcagcttctaagggagaacacgtgataggttngactaacgtgcaattcgaanaagatagaccttgtgcagctggtcaggcaggtaaacaggtgggaggagcacatcacagcaagaatgtgatgaccacatcaagacccctggagctgctacatatggacctcttcggacccgtcgcctatctaagcataggagggagtaagtatgggttagttattgttgatgacttttcccgcttcacttgggtgttctttttgcaggataagtctgaaacccaagggaccctcaagcgcttcctcaggagagctcaaaatgagtttgagctcaaggtgaagaagatacggagcgacaacgggtccgagttcaagaaccttcaagtggaggagttccttgaggaggaagggatcaagcacgagttctctgctcctacacagcacaacaaaatg

SEQ ID NO: 23307 - DNA, 457 bp, Zea mays
agcttgtggaggaccagatcatcaaagcatatattttcctgtatgagaagtggtcacccaagttccattgatgaagcaccagaagactaatcaaggaaggaatccatgtgggagttcgcaagagaaaggtttgcgtgttggcatcaatgcttcttcaataagctagctgccaagagaaagccagaagcctgaagatgatctttgagtagccagaatcagtgtttgcaatcggcaaccggatgctcctcaaaggccagattttgttgaagttccatctcctcgaagcgtctgcaaagtgaagatatgtagctgaagtaaagctatacccataacccttctaagccgaatctcgaggacgagattccttttaagtggggtagatttgtagcatcccaaaaattcaaatcttgaaaatttctcaaacttgctctaaattcaaaatgaatttcaaatttcg

SEQ ID NO: 23308 - DNA, 403 bp, Zea mays
  unsure (1)..(403): unsure at all n locations
ctctagactacgttcacggaaccattcaatcaatcaatgacatggcaaacgtgaggcgccgaaacgaagttgctctagtgccaacatttttctaggccttcttctttggtggagaagccagccagtgcagtgacgacgtatggatcgcttgtgttgggatgggaaccttccctcgtgctgaaccaagcctnctgatgcttggggtgcgctctatagtgctcttcaaaaacttctgaacaggcctatgtagacgcgcaatcaatcgggttgaactaacaagcagtattactcctgtgatgatgaagaacctgcaagaattatctaatttcttagattctcaagctgtttgttaaaaagagaaacgttacttttggctattagtaaacatatatgtcttcatatg

SEQ ID NO: 23309 - DNA, 442 bp, Zea mays
  unsure (1)..(442): unsure at all n locations
agcttctaaagggagaacacattntgagactaacaaatgttcattntgagaaagacaggatttgtagcgcatgtcaggcagggaagcaagttggtgttcatcatccacacaagaacatcatgacgactgacatgccactcgagctcctacacatggacctattcggcccgatagcttacataagcatcggcgggagtaagtactgtctagttattgtggatgattattctcgcttcacttgggtgttctttttgcaggaaaaatctcatacccaagaaaccttaaaggattcttgagacgggctcaaaacgagtttggcttaaggatcaagaagattagaagcgacaacgggacatagttcaagaactctcaaattgaaggcttccttgaggaggagggcaacaagcatgagttctcttctccctacacaccacaacaaaat

SEQ ID NO: 23310 - DNA, 385 bp, Zea mays
  unsure (1)..(385): unsure at all n locations
ttaacttgggttaagttntacccctataatcactggttatggttaagtcctttaaccaagggttcatttgcaaaaacattaaaacaatacaacttgtttgaaatttttgcctagtgaatgcactctangtgtatcaaacatatgcaatgccaatgctatgatgccatgctcaagttttagttatagtaacaccaagggtgttacatcgtccgactgatgctaagggcctttaccattcttgatcctcatttggtgaataatattcgtgagaatcctatgtacaccaaaatgtcgcctgaagaagtccttagaaaattcgtaagcgggcgaatgatgatcaagtaggcgaggtacgtggacgacgcattgaattattcaatcaccg

SEQ ID NO: 23311 - DNA, 465 bp, Zea mays
  unsure (1)..(465): unsure at all n locations
gagcgggtctgcatttatggatcgcttgttgatgtatgattcacataacgaggtggaactcaactgaacttggttgttgagttgtccccgaagatcagaaaccttttgcttcaagttcataatatcagcttcagcggcaacaacttcctcaagatcagccttagtctattatcaacgtaaagaaaaaaaacttaaaatggtgaaaaacattatctacctcaatagccagattcagaaaggataccttggtgtctatcgttgaggggaaggacacttgtcctcttcgcatattcattagcccagactccagagaagccctcaaacttccctccttcagtagctgggctcgtaaattntccacctgttgaatgtgcaaaatgaaaatattcttggtgaacagagaanaaaaagcagaacattgcangcacaacaaaacaattcccgaaacatgtaaatacaacatag

SEQ ID NO: 23312 - DNA, 347 bp, Zea mays
tcttgttttccttcctctcgcccgtgtgggccgttattctgcccacctccacttcttcgtccgcgaacccagcctaccccacagggatggaagcgccgacatgcgggccccgcatgtcagctgatgcatggcacacctgcgatccggctaagaccgaccggtgggacccatccgcagcctctcaatgcatcaccaactctcgggtcgctgggcgtgggtcccttatgttaaggcgcttcccttcgcctgtaaaaacccccgccgattccaacagccgcgcattcgttctcgccgaacccatcaagctcgactcgatatataacaccatactgactccctatcattat

SEQ ID NO: 23313 - DNA, 460 bp, Zea mays
  unsure (1)..(460): unsure at all n locations
agcttgacatcacctatttgagattaagtaaaatttctgatatcgagaatatttagctcatttctcaacatacaaaagcgggttttatctaaaggctttgtaaaaatgtctgctaattgatcttccgatctcactccttctaaaataatatctccttaagcaacatgatctctaaggaagtgatgacgaatatcaatgtgcttagtgcgaaagtgttgtacaggattattagcaattttaacagcactctcattgtcacacaacaaaggtaccttttctagaactacaccatagtatagaagagtttgtttcatataaagaatatgtgtgcaacaagcacccgcgacaatgtattactcttcngcggntgacaangcaacactantttgcttcttagatgtccatgaaactagtgatcttctaagcanatgccatcctccgatgtactttttctatcaat

SEQ ID NO: 23314 - DNA, 183 bp, Zea mays
attttattactattattactatcctttagggcacgctttaacgaagatcggttcgatagagcatattattaagcaagggtctaaaaatgccacccgatttggaagaagagaaaagccaagcgcgcattccagaatttgctgacagagttgtatatcacgaagcctattctgaaaagaaagatc

SEQ ID NO: 23315 - DNA, 411 bp, Zea mays
  unsure (1)..(411): unsure at all n locations
agcttgtgaagattcttcatcccatcatgggctagtcggcggggccagagccaacccatgttagtcttagcaattaagcaagtgtcgagttcagctctatcaaaatctaccaagtatagctgaccctctaacactcccttanatgctattgaatcatcacttcttctaaagacagtgacacctacatcagtgaatagacagctgtagcccattttacataactgagaaacggaaagcaaattgtaatctaaagaatcaacaagaaaaacattggaaatagaatggtcaggagatatagcaattttaccaagtcctttgaccaaaccttgatttccatccccgaatgtgatagctcgttggggatctttggttttctcataagaggagaacatccttttcttcccggtcatg

SEQ ID NO: 23316 - DNA, 397 bp, Zea mays
cgaagattcttcatcccaacatgggctagactgtgatgtttgtgtcaacccatgttaggcttagcaactaagcatgtgttgagttcacctctattaaaatccactaagtatagctgaccctctaacagacccttaaatgctattgaatcatcacttcttctaaagacagtgacacctatatcagtaaaaagacagctgtagcccatttgacataattgggaaacagaaagcaagttgtaatctaatgaatcaacaagaaaaacattggaaatggaatggtcaggtgaaatagcaattgtacccaaacctttgaccgacccttgatttccatccccgaatgtgatagctcgttggggatcttatgttttctcatatgaggagaacatccttttctccc

SEQ ID NO: 23317 - DNA, 450 bp, Zea mays
  unsure (1)..(450): unsure at all n locations
agcttgtggtcgcaaaacatatgaagaattatgattaccctaatgggtgacctaaggtacatatttatagtctggtgtaacaccctgtccaatccctggaccggttatacttactcctggcagctcgctaggatcatatattgtccccacagaccaccacggatcttttgtgcacactttgtcctcactcatgcgcacccgagaaaacttcccggtcggtcacccatcccaaatttctccaagccaggcacgcttaacttgcaggttctttcgagataggctttcgaanaagaagatacactntgctgatatgaatactctattaatcctattaatccatgggcaaccccaatccaggaacctcccctcttagccacgtctgtgtgtctagtgtcatcatatgtcatgccatgtgaccactcggngcccacaagcaccatgcaccatata

SEQ ID NO: 23318 - DNA, 426 bp, Zea mays
  unsure (1)..(426): unsure at all n locations
ctgctgggctccctttagaacaccctataatgacacttcttaattctggacgncacatgagtgtcttcttctaccttatgagcaagcgctcactcgtgaggattccaccacgggcctctattatgactgctctgcccacttcctatgggtcggagagcgcactcgccagcttgatggtgctcacggtgagttccttcgaggcattgccaaccctcttggtatcaaggtaaatctaatgctcaacatttagcaagtcctgtttgacctctgcatttgtaaagctcaaggtttangcattgtctgagaaatttctcctcacccaacaatgtaatacaggttagtgacaagatggacccagcagaacttgtgcggttgattgatatattgaatcccgaaaacagggctgggagaataaccatcatcaca

SEQ ID NO: 23319 - DNA, 453 bp, Zea mays
agcttgtgagtctaccaattaatagagcacaatctctacttatgagatcccatgaaatatcttagaggagattgtattaataacacaagcaatagttttctatttagcaacctctattatatgaatgacaagaaggttactaaaacaaggaaacctcatgatatgaactaaattgcccttacaagcatcatgcataacatcaattgagaaaaagatgaaagtagcatgattatgtaattaagtttacatggcaagtttaattcatagcatggtgagtgattaatgtacaagactcaaaaccaatttaaacaagaatgaatacatcatagtattgggtcgatcttctttgaatgttgaatggcacactccatttgggaaacacattctcatgctgtgagactacataaacactttgatagaaacattaatctcacaactctagtcatatagaga

SEQ ID NO: 23320 - DNA, 318 bp, Zea mays
  unsure (1)..(318): unsure at all n locations
ctggagagacgctgaatgagatgtttgccaatggtttaactcctaatgttgacatttacacttctataattgatgggtattgcgaggatgggatggttggtgctgcactaaaggtcttcaaattgatggaacatgaaggctgccatccaaaggcctggacttatggatctttgatatatgggttaattcaggataaaaagcgtcataatgcgatggctgtcataactaaaatgcaggaggatgggataactactggtgttatcgcttatactactctgattcaaggccagngcaaaaaacatgacattgataatgctt

SEQ ID NO: 23321 - DNA, 407 bp, Zea mays
  unsure (1)..(407): unsure at all n locations
agctntgctgaggattagaccctcacaaaacataaaatatacaaatattagtaagtattaccacaaatcgtttgccggaaactcgcctagcaaaaatcagcaaatgcagaaatataaatattcgaaccttcaagccgttacaatcaaagttgtctgcaagttggtcctttgttattgcagataggccaagctcaagcttcggatatcccatgttgtccatcatctcccgatagacatttatctccttgctgtctggtagatagtaaaggaagccatcttcgtcgtttcctccatatatcaaggaccctcgggagtatttcaggtcctttgcataatgttgtgcttcggcaatttgctcttctgatagttgtttcctcgaagcatgtcgaacaatatattctaaatca

SEQ ID NO: 23322 - DNA, 404 bp, Zea mays
  unsure (1)..(404): unsure at all n locations
taggtcttttggggtcctcanaaccgggatgttgttcaacatacactagttcactaatcttaccatttagaaaggcactctttacatccatttggtagagcttgatattgtgtgcacaagcataagcaagtagaatccggattgcttctaatcttgctacgggagcaaatgtctcgccaaaatccaatccttcaatttgagtatatccttgtgcaactaatcttgccttgtttcttactaccacaccatcttcattgtgcttgttgcgaaacactcattttgtaccaataacattgtggttctttggtctctcaacaagctcccaaacttcatttcgagcgaagttatttaattcttcatgcattgcattcacccaatcaacatcaagtagagcttcatctaca

SEQ ID NO: 23323 - DNA, 295 bp, Zea mays
agcttataaaccaataaattattacccatattatattcaaaattaacaaaaaaaaagtgaagcccaatttgccatgaaccttgaatttaaataggaattggaaattgaatacccaattctaatttgttaagggaaagaaaaaataaatataggagtaaatatataatttattttcataatggtatgagtaaatcggacatttaacttaagtacaaaaattttcacaaaagaattcaaattcagattgaagatttgaaatagaaagaaaggaaaataaataaactaaaaaaaacag

SEQ ID NO: 23324 - DNA, 386 bp, Zea mays
  unsure (1)..(386): unsure at all n locations
ggcagcaagctntngtacatgtgtaatgaaggaagtttttacccttttgtaccttcacatagagacgctcttttcattgtgctttgtccttggtcttggttacttaagacctatattcaagacaatatatggaaatattttgcacaagagagagttctacaactagtgatccttttctaagtcatgttatcatatatcaagtagatcacaaattgcataaatttatactgaattctccttttaacttagtgcatcgcaagagagattgattgatagtatatgaggcactaagcaacataagtgtcaattgaagttattcaatgatcaaacgaataacagatgcgatcaaaagaacaacatatgcattagattatcaaataagctta

SEQ ID NO: 23325 - DNA, 357 bp, Zea mays
  unsure (1)..(357): unsure at all n locations
gattaccacatcatccacagaagcttccacacgcttgccctagtgatcggctaagcatgtctgaatggctctctggtaagtcgctccaacgtttttgaggccaaatggcatggtggtatagcagaaagctccaaatggggtgatgaatgcagntttttcctcgtcttcttttgccaggctgatctgatggtatccggagtagtaatccaagaaagacaacacagaacatctagcggtcgagtccaccacctggtctatcctggggagcccgaanggatccttcagatagtgtttgttgagatccgtataggcgacgcacatgcgccaatccactttattctttttgagtacaagaac

SEQ ID NO: 23326 - DNA, 443 bp, Zea mays
  unsure (1)..(443): unsure at all n locations
agcttgtgcaagttttctacttgtatttgagcactagcagatgcaatatacatatttggaaggcatgtggatctttacgtgctgaatctttcaggtaatgtggggcaggaccatgctatcttcgagcaaggtgcttctgcaggaaatgttggaaatgagaaaattgtggagaagaagagagctaaccctgttgcactgctgctatcttctgccatgatgttgaggcacttgcaattcccatcttttgctgaccggctggagacggcagttaagcgtgtcattgcagaaggcaagtacagaaccaaagatttgggcggcaccagcaccacccangaagtcacagatgcggtcattgccaaattgggttagaaaccaaccgtgtctttaatacaactttttttttatctcttggactangtaactagtcctgtcaaaacatttgc

SEQ ID NO: 23327 - DNA, 442 bp, Zea mays
  unsure (1)..(442): unsure at all n locations
tcggacgcttcanatcaaagcgccctcgtgcagactatgctgactacactcaaaccactaattcagaggcccaatcttcagctagaggcagtgaatctacggacacagaagacattcctcatacacatcctgactacctaattgacatcacatgatggacatttccaaagaggaggttctctatggcagaatactgctctaggagaactgtcaatcaatatactctgccatcagacacaaatgttcaattcttccacactcagctccaatttgatgttttttgggggcacattgatggataccaactttcacaaacatcaggtgattgattggactttcatgatgtgccaattatttatggaggacctaattctaaagtttgagacatgtggtatgtactcatttatgggtcagaggacttatttcagtgagacggcagtca

SEQ ID NO: 23328 - DNA, 457 bp, Zea mays
  unsure (1)..(457): unsure at all n locations
agctnggtgcatgcataanacaaacatagacatattttctcaataaaagagtatcttattttagcatccaccaatcttcgacttagataagttatgtaatgctcctttcccttgctctcctaagtcagaacaacttcgatgaccttatcttcagctgcgacatataacctaaaagggaagccactctttggtgctttcaacactggaactaaatataagtaatcctcaataagatcaaaaacatgatgttgctctgctcccaagtgaaatcgacattatccttaaatagaagaatgggagtaaaagcatcaaccttcccgacaagattagaaatgaatctccataactaacttattttgccgagaaacctttgcatttcaagcttactagtaggtgctcctatgttccgaataacctttanttcgatgggatcaacctctatgccatgttcatgaat

SEQ ID NO: 23329 - DNA, 382 bp, Zea mays
  unsure (1)..(382): unsure at all n locations
ccttcaggctagngaaccatcacttcttctaaagacatatacatctacattngtaaaaagacaattatatcccatattgcatagntgactaacagatagcaaattgtaaccaagagactcaactaaaaacacattggagatagagtgctcattaaaaattgcaattttaccaaacccttttaccttgccttgatttccatcaccgaatataattgaatcttgggaatccttattcttgacgtaggaggtgaacatcttcttctcccccgtcatatggtttgtgcatccgctgtcgataatccagcttgaacccccggatgcataaacctgcaaggcaaatttaggcttgggtcttaagtacccaactcatgttgggtcctac

SEQ ID NO: 23330 - DNA, 478 bp, Zea mays
  unsure (1)..(478): unsure at all n locations
gaggcatgcaagcttgtattagatcacgttcaaatactagcttgtttgtttctagaatttgcccaggntgcaataacaacaattgagaatcaacccaatgtgtcatgcactcccaagacactgctgattctaactatttaaattaaagcaatatatccatgcctagagtgagaaacatgtagaaaaattaatgaagtcaagactaagcaaaatgaacttatcaagctaagcctgtagttgcctgtagtttattgacaaataaaaatgaatcaaggaatgcgttaaaaatggatcaaggaagaaatgggcaccatagtaatacgagagcagttgtcattctccttatattccatctgattatgtcacaatttatgatggtaagggaacccttgaggaagaggaaattgttgaagcgtgtttcatcaagatcaaagcagcgtatgagatgttgattgatggtgaaaggaaaagagcatat

SEQ ID NO: 23331 - DNA, 359 bp, Zea mays
  unsure (1)..(359): unsure at all n locations
tcacagttatctggttctgtttaccagcatcagcaacagcaacagcagatgctgccgggtggtccgcatgaaattcagggaggcctgcggcttggttcacaaatgggagcacagtatggtggccctgggagtggtatgccttcctttggatttggtggcgttggcggagggtttgggggtccaaacccttatgctaacatgccatctttcatgggtggaggaggcgcacgtgggttanggtctgtgggaagacaagtgcccactgggttggatggtgctggtggatttgggcctgggggattgggtggtggctcatttgggggatcatctcaatttggtgctgctgggatgggggcata

SEQ ID NO: 23332 - DNA, 464 bp, Zea mays
  unsure (1)..(464): unsure at all n locations
agcttgacaatgttgtggaacccacaacgttntgtgcacatataanaatacagttggtaaatgaattataggattggttcacattcaaataggatatgtcaatctctacttatctcgatgaagaaggcagtctagaagatcacgagggaaaggtataaacaccaaacaaactttactcgcaaattctgttggaacatgtttaaataactcttatttaaacaaggcatatgtatgttcataacaacgtataggtacctaacttactactatgaagaaggtaaggcgtaggctgaccctctctggttctgcctttcctatctccgacaaatggactcgacacttttggcaaaaccatccacgcctggcctcctctggctcttccccgtctcttgctccaatcgcgcagcgctccgcatgccacggnctncagccacattgccgccctcgagcctgcctctcaacgc

SEQ ID NO: 23333 - DNA, 443 bp, Zea mays
  unsure (1)..(443): unsure at all n locations
agctntgggaggaggtaggttccaggccgagtatgccactggagcaccaacatttgaaactttacccctgaggatcatttcaagtcggcttaccaagtctacagaaggaattctcctattggtaacccgagttgagtcggccagccctcgatacagatatgccggataggccctatctttcagtggctgaatgttcttaaaaacaaagtcagtgaccaccgcttcagcagttagacctctctctttcagcagtccaacttcagccagcaacacacctgcctcagccacttcctgatccgtgggagactcagtccaactcggggtgcgaacgtctggctgtcttcccgaccgggaagggagagaatntccataattatcaactataaaccactctagacgccaccccttaatactatccttgaggggaatttcaagatactcag

SEQ ID NO: 23334 - DNA, 412 bp, Zea mays
  unsure (1)..(412): unsure at all n locations
gctattatgtgacactattgtagacttaagctcgctacacgccttcttctttntctccaaagcaggaactntactggaacactatcccacttaaaaagaatgagggtagaactcttgaatcttggggagttgaactccttgaagtacctcataacaagggtgttacagggccttcttctgctgttgctgcttgaccaagctgcagagagatgactgtcacaaggttgattctgggagaaccttcttcttatcttctcttcactatcttcttttcactgaccctttctttctctttgctcttcccactggaggattctatcaaagagtattaccatcacacattggaggaaaccaaagattatgaaccatgtacaacagtcttcaacccaagaatcaccaagcattgtgatct

SEQ ID NO: 23335 - DNA, 315 bp, Zea mays
  unsure (1)..(315): unsure at all n locations
agcttctaaagggagagcacattttaggattaacaaatgttcattntgagaaagacaggatttgtagcgcatgtcaggtggggaagcaagttggagtccatcatccacacaagaacatcatgacgaccgacaggccgcttgagctactccacatggatctattcggcccgattgcttacataagcatcggcgggagtaagtattgtcttgtaatagtggatgattattctcgcttcacttgggtattctttttacaggaaaaatctcaaacccaagagaccttaaagggattcttgagacgggctcaaaatgagt

SEQ ID NO: 23336 - DNA, 195 bp, Zea mays
gcgcgctgatctgtgcttcatccgagtatgcgctgtcttttttactggatcatccctgaggagagcgtccagcccctacggggactttatctgccagactgctttgggacaccctaccacttatccaaggagaccctgctatgctaagggacggggttcaaaggaactaacaccctccgctagggaggccatgct

SEQ ID NO: 23337 - DNA, 378 bp, Zea mays
  unsure (1)..(378): unsure at all n locations
agcttctaaagggagatcatgtgtttgtactaaccgatgtctgggttgagaaagacagaccctgtgcagcatgtcaagtagggaaacaggtgggaagcactcatcgtggcaaaaatgtgatgacgacgtcaagaccactggaacttcttcatatagatctcttcggtcctattgcctatctcagcattgggggaagtaagtatggtcttgttatagttgatgattntttcccgcttcacttgggtattctttntacaggacaaatccgaaactgagaacgatgcttggagagtacaatacgcctgagcggttntggtcagaagctgtgaacacaacttgccatgccataaatcggctctatctgcaccgtctccacaa

SEQ ID NO: 23338 - DNA, 440 bp, Zea mays
  unsure (1)..(440): unsure at all n locations
agctntaagcgctggcagattaagactcacatgtggctcactgacctanaattactttgggtagtgacgtcaactgttcccaaggctgcatcagataatgttgatgatgcagtcaaggccgccacactagcggagaaggccaagtgggacgaagccaatgaggcatgcttgtctcatctgctgaatgtcttgtcgaaccgcttatttgacgtgtactctggttttacctccgctaagggtctatggactgaacttgagaacgagttctctgaagttgacaatggcaatgagtctttcacaacggaaaactacctcaattataaaatggttgagggaaggtctgttatggagcagctacaggagattcaactccttgntagggacttggtccaatatggttgtgtcctaccagacagttntcaggtgaatgcaatactggc

SEQ ID NO: 23339 - DNA, 110 bp, Zea mays
ctcgatggcgaattcgatatctccgtctgagggcattcctggcaattcatcaagaaaggcatctgcatactcacagaccactggaatcttcttcacatgtgactccatca

SEQ ID NO: 23340 - DNA, 432 bp, Zea mays
  unsure (1)..(432): unsure at all n locations
agcttaattggtggaaaaattntcactgacatctataaaaatggcggccgagggatgacccacgaaataataaagaagagcgaanaagatactcatgacgctagagaagcaacgaaagcagctgaaagagctgcggaactcgaaaggcagataggtattacttaatagcttttaactntattgtttatttttatgacttcgaactaatttatgttttctaccgcaactgaactatctcctccccagagcccttcgagtcactggccgacccagaggcaaaggaatcaacaagagttattagaatggccgaaactattatggacgaagtcgttacccaactgctgaccgaagctgcagataaagttttgaaagaagaaaaatagatattgtanaaacattgccagaatatgaatgtaacatttgctggactat

SEQ ID NO: 23341 - DNA, 315 bp, Zea mays
  unsure (1)..(315): unsure at all n locations
cgacatcctgcgcgaccgcctggacaagacagaggcctcgacgcgtgcggaggtcgaacggacgcatgctcagcttgtggatgcgtaccaatgaaaaggaaatgtgcccttgtgcaatttctattatgttttgttgattaagtgcccaacacatttaaatacgtttttatgtgctaaatgaagagataagtgcaaatcaaagagaaggtatgtttctatacttagtacatagtttttaagtactaatatgttttatctaagtgctagaaacagtgagaagaaaagaagaaaagaattgcanatgacttggcttgt

SEQ ID NO: 23342 - DNA, 351 bp, Zea mays
  unsure (1)..(351): unsure at all n locations
agctngactctcgaagccaaacgaagctccagcttgaagcctacttcgtcagaagaaaagaaacttcggaagaaaagtatttagttcccaaaaaatccagaattaaatggctagagtgcgctctaccgctagggttgagcgtgaaggaggcgaagctgaaggatcagagactgttcccatctccgaagcgatgcaacgatccggactggtaacctcggaagaaatccccactgctgaaacagaacaggccactgccgaagcggaagaaggaaacattgaggaaactgattccgaagatgattatcatattgccatgccaagtaagcccagccacttggacttcggaaagtc

SEQ ID NO: 23343 - DNA, 322 bp, Zea mays
  unsure (1)..(322): unsure at all n locations
gcgtcgatccgtcctccgtccgagcaggcgctgcgctcttttacgggatcatccctgggaagcgcgtncaacccctctggcgactcgacctcccagtctgcttccggacaccctccaacttccgaagggagaccctgacgttcgaagtggtcgggttccgaggaacctaccacgccgtgctagggaggccatgctacgcgaagntcatggnccgtcccaactacacctacctgaagctcaagatgccgggccccaacggggtcatcaccgtcggccccacgtacaaacacgcgttcgaatgcgacgtggagtgcgtggagta

SEQ ID NO: 23344 - DNA, 409 bp, Zea mays
  unsure (1)..(409): unsure at all n locations
agcttatgaagattcttcatcccaacatgggctagtcggcggtgccagagccaacccatgttagtcttagcaattaagcaagtgtcgagttcagctctatcaaaatctaccaggtatagctgaccctccaacactcccttaaatgctattgaatcatcacttcttctaaagacagtgacacctacatcagtaaaaagacagttgtagcccatttgacataattgagaaacagaaagcaagttgtaatctaatgaatcaacaagaaaaacattggaaatggaatggtcaggtgaaatagcaattntacccaaacctttgaccaacccttgatttccatccccgaatgtgatagctcgttggggatctttggttttctcatatgaggagaacatccttttctccncgtcat

SEQ ID NO: 23345 - DNA, 325 bp, Zea mays
acgagtggtacttcagcgactcagataggtcaactcgtaatagctattggaatatttattagttgactgtactcgagatgtacaagcaggatttgcttttgaacaacccactactggggttctcgtagttggcatgttgtcgaactagtcgtgtcatgtatgtctaattctccatgctacctcgtccgcttaagttagtatgatgtccaaaaccgtgtcgtctgcgaactgggatgactcttaaatgttctgatgctagtccttaataagttgatgaaattatggttctattatttgagtggtcttatatgctttggcttaaagt

SEQ ID NO: 23346 - DNA, 420 bp, Zea mays
  unsure (1)..(420): unsure at all n locations
agcttgcaaaanatgagttaaactaataatttatttagtgtcaaagttcataacgaagggacttgtactctntttctatgttatattttctatttgtacgtatgactggagatgatcttatgtgatgatggatatattaactntgttggatattagatgatatttaagttaaactttgttggatattagatgatcaagtttggtgcatattttttagatttttagtgttggttcattatgttttttatgtttctaaatatttcatatttttctttgattctttggaatttttctaaagtattttgtctcaagaggggttnttagccccttggttgccaaacagtgacagggaaatacacccgagtagaaaaatcctcctatggaattgaggtgtcatttaaaatccccttggtggattac

SEQ ID NO: 23347 - DNA, 435 bp, Zea mays
  unsure (1)..(435): unsure at all n locations
cgcgaaaacgactactccaaactgtccgacaattattaactacatgcgcaccagaccaacagtgcatatactcaagaccaagtacgtaacgccttcacgaacatagccgagtgtgcgaaggcacacaacctcatcatacaagccattacacatgtacaagcgagggcatcacactctacatcggctcaaccttcggaataattctcatctccctatagttaaacaacattatcctaagctcctcacccgcaaaaaggcttcgcagctccccctcacctgcactcacagcgngccggcaggacaacagttcctgcctgccagccctactcacacgaagccaaccgccgttcgccccactcactctacgcttcgcaaccggccttcgccgcctacgcctagtgctcggaccaggcacaacttcagcattcgcagcat

SEQ ID NO: 23348 - DNA, 334 bp, Zea mays
  unsure (1)..(334): unsure at all n locations
cacgccaatgtntttagagagggttctaacaattntagcttcgctgcngtttcgaaggcatctcagctttccttcgttaaccccaccaaatagtgtagcccctggcttatatccgcaggatatggcatattnnttaagctcttctttttcagcatctgtcaattcttgcccaagtaaatcttgaaagttaaaatctctttctccaaatgtcttcaatttgcttttccccttttcagtagctgtgctcgctgcagccacaacagtttcttcattagccattttcaggagtatattatcaataacttcaaagtgtgtttccaggtcggatcttctg

SEQ ID NO: 23349 - DNA, 224 bp, Zea mays
catgcaagcttacccatgacgaggcatgtgaccagttaaagggtccttggtcagcatgcccacatcgagacggtccttaatcaactcagacggagacactacaccgagactctcttctcgtgcaagtcacccgcccggtctcagctttatcatttgaaaacccaaaatttggtacctatcagaagtacatcttttctgatgttgaacccatcatggccatgatg

SEQ ID NO: 23350 - DNA, 150 bp, Zea mays
  unsure (1)..(150): unsure at all n locations
aagctgcttctgccgatcagtcgaagcccattcttttatgtcangacatagccgagcagaggcgctattggatcccactgtctgaaaacggagaaaccttgatagattctattcacaacaaagatgttgttgcgtggtcagctaatgatc

SEQ ID NO: 23351 - DNA, 168 bp, Zea mays
ctgttttctgtgagattttgttatcgcttacaaatgctcacaacagacgatcctgatgcgtaaatgtgaaaacctggggagccttatgagcgatctgactcacattcattgcgatgcgctcactggccgcattacaattaggaaatctgcatgccagctgtttaatga

SEQ ID NO: 23352 - DNA, 420 bp, Zea mays
  unsure (1)..(420): unsure at all n locations
agcttaccgcatttgaagcatgatcgctctcccttggtcttagtcttgctcggctgtccattgcgaccctttagcaccgtcttgaatctcttgataatgagggccatttcttcttcattaagaccggccgcctcaatttgcgccaccttgctgggtagcgccttcttgttccctgtggctttgagagcaaaaggttgcggctcgttgatcggtccattcaaggcgtcgtccacataccttgcctncttgatcatcattcgcccgctgacgaattttcctaggacttcttcgggcgacattttggtgtacctgggattctcacgaatattattcaccanatgaggatcaagaacggtaaaggacctgagcattaatcggacgacgtcgtggtccgtccatcgcgtgcttccgtagcttctt

SEQ ID NO: 23353 - DNA, 478 bp, Zea mays
  unsure (1)..(478): unsure at all n locations
cttcatcccaacatgtgctagacggcggtgccagagccagcccatattagtcttagctattaaacatgcatctagatcgacattctcttttgagaaatcaactaaatagagcttgccaactaatatacctttaaaagctaatgaaccatcacttcttctaaagacatatacatcaacatttgtaaataaacaattgtatcccatngacacaantgacttacagaaagcacattgttctantttacctagacctttaaccttgccatgattcctgtcggtactctgaaacaggggtaccccttactacagtgtgaaggcacggtgcccatgcggctatctctagtcgcgtggtaaacagcacccgaccccaccacgtggtcggctcccgggtcgccatgtggccagagaagatgatatactccaggatatcaacggtgggtccagacccncatgggaaagtgtctgacccctatacgta

SEQ ID NO: 23354 - DNA, 469 bp, Zea mays
  unsure (1)..(469): unsure at all n locations
gcttgtgaagattcttcatcccaacatgtgctagtcggcgatgccagagccagcccatgttagtcttagcaattaagcaagtgtcgagttcagctctatcaaaatctaccaagtatagctgaccctctaacactcccttaaatgctattgaatcatcacttcttctaaagacagtgacacctacatcagtgaaaagacagttgtagcccattttgcataattgagatacggaaagcaaattgtaatctaaagaatctacaagaaaaacattggaaatagaatggtcaggagatatagctattttaccaagacctttgaccaaaccttgatttccatccccgaatgtgatagctcgttggggatcttggttnttctcgtaggaagagaacattntcttctnccctgtcatgtggtttgtgcacccgctgtcgatatccaacttgagcccncggatgcatanaacctacaa

SEQ ID NO: 23355 - DNA, 410 bp, Zea mays
  unsure (1)..(410): unsure at all n locations
aacgtcttgttgtcgactaaagtcaagaagaccatataagctgccatgcatgatgcacaaacgaacggttcatttatgaatcctacgtgcgcatggtagagtatctcaagaacaacaacactattttatttgcccatttttttgttatgcctaactgactgggttacttggcttataatgatgaaaccattagttctcaatactgcctcanagtgtcaaaatcttttaaagtagaattcatcactaatggaagaggaattcaattagcatatgaaggagcnacccctgtctgttataatcgtcatgtcacagtgaccaatctgaacaaagttcatagttgactaacacaagaacanaattcgtagttgcctaaatgtgaacatacaaagaatgggaagactgacatagtg

SEQ ID NO: 23356 - DNA, 400 bp, Zea mays
  unsure (1)..(400): unsure at all n locations
agcttctccatcatctctttctttatttctttagcacaaatatgtctatgaaagtatcgtagcttcgctaatgctttcaacacatcatttctacaaaaccacggagcataacaggaaggagtctttccattattatgtggtaatcatgactcttcaacccggaaaacttgcccgtcttcaaattcacagaccttctaaagcccacgctgtgaccatttggaaagtctaagtttttcaccatttcatcaattgtttcttccttttaagtttaaagctganaggagcacgtggcttcttctcgttatctcatagctccatagttggtcgactacanaataaggccaagtcttttctagccttaaggttgtcttttggttttgcaatgatattcacgcaagtt

SEQ ID NO: 23357 - DNA, 244 bp, Zea mays
  unsure (1)..(244): unsure at all n locations
tctattactctttaatcgcagntacttatctnagtaganagtctattacaacctgtgggacattcttgtattgacaataattatgacattatggttctctcttacacctaattttgctgccatccatttgctttagcattatgattgtgtggtaatagaagtattcaattcagtgtccccatatattggaatgctactatggaacttttgctatggtcagacattatggagattcatcgaacac

SEQ ID NO: 23358 - DNA, 430 bp, Zea mays
  unsure (1)..(430): unsure at all n locations
tgtgtcaagctcatctttagcctctcattttcttccttgagctttagatatgaatcatcgtttgttcctgcaaattctagctcaaaggaagatttgcttgtcgaccgaccacaagcattagcacatggtcatatagtatcaatttgaatacatgcgcatgagtgaggttgtttggaatctacaatttctatcacacactcatgagcaatgtctaatatgatatgatcatctcttagattttcatgagagcataggagcatatcatatttgtcttggaaagctagatattcaattttagccttctacatggtccttaggcaaggnatcttattactaattgactatacatgtgagcgtatcttgctcattgaaagttcatacttggacacatacatagagcctttactctcatgttttatcactcgcaaca

SEQ ID NO: 23359 - DNA, 418 bp, Zea mays
  unsure (1)..(418): unsure at all n locations
agcttnctgctgctcttctttgtggggaactatgcgatgtatgtgtatgcgcagaagacgctcccgccaaagaagaagaagccggtgtcgaagaagaagctgaagagggaaaagctgaagcagggggtctctgcgccgggagagtaaacggccatgctgccgatcctcccgtccagagctcctattcacatgattattaaagaaaaaaatttatatatatataccagctggagccgtagtggtggagtaactttgttctgtagatgctctgtctttaatggtacatctgtattggagactntaatggcctgagccgagctagtatgcttcctgtttcgtacaagttcttgaaatgctggtgatggcgcatggctctagagaanaactcaagggagctgagccagcgaaacatgatcta

SEQ ID NO: 23360 - DNA, 428 bp, Zea mays
gtcgcctagaggggggtgaatatggtgaatctgaaatttataaacttaagcacaactacaagctgggttagcgttagaaatatgaacgagtccgagagagagggtgaaaaacaaatcgtgggcaaataaggagtgagacacgatgatttgctttaccgaggttcggttcttgcaaacctactcccttgtgaggtggtcacaaataccgggtctctttcaacccttttcctctctcaaacggtcacttacaccgagtgagcttctcttctcaatcaaacgggacacaaagtccccgcaaggaccaccacacaattggtgtctcttgcctcggttacaattgagttgatcacaagaaagaatgaggaaaaagaagcaatccaagcgcaagagctcaaatgaacacaagtcactctctcacaagtcactat

SEQ ID NO: 23361 - DNA, 442 bp, Zea mays
  unsure (1)..(442): unsure at all n locations
agcttccttgatctcgtagggtccaatgtagcgaggagctaacttgcccttgatcccgaatctctggacacccttggttggtgataccttaagataaacatgatctcccacctcaaactgtagaggcttccgtctcttatcatgatagctcttttgtctagcctgagcagcttctaagtttttcttgatgaccctgacctttgcctctgcttcaagtaccaaatctggcccanaaatttccctctctcctgcttgagaccaattcagcggngttctgcatcttctcccatacaaggcttcaaaaggtgccatctttagactagactggtagatgttattataagaaaactctgccaaggaaagacacttgtcccaatcttttccgtagtgtagtgcacaagcccgcaacatgtcttccanaatctgatntaccctttctgtc

SEQ ID NO: 23362 - DNA, 524 bp, Zea mays
  unsure (1)..(524): unsure at all n locations
tgatcttcctttcagaacaggaagaatatcacatcccagtgatatgtattctttggttctcttctagtatctatgggtatatgacaggtccggaaccttatccatctcctcaagaacccattgtggcaaaggaatcctggaaaggtagtaaattccaaccatgaacaaaaaagagatatgcttttaaactatattacagtgaagtaaaagtcaggcactacttngtgttcagtaaagggtgaggccatanaacagcacacaacaatcaacgtgcccaaatttcatacaatacttttgttcgttagaggaacaatctcgtgaaccaatggctgtttgggacgtgtggcctatggtcgtcctccaccttctcgatgctctaaacaacattagcaacaaaggcacanattattgattcatagaggagatctangaactcgactatgaagtaggtatatttaaggttcatctgatatttaacaagtcatgttcaataacttctgttccatggatatactgcatcactt

SEQ ID NO: 23363 - DNA, 422 bp, Zea mays
  unsure (1)..(422): unsure at all n locations
agcttatgatatgcatttactggtgaaataactcanagaatttggttgtgcgctgcttgagaaggtgtggcatgttgcattattgcaaaactaccacagacttagatagattttgctatctctctaaaacataagaggcggaagtttgacatcaccaacctcgttggctctttggatattgaagagaaggtgagagaataagatgtccatggcaaaaaaaaagtagttgaggagacctctagttctcatgaggtacataataattcccaaaactcctataagaagtccaagcaagaactcaaacagaagaataccactacttgtaagaagaagaagatnaagggctnattatttacttgtggcaagaccgagcattatttaagggagtgctcngatgccaaacaaaaagtctataaatgtga

SEQ ID NO: 23364 - DNA, 445 bp, Zea mays
  unsure (1)..(445): unsure at all n locations
tatcaatggacgtgaagagtgccttcctcaatggactaatcaatgaagaggtctatgnggagcaacatcccggctttgaagatagtgagtaccctaaccatgtctataaactctctaaggcgctgtatgggctcaagcaagccccaagagcatggtatgaatgcctaagagagtttcttatcgctaatggcttcatagtcggaaaagccggccctactctctttactaaaacaattgcaaatgagttggttatatgccaaatttatgttgatgatatcatatctgggtctactaacaaatctacttgtgaagagtgtagtacgataatgcgtcagaaatcgagatgtcaatgatagggagtcgaagtatttcttaaggattcaagtgaatcaactccaagagggcaccttcatcagccagacgaagtacattcaagacattcttg

SEQ ID NO: 23365 - DNA, 301 bp, Zea mays
ggagccattgggttattgacagtggatgcacacaacatatgacaggccacccacggatgttcacctcactaaatgagaatgttgatggtcaagataaaatcacatttggagaccacttcaaaggaaaagtgccaggacttggcaaggtggcaatctcaaatgacttatcaatatcaaatgttctcttatgtgcacccttgagcttcaatttattatcaatgggacaactctgtgatcttggacttcaatgcttatttactccatcagaggttattggtaacaaaatggatgatgaatcaat

SEQ ID NO: 23366 - DNA, 513 bp, Zea mays
  unsure (1)..(513): unsure at all n locations
tgacatgaggagatggcgctcgtcatcaagagcttccgccanattctcaaacanaggagggggaaagactacaagtcccgctccaagaaggttggctacaagtgtggtaagcccggtcactttattgctaaatgtccattatcaagtgacagtgacagggataacgacaagaaggggagaagaaaggagaagaagaggtactacaagaagaagggcggcgatgcccatgtntgtcgggagtgggactccgacgaaagctctagcgactcctcctccgacgaggacgccgccaacatcgccgtcaccaagggacttctcttcccaaacgtcggccacaagtgcctcatggcaaaggacggcaaacggaagaaggtaaatctaactcctccactaaatatgaatcttctagtgatgataatgctagtgatgaggaggataatntgcgttccctttttgccaacctcaacatgcaacananagaanaacttaatgaataaattagtggccatcatg

SEQ ID NO: 23367 - DNA, 437 bp, Zea mays
  unsure (1)..(437): unsure at all n locations
agcttggaggtcccgtangaccaaacactcgcacttttgtggatgaaatcgtattatttacaaagaagaaggcaccacttattggagtgaaaaagtggaaagatatagagctcaatgttagatcttctatagcctctgacgtactggtatgtgaaatttctttacttgagccctaacagttagctagaactattagtggtctactattcctaaattactagacaattaaccttctctttatatcanaactgaaacagcgaaggtgggagtttccaagcaatgaggacgtgcatgaaaagatctggtctattgccaaggagagatacaaaggatggcgatcaacgttaagctcaacatacaaggcatacaatagttatgctgaaaggatgannaacaagcctgaagatgtagacatcgtcgagtggcatacatgatgt

SEQ ID NO: 23368 - DNA, 481 bp, Zea mays
  unsure (1)..(481): unsure at all n locations
acgacttaacgcatctgccactacattnggcttgcctaggtgatagtgaatctccagttcataatcctttatcagctcgagccatctcctttgtctcatattaagctctgactaggtaaagatgtacttcaagcttttatgatatgtataaatgcgacagacattccccagcggataatgacgccatatttttagggcatgaaccaccgcagctaactccaggtcatgaagtgggatatggtcctcatgtcgacgcaactgccttgaagcataagctatcactcgtccctcttgcatcagaacacagccgagaccactgcctgatgcgtcacaatacacatcanaggggctttttaatgtccggttgagccaataccgaagcaatggcaataatactttcagctgctcaaaggcttcattacantttgaggaccaanntaaattagtatcattcttcaataaacttgtgatggggtttcac

SEQ ID NO: 23369 - DNA, 321 bp, Zea mays
  unsure (1)..(321): unsure at all n locations
agcttataacaggaggatagaggcagggcccgtccatatgtcatgatagaaggagaattgtacaagcatggagtttgtgctccgctactcaaatgtttatccagaaccgaaggaattgagttgatgaaagaaatacatgcaggcctctgcggatctcacattggatccaggccattgcttggaaaaattntccgacaaggaatttattggccanaggcagcttccgatgcagcggagttagttcaaaagtgtgaaggctgtcagaaatgtgcacgagatcaanaacaaccttcgtccttaacacaactcatacaacccatt

SEQ ID NO: 23370 - DNA, 272 bp, Zea mays
  unsure (1)..(272): unsure at all n locations
acctcgtagatagccttgcgtacaatatcctaaaggtacaggagttatgnggctttaagcagattattnnttgtgtctcttattcttgtgctgatcctttgtctnccccttttttgtanggtttaattctgagcaatgctttgagagcacagaagaatgctgaagatgaaaactgccaggtagcccttggntaaccttcgtcgganggtatcaaactgaggaatgaagctgcagagaaggataaaattttgctttccttagtggacagagtc

SEQ ID NO: 23371 - DNA, 391 bp, Zea mays
  unsure (1)..(391): unsure at all n locations
tacttgtcaaagcaacaacatctgccagcacagcaactgcagaccataccagtaacttggcctttcgcatgctggggactggatatgattggacctttcaagaaagctcaagggggatacactcatgtatttgtagcaattgacaaattcactaaatggatagagttcaagcccattgcttctttaacctctgctaaggctgtggaattcatacaagacataatattcagattcnggataccaaacagcatcataactgacttangatccaacttcacaagttcagaattctttgacttctgcgagcaaaagagcattcagatcaagtatgcatctgtagcacatccaagagccaacgggcaggttgagcgagccaacgggatgatactgg

SEQ ID NO: 23372 - DNA, 493 bp, Zea mays
  unsure (1)..(493): unsure at all n locations
gcttatagtttctggatgagaagtggtcacccaagttccgttgatgaagcaccagaagaacaatcaaggaatgaatccatgtgggagttcgcaagagaaagggttgtgtgttggcatctatgctccttcaataagcaagctgccaagcaaaagctagaagcctgaagatgattcttgagtagccagaacccaacgttgcaatcagcaaccggatgcccctcatagggccagatttgttgaagttccatctcctcgaagagtctgcanagtgaagatatgtagctgaagtaaagctatacccataacccttctaaaccgaatctcgaggtcgagattccttttaagtggggtagaattgtagcatcccanaaattcaaatttctgaaatttctcanactcgccctanattcannaatgaattcaaatntcatttcanaatgttngntngcgagtngatatcaacaaataaattatagtgggctatattctctct

SEQ ID NO: 23373 - DNA, 438 bp, Zea mays
  unsure (1)..(438): unsure at all n locations
acgattagttggtgatggtggatatggattctgttaaatgggagtagatgtgattctgttaattagccgtagaaattaatactgatctgtactaaagctttgaaccatttaatattagttggtgatggtggatatggatatcgattaaatgtgattgtcggccatcgtgtcgttgatatatgtgtggatgtcagccattgtgttgtcagttttatttgcaggttttggaaacctccccgtgcaagggagggtgtgccgaaattttttattgacaagcttgtttatttnttttgcagaggtcttcctagccgttgcgggtctgcctgcaccgcgtcgagtcgccacttgaccaacccgctagcctgactccactgtcaccctatgtataacctcaatttccgcatcatggtcgtagatcacgtaacccagttagtcgtc

SEQ ID NO: 23374 - DNA, 408 bp, Zea mays
  unsure (1)..(408): unsure at all n locations
gctatgaagattcttcatcccaacatgggctagtcggcggtgccagagccaacccatgttagtcttagcaattaagcaagtgtcgagttcagctctatcaaaatctaccaagtatagctgaccctctaacactcccttaaatgctattgaatcatcacttcttctaaagacagtgacacctatatcagtgaatagacagttggtagcccattgacataattgagatacagaaagcaagttgtaatctaaagaatcaacaagaaanacattggaaatggaatggtcaggagatatagcaattntacccaaacctttgaccaaaccttgatttccatccccgaatgtggatcgctcttggggatcttggttttctcnaggaggagaaattttttctccctgcatgtggtc

SEQ ID NO: 23375 - DNA, 385 bp, Zea mays
gcttatccatcggtccagcccaacacacttacatcctccacaacgatgagcccactaatatggaggagcattagagcatctccaagagactctttatttttgactctctatttgacactttatttggctctctataaatattaaactctatatataacatctcattccaatagactctccaatatacaagttaacttggctagggagagttgttagccaaatttggctagtgaggggggttaattagagagcccgatagcttagcaaagtaaatggctagtctggtggagagctattatgctattaagtagctaaaatttagcttgacaaagtatttagcttatctcttggagatgctctaagcctaccactagtagtcatctct

SEQ ID NO: 23376 - DNA, 315 bp, Zea mays
  unsure (1)..(315): unsure at all n locations
gctgatggaagtaaaagctaatatgttcctttatatgataatataagttatatattattgtgtggaccgagtttctgaacacaattgcggttcatgtaatcatgtatgtggctcgacccangattactagaccttccaaattnttaaggggttatctaaatgattcacaatataactaggaaaaccttgaaaaaacacacatgagtggcacatgagaatcaacattttttgtgaaggaggataaacaagttgtagtcttcgtgtttggaaanatcagaagatagaaagtgccatataatttacgggtctggagat

SEQ ID NO: 23377 - DNA, 473 bp, Zea mays
  unsure (1)..(473): unsure at all n locations
gctttgggctacggtgtttatagagtaagtgaagcccatatgatgttgaacaagtctccttaagtaagtttggcttggtcctgtataaaaagtggagtaaagttggttccaaaatcagctgacaggtttgcactgactgcatttttattcagctgctgaaatctgaagttcagtgaaggatgcctagtttggagccattttgtgacttatctgagtggttttagactatagtttctatagtaaacttggagaagttatgttggtaagtaatttccttattttgatacttgtaaggttctgcataaaaagtggagtaaagtgtactcaaagttggaatgtcaggtgttggggattcagacttagtgtaatagctaagtctgaatctgtgtggttntacccaacttggnggctttgtgataattaatctangcgaaattgngttagaaattctatagaacaatgaaataccatat

SEQ ID NO: 23378 - DNA, 422 bp, Zea mays
  unsure (1)..(422): unsure at all n locations
tgtctcgcgcatcaccttctttttggtctcggcttcaacgacggcaaggctgtgtggagcaagaaaggccagacgatactgctccacgtcactcttcttcgttgccttggataggctatcgtcagtcacagtcatggtattcgacgtaagaccactgatgaacaaaaatgaagaaataatctagctgctatgcagttcgacatgattntcctatggaaaagggaggaaatgggcnntgcacagagatgaatccttanatatgtngtgcactcatgcaaccatatttgttgattgtttgactcatacggactgatgcgacgacgtttgttagcaatagataatatgtattacttttttcnatatattagcatgagcggctaattattcaanatatataacataaatataaatggtcgtgataa

SEQ ID NO: 23379 - DNA, 346 bp, Zea mays
  unsure (1)..(346): unsure at all n locations
actgtcagtgcgcaacttctcttctacgttcgcgcacaatctatctatagtgactntctagcgagtggagagcgtgagatgagaggcaatgagtagaaatgacaagttgactgcctctgcccgtcttatctgcctgtcgcggacggtccgcgccctgataacttcagactgtctgcgcttctgaccgatttgtccagatcctggtacttgagacgggtcgcggcctaatactcaattnttcaaagtctggtcactttctgatgtngaatttcaaatctgaattgatgctcatatnatgacatttcgaccaatccaatggttaatatgcatgcatataaacattatg

SEQ ID NO: 23380 - DNA, 312 bp, Zea mays
  unsure (1)..(312): unsure at all n locations
agcttcagtcttagcggtaggctcggtcttagttagttttagttagacagggtaagttgctatatcctgtgcatttatgtttgtcatgatgaactatggttggtttggatctttggaatgattggcaccagagtgtgggtattccctgcattttggtttacatactatgtcaataaagntaggtatatagttgggaaacccattattctcctttcctctttatctgagaagctgtgtggtctgtgttggagatcagtgaagatgctcatctgttcagtgctgttggagaattctatactcttttcttatgct

SEQ ID NO: 23381 - DNA, 339 bp, Zea mays
  unsure (1)..(339): unsure at all n locations
tatgaagattcttcatcccacatgtgctagtcggcgatgccagagccagcccatgttagtcttagcaattaagcaagtgtcgagttcagctctatcaaaatttactaagtatagctgaccctctaacactcccttaaatgctattgaatcatcacttcttctaaagacagtgacacctacatcagtaaatagacagttgtagcccaatttgcataatggagaaacggaaagcanatggtatctaaagagtctacaagaaatacatnggaaatggaatggtcaggtgaaatagcaaatttacccagtccttggaccaaaccttgatttccatccccgaat

SEQ ID NO: 23382 - DNA, 301 bp, Zea mays
  unsure (1)..(301): unsure at all n locations
gtcacggcaacttcattctaccccgacgtcctcttcatcagggggagagtggaatcgtcccccatattcgacgatgaaccaatcgtgcctggggaagaacctccttcaggggaagctcgccgataaaggaaccgacgccgtaatgccccgcgacatcatgaggccggagaacgagactcggtgttacctatatcacgagatgagatctcggaggtgggagaaactccagatgaatgagtcttcagagaaaggaggaacttccgccgacgtgattgttggccagctcaagagncagccgagc

SEQ ID NO: 23383 - DNA, 534 bp, Zea mays
  unsure (1)..(534): unsure at all n locations
tccttgaactntctccactgcacctctcggtccgctggctgcatagcaagaaaatggtcccaccaggtccttgagggtccgcgaagctgctgggtggcaaacctgaccttagtgacctcataacaaactccatggagtagcgggaatttggattccatagctctcaaccatacatccgcatcaagtgggtcctctgccctggtgaacaatggtggctgggtactgangaactcctggtangtggctgctgcggagtgacgctgatgatcaccaccaccatagtgctgatgtggcggctgacgctgagctagctgcctcaagatctcattctgctgagccattagctcctgcaaagtangaagcggtggcggcggtggaagaacgagctcattntgaccacgacgcactctcccggccatctgaanaatcacatatattttcaataacacatctttgaggttcaaggttcaatcacgatgaaagagtcanaaggcgaaactgatagaatcttgataaatcataaagactcacatg

SEQ ID NO: 23384 - DNA, 246 bp, Zea mays
ctaatcacctgagctgcagctgcaagagatatcctatcgacacatttggtagcatcaaagagggtacacccgtctaattgacaattttgtgaatattacttgtttggttccactcttgagccacttaaggtagaagaagctctataagatccaagaatatgtgatagcgatgcaagaggagctcaataatttcaccaggaatagaagttggtcttttggttgatagacccaagaaaagcgttattg

SEQ ID NO: 23385 - DNA, 388 bp, Zea mays
  unsure (1)..(388): unsure at all n locations
tcgcanaggtgaaccgaaatagagatttggagaatggagttagggttcaagtgagtcaggttgatgtgataaaaatcaaggatgccacggaaaaaatgagatatgggaaggccgaggccgcgaagaatgaaaggagtgtaaaccactgactcgtgggtatcttcggttgggacagtagtcccatggcaagaacgccaagaacagagttcccgtggagggagaaccccgatggagacaaggcggagaagctcaacttcagaaatcacagacatatggttacctgcgaagggtaactgactgttgggatcgatggcggngatcactgcagcagacgagttcgcggtcttcctcttgggcgccatcttgcttctcgccggcgaaacagagc

SEQ ID NO: 23386 - DNA, 443 bp, Zea mays
  unsure (1)..(443): unsure at all n locations
ntaactctcgcgagacctttccncgcctctttctaaccatgggtaattcattatcgtatgtgatattctatgcatatntaccttatttggtctcttggatgggggactggttgcttcctaatttgaatggatggatgtatgtatgcctgccatcgcatagagaacgaatcgggtgagaagccgaggaaccccaggagaacccttgacaacagtcggttgttgaggcaaggtccttgactatcttgtctattatttttaattcacctccgtttatcattatcctaggatgatacttttgtatcatatcttgttactattggttgatattttgttacttatctatgctaacttatcatgactatagatttataacgtgttcctttctatatatgtgactgggcttaagggtcagcggttcatgcttcgaagactgtttgataccc

SEQ ID NO: 23387 - DNA, 216 bp, Zea mays
agcttgcattcatccctaggctgatctgaattccaagcatttggtggccgacagactacgacccttggtctcactatcaatgacgctgactcaacgaggccgtacacttggctgcaggaacgctcaatgatgcaggaccttattcgccgacatgtattgctcgcccgctccagactgagacgacatgctgagtgacacaggacatagcgtacattt

SEQ ID NO: 23388 - DNA, 369 bp, Zea mays
  unsure (1)..(369): unsure at all n locations
actcagcttaacggtcagaatccaaccgcagcgatgacgtggcgggggcaccttacctgtccngtgtgcaccgcacttggcagagcaccatactacatacgggcatccgccggacagtagtaggcatgttaggaagttcttcgtgtgattattctgctatggccgtcagactagtgattcgtacatttgctcttctagaaactatatgtgtttttcggaagctagtggatctttgataaagcctcgtagtggatccctatctatacaccttggaagtgtctaaaggccttgtcatccctgcgacatggatacctacctatgagacatggtcaacctttgcgagtgtaaacgggaactagctgtcgggtt

SEQ ID NO: 23389 - DNA, 378 bp, Zea mays
  unsure (1)..(378): unsure at all n locations
acttacgaccaaaccgcacccgcatccatatcacattcaatggctcaacaatagtggtaaggtcaaggtaaccaagctggtacgaattaattttgctattggttcatatcgtgatgttgttgactgtgatgttgtgcctatggatgcttgtaatattctgctaggtagaccatggcaatttgattcagattgtatgcatcatggtagatcaaatcaatattctctcatataccatgataagaanaatattntgcttcccatgtcccctgaggctattgtgcgtgatgaatgtgctaaagctaccaaagctaaaactgagaacaacaagaatattaaaagtgttggtaataacaaagatgggataaaattgaaaggaca

SEQ ID NO: 23390 - DNA, 385 bp, Zea mays
  unsure (1)..(385): unsure at all n locations
tataatcatggtatgaaccaattgtaaattccacactgaccatacgtgttaccttaagcttaccactgtcgttgaaccatnggatgtagtangggtgtggatgtggaagcgttttcagcccaagcttctctaccatggtggtgcttggctaagttgtgcagcttcctccatcaattataatacgacaagatcgtccaaaactacacanttagtttggaacaaattgtgtcgcttgttntgttcagctttaatatattgggcactcaagacacgtcttacaacgaggctctcatagtgttcagcatggtcaaccccaatatgctcttcatcatcatgctcctttttagcatcttgggcagcaagcatggcatatgtatcattatct

SEQ ID NO: 23391 - DNA, 423 bp, Zea mays
  unsure (1)..(423): unsure at all n locations
agcttttaaagggagaacatgtgttaagactaaccgatgtctgttttgagaaagacagaccttgtgcagcatgccaggcaggaaaataggtgggaactactcatcaaagcaagaacgtgatgatgacatcaagaccactgaaactcctacatatggatctcttcgggcccgttgcttatcttaacatcgggggaagtaagtatggtcttggaattggtgataattttcccgcttcacttgggtggttgcacacccgtttctaatggngcagagccgggtgcatagcatatgtgtgccaggatctattcccacacatatgtngatgtcacaagtgtaatatatcaaaagaacaatgcataaaagagtaaataacgattatattaacatattacacttcgaacagacataatgtcttaaccttta

SEQ ID NO: 23392 - DNA, 463 bp, Zea mays
  unsure (1)..(463): unsure at all n locations
ctttccagccctcgattataatctcattcttttatctttgagggtcttgtgcattctcagggctttgcttagcagcatactctgtgcaaaatagccttcatcagaaatctttgcttcatcacanaagattaataagctgaagaaaaaaactttaccttaaaattggaatagaataagctgccaacgatattgtgtcgtcggtagttgctaatgtcagcttcaagcttcggaaaaccaacactcttcgacaaagtgatgataatcttcgacaaagtgactatgtggtctcgaatgcatcctaagggatattcattgattcctccaaagagcatggctcctggttggtagccacaggatatagcatactcctgcagctcctccctctcagccttggataattcttgaccaactagactctgaaagctgaagccttngtcttccaaagtgtcttcggcaatttctt

SEQ ID NO: 23393 - DNA, 354 bp, Zea mays
  unsure (1)..(354): unsure at all n locations
aatcttcacctaataaaaagattangaatgctcaaggcaaaggtatggaacaaattgcttcaattggtagttgatcaatactagttccttccaagtggcattctttcatttggcaataatatattctatggaaaggaatgtcaatatgaaggttaaattccttttggcttaaatttgtaaattagtgcatattgtgaattcactgctccatgtgcattaacttagaaggaatttaatntatgcctttatgcctcataaatgatgaattatttgccattcatatataaatatcatcattcattaaatacttccttgtactactaatacctcttttcaaagtggcttttgactagt

SEQ ID NO: 23394 - DNA, 459 bp, Zea mays
  unsure (1)..(459): unsure at all n locations
cactcagcttcctgctacaccttcggcgctgtatcaaccttcgtattattctggtctgctgtgataccgacttgagtccgaagatacctgttcacacattatactccagaaatactgtcaaatcctgtttttgagtaccttcgtaagccgaaggcccccaacatagatcaactccgaaaagcaatctaaatgaaactattttgactttgactaatattatagtgaagaatgacacanatanngtgatcattanaatacatttcgtgtatctagcgatactaacttcacataacatacaattatgctctntcttctccatctgtcctaaattaataatttattttaggtaaaaaataaatccatacaataatttggtgtatgtgctntatatattgtcagggaccataattaggggtacccccaagactcataatctcagctggtaagccccatcatcac

SEQ ID NO: 23395 - DNA, 332 bp, Zea mays
  unsure (1)..(332): unsure at all n locations
agcttactcctncctgagaagggccgntcatcatcgccaaaactttgaagcccgggacacaagctggccaacgatcaaggcgaggtctatagcaacgcttggaacatcgaacaactacgtcgcttttacgcttaaaatgtttcaagtcgttcatgtatctcgctccctttacatatataaataaaaagtctagctgtcaagggaggatcggccttgcctcaacaaaaaccgacccttccttcggggctagaagggggggaaccccctctgcgtcaaaattttcctcggaaaaagtttctaccaaaacgactttcgtgcctttcgactatatc

SEQ ID NO: 23396 - DNA, 378 bp, Zea mays
  unsure (1)..(378): unsure at all n locations
gttacaattcctgtaccttcatgctggtgtatgcaaagctatccgcaaggttatccttcgacatggcggcgaggccagtttcaagcttcggaaatcccatacttttggcatctcctagcaaacagatatttctttgttgtccgggagaaagtataggaaatcatcttcgtccgtgccattgaacactaaggcccncttcggatattttagtttttgggcgtagtgtctggcttctaaaaattcctattnggataatctnttccccgaagcatgtcgaataatgtaatcaacatcttcgaacagagcttctggggtaggagatttagtttgttgctcagctttatcctcangtgcggcaagcttcgtctcaatgggcac

SEQ ID NO: 23397 - DNA, 467 bp, Zea mays
gcttccaagttcgggttgaaccctctctaagcttcttcacacgcattaagcggttatcttatcgaggttgttcttgtagctggttgcaatccaaaatagattaagtacatgggttcactttgctcatgaacaaactcatatgctaccactagtttcaatcaacaaaaataaccaatagtggtagaacatgaatttaaatctttcatttaatatgcatgatactattaagtatgtactatgtgcactaaccacatatatactagtaggggatgatatgatcatgcacatcacaatgatacctttgctatgttggagtagaggatagtcaagattctttcgatttagctctccaatagcaatgtgaagttcaattgaatagcttggtgaagaccaattatcaataagaaatccattcttcaccagtatgaagttgagaacccatttaagatcaagtgtacaatttgaat

SEQ ID NO: 23398 - DNA, 472 bp, Zea mays
  unsure (1)..(472): unsure at all n locations
tctcaagctttntcaccatattatcacggntattttgagaaggttgagcatgacactttcccttcaaacgagttaagctccttcttaccattccaacttcttccttgaactctttattttcttgtgtgatagaaatatcactaattcctganatttctagctcaatggaagattggctntcttgagagcaacatttgttagcacatgataatatagtttctacttgagtacatgtgcatatgtgagggtggtatgaattcaaattagttaacacaacctcatgagccatttctaacatgatatgtgaatccatcaatntattatgagagcacacaagcatatcatgtntntcttggaaagctagatcttcaatattagcgtttctatggcgtcttgacatatcattttactttctaatgacaatatatatgaatgataacaacttaaattgctcaatgaatgtctcatacct

SEQ ID NO: 23399 - DNA, 309 bp, Zea mays
tctgtcaagaatatcccacgatgagaaaatgagcatgctgatctgctagccaagtcagcggcacaggggctgcctttaccttcggaagtattctttgaaacaataaaagcaccttcggtggaacttcttgaaagagcagtgctcaatatatctcttgtttatagtgaagattggagaactgagatcatgtcttttctccagggaaatttcctttcagatgacgaagcttattataagagaatagaggccagagcccaaccatatgtgataatagaaggggagttatacaaacgtggagtttgttctcca

SEQ ID NO: 23400 - DNA, 350 bp, Zea mays
  unsure (1)..(350): unsure at all n locations
aagcttctncgacagtctgagcagttcgaacgagaaanacatgatctcaatttaaactngtagccgaagctcagcagaattcggatgtgagaaaactactgacaaatcttcaagagaaatgcctggaatttagcaacaagtgcattcaacgattaagaaagattctttactcggttggagctagcagcgaanaatttaccccctcagctgaagatctaccaaaaaccttcgaacacattgagggggagattgacgagctcgacgaagtcatagctgggcatggtgacttctgtgcctgggtggcttctcgagggactgctgcagccttcatgaaggctggctgtgatcat

SEQ ID NO: 23401 - DNA, 447 bp, Zea mays
  unsure (1)..(447): unsure at all n locations
agcttgtgaagggtcttcatccccacatgtgctaagcggcgatgccacagccagcccatgctagtcttagctattaagcatgcatctagaccggcctcttcttttgcaaaatctactaaataaagtttgccgtctaatacacccttaaaagctagtgaaccatcacttcttctaaagacagacacatctacatttgtaaatagacagttatatcccatattgcataattgactcacagatagcagattatatccaagactctctactaaaaatacattagagatagaatgctcattagaaatcgcaattttacctaacccttttaccttgccttgattcccatcaccgaatataattgaatcttgggaatccttattcttgacgtaggaggtgaacatcttcttctcccncgtcatatggtttgtgcatccgctatcaataatccag

SEQ ID NO: 23402 - DNA, 436 bp, Zea mays
  unsure (1)..(436): unsure at all n locations
ctggagcatgctgctctnttggagatcctgaggcacaaggngttcggtgataaatggatccactggatctctatgattcttggctccggatcttctgaagttcttttgaatggagtccctgngaaaagatttcactgtagacacggagtcagacaaggcgaccctctgtccccacttctttttgntcttgctgcagatcttttgcagtctattgtcaacaaggcatgtgaaggtggcattcttcgtcttccattaccaaacaattgtggttcggatttccctatcattcaatatgctgattatactattctcataatggaagcctgccctagacaactnttcttcttaaaggcaatgctcaactcttttgctgactccactgngcttcatgtgaattaccataagtccaacatttaccccatcaatgtcacggacc

SEQ ID NO: 23403 - DNA, 453 bp, Zea mays
agctggcttcacaatactagtttcgtgaagggaagtttcatgaacacccataaatggatgcatttgttgctttcgagagtgaggaatgggcctcatagttgcaggctttaatttagccttgacggctgaccatgaggaaggcccttccatcatatgcttcttgtcttccaaaactccatttgcacccaacagattttgttttgattctgaacccacctttgttctgtccttggtaagggaggctgaccatcttggaagatgaaaatatggaccattttcattagccaaatctttgcactgacttgtgcaaaagaataatagacggtctgcatcccgcctctcaaatgaagcaacaggagtaccatttatacaaccaataccaagtgcaaccaagctcctgtatgatatatctggcgctagatgcttcagaaacctaaaattcaaagaagaatg

SEQ ID NO: 23404 - DNA, 449 bp, Zea mays
  unsure (1)..(449): unsure at all n locations
ctatattatggatggctttngagtcagtccagtttccttcggcccttctggcagcttcctgacttccatgaatagcaatgggtccttgatccgaaagtatcttcatgcaaagataagcangatgaagaattgcttcgaaagcattgagggtgccacgaccaataattgcattgtaagggtattccatgtcaacaatgtcaaacacaacttgctcagttctgatgtngtcaatgaatccgaaggtcactggcatggtgatcttgcccagtgctacaatctgtcttcctccgaagccacggagagggtgtgtagcatcatggatcttatcttctggctcttgcattngtctgaaggccttagcaaatataatatcagctgcactggctgtatcaaccaaaacattgtggaccagaaaccctttgataacgcaagaaataaccatagcatcg

SEQ ID NO: 23405 - DNA, 442 bp, Zea mays
  unsure (1)..(442): unsure at all n locations
agcttcatgatcnttgattntcttttccaagccctcaattataatctcattctttntatcttcgaggtcttgttgcattctctgggctttgcttagcagcatactcagtgcaaaatagccttcatcagaaatctttgcttcatcacaaaagattaaaaagctgaggaaaaaactttaccttaaaattggaatagaataagctgccgacgatatgttgtcgtcggtagctgctaatgtcagcttcaagctttggaaaaccaacactcttcgacagagtgctgataatctttgccctagtacggtcttgaatgcatcctaaggcttcttcattgattcctccaaagagcatggctcctgtgtggagccacaggatatagcatactcctgcagctccgccttctcggccttggataattcttgaccaactagattctgaaagctg

SEQ ID NO: 23406 - DNA, 529 bp, Zea mays
  unsure (1)..(529): unsure at all n locations
ccgcagcaagggtcaaactccgcaagaaagaagctcctaaggcaacaagtggagcaatcaacatgaacaaagaanaaggtaaagattcaattagtcatgttgtttgcactgatcatctctctatgttatccaagagcaaaaagagaataggaaaaagaaggtgcttcaagtgcaatgagtcaggccacctcattgcatcttgtccacacaaagacaaggatgaanggatanngagatgttntggatgcaatgacaaggaccatatgatcacttcatgtccgttcatgataaatcaaacatgtgcaccctccaggctgaccctcactgagagaaaagagaaacagcaagcgtcatgtcaggttgagcgacgttntagctacatgtggngtgagcatggtcatctacctaaggtatgtaataagggtaaggttcctatagcaagtaaattatctcaatatttattcggtatgagacccanatcatacacttgtgctagaatcagtacgagatcacctagaactagcacaat

SEQ ID NO: 23407 - DNA, 377 bp, Zea mays
  unsure (1)..(377): unsure at all n locations
agcttctaaagggagaacacattntatgactaacaaatgttctatttgagaaagacagagattgtagcgcatgccaagcaagaaagcaagttggcactcatcatccgcataagaacataatgacgaccgacaggccactggagctcctgcatatggatctattcggcctgatcgcttacataagcatcggcgggagtaagtactgtctagttattgtggatgattattctcgcttcacttgggtattctttntacaggaaaaatctcanacccaagagaccttanagggattcttgagacgagctcanaatgagttcggcttaaggatcaagaaaataagaaagcgacacggaacggagttcaagaactctcaaatc

SEQ ID NO: 23408 - DNA, 457 bp, Zea mays
  unsure (1)..(457): unsure at all n locations
gggatattattcatcanaacactacggatattgtcgcaatagataataagtcttcttcacgaagcatgaaaagaagggaaggtgtttttcgtcaaagactcaaaaacggtacgtatgtaaaatntcatgcatcgtaaagaattgaacaatacaaataggtatattatatacagggctacaagatgttacacatgttacatttcagaagtttttacaatagtacttaatcttctctcagaacaacatctgcagcttcgttcaggagccgattaacaacttcgtccatgatggcttcagccatctttntaatttcgtcatctcctttcgggtgagggcccggagacgctntagtaggatctgaaggaggacaggatatggctacattgctattacaaatngcgaacgaagtttataaccaaaaattacaacacaatanaaaccatttagtaatacctat

SEQ ID NO: 23409 - DNA, 280 bp, Zea mays
  unsure (1)..(280): unsure at all n locations
ttcttttcaattgccaaggtatcaatagagggtttcaaagtaattacctctatatctttaatgtgaatcaactctngcagctctaaggttctctcctctttaagggataaccagtcttcttgagcatcaagagttgccttcttttatctaacgtttccattaattttgtgataacaatgtatccattaaagccanattctttaatcatttcattttcatggcaattgatcatctcatcatcanttgaaaatcatactaaataaattacctatctcctttg

SEQ ID NO: 23410 - DNA, 407 bp, Zea mays
  unsure (1)..(407): unsure at all n locations
ntatcatatggacgtganaagtgccttcctcaatggaccgatcaaggaagaggtctatgttgagcaatgtcggngaccataattaagggtaccctcaagacgcctaattctcatctggtaacccccatcaacataaaactgcaaaggcctgatgggtacgaataagctagggatcagtccacacgagtgactcgatcacgctgtacccgagcccagcctcggtcataggcattctagctctagatacttccgtctcgcacgaaggcccccgttttacgtgtgacacatcaccggctctgccgatgacttggcttctctcagaagcaaccctgactgaatcgccacaccgtctgaccaaatctcaggatcatataacacataggtggtctgacatctatattctgaca

SEQ ID NO: 23411 - DNA, 433 bp, Zea mays
  unsure (1)..(433): unsure at all n locations
agctcttaaacacttttgagtgattatcttaacttggttttgtaagtcctatgttcatagcaactttaaacatgtnttatgttacaatgtaatgcaagagacaacataaactctttttagctgaaattgcttagatcaagaatattacgattattcttcaacataaaaagtgtgtttcatctaatggattatgaagatatccggtaattgattatccaaccttcttctaatgctatgtcctttngcaacatcatctctaagtaaatgatgatgaatgtcaatgtgcttggtgccggtgcgagagtgttgaaccaaactattagntaagtttaaggcaatatctttgccacatacaagaggtacttttcttgaactatatcatagtctagaagtgttcgtttatgtagaaagnttgacacaacatgcacccacg

SEQ ID NO: 23412 - DNA, 404 bp, Zea mays
  unsure (1)..(404): unsure at all n locations
cttcatccncacatgtgctaagcggcgatgccacagccagcccatgctagtcttagctattaagcatgcatctagaccggccctcttctttgcaaaatctactaaataaagtttgccgtctaatacacccttaaaagctagtgaaccatcacttcttctaaagacagacacatctacatttgtaaatagacagttatatcccatatggcataattgactcacagatagcagaatatatccaagagactcaactaanaacacattagatatggagtgctcattagaaatngcaattntacctaaaccttttaccttgccttgattcccatcaccgaatataattgaatcttgggaatccttattcttgacgtaggaggtgaacattntcttctctcccgtcatat

SEQ ID NO: 23413 - DNA, 399 bp, Zea mays
  unsure (1)..(399): unsure at all n locations
gcttcgggaagaatatcccgccgccaagttcatcctctgctctccctgctcgccggcagaagctcccagccgagttccagccgtcggtctcatcccgtcgtgggatatttcctgctccctcctctgccttatctccggtctgatatttcccgcggtcgtcttcatctcttgggattttatcctcccgtcgctgagtttttccttctctgaagtctgtaccgcgcctgctctctctgttcgtcttccctacggcgccctcttcagcccgcggtgcctctctctctctcgccgtggagctcccttgcgtcgtcctcagctgaccgcggcatcgcatgctctctggcgcgcccatctccccaagccgcgtnccagcgcgccgcagaatcctccttgtgctct

SEQ ID NO: 23414 - DNA, 439 bp, Zea mays
  unsure (1)..(439): unsure at all n locations
caccttcgtcattctacataaatcaaggaatcgtgagtaaaaatcaagtgcaaagaanaaggtaagtacgaagtattatttcttactggttcaagatgacttcgggcttcgtctccagctttctctcgaccgccctttgtccatanccattttataaatctattggagatacttcgggcgaggtcgggcatatcatccaggattgatgaagataaggtganattgggcctgttgacaacctttccatgttcgcagccggctttcagaaatgcagcagcggtaccctgagaagctacccaggcacagaagtcgccgtgcccggctataacttcgtcaagctcttcgattcagcttaatatgatcgaaggcctgggaaatntccgccgaaggtaaattccactgtggctcacagagaaaatttcttatcgtcatcaatatg

SEQ ID NO: 23415 - DNA, 394 bp, Zea mays
  unsure (1)..(394): unsure at all n locations
tgcaagcttcttcaagctgggcttcggttcccgttgagcagatttgttgttgaagttttaaagacatatcnagatttccttcaccagattactcctgaagcaattattataatggggatcttcgtctgggctgtgagaagtcaaggtctggagccaagtgcaaaatgttttagcagcatgcatgaactttcgtatgagacngaagccctgggtaaggaacagtatcataaccaatttggttgctatggcttcgtttctcgttctggctcaagctaccgagtaccaacttttcggaagaggtggcccgaggcctggatggaagagtggttttatgtaaaaaatgatttcaaggcgagagaagatattaaagagatcatcatgcgaccaatctggt

SEQ ID NO: 23416 - DNA, 514 bp, Zea mays
  unsure (1)..(514): unsure at all n locations
cttaatgtatntagaagtctnggtaaaggttggtatgaattgngcaatgtttgatgcctaaacctcanaaccctagtcttctagtgatgcctgccctaggaacttcagttctgactccaaaaaccatagtttcctggagtcccgtgaatgaaaattatattcaagacataagataatgtacttttattatctttgcatttgcataagcattacatgagcattcatgattatatatggttatgtatnagaaacgaagaagaggtagaagttgaagaggcaagagctacaccaccaccacttgaagaaccaccggccgggaattgcttttatttgacatctgtgagcagagcccgactacctatacacaaggcagccccgggcatttgcacctccttgctatttaaatcttctcacngcttgatcattangtgatngagtttgtgctaacanattgctgcattccttcttgagaattgataccttccttgatccttgttataaaaggttttcttat

SEQ ID NO: 23417 - DNA, 441 bp, Zea mays
  unsure (1)..(441): unsure at all n locations
gaaatcccatacttttagctatcttccggcaaatggatatttctttgttgtctgggagacagtatcggaaatcatcttcgttagtgccattaaacactaaggcccctttcggatattttagtttttaggcatagtgtctggcttccaggatttcttcttcggataattttttccccgaagcattgtcgaaaatgtaatcaacatcttcgactgaagcttcgagggcaggggaatttgctttttctgccataccctgccctgctgccatgccggtatgtgtagtttgttgatcagctttgtctttaggcacgacagccttcgtctcaatgggcactacaggcctagcttcggctttggcttggaccttagaaacttctgcaactttcttaatangagtaggggtcaaggcctttgtggctccataacagcgtctagcacgct

SEQ ID NO: 23418 - DNA, 473 bp, Zea mays
  unsure (1)..(473): unsure at all n locations
gttcttatccggtatatggaanaatagcagataggaaattagcatcgaagaatccatgtaaaatagagagaaggttcgagttttagtanccttgttatacttgcacaaaanatatgtgtgttataatgtctgaccattttgcatgctcgaagggcggctgaaaaagctgcaagcatcatgaaaatnttatagaccaagaaggtcgaaggtactttccctctttacctctgttggatttctttgtgttcatgtnggaaagttgtcctctaacttttgttgggaagtttctacttcacaagtcataatttaagtaaagcatactaatgccaaagctgaagatgctgtctgtgaaaccaaagcaatagctgttatgaccgcgaagaaagctacagatgacactatcttcaaannattgtgaacaaattatgatgagatgatgcagggccataaagaaaaccgatgagatgatgcat

SEQ ID NO: 23419 - DNA, 364 bp, Zea mays
gctttatcaaatggacgtgaaaagtgccttcctcaatggaccgatcaaggaagaggtctatgttgagcaacctcccggctttgaagacagtgagtaccctaatcatgtctataagctctctaaggcgctttatgggcttaagcaagccccaagagcatggtatgaatgccttagagattttcttattgctaatggcttcaaagtcggaaaggccgatcctactctatttactaaaactcttgacaatgacttggttgtatgccaaatttatgttgatgatattatatttgggtctactaacgaatctacatgtgaagaatttagtaggatcatgacacagaaattcgagatgtctatgatgggg

SEQ ID NO: 23420 - DNA, 419 bp, Zea mays
  unsure (1)..(419): unsure at all n locations
agcttgtggaggttcttcatccncacatgtgctaagcggcgatgccacaaccagcccatgcaagtcttagccattaagcatgcatctagaccggcctcttcttttgcaaaatcaaccaaataaagtttgccatctagcacacccttaaaagctagtgaaccatcacatcttctaaagacagacacatctacatttgtaaatagacaattatatcccatattacatagttgactgacagatagtaaattatatccaagagactcaactaaaaacacattagagatagagtgctcattggatattgcaatcttgcctaaacctttcaccttgccttggttcccatcaccgaatatgattgaatcttgggaatccttattcttgatgtaagaggtgaacatcttcttctcccccgtcatatg

SEQ ID NO: 23421 - DNA, 324 bp, Zea mays
  unsure (1)..(324): unsure at all n locations
tattcgtcatggtttcgggaaagaactatcccaagaagaaatgctagaagcacgacactacgcctaaaaattgaaatatccgaagggggcgttagtgttcaatggtagtgatgaagaagattttctgtactgtctcccggataacaaagaaatatccgtttgccgggagatatgtaaaagcatcggattcccgaagctagaagacgacctttcgantttatcgaaggatgaacttgctgacaacttatcatacaatagcataaaggtataaaaattaactttacaattgaaaatgaggtatttcattngtcatactcaattcgc

SEQ ID NO: 23422 - DNA, 404 bp, Zea mays
agcttgaagctgtgtatagattaccgccctcttaatgcggttactatcaagaacaagtatcctttgcctcgtattgacgttctctttgaccagttggtcggggccaaggtgtttttcaagatagaccttcgctctggctaccatcagatcaaaatacgagcaagtgatattccgaagacggcattctcaaccagatatgggctggatgaatttttggtgatgtcattcgggctgacaaatgcaccagcatacttcatgtatctgatgaattctgttttcatgccagaattggacaagttcgtagtggttttcatcgatgatattctggtgtactcgaagaacgaagaagaacatgccgggcatttgcatgtagtgcttcaacgtctgcgagagcaccaccttta

SEQ ID NO: 23423 - DNA, 444 bp, Zea mays
  unsure (1)..(444): unsure at all n locations
aactaagtctgaggtcattggtgggattcattcctgcatatctttataacatgccctngcgagccattagattcatcaaatgtcacgtctatcgctatttcaacaagaccggtggtattggtgaaaacacgatacccatgctcatttgatgcataaccaagcaagataccctcgtccactctaggagcanaacttgagctcttgactntcttggtaagaataaagcatntacaaccaaatactctanagtaatcaactttaggtttgttaccagtgagaagctcgtaggtagtcttcttgtagatcttgtgaagataaaggcggntgattgcatgacaggcggtgtngaccgcctctacccanaaatggtcaggtgtcttgtactcatccaacatggttctagcggcttcaattagtggtcagttcttcctttccacaacacca

SEQ ID NO: 23424 - DNA, 393 bp, Zea mays
  unsure (1)..(393): unsure at all n locations
agcttatcgtatgagggacgagtacagtgcaccgcgcatcacgggcgcactgtttcggcaatggagtggacaggtgcgccgtctgcagggtggccttggcgccgcttgccagtggaatgtacaagacgcaataaatgtcgtggggggcaaatcgcctgtcagaagggtggacaggcggcgtgtcctctccgcaataaatgcggaggccgcgcggccgagagcccttacgtcatgctccgcccgctggtctacgtcacggacaataagccgggaggcagcattagaccctcgactgagtggggagcggaggtgctccggatagagcttggacacgcgtcaataccggacccatgcctangtcacgacacttcatctnctgtggccttgtatggg

SEQ ID NO: 23425 - DNA, 446 bp, Zea mays
  unsure (1)..(446): unsure at all n locations
gaccttagatactaagcttgtaaagggtaatgtactatagcagtgaccgacataccacgtatgcccaacaataatttgttgaatgactcggccatgttactacactagaactcatatctccatccacctaagtcgtgagctctcgtccacttctccaaatccggcatcaatccattcaaccaatctctgccttcggcatttgttgcgactttgagcttttctaactnttctctaaagaacttgtcttccagctggcgacatgtctcctagaaaatctcanagttatccttgacaccatccttacgcagaagattctcagcaaggtgtcgattacaccacctgtgatgcataggagggtacccatcgatctgctcacggaccgcgttgagtattccctggtgccgatctgatattacaccaacttcccgtcctaggccaaccacatg

SEQ ID NO: 23426 - DNA, 471 bp, Zea mays
  unsure (1)..(471): unsure at all n locations
ccttcggctatcttatacaaacagcttcagccgatgaccacttcttcctataagaccttcggcgacgaagcatagacccaacacctgtggaactgcgggttctattntataaaaacaaagggtttctttaagaaagtcgcctgttcgaaggggtatcgggtactccccgccgttggatctgggtttagcgcatgggattagatctccacctctatggaacaggataccatggtagccacgagatctagcatcaacggttcagatcctatacaatcgttgtggaatcgtacacacaggttcacagatgaatggtcagggttccctgttaatcctagcccttcaaaactgatccagcggcgacagtgttatcttctttcccaagcgaccgagcccagtggcgcgggactccccagtatcttctctctctcccgttggtcaaccggcggacctatgcccgaccaacacccgaca

SEQ ID NO: 23427 - DNA, 425 bp, Zea mays
agcttgaaaaagttgagggtacctcgacttcatcttttggtgcagatattgatcctatggcaatagaccttgccatgagaatcgtcagaaggatgttcctcaaaatgaaggaagaagaggcgaagaacaagattgaagaagaagaaaatgattgatggagaccaaacaacgaatccacctcttgacaaggttcgtctttcaaatccacttctcatatgtgctttattgctaatgggagcgacaatgaaagcgaaagtgaggatgaagaggagcaagaaagtgatagtgaagatgaggatgatcttcaacaattcttcgcccagctaagcaagaaacatcagatgagcttgttcaaactcatgaaaagagcagaagaacaaaaagaaatgcttcataagcaagaagaacttctcatcagaaaaatc

SEQ ID NO: 23428 - DNA, 434 bp, Zea mays
  unsure (1)..(434): unsure at all n locations
gcttatcagactatcttcgtctttgggagatgctttcaagctntgagttgcatcctgacagggaggataagcaatatttcagcattgctccagatggaagatactctgcaaggtctgcctgtaaaggtctttttatgggatcatgctattttgggcactataagcgagtgtggaaaacttgggcgccaccaaaatgccgttnttttcatttggcttgttgctcagaacagatgctggacagcagatagactcgccaagagaggattaaatcacccaaacaaatgccccttatgtgatcagaatgctgaatctataaatcatctgcttgtctcgtgtcgttgccagggttntctggtataaggtgctaagaaaagttggatgcactccttagctcctcagccaggtgctaccttgttatagactctntctatggt

SEQ ID NO: 23429 - DNA, 432 bp, Zea mays
tagcttagacagatcaaggccagatagattcacgccacggaacctgagctcttgcgtttgtatgcacttgatcacgtcctttcgtgtcaattcagcctccgaattgtcggtttccttccaacccagcctctcgtttatgtagtcgactaaaccctagagcagaaaccatcgcattatgaacaacagttgattgggatcaagatttgtaagaaaacgagacgcaattgagcgttagtttatatacgagcaactggtagtactctgcctctcgcagcagctgctggtagtcggactcggacagcacggggatggcgccgtccctgagccaattgagcacgtggcggaagtgcttcccgtccctgtccacgaagaccactccctttccctagacacaaaaacagaaaccactcaacccatccactagacacaaag

SEQ ID NO: 23430 - DNA, 468 bp, Zea mays
  unsure (1)..(468): unsure at all n locations
ctcaagctgtgaagattcttcattccaacgtgggctagtcagcgatgctagagccaacccatgttagtcttaacaattaagcaagtgtcgaggtcagctctattgaaatcaactaagtatagctgaccctttaacactcccttaaaagctactgaatcatcacttcttctaaagacaagaacacctacatccgtaaaaagacaattgtagcccattntgcataatggagaaacaganaagcaaatgtaatctaatgaatctacaagaaaaacatnggaaatagaatggtcaggtgatatnagcaatttacccaatcctttgaccaaaccttgatttccatccncgaatgtgatagctctttggggatcatggttnttctcgtaggaggagaacatcttcttcttccctgcatgtggttggtgacccactatcgatgatccaacttgagctcccggatgcataaaccta

SEQ ID NO: 23431 - DNA, 419 bp, Zea mays
  unsure (1)..(419): unsure at all n locations
gcttcggcatctttgcttattccctcttcgtgagcccctggcgtccaatcagcgatgaaatccgctaacgcttgagattggattgaagatctgtgcacgtagtcaatagtgaattcattaagctccacggcccattttccaatccttccagtagcttctctattcctcatgatatccttcaggggttgtgatgaaggaacaattatgtgatatgcttgaaaataatgccgaagcttcctggacgccattagcacagcatacaacaccttctccaattctgtatagtttttctttgataagcccaaaacttcggagacaaagtatactangacttngcttttagcttgtccttcgagcttctcttgtacaagtgccgcactcactgcagagtgcgaagctgccacatacaatagcaatgg

SEQ ID NO: 23432 - DNA, 478 bp, Zea mays
  unsure (1)..(478): unsure at all n locations
taccgcattngaagcatgagcgcttccnctnggctntggtcttgctnggctgtcccttgcgacctttaagcaccgtcttngaatatttgatgatgagagccatctcttcatcattaagtccggccgcctcaatctatgccaccttgcttggtggcgcctccttgcttcgtgttgccttgagagcaagtggttgcggctcgttgaccggaccattcaatgcgtcngncacgtaccttgcctccttgatcatcattcgcccgctaacgaatntcccaataacttcttcgggcgacatcttggtgtacctgggattntcacgaatattgttcaccaaatgaggatcaagaacggtaaatgaccttagcattaggcggacgacgtcgtggtccgtccatcgcgtgctcccgtagctncttattttgtngataagggtcttgagcctggtgtatgttgtgtcggctcctcgccccttatcatc

SEQ ID NO: 23433 - DNA, 335 bp, Zea mays
aatacgaattgattctagcctatctacgggtgcataggtttcaccaaaatccaaaccttcgacttgtgaatatcccttggctacaaatcgggctttgttccttatcaccacaccatgctcatcttgcttgttgcggaagacccacttggttcctacaacattttgattatgacgtggaactaaatgccatacctcattcctagtgaaattgttgagctcctcttgcatcgccaccacccaatccgaatcttgaagtgcttcctctatcctatttggctcaatagaggaaacaaaagagtaatgttcacaaaaatgagcaacacgagatcgagtag

SEQ ID NO: 23434 - DNA, 521 bp, Zea mays
  unsure (1)..(521): unsure at all n locations
tagagttctttgatttctgtgagcaaaagagcattcagatcaaatatgcctcggtggcgcacccaagagccaacgggtaggtcgaaagagctaacgggatgatattggaggcgctcagaaagaaagtcttcgacaagaatgaaaagttcgcatgaaagtggatcagagagctaccgtatgttgtttggagcctgagaactcaacctagtcgagctctgcatggaaacacacctttcttcatggtctatggttcggaggcagtgctacctgttgatctcaagttcggggcaccaaggttaatctttgaaaacatagcagaagctgaagctactangctggaggatgtngatgtactcaaagaagagcgactgaatacngtgattcaatcagcacggtatcagcacactctgaggctganagggaattangcttacacctatttcctaatngatnnttggtggtgaattgcccaacacanataatgggactatactagtntctctagtctataagttatacat

SEQ ID NO: 23435 - DNA, 493 bp, Zea mays
  unsure (1)..(493): unsure at all n locations
tattcncattctcattcccccgtacagcccacgtctgctaaaattaataaatacctattaaggctgcaagagttccgtgttctaccaccattcctgttctgccattcccgttcttgccaccattccagtcctttgttctcattcccatgttctgtcacccatgttctgccatcattntatgttctctcattcctattctttattctgtctttctcatttccctccccgcanagcttattcccatctcattcccccgtacagcccacgtctgctaaaattaanaaaacacatatgtcctcatggngaattgaacccgtgacctctcaagcanaggccaagagtagctaccgctacaccacatngtgtgttatgtctgcatctgtgacangaaacacatctactacatctctcaccaagctcacttgctacccttgcacaatgcgtagtagtatataagtatcaccaagaatcttnngaatatattttggatgga

SEQ ID NO: 23436 - DNA, 282 bp, Zea mays
  unsure (1)..(282): unsure at all n locations
tatgttggtcatattagcgaattatctttcttctgctcatctggctatgatcacaagcttttgttgatggaatatctgcccagctgagatcctgcggtgcttgctgttccaaacaagctctgtctctgatgcagtggaacccattgctgctccagaaacagatcgacgacttgaaggcgtcaaatgctggntagtgatcttgcagcttatctagatggtttattgggcaacttgttcttaactatgcatnccctttcagttgtgttgaagatatggcacaac

SEQ ID NO: 23437 - DNA, 520 bp, Zea mays
  unsure (1)..(520): unsure at all n locations
atcaagctcgttaccgaaaacgatctagcaccgcgatatgtgctactggtgggtctatgcttcgtcgccgaaggtcttcaagggagaagcggctntataatgtgtgaacaggtatcttcggacttgtatcagaaagggagaagctcanaagatacaaaggttgacacagcgccgaagctgtgaagcatgaaagcttcngcatgttcgcagaaaagggaaccgactttacagatgaaaggccatntatacctcgatagagtgctatagaattatcaccaaatgtaaagggcatgtatgtaattntgtatgggtngtaccccgtgcctataaataagtgaacagtacccccgtactgttcacgctgactnggcattttgcttttgcgtcatccttgtattttcatctcctttcaagccgaaggtaccattataattngatattggtcttatttctctatgatgatataataaaagtaaatgaataatggtatatgagtgttcatactatcttttatgttcat

SEQ ID NO: 23438 - DNA, 452 bp, Zea mays
  unsure (1)..(452): unsure at all n locations
agaacacgtgataagtctaacttatgtgcaattcgaaaaagatagaccttgtgcagcttgtcaagcaggcaaacaggtgggaagctctcatcacaccaaaaatgtgatgaccacatcaagaaccttggagatgcttcacatggacctcttcagacccgtcgcctatctaagtataggaggaagtaagtatggtcttgttatagntgatgattnttcccgcttcacttgggtattctttttgcaggataaatctgaaacccaagggactctcaagcgcttcctaaggagagctcaaacgagtttgagctcaaggtgaaaaagattaggagcgacaatgggtccgagttcaagaaccttcaagtggatgagtaccttgaggaggaatggatcaagcacgagttctccgctccttacacaccacagcataatggtgtggtagagagaaaacaaga

SEQ ID NO: 23439 - DNA, 368 bp, Zea mays
  unsure (1)..(368): unsure at all n locations
ctattataagccaactcaatatatggcatacattcctcccacaacctcanattatccttcanaacagcccgcaacatggtagataaagtgcgattaacaacctctatttgcgcgtcagtttggggatgacaagtagtagaaaacagcaactttgttcccaatttataccacaaggttctccataaatgacttaaaaacttagcatccctatcagagacaatagtatttggcacaccatgcaaacgcacaatctcagtgaagaacaaatcagcagcatgtgaagcattatcagttntgtgacagggtataaaatgtgccatctttgaaaaatgatcgacaacgaacaanacactatcacttcccctctt

SEQ ID NO: 23440 - DNA, 359 bp, Zea mays
  unsure (1)..(359): unsure at all n locations
agaacacattntatggataacaaatgttcattttgagaaagacaggatttggagcgcatgccaagcagggaagcaagttggtacccatcatccgcataagaacataatgacgaccgacaggccactggagctcctacacatggatctattcggcccgatcgcttacataagcatcggcgggagtaagtactgtctagttattggggatgattattctcgcttcacttgggtattctttttgcaggaaaaatctcaaacccaagagaccttanagggattcttaagacgggctcaaaatgagttcggtttaaggatcaagaaaataagaagcgacaacgggacggagttcaagaacactc

SEQ ID NO: 23441 - DNA, 411 bp, Zea mays
  unsure (1)..(411): unsure at all n locations
gggaccgctcggaggcgaactggcgggacgctgccttggtgcgctcctncagctgggtacgccagtcgctgaggcgctggtgttcggcctcgagcgcctnccactcccgcaggatcgccacctcagtctcgtgaagagcctgatgggcgcgagacagcacccgagaaaggggaaccggcgctgcttctggctatgggacagaccagagcccgcacccataaatcacctttgtctctgtcacacccggttntagaangcaaaccgaatgcgaaccatgtacgtgtcaagaacatcaattcacttacacaacagttacataactggacatcatcacacagtgctcaaatgataatatataagggaaataatagtcgattacatcatatgtctgagacgtcacatagtccttac

SEQ ID NO: 23442 - DNA, 328 bp, Zea mays
  unsure (1)..(328): unsure at all n locations
aactagacataatatcttcagagctcgtctacattccatgatcttggaatgtcatttccttccatgtctttaagcatttatgaccctaatctgttcaaagctattacgagaaagagtccttcccactttacttgcaattttcctgttgtgtntgggttggctacccttcagaggacaagatgtcctggtgctacgttcttgagttttacttttctgtctcgccacctcacgggttctgcctgatatttccttatgtgcacgatcgcctctagcctcagttcctctacagcatccttcgagactttctcattgtccgaattttgtgctg

SEQ ID NO: 23443 - DNA, 438 bp, Zea mays
  unsure (1)..(438): unsure at all n locations
agcttctaanagtagaacacgtgatatgtttaactaacgtgcaattcgaaaaagatagaccttgtgcagcttgtcaagcaggtaaacaagtgggaggagcgcatcacagcaagaatgtgatgaccacctcaagacccctggagctgctgcatatggacctcttcggacccgtcgcctatctgagcataggaggaagtaagtatggtctagttattggtgatgacttttcccgcttcacttgngtgttctttttgcaggataagtctganacccaagggaccctcaagcgcttcctcangagagctcanaatgagtttgagctcaaggtgaagaagataaggagcgacaacgggtccgagttcaaaaaccttcaagtggaggagttccttgaggaggaagggatcaagcacgagttctccgctccctacacaccacagc

SEQ ID NO: 23444 - DNA, 546 bp, Zea mays
  unsure (1)..(546): unsure at all n locations
ctaagcttatgcaactgctgncagaaatgagaagtgaactgcgttcctctgtctgacactatcttctttggcacaccatgaagaccaacgatccgagacatatacaattctgccaatactgcactgctatagttggtcttgacaggtatgaagtgggttgacttggtcaagcggtccactactacccaaatggaatcgtagccggctcgagtgcgaaggcattcgactatgaaatccataccaatttcatcccatttccactgagggattctgcacggtggcaacaatccanctggtctctggtgctctgccttaattcttcgacaactatcgcacttagccacatgctctgcgatntccctcttcattccgtaccaccaggaatttcttcttcagatcctgatacatcttctcactaccagngtgaatcgaataagctgtctcatgagcttccttaanggatcaactccgaatagactggacattgngaacacancagcggtctntgaaccatatacgccttctgcatcttctcgaanatctttg

SEQ ID NO: 23445 - DNA, 417 bp, Zea mays
  unsure (1)..(417): unsure at all n locations
agcttgtgaaggttcttcatccctacatgtgctaagcgacgatgccatagccagcccatgctagtcttagcaattaaacatgcatctagaccggcctcttcttttgcaaaatcaactaagtaaagcttgccgtctaatacacctttaaaagctaatgacccatcacttcttctaaagacagacacatctacgtttgtgaataaacaattgtatcctatattgcatagttgactaacagatagcaaattgtaccaagagactcaactaanaacacattggagatagagtgctcattagaaatngcaattntacctaacccttttaccttgccttgattcccatcaccgaatataatngaatcttgggaatccttattcttgacgtangaggtgaacatcttcttctnccccgtcatat

SEQ ID NO: 23446 - DNA, 405 bp, Zea mays
  unsure (1)..(405): unsure at all n locations
agcatccccacccttatcacattcaatggtttaacaacagcggtaagttcaaggtaacaaaaacagcaagggtgcattnttctattggctcttaccatgactttgctgatttcgatgtggtgactatggatgcttgctctcttttactgggacgtccttgggagtttgatactgatgctattcaccatggtagatctaataaatatactttcatgcataaggganagaaaatngtgtngcttcctatgactcccactgagaatgtccactttgaacatgagaaanagactaatgctaagcaaaaaggtgttttgaactctgaanatcagcaacctattaagttaanaactcctacttntctagccactaaatctgatcttgatgaagtacatgcctctcttggac

SEQ ID NO: 23447 - DNA, 376 bp, Zea mays
  unsure (1)..(376): unsure at all n locations
tatgcccctttctttgatgggtgcctaagagtcttagatggtacacacattccaactcatgtatgtcatgagtcgaggcttgaacacataaatagaaaaaggtggcctaactacaatgtattatgtatagtggaaatggatatgcggntcacttttgtaggtgctgggttgcctggttattgccatgacatggcagtgctcatgagttgtatgggagaagcgaactatctacacccaccagcangtatggtggcatgcatgttatgttggcattacacattgtattcatgcattacgatctagtaaatctttntctgaagttattttgttgtgtatagggaggtattatctagtggatgtcggttactcaattcgt

SEQ ID NO: 23448 - DNA, 454 bp, Zea mays
  unsure (1)..(454): unsure at all n locations
ttcattcttcttcttcacaaatagtgctggacagcctcaaagcgatatgcttgggcgaatgaatcccttatccagcaactcttgcaactgcttcttcaactctgccaactcagcgggtggcattcggtagggcctcttggaaattggggccgttcccggttgcaactcgatggcgaattcaatatcccggtccggtggcattcctggcaattcatcaggaaagacatctgcatactcacagaccactgggatcttcttcangggtaactccgtcatagagaaagcacatgactgagaagaaccctgactaggcagaatcaaagagaaattcccgcagaaaggagaattaacttccacggtacgactggctacatcaagcacaacttggtgcaaggtcatccaatttgctcctagaataatgtccacattttccaatcccaacacaagaagagtg

SEQ ID NO: 23449 - DNA, 447 bp, Zea mays
  unsure (1)..(447): unsure at all n locations
ataaagtcttggatcactctntttggtgatctgaatattaagttatggatgtttaaagtctgaatactgaatctgtctaattctggacatcaaagccttctagtgtcttttgtccttagttaaatattgaatcaccttgagatgattataaatgatatgtagacaattttattacctttccagaaagtctaagatcaatntgtttggatgtctgaacctgtagttgtgaaattttgaagtcgcaagtctgaatctggccaacctggacagacctgttatttttgcacagttcgactttgctaagagtctagtcatattgagacgataataccanagttgtagagcgtttcccaagatttccaaaaaatattttgtcacttattttagataaatattngaagaagtatgactganacaagcaactgtngtgctgctgtcctaaatgtg

SEQ ID NO: 23450 - DNA, 439 bp, Zea mays
  unsure (1)..(439): unsure at all n locations
tcgganagcctatgcttctcgccatctctcggcagacggatagctcttgntatcatgcaggcagtataagaagtcatcttcatttgttccattgaatattactgcccncttcggatatttcagctcctttgcataatggatggcctcatgagtttcttcctcagatagcttntttcccgaagcatgtcgtatgatgtaatcacacatgctggcaggcgcttctgggatggcagtgtccgtctcttcactaaaattggttctgggtattttatcgcttcggcttccaaagtttcttccttgaagggctctgaaggcccagcttcagcttcagtttgttgtgtcggagcttcanaggaagcttcagcaatttcaacactcttttttggagntgtgctngaagacttaattgtctncaagacatctagtacatttaccattc

SEQ ID NO: 23451 - DNA, 463 bp, Zea mays
agcttgcttctttggtgagagtcttggcccacaacattggcaaaaaagtgttaccggtgctcaggtgtgccttctttgccgagtgctatggccttaacactcggcaaagtacctctttgtcgagtgttacacttggcaaaatgactagcataccactttcttatttgtttttattatttcatccaaacaaacaaaagatatatcacataatcatcacagatacatcacaaagttcacataatcatcacatacataatagaaaccacatatctcacaaaaaccacaaatctcacaagttttttacaacatgtctatgtccgctaccaagtttaccaatataagtattaccaactctcaaaacataagttttcacagacataagttcagaccaagtttctcacacaagtctcatcagcgaggtgggcggctggactgatgcgacgatgggctggacgatgcatga

SEQ ID NO: 23452 - DNA, 508 bp, Zea mays
  unsure (1)..(508): unsure at all n locations
cagcttaattggatctttttactgtatgtgctaaagttcaaatacaaatatcttgctcctaaatatcacctaaggtaatgctcttttgacattatccattaagttgtatcttgaccttaaaagtccaagagcatgtcttctacaagtattcaaaacttgtatgccaatatttatgggaggctactttatagtttgatatatttgagactaacaccctttacagaggtatcgtatgtgtagtagtattactgaagcanaatggaatcatatgagaaaggcaatgtgcttacactgcanattgatactatatttgcgattttatcaaanacctttagcatcttatacatgctntatccatttgatagactataatattttctagaaattattacccctttcaatatcatatggtnntcattttggtatcatatagatcttgatatataatatcaacataaagggatagctagctattaatgtatgaaaaatatggatcttatgattacta

SEQ ID NO: 23453 - DNA, 91 bp, Zea mays
cttctactcggagtcagcctcatctcagcatagtagtttaaacaatcgggtgagagatgacaatcaagacatgatgcttttcatgatagta

SEQ ID NO: 23454 - DNA, 524 bp, Zea mays
  unsure (1)..(524): unsure at all n locations
tncaatctcctcaagtgtcacaattaagacaagtgatcattagtgattagtgactngngagagtgtgattngtgtttcatttggtgctcttgttgcttagctttttaatcgtgctttcttcacatccttctaaactctctagtgacttgtaaagctagcaagagacaccttagtgtgtggtgatccttacgaggtgtntgtgattcttgagattaagaagaagcactcaatcgatctgagtgatcgattgagagagagaaagggttgtaaaagacctggcccttcgtggcctcctcaacggngagtaggtttattggaaccgaacctcgggaaacaaatcattgtgttcatttgtgttgatcactaacttatgatttgattcttcctctcccctctctctaaagttctcttgttcacaatcttttgagttagcttccanagttatccgcattgattgagcaactcatagcaagaagaactctctntcacactctgtattcattattactctntctaatcctaac

SEQ ID NO: 23455 - DNA, 389 bp, Zea mays
agcttgtaaagccaattacaagtttattgaagaatgatgttaaattcaattggtcttcaaagtgtgatgaagcttttgaacaattgaagacattattaaccactgctccggtattggctcaatcggacatcaccaagccctttgatgtatattgtgatgcatgaggcagtggactcggctgtgtattaatgcaagaaggccgagtaattgcatatgcttcaaggcagttgcgccgtcatgaggagcattacccaactcatgatctggagctagctgctgtggttcatgccctaaaaaattggcgtcactatctgctgggaaatatctgtcacatttatacagatcataaaagcttgaagtatatcttcacctagtcagaattgaatatg

SEQ ID NO: 23456 - DNA, 496 bp, Zea mays
  unsure (1)..(496): unsure at all n locations
tatccccgcccgccgccggccgtgaagctagctgctgctggcgtcgtcttcatcctcatcacaggctatccatctgcttcctgtgtgtggtaagagacgtnnttgtttattctctggtgcctgcgtgcgtagacagtatagatagcaatggttcaatacccaccggccaccgcgtattaatattctatacctatatccgtgacaaaaaaaaattagccctatcgagtcacccatttttacttgtggatatagaatttaccctcatactcatatctatgtgggtataagtcaccggtcgggtcacacatacccacaaagattaaaaatctaccaaaataatatattatacaaacatagagtatatgtatctaaatatcattacaaatttctagcatcattcaatcatcaatttaacaacaccatagataattggataatgtagcaacactaggataataccatataacacattacatgttctattacatggtcatta

SEQ ID NO: 23457 - DNA, 358 bp, Zea mays
  unsure (1)..(358): unsure at all n locations
actccatattccctctctcggcctggttcccttcgaagcaatccacgcgacccaggggatctccacaacgccgactagcgggccccctgctagtctcacccgtgcgctcgcataccccctggaaccgctggcaatcgggcctgctcgaacgggtgcttcgtgaggcctttgtttcgccgcgccgggggcccatggtgtcaggggcgtcctctacatcagaacgcaataaactgggcgccggatttgggttgtgcgttggccgggatctcgccatcatgngactccgctatgagatctcatcctgccattgctatctcgcccagtgcatatagcagccccccccataccctcaaacaaa

SEQ ID NO: 23458 - DNA, 432 bp, Zea mays
  unsure (1)..(432): unsure at all n locations
tactcagcttgccatagtctcgatgatgtatgcctttagatagtccaagtcttctaaagctattactttntgtgaaactgcattgaaaaagtaacacaagcgtgtgatgacaactttgacatgctcttgttcgagggctcttaccgcaattgggaggaacaccgtcatcatcacatggcagtcatgagagttgtagccaaatagagacaagtccttcatccagactagtctgctgatattggatgagaaacctatgggcactttgaccccacgcanacattngcaaatctttggtctctcctcaactgacatgttgtagctagctggggggaggtaaggcttccctttgcactantccactggatgaagtccggtctggntngaagatctactagaatcattgcgtgattgagtcccgtcttttgcttactc

SEQ ID NO: 23459 - DNA, 339 bp, Zea mays
  unsure (1)..(339): unsure at all n locations
gtagcataggctaataatatgcgaatggactcaagcctagctacaggtgcataggtttcaccaaaatccaaaccttcgacttgtgaataccccttggccacgagtcgagctttggtccttgtcaccacaccatgctcgtcttgcttggtgcggaagacccactnggttcctacaacattttgattaagacgtggaactaaatgccatacctcgttcctagtgaaagtgttgagctcctcttgcattgccatcacccaatccgaatcttggagcgcttgctctacccttgtgtgctcaatagaggaaacaaaagagtaatgctcacaanaatgtgcaaca

SEQ ID NO: 23460 - DNA, 233 bp, Zea mays
  unsure (1)..(233): unsure at all n locations
gacacccgtttcggaatgggtgacgtgcggcatcgaatatgcgcantaccaccccaaacatgagtttggacctaaagaagtggattgggcatgttcgttgcgaataacgataaaatgggtccggtggcgaaaactcgtgctttgtatgcacccccgacacccgttttcggaatgggtgacgtgccggaacgaatattgcgccaaaccaaccccaaacatgagttttggaccta

SEQ ID NO: 23461 - DNA, 384 bp, Zea mays
  unsure (1)..(384): unsure at all n locations
ttcttcaaagctgggcttcggntccccttaagcagatttgtggttgatgttttaaagatatatcaaaatttccttcaccagattactcccgaagcaattatcaaaatggggatcttcgtctgggccgtgaggagtcaagggttggaaccaagtgcaaaatgtttttgcaacatgcacgaactttcgtatgagacgaagccctcaggtaaagaacagtatcataacaattntggntgatatagcttcggtgctcgttctggctcaagctgcctaatgccaacttttccgaagagatggcccggagactggatgaaagaatggttctatgtgaagaatgatttanaggcaaaggagacattacagagatcatcatgcgccccattt

SEQ ID NO: 23462 - DNA, 454 bp, Zea mays
cactcagctgagcgaaccgcttcgctgaacccttggaactggtgatcagcatatccttcaacttctgccatgatgtgattgttcctggccgaagagaggagtaccaggtttgtgcaacattcttgactgccgtgacgaaggatttcgccataactgcagtattgccaccatatgaagatatgggtgcttcgtagctcatcagaaactgtttcgaatctgagtgtccgtcatacatggtgagctggggtggctcgtaagacgggtgccaaggtgtatcctgtagttctgctgatagaggagaagcattatcaaaagcatatattccatgatggaaatcttcataccattcatcctctgtgtagaagccctcttggtgcagctctctgtgctggggccttcgattatgctcatcttgagcaagatgacgtacttcttcggtggcttcgtcaatctg

SEQ ID NO: 23463 - DNA, 327 bp, Zea mays
  unsure (1)..(327): unsure at all n locations
ctgcagcttctcatctgaaagaattttcctgtaagtagagatgatctcagttctccaatcctcgctataaacaggagatatggtgaggactgctctttcaagaagttccaccgaaggtgcttttattgtttcgaagaacacatncgaaggtaagggcagcccctgtgctgctgacttatctagcaaatcagcatgctcattttggtctcgagggatatttttgacagaaaacccttcgaaagaagcttcaactcttcgaaccatatccagatatttttcaagcttcagatccttagccttgcaactcttgtcaatatgacccgaaac

SEQ ID NO: 23464 - DNA, 417 bp, Zea mays
  unsure (1)..(417): unsure at all n locations
cccaggtttagcttctccatctcttgacatanagtggtgtcagaggtcttcattgtaagacaatgacaggcaaccttacngcttagcgcatctgccacaacattggctntgcctatgtgataatggatttccagttcatagtccttaataagctcaagccatcgtctctgcctcatattcaattctgactgggtgaagatgtacttcaagctcttatgatctgtatagatatgacaaatatntcccagcagatagtggacaccaaattttagggcatgaacaacagcagctagctccagatcatgaagtgggtaatgctcctcatgtcagcgtaactgccgtgaagcatacgcaattactcggccctcttgcattaatacacagccgagtccactggcagatgcatcacaatataca

SEQ ID NO: 23465 - DNA, 256 bp, Zea mays
  unsure (1)..(256): unsure at all n locations
agcttgagaaggggacaaccgtatcatgcacaanaccccttcaaaagaataccaagctttctgaaaaggaattaggcttacacctatttcctaattgattttggtgggtgaattgcccaacacaaataattggactaactagtttgctctagtctataagttatacaagtgccaaaggttcacactaagccaataaaaagaccaagaaaagggttcaaacaaagagagcaagggataaccgaaggcaccctggtct

SEQ ID NO: 23466 - DNA, 400 bp, Zea mays
  unsure (1)..(400): unsure at all n locations
ctcagctatttctgaagcaggcgtgcccnnctttccctctgtgaaacaagacaacttcttagttgctgatagctcttgtttgaacttaaccttatgttcatttgccaggatgacgctctccttgcgtaccaaactgcttttgatcttgctgaaaatgaaaaccaggctttccttctaaatgtgcggaatcaccttgatgcattgagttcacatacttctgcccatgtgtaccctgcgagcagacttggtgtacaaagtaatcaaactaatgctgctacagaaccatctgaggatgctcagatgagggatgacataaccatgccaaatgacagtgcttgcactatggatcccaatgcagcaacacattctgataagctgacaaatcaagggtatattgtca

SEQ ID NO: 23467 - DNA, 455 bp, Zea mays
agcttagcaaaagaaatttctagaatcaagaatattgagctcatgcctaagtctggtaaaagattgttcatcaagtggcttggtaaagatatcggctaattgatctttagtattaatgtaagaaatctcgatatcccccttttgttggtgatccctaagaaaatgataccgaatggctatgtgcttagtgcggctatgctcgacgggattgtcggccattttgattgcactctcattatcacatagcaaagggactttggttaatttgtaaccgtagtcccgcagggtttgcctcatccaaagcaattgcgcgcaacagtgacctgcggcaatatactcagcttcggcggtggaaagagcgaccgaattttgcttctttgaagcccatgacaccaaggatcttcccaagaactggcaagtccccgatgtgcttcttctattgatcttacaccccg

SEQ ID NO: 23468 - DNA, 322 bp, Zea mays
  unsure (1)..(322): unsure at all n locations
tcgngnnttctgaaatggctctccgctataatntatcggactgtccggtgtagcaccagactgtctggtgtgccaagcggagtaacggctacaacgccaatggtcatctgcaaaaggtgaacagtgagctacagtgcgcgtacaacgcgcgtagaagtcagagcatgcgtagatggcgcaccggacagtgaacaggacctgtccggtggcccacatgtcagaagcttcaacggtcgaaccctaacggttgggtgacgtggctggcgcaccgaacagtgtccggtgcgcccttcgacagcagccttccacaacgaccactttg

SEQ ID NO: 23469 - DNA, 450 bp, Zea mays
  unsure (1)..(450): unsure at all n locations
agctttatcaaatggacgtgaagagtgccttccttaatggaccaatcaaggaggaggtctatgttgagcaacctcccggctttgaagacagtgagtatcctaaccatgtctataagctctctaaggcgctttatgggctcaagcaagccccaagagcatggtatgaatgccttagagatttccttattgcaaatggcttcaaagtcggcaaggctgatcctactttattcactaaaactcttgacaatgattnntgttgtatgccaaattatgtcgatgatatcatanttgggtctactaacgaatctacatgtnggagaattagtaggatcatgacacagaaattcgagatgtctatgatgggggagtngaagtactttntaggattccagtcaagcaactccaagagggcaccttcattagccaaacgaagtatactcaagacattct

SEQ ID NO: 23470 - DNA, 503 bp, Zea mays
  unsure (1)..(503): unsure at all n locations
cactgaacattatagtactttctcaaggtataaaaccaactaatagagagcaaaaatatatgtgtacaaagacggagctgggctataccccgagaaacttgactgaagggttaacgaagatgctcctgtggcttaaggaagaaaaactaatcaagttttagcgttatttactacacgccatatcacatatctaatgtacactgagacattgggggtgtgctggggactccgcagcactggtaaattgtacatacctggacaacatgtgtatatcacttagaagacacgaccatgctagctctgcaacagataagaagcgctactcctttntcaaggtacctgcaacatgtagttgatgctgtcagttgtgtgcagagtttggagataccatgatattgcattgtntatgactacaagaatatgatcatangaagtacatatnagttggttataactcaacctgactatgggtatatatatanggttataatatgctatatata

SEQ ID NO: 23471 - DNA, 469 bp, Zea mays
  unsure (1)..(469): unsure at all n locations
tatgaagattcttcatcccaacatgagctagtcggcggtgccagagccaactcatgttagtcttagcaattaagcaagtgtcgagttcagctctatcaaaatctactacgtatagctgaccctctaatactcccttgaatgctattgaatcatcacttcttctaaagacagtaacacctatatctgtaaaaagacagttgtagcccattttgcataatggagaaacagaaagcaaattggtatctaaagaatctacaagaaaaacattggaaatagagtggtcaggagatatagcaattntacccaatcctttgaccaaaccttgatttccatccncgaatgtgatagttcgttggggatcttgngttttctcgtaggaggagagcatcttcttctcccctgtcatgtggtttgtgcacccgctatcgatgatccaacttgagccctcggatgcataatacctacaaac

SEQ ID NO: 23472 - DNA, 432 bp, Zea mays
  unsure (1)..(432): unsure at all n locations
agcttgcatgtgctcattcgtgcatgtaaagtctccttgtgagcatgcaagtgataaagcatatgtttgatagccggtggaattaaatgttaaaataaatacccttatcagcatatgtgtttggacaatttgtaggaaccaacagtaaacataagataaaatatatgtaaatgtaactcgcatttgaactatggttgttngatttaaactcgtattcacatccacacctagccaccagaacacacatatttntgttttatactttatactcaagtataatatagagacttttatgaaaaaatagaggaaaaattaanacggggccatgttcaggccaactatgacactttntttacgtgagnttgtacctcgataatttatatgaatttctttgcgttaatatcaatataactatgataactattttagtca

SEQ ID NO: 23473 - DNA, 448 bp, Zea mays
  unsure (1)..(448): unsure at all n locations
tatatctatggcatccttctataaagcacaagctcagtgatatcaaactctattccacagatatccttgatcagctcatctatcttcttctttgcctcctcatcaattcatcatcatcatctgtaaagtctccatataagagtctgacgtgcggcaaccaagtgtcagtactaagtagtcaatagcatgtgaattttcactcaggaacagaattcagctggtacactcacgagtttttcttctataaccgaagtcggcacagcagtgatcgctcgctcccacctcctaacaaaattcagataatttgatataagagagccaaatgatcccaatgcacaagcacaatacaatactgcatcagcatttcctctggatttcaaacctgctggaagttngaaactcggagcanaacanacttaactacggaactagtacgaggagaagagat

SEQ ID NO: 23474 - DNA, 456 bp, Zea mays
  unsure (1)..(456): unsure at all n locations
tagcttcggcagaaggaagaagtagtcttttatgttttgctatgtaaaagcttcggcagaaggaagaagtagtcttttatgttttgctatgtaaaagcttcggcagaaagaagaagtagttctttatgttttgctatatgaagaaaagctttggccaaaagaggaagcggcccgttatgcttcgttgtgtaccgaaagaagggaaggtgtttnttcgccttcggctcaaaatacttgattcgtccacatcaaagcgactcaatcgaagggtaagaatatattacaaggtatgtacaaagttccttgagaacagttcaattgtatttacaaaacttggtacaaaagtatcctggagtttttcctatagtacatttctactgatcttcattaagcttcagcttcggcgacagtttcggcgacataacttaggcatcatttcaccttcgtcatctacat

SEQ ID NO: 23475 - DNA, 394 bp, Zea mays
  unsure (1)..(394): unsure at all n locations
cagcttgatacacncncgacacccgttttcggaatgggtgacgtgcggctaggaaattgcgcaaaaccaccccaaacatgagttttggacctaaagtagtggaatgggcatgttagttgtgaataacgaagaaacgggtccggtggcaaatacttgtgcttgtatgcaccccgacacccgttttctgaatgggtaacatgcggcaacgaaattgcgcgaaagcacaccaaacatgagttttggacctatagtagtggattgggcatgttcgtngcgaaaaacgaagaattggttccggtggcaaaaactcgtgctttgtattcaccccgacacccgtttttggaatgagggatgtacgataatgaaattgcgcaaaaccaccccaacatgagtt

SEQ ID NO: 23476 - DNA, 399 bp, Zea mays
  unsure (1)..(399): unsure at all n locations
agcttactcgacttanggtgaccactataccctgctaccggagcaatcggcttaagtcagcaacaacttatggcggtgcgacatgctcacgcttactcgacttatggtgaccactataccctactaacggagcaatcggcttaagtcggcgacgtcttaagtcggtgcgacatgctcacgcttactcgacttatggtgaccactataccctactaacggagcaatcggcttaagtcagtgatgacttaagtcggtgcgacatgctcacgcttagtcgacttaaggtgaccactataccctgctaacggagcaatcgacttaagtcggcggcgacttaagacatgcgacatgctcacgcttactcgacttagggtgaccactataccctactaacagagc

SEQ ID NO: 23477 - DNA, 423 bp, Zea mays
  unsure (1)..(423): unsure at all n locations
tactaataagcattccgggtctcatgtaccctcacccactctcgtaatgcacatnggtacctttcttataatctttttccattgtgatgattcctatgttgccagaatgtttagttttcataaaggtaaatgttggaagatattgtcttatttccatgcacacacatcttgttatcgtccattcttctttgtttgtccagataattcaacacaatatggatagttgctcaaacacattctgtcatgatattcacaggccccatccaactgtatctgcaaatccccgcccactactatgcacggtcagttcactgttgcgttcctcaagactagtttattcgttagcccactgctccagtatacgcggtgttcaggtagcacaattcatatgaataatcgagttgttcagggtacttatctatg

SEQ ID NO: 23478 - DNA, 414 bp, Zea mays
  unsure (1)..(414): unsure at all n locations
gctggagtggcggtgaaccgacagcacgggcacagagctccgttttatagagaatggggaggagagagggcctcnaggatgtggcaaaaccttccaagttattgggcccacatgcacctgcccttgtctcaaagacctcagacgactatgcatgtgcaccagataacttaaacagatccgtccgagtgttccaaggaccccggataaaccacttatcaccaggatcacaagatcaagttaacacaaatcacacacaccaacatttggcagcagaatttctttattacaaagttacaaggtacaacaaatttacattggttaccggagtaattacaaagtggttcaaagaaataatacttgaaatgttataaatattataagttgaaatatatgtagctcagtgacaatctaata

SEQ ID NO: 23479 - DNA, 477 bp, Zea mays
tcttcttccagttagaggcaactccttgagagagtgattattaatccaaatatttaagctacccatgagagctctattaagattcgaattattcttgtcctcagcacaacggatcatattgaagtcccctgcaatcacccaggaccagggcaactggttctgacctgagaaagttcttctagaaaagccaatttctcctcatctctatgggggccgtagacccccgagaaccacaaggtggtgctgttttccttcataaaacagactgacacagaatgatccagaataccacctctagtaccaatggatggtaagtaaacaaaatccccaaactccgagcccttaataagtcaaacatgacaagtatggtacaaaactaaacctaatgaataaggtacaaaactaaacataatgaccaaaggcatactcatctgaaatgtttcctgcttgatgattggttgcactgttcacatattc

SEQ ID NO: 23480 - DNA, 286 bp, Zea mays
  unsure (1)..(286): unsure at all n locations
attttcactgatanttgggaaaatggtggccgagatatgacccatgaaataatgaagaagagcgaataagatatccacgactctcgagaagcagcgaagaaagctgagaaagctacagaacttgagagacggataggtattggttaatggctggcatcttcggcatttggtttccgggcttcaaactgattaactttttctatcgcagctgagctacctccttcgncggaggccgtcgacccccttgccgatccgggagacaagaaatcgatagaaatcattaata

SEQ ID NO: 23481 - DNA, 502 bp, Zea mays
  unsure (1)..(502): unsure at all n locations
cctctagctgagtggtaggtagtntgaatagcacttctcatgtcccccatgtgagcgatatttaggttggggttaaaaaatccncttgtctgtcccacaccaaaggacgtccggtctcggtcatggttattctcacataggctacggcgctgctgtgtatgggactatgggtaaagtatgggtttggaggttttctcgaacttgcttctcttaatacaatgcctacccccnctcccccatangttgactntntttatgatttaagaaaacaaaaagttttgatattgtgagctttcagtctatnttctcccttttggatgagatctttatntgaagagatgcatgctntatgtagtatttgtctcatgcacgtgcctgcangacccatccacatttgcccctcanaataatcctccatgccctactctntnntgtgcgaacctggctccaactntgtcagagcaacagctgatagatgtttctcaagggatttcatatactg

SEQ ID NO: 23482 - DNA, 420 bp, Zea mays
  unsure (1)..(420): unsure at all n locations
cttacgcttagagtatatgcccctgtttgcaactcatgcatgtcaattagttcgttaccccaggctatgcaccctgttgtagctgtgtaaacataaacaccgcatgagcagttgtttaagcagacagttctgcatccaggctcatctcccactgtagatacccaatatgagaaatcacgccactctatgtttcccattggaagaaatccatccccagactgattggtcttacaacccagaggtgggctcctgatgcaaccttgactncaatttcctgcattccactgctcctgcaacttcggatgaaaacctattgaaataaatgaaatttcgaagtcaggctacagctaatatttatttatggaaaataattaaggtgtcaacagaaatatacatagcactccatgtcttcctgtgtct

SEQ ID NO: 23483 - DNA, 422 bp, Zea mays
  unsure (1)..(422): unsure at all n locations
gaactctntctctaatgtgtcaccanattccaagagaaggtcatcaagactggccagggacatgntcctcgggtcggactggttcctgngagggttctcttcctgctgctcagtctgacatccttggcttttggtcttcttgcgggtttttcttgcgggggcgagcttcttcagtttcttgtcgtagtcccaattgagggtgcggtaagcttcacnggtattggcctcttcgccttcagctagcgagaggctctcttgaanggacgctttntcttctgaaagttccctgactttctgctccaggctntccacctgngagggtatggaggtgcaatggagggcgaggtcatcatattgngtatcaagggtatgaaggtatcctgccatgtagacaatggtgggatcattctcaataagatctc

SEQ ID NO: 23484 - DNA, 446 bp, Zea mays
  unsure (1)..(446): unsure at all n locations
ctactattgtcggcgtatctacagggaattgaaccctctatgcgttatgcatggtgagcgttgaagtgctatcatgacgcgagttggacatctgagcccctaattaacgatatcttatgtctgacatgaatgcttctctacctcctttgtagcactaaagaggcggcattattacctggatatgactctttgttaactctacctatcatcacgccaactgaccatgatctgtcactgagatgcaatcacgtctagccataagcctgcgctggcatgatgagcctagagagacatgtacacactagttgtccttaccatacatggacggtgctcacgagtggggctcaattgccgctattagctcatgagcgcatagagactggctatagccctcatangattgagccacacatagtatattctcattacgtcggacacactactca

SEQ ID NO: 23485 - DNA, 446 bp, Zea mays
  unsure (1)..(446): unsure at all n locations
gcttatgaagattcttcattccaacatgtgctagactgtggtgccagagccagcccatattagtcttagctattaaacatgcatctagatcgacattttctttagagaaatcaactaaatacagcttaccgtctaatacacctttaaaagctaatgaaccatcacttcttctanagacagatacatcaatatttgtaaataaacaattatagcccatatgacataattgactcactgaangtaaatggcaaccaatcgattctactaagaacacattagaaatcgaatgctcggtagtgatggctattttacccaaacctttggccttgccttgattcccatctncaaatatgatcgtgtcgtgggaatccttgttcttgacgtaggaggtgaacatcttcttttcccccgcatgtggtttctttcctattcttattcaccctgca

SEQ ID NO: 23486 - DNA, 388 bp, Zea mays
  unsure (1)..(388): unsure at all n locations
gctttgagatgaaagaccaccacttcagatctatagggttgggttgcgatgtttagctntaatgctagtgctcaaacataataaatgaacatgatgagatgatgatgttatgatatgatgttntgatggttcgtatatgaatctatggtaacctacatgcttgngttgtttcccaagtgcttcacctgggaaaatagtgcatacatganggtagtatgggacaccataagctaattattagaggaacatgaggtgtaatttgctctaacagcatgccatatatggngcctanggcatagtcctcgctccatcaaggttgggtgtcgaggtttattcatttggttcttggtagtaaccaccttgtataggagtactacactggggaact

SEQ ID NO: 23487 - DNA, 383 bp, Zea mays
  unsure (1)..(383): unsure at all n locations
ttatacaaccctgggccactagaacattaatacaggtaagatacaatatgtatagaaagtcgtgaagacacggactttctgtaacactagtcttatgagctagccaaatcttattggtttataacatntttaatagaagtgagaaaaagacaactttggatcaagaggtacctcatacatatatttcaagatcaggggtttcgttgtttcattgcctgataacttggtatattttatctaactttttctatctaatattagntctttaatttgaccggctaatcatagccaaattatgccgtaattagttgagaaccaaacagaaagaaccaaacacacatgtgtcagatgtaaatattcatgttacgagcttatatgctagt

SEQ ID NO: 23488 - DNA, 228 bp, Zea mays
cacgtacgtgcgccccgggaattcctgggaccttcgaagctgccggcagcagccgggagagtctctccgggactacatttggcgattctcgaagcagcgcaccgagcttgccaacatcaccgactcggatgtcatcggcgcgttcctcggcggcaccacctgacgcgacctggtgagcaagctggggcgcaagacccccaccagggtgagcgagctgatggacatcgc

SEQ ID NO: 23489 - DNA, 352 bp, Zea mays
  unsure (1)..(352): unsure at all n locations
cccattgatcccaatagtcaactccccttctatggtaactatgncttgccgtagaaatcggtgtntgcacggggagtctgacttgctccatttagtcgaaatcggtgttttgcggtcaaaggaattatgttcttggtggatttggcagggatctcttacccatggaggatacccatcagtctatagtctgcgtcctttcctgatctgtgtctaggttacctatttctcctttttccgggcctctgattttactccttactgatcacttgatccactatgtctcaattgcatcttgtcatattgtaagctacttggatatccgattcgatgtgagactgatactgtaaccgat

SEQ ID NO: 23490 - DNA, 350 bp, Zea mays
  unsure (1)..(350): unsure at all n locations
agctntattccacattctgggcttgtaaggttgttaggagaaaatgcatcacagtaaaaaccattgcatgtattgatctgttatgaagaaaatcaaatttcaagaactagtttacagcacagacacaattgcaaaacatagcatgctacagttggtcaggtggtttcactggccgaccttgaaaggttcgttgtctgtcctgaagctgatgccgggtacatacttaaaccanactggagacacgaatatgctccatttntaacggaggtgatttcaggaaatggagaaataccccatacccgaagttccactcgccacaaatgtangaccgatgcagagatgtacaaaca

SEQ ID NO: 23491 - DNA, 525 bp, Zea mays
tggatcacactctaatcgcaacgtgtagcgaatacgaacatacagatgcaagcatacacatctatgcataagaacattacaccatacaaatacgtacataatataacatacaaaacgagatagagcgtgttactactgtcacgcgaggaaaaagaaacgcgacggtcaaggctacggtcgagaagttatcgcgtgtacactaaacgagtattaatcataacagttacgtcgatctgattatattaatcaatatttatttaaaatgaaactagagctatcgcacagttttaattagctaaccactaacaattcttagttaaataagtaatgtagataacatcagcgactctaagcgggacgaattagcagagcgagacataatacgtaacgcgtgaaacagcacgaccgtacgcgacctagcgcgtgcaccacgcgtggcatgacagacaacgtgacgacgacgaacccaacacgacagcgtgcatacgacgcgcggacacacgcgacatagcacgctgatgacac

SEQ ID NO: 23492 - DNA, 448 bp, Zea mays
  unsure (1)..(448): unsure at all n locations
acctacaggctcacatcctccnctgatgtgggcccggtggccactgtcggtaccctaatactatggtaccccctgctactatataaagatgcagtacccacgcggctatctcttagtcgcgtggtagaagtgttgtgtgtgggaccaggccatgactcgccccagcctcgggcgactactctgggtccacaatagcgcctgaccccgccacatgggcgggtccggagtcgccacgtgtccagagaatgcgacacgctccaagccatcaacagtgggcccggaccccatgggagagtgtcggacccctggatatgcagtccagacctccaagggtggtccaggaaccccacatgcacggaccggacccctggaatcggatccgtgaccccccatatgggtctgatgccgccacaatggtgtcccgatgtcccaggacagaacataccca

SEQ ID NO: 23493 - DNA, 428 bp, Zea mays
  unsure (1)..(428): unsure at all n locations
agcttntcaactnttttagatgtactgaataggttccttggngtatttagaacttatccaaagagtagaactactgataggttatctattccatgttttacccctatatggttggatctgagctgattctgacttagaaactaaaatgttgatcttataaacctgtgaatcaaagactagacaaactagttagttcgaatggttgtgatggttatcaagcaccaaaatcaatataagaaatggtttaaggccattnntcctttcaaaatgctcgtacgctgntatggntttcatttatgcttaattatatagtacagaacatagacatatacatcatgttggctagttaagtgtgaatgtgggttaaaatcacaaccatgatttgaatcctattatcaataattaagttntaccattaaatatagaca

SEQ ID NO: 23494 - DNA, 448 bp, Zea mays
  unsure (1)..(448): unsure at all n locations
acatgtgctaagcggcgatgccatagccagcccatgcaagtcttagccattaagcatgcatctagaccggcttcttcttttgcaaaatcaactaaataaagtttgccgtctagtacacccttaaaagctagtgaaccatcacatcttctaaagacagacacatctacatttgtaaataaacaattatatcccatttgacataattgactgacagatagcanaatatatccaagtgactctactaaaaacacattagagatagagtgctcattagaaattgcaattttacctagcccttttaccttgccttgattcccatcaccgaatatgaatgaatcttgggaatccttattcttgacgtaggaggtgaacatcttcttctcccncgtcatatggtttgtgcatncgctatcaataatccagcttgaacccncggatgcataaacct

SEQ ID NO: 23495 - DNA, 164 bp, Zea mays
  unsure (1)..(164): unsure at all n locations
catgttagtcttagcaattaagcaagtgtcgagttcagctctattaaaatctaccaagtatagctgaccctctaacacttccttaaatgctattgaatcatcacttcttctaaagacagtgacacctacatcagtaaaaagacangtgtagcccatttgacata

SEQ ID NO: 23496 - DNA, 140 bp, Zea mays
  unsure (1)..(140): unsure at all n locations
cactggttaacctagcaatctcggcttgagcttctgccagcaaaccctttcattgttgaagcatgaaatctttcttctccaaagtagctctgtgctctttaattntgccctctaagccctcaattataatttcattttta

SEQ ID NO: 23497 - DNA, 363 bp, Zea mays
  unsure (1)..(363): unsure at all n locations
agcttgtgaaggttcttcatccccacatgtgctaagcggcgatgccacagccagtccatgctagtcttagcaattaagcatgcatctagaccggccttctcttttgcaaaaataactaaatagagtttgccgtctaatacacccttaaaagctaatgaaccatcacttcttctaaagacagacacatctacantttgtaatagacaattatatcccatattacataattgacttacagatagtaaattatatccaagagactcaactaaaaacacattagagatagagtgttcatttgatattgcaatcttgcctaagcctttcacctttgcttggttcccatcactgaatatgattgaatct

SEQ ID NO: 23498 - DNA, 465 bp, Zea mays
  unsure (1)..(465): unsure at all n locations
gcctagctactggtgcatagggttcaccaaaatccaaaccttcgacttgggagtatcctttggccacaagtcgtgctttggtccttgtcaccacaccatgctcgtcttgcttgttgcggaagacccacttggttcctacaacattttggttaggacgtggaactataatgccatacctcgtccttgtngaagtgttgagctcctcttgcatcgccaccacccaatccgaatcttgaagtgcttcctctaccctgtgtggctcaatagaagaaacanaagagtaatgctcacanaaatgtgcaacacgagatctagtggttacctctttatgaatgtcgccgaggatggtgtcgaccgggtgaatctcttgaaatgcttggtgggactcttggtgtggcgtccttggatcttgctcatcctccttttcttggatatntgcatctcccctttgatcgtgcgcgtatt

SEQ ID NO: 23499 - DNA, 281 bp, Zea mays
  unsure (1)..(281): unsure at all n locations
atgtgtttatcacaactggagtacatccaccaggcaaaaaaaattcaaaacaaattgaattgatgtgatatgtcatgggtacaaccctatggtagaaggcttaaccctaaactgagcttangagttcaaatanagccaaatgagttaggatcttcaaacttacttgtataatcataaaatgtcaccatggatggacttaagttgcattcaaaccctagaaatatcaaaaacctgaatagacccctcgaaaaccctgactaaaaccctatggggttatatgc

SEQ ID NO: 23500 - DNA, 521 bp, Zea mays
  unsure (1)..(521): unsure at all n locations
tcaaggctcacttttcgcagcaatgaatacgaanggaatatgtacgtatgcagtcagcaccaaagtcaagagaaaagagtctgcatatgagaggagtgattattatcacatgattagacacagataggttctgatttcgatggagacatatgaattaatagtgaattcgctaaagaacgcataaaaatggtatgctctnttgattcaacagagacgacatatgtngcttgatcattttgacaaacaacaccgaaatcatgtcaggaagagatctacggaagataacatattanggtagttccagaatggatcatgactagagaccttgataccagcattcgacgagtagcacaatcccgtgtgcgcattcacagggagctctcagtttcgctacggcaccataagtccttaatcatgacagcatcaccgaactggcactaataatgaatctcacaggtnagaacaatttgtgcanggataacatattgatatagtttcataatggattatgactactaact

SEQ ID NO: 23501 - DNA, 326 bp, Zea mays
ttatgaaagttcttcatcccaacatgtgctagacggctatgccagagccaacccatactagtcttagccattaagcatgcatctatattggcattctctttcaaaaaatcaactaaatagagcttgccgtctaatacacccttaaatgctaatgaaccatcactccttctaaagacagatacatcaacattttgtaacaaacaattgtagcccatgtggcacaattgacttacagataggaggttgtatcctaatgactctactaaaaatacatttgaaatagagtgctcgcttgtgatggctatctttcccaaacctttgacctg

SEQ ID NO: 23502 - DNA, 405 bp, Zea mays
cctttatctaactttatggggatattattttattacttattttatccataaaattcttgctttcttctcttttctaaattctaggatttcttttaaaatctaaatttccacttgggaatctaatatatttcttgtcacattacttttatattgccacataatgcacacaaaataaagaaccaacatgatgcacattctttttgtgggaagtcctttattaattatcattttcttgaatatggtgttcacatgtgatgataagtaggttcaacatacacataaaatatatgaaaaaaacttttctcctcttttattatctattacaaattatgtattacacttataccgctcaagggagccatcggcgttgaacttatgcttgaatatcacttgcctgcacaacat

SEQ ID NO: 23503 - DNA, 394 bp, Zea mays
  unsure (1)..(394): unsure at all n locations
agctttctcaccatgtatagcaagcttaatgaaacttcgtataatgatgcagnttaatacaaaaacttggtcatcaaacagactgttgaccttctgatcagtcagcactaaagtaggtcggctgcctttctggtagaattaattaagtcggccttagaatcattggaaaatagacttcaagagctttccaaaaagtacttatgaagccttcatagctttgggaatcaaaaatatgactgttcttctggatgttctgagcgctggactgactcgncatagctattttgctgatcgccttgaatgtntgccttctcttgggaactagtatatcactacatgactangagcatataggttaatgaaatataagacgcggcattttgtgacttttact

SEQ ID NO: 23504 - DNA, 398 bp, Zea mays
  unsure (1)..(398): unsure at all n locations
agcgccttcctcaatggaccaatcaaggaagaagtctatgttgagcaacctcccggctntgaagacagtgagtatcctaaccatgtttataagctctctaaggcgctttatgggctcaagcaagccccaagagcatggtatgaatgccttagagaattccttatcactaatggcttcaaagtcggaaaggccgatcctacactctttaccaaaacacttgaaaatgaatttgttgtatgccaaaattatgttgatgatattatatttgggtctactaacgaatctacatgtgaagagtttagtaggaccatgacacagaaatttgagatgtctatgatgggggagttgaagtattcttgtgatttcaagtaagcaactccagaaggcaccttctaacc

SEQ ID NO: 23505 - DNA, 334 bp, Zea mays
agcttcgcacctctgaactaactcggctgcattactcttcgctgttggccaatagaatcctgacctgaagaccttcctgactagtgttctggatgctggatgtattccacatttgccagcatggaccttcttcagaagtcgctttccaatagatgggagaatgcactttatgaagacgcctgatgcaacccttctgtacaatgtctcccaatgagtgtgtatgagcgactgctggcaatgcgctcggtgaatctttgcatctggttctcttcattcttatatactgagattgccttctcagtcataaatctgactgggttgactatatatacac

SEQ ID NO: 23506 - DNA, 485 bp, Zea mays
  unsure (1)..(485): unsure at all n locations
tcttctcgtcgtcgatgagcaacaccaacgtgagtgcctcctgctagtggtgttggttccggggttgcaagcaagacacgtggattcatctttggcattgtgttatgaanatgactcacaagtcagatctatggaataaatattatgagaataaatatcacacatgcaaaaaaagaattttaagttgaaaacattattcaaacaaaagaaattgcatgtcaggctcttctttagatactactccttctccaaaaatataattcanaaatctcggtgatanttatctactactatgcattgtgcaagggtagtagggtaggcttgggaagagatgtagtagatgttnnttctgtcatagatgtagacataaacacacatgtggtatagtggtagttattactccatgtgagaatgagaatgggaatggaanaacataggaatgagcgagccttaatangtagtagagattcgggacacactactct

SEQ ID NO: 23507 - DNA, 340 bp, Zea mays
  unsure (1)..(340): unsure at all n locations
cttcatccccacatgtgctaaacggcgatgtcatagccagcccatgcaagtcttagcaattaagcatgcatctagaccggccttctcttttgcaaaatcaactaaataaaagttgccggctagtacacccttaaaagctagtgaaccatcacaccttctatagacagacacatctacatttgtgaataaacaattatatcccattntacacagttgactaacggataacaaattatatccaagcgactcaactaaaaacacattagaaatagagtgctcggatgaaatagcaatcttccctaactcttttaccttgccttgttcccatcaccgaatatga

SEQ ID NO: 23508 - DNA, 419 bp, Zea mays
  unsure (1)..(419): unsure at all n locations
gagaatcataagtaaaacataagatgtgggagttgataagtgcattctatgtcatgagcatcacgtttattttatgacacactgcaccccatgaatagtatgatataagttgtctccatactttgacctaaatatgtgcttttggcatttgagtacaaaagcgttattttctgaaatgcacatatttagggggaggaaactatatcatanngattaaaatcttatttatcaaatcttatgtaagctntaaatgtgttgtcatcaatcaccaaaaagggggagaatgaaagtgagaaataattaacaaaagggggagaatcataagtaaaacataagatgtgggagtngataagtgcattctatgtcatgagcatcacgtttattntatgacacacttgaccccatgaatagcatgatat

SEQ ID NO: 23509 - DNA, 430 bp, Zea mays
  unsure (1)..(430): unsure at all n locations
cttggtagctattattatatgaatactccgctaaaggtagacattcatcccatcttagtgagaaatccaagacacatgcccgcagcatatcttcaagtatttggttcactctctcagtttgtccactggtttgaggatgataggccgaactgtggagcagtttagtacccaggaatttatgaagttcttcccagaaattagatacantatgttgtccacgatccgacactatagtctttgggataccatgcanactgagaatacnggcgatgtacaacttcgcatagatattgacatgatattttaccttgaccgggagaaagtgggcgaatctttgtagtcgatcgatgatacccagatggagtcaaagccttttgcggtctgggcaatcccacatgaagtcatgctgatgcttccatttcatgttgga

SEQ ID NO: 23510 - DNA, 420 bp, Zea mays
  unsure (1)..(420): unsure at all n locations
aacaagaaaaaaaaatgagcccacacctgtatatcccgttacccgatacccaaaaagcttgcgtgcagtgggtagtaaaacttaaaaactgactagtctaatcctggtgcgtgcgttacgacggtacccaaccatatttgatgatattgattgggagactaagcgagactttgaagtcttaatagacactccacataaaaatatcataataaataaatttaatgtcaaagtgaacatattgttcatgtaccagatattgaactggtaagacatagaaaagcacaagtacgccaacaagatcattcctaanataccaaatacaagtttattctttaatgtttaatatgcttactgaaatacatactcttgctcttgcctttagaatatcatatcaaacaatataaacattttccgctttac

SEQ ID NO: 23511 - DNA, 472 bp, Zea mays
  unsure (1)..(472): unsure at all n locations
tgagaccgacataagcagctaccgacgacagcatcttgtcggtagcttattctattctaatttcaaggtacaaactcttcttcgactgtttcattatttgaacaatgaaggtgttttctaacgaaggttgcttgtgcacagagtatgctgctgagtaaagctttgagaatgcaacaagatctcgaagataaaaaacatgaagttataattgagggtttagaaagtaaaatataagatcaagcagctgcgctngataagaagggatttgagcttcagacaacagaatgtttattggcagaagctgaagctaanattgcanagttaaatacagatcttctctcgaagtcagaaagcttcaaacaggagaagcagaagttaaatgccaaatttaagactgaggccgagaaaagttcgaatctgcanaaatcattgtcagatcttcaaaacanatgtctgggagtcagtaaccgat

SEQ ID NO: 23512 - DNA, 287 bp, Zea mays
  unsure (1)..(287): unsure at all n locations
gtgagtaccctaaccattgttacaaactctctaaggcgctttatgggctcaaacaagccccaagagcatggtatgaatgcctaagagattttcttatcacaaatggcttcaaagtcagaaaggccgatcttactttatttactaaaactcttgcanatgatttgtttgtatgcccaaattatgtgatgatattatatttaggtctactaaacgaatcacatgtgaggaatttagtaggatcatgacacanaaattcgagatgtctatgatgggggagtngaactact

SEQ ID NO: 23513 - DNA, 484 bp, Zea mays
  unsure (1)..(484): unsure at all n locations
aatacctgtgcgtcttccaatatagagcatacttctagcaaatntaaatttttcattttctaagtcatgctcattgatattagccctatggtgagctatgtgatcatnttgtngtttaattaaagctaggtgatcatgaatagcatcaacattaatatctctacatctagtacaaatagtaacatgctcaatggtagatgtagagggtntgcaaatatttatgtcatcaatcttagcatgtaaaatagcattctcattcttaagattagaaatagaaatattgcaaacatntaaatctttagccttagcaatttaatttttgattctcaattttaaggctagagagtgatgcattcaacttgtcaatcttagtaatcaaactagcattatcatgtctaagactatacaattgatcatcacanacatctaanttctcaacttagcaattaattttcattctcaatctaagttngagatatatcat

SEQ ID NO: 23514 - DNA, 353 bp, Zea mays
  unsure (1)..(353): unsure at all n locations
tgtacgaaaagaagggaaggtgttttttcgccttcggctcaaaatactgatttcgtccacatcaaagcgactcaatcgaagggtataggatatattacaaggtatgtacaaagcttccttgagaacaagtcaattgtatttaccaaaattgtacaaaaagtatcctgagttntttcctatagtacatttctactgatcttcattaagcttcagcttcggcgacagcttcngcgacagtttcggcgacataacttaagcatcatcttcaccttcgtcaacctacataaatcaaggaatcgtgagtgaaaatcaagtgcanagaaaaagtaagtacgaagtattatctcttactg

SEQ ID NO: 23515 - DNA, 441 bp, Zea mays
  unsure (1)..(441): unsure at all n locations
gtttctttctaaccataatgaatgcgatatcgaatgtcatacttgatgcatattcacttttattgntcccttgtatgatgtactgtntgtttcccaatttgaatggatgaatgtatgtatgcttgcaatcgcatagagaacgatccggttgaagagcccgaggaactctcaggagaagcccctgagcagcagtcgggtggtggaggcaagtgtnccttgacctatctctgtcctattcattattaaattcacctcccgctttacacatttatgcctaaggactgactagcttttgttatccatgtccttatctacctatctgggttggattattattgtttagctttatgctattgttcanactctaatcaatgaacatgatgagaatatctatgatacgctgttntcccttctcttatttatgatgtatacttgtggtct

SEQ ID NO: 23516 - DNA, 508 bp, Zea mays
  unsure (1)..(508): unsure at all n locations
tcgacttagcgatgganaatgaaaccgacctataggggaaaaggttgcctagtcctcgacatattactccttaggtaatagtaaatgtcaaggacatggatgtaattttacacaggctgtgtcctgtgcctataaaaagatgaatagtggcaccgtactgttcacgctgacttctattcactcgcacatcactccttaattcttatcttctgtccagccaaaggtataaatgtaatttgatattgttaacatttattcatgattatataatgagaatatggatgatctaatgatttgatatgattatctatattctttacgtgtatcatatngtcttgcttcttggttgatattgagtttatgaaggtatgcccttcataaccttcatctgaagatcattatatcctaagggagataatgctttgaaggacgaaggtctntaacnaataacatttgtggtgccttgtcttaactcgagcatttgagacaagtggcaacagtaataata

SEQ ID NO: 23517 - DNA, 355 bp, Zea mays
  unsure (1)..(355): unsure at all n locations
gagtgcatccgccactacatttgctttgcctgggtgataatggatttctaattcataatccttgatcagctcgagccatcgcctttgtctcatgttcaactctgactgggtgaagatatacttcaagcttttatgatctgtataaatgtgacagatattacccagcagataatgacgctagatcttcagggcatgaaccactgcagctagctctagatcatgagtgggataatgctcctcatgtcggtgcaactgccttgaagcatacgctattactcggccttcttgcattaacacacaaccgagaccactgcctaatgtgtcacaatacacatcananggcttattgatatct

SEQ ID NO: 23518 - DNA, 424 bp, Zea mays
ttgaagccttatctaccttcactagaccgttgtctgggaccataattaggggtacccccaagactcctaatctcagctggtaacccccatcagcacatagctgcaaaggcctgattggtgcgattaagtcaaagcatcggccactctatggacacgatctcatcttcgccgagcccagccttgggcaagggcagccaacctcggagggttcacgtctcgcccgatgaccccctcaagcaacgggcacaccttctgctctgccgaggtccagtcttcgtcaagaagcaaccttggccagacgccacaccgaccgaccgcaccgcagaagcatttaatgcgaggatggcctgacaccttatcctgacgcgcgctcctcatgcgacagagccgaagtgaccgcagtcacttcgtcgctccactgacc

SEQ ID NO: 23519 - DNA, 457 bp, Zea mays
  unsure (1)..(457): unsure at all n locations
cactttagactacaaagtcattttataaagacacgattagtagcgcatgccaagccgggaagcaagttggcactcatcattcacacaagaacattatgacaaccgacaggccacttgagctactccacatggatctattctgcccgattgcttacataagcataggcgggagtaagtattggcttgtaatagtggatgattattctcgcttcacttgggtgttctttntgcaggaaaaatccgatacccaagagaccttagagggattcttgagaccggcttcaaatgagttccgcttaaggatctagagaattagaagcgacaatgggacggagttcaagaactcttcaaattgacggtttcttgaggaagacggtatcaagcatgagttctcttcttcctacaccccacaacanaatggngtattggagaggaagaatcgaactctattggacat

SEQ ID NO: 23520 - DNA, 500 bp, Zea mays
  unsure (1)..(500): unsure at all n locations
tgaagccatggtaagtagcataggctaataatatgcgaattgactcaagcctagctacgggtgcataggtttcaccaaaatccaaaccttcgacttgtgaataccccttggccacgagtcgagctttgttccttgtcaccacaccatgctcgtcttgcttgttgcggaagacccacttggttcctacaacattttgattaggacgtggaactaaattgttggggacttgttctcaaatgctaagaattaagaacaaggcaacacanaaaatgttaagcgttaaggtccttcgtcctccataacaatatatccnctcgggatatatagcatctcggacgaaggttacgaaggtcataccttcgtaagcataacaacgaagaatgaagcattcacataaatcatagaatatgaaataaacatttaaatattgtcatagaattatctctacttgtatcaatgaatataaatgactntgaattacanatgtaccttcggtcctg

SEQ ID NO: 23521 - DNA, 490 bp, Zea mays
  unsure (1)..(490): unsure at all n locations
tnccattcgccttgtggacgatgactgggttggcctgccacactgtgtgatgaacctcttcgatgaagctggcatctagcagcttccggacctccttttggatgaagtcctgccgctcgacggactgtctacaaggcttctgactcaccggcttggcgtcagggttgatcttcagatggtgctcgatcacctncttagggatcccaggcatctgcgacggctcccatgtgaacacgtcgacatttgccttgaggaaggcgacgagcacgagttcctatttctcctctagatcacccgcaatgcgagtggtctggngggaatcctcgcagagccgaatggccttgacggggacgtcgtccgctccggatggtcacaccttcggcaccttggtaggtgttggggacttgntctcaaatgctatgaattaagaacaatgcaacacanaatattaaagattanagaccttcgtcctttgaagcattaattccct

SEQ ID NO: 23522 - DNA, 454 bp, Zea mays
  unsure (1)..(454): unsure at all n locations
tattaggacctatgatactaagcttgacaatattcatgataaaccttaatcataagcaagacgaatttctatgaacaactatggataaccatgatgtacatagccttctagaactccttacactaatcatgataagtcattaaacctagatatttttagacctcccaaaaactgcggtgatgtgtcatggtgaggtgtcccccgtgtaaggcggaggtgacacatgcatggtgaggtgtcactcatccatggctcctaggttcctatataaggatgtgcccccctcttgccatgtcataccatcccacccncatccacacacattcaagagcaagatagaagtaaattattgttaaagtgtagaagcccttgcataatcatgtgtccttgttgcaaagtatttgttatgctgtanaatttctatttgcttagtgcataagtngtgatccatctg

SEQ ID NO: 23523 - DNA, 325 bp, Zea mays
ttcaagtgatgggtggactgtgagtggctctctctactgccttaggaataagtgaatagccaccgcaacatccaaatccttcagagagctcaccaactaattctctgtttcgtttctgtttcagcccaacaactggaggtgttacacctgccccagcagcagaggctgaattgaaagccagtgcttgaattttttattctgtgttccctgagatcatatttggtagagtggaattgtatcagccagtcgagagcttagttcccgaatcttttttaatcgtaacggaaaattgtccgtcatccttctgatgaaggaactcattaac

SEQ ID NO: 23524 - DNA, 440 bp, Zea mays
  unsure (1)..(440): unsure at all n locations
ctaagcttctaagggagaacatgtgttatgactaaccaatgtctggtntgagaaagatagaccttgtgcagcgtgccangcagggaagcaagtgggaactactcatcaaagcaagaacgtgatgacgacatcaagaccattggaactcctcaacatggatctctttgggcccgttgcttatcttagcatcgggggaagtaagtatggtcttggtactggtgatgacttttcccgcttcacttgggtgttctttttgcaggataaatctggaacccaaggtactttaaagcgcttactaaggagagctcanaatgagtttgagttaaaggtgaagaanatcagaagcgataatggatttgaattcaagaatcttcaagtggaagagtatcttgaggagaaagacatcaagaatgagttctctgctccctacacaccacaat

SEQ ID NO: 23525 - DNA, 427 bp, Zea mays
  unsure (1)..(427): unsure at all n locations
gacgtgaagagtgccttcctcaatggaccgatcaaggaagaggtctatgttgagcaacctcccggctttgaagacagtaagtatcctaaccatgtctataagctctctaaggcgctttatgggctcaagcaagccccaagagcatggtatgaatgccttagagattntcttattgcaaatggattcaaagtcggaaaggccgatcctacgctctttaccaaaacacttgaaaatgatttgtntgtatgccaaatttatgttgatgatattatatntgggtctactaacgaatctacatgtgaagagtttagtaggatcatgacacanaaattcgagatgtctatgatggnggagtngaagtacttcctaggatntcaagtgaagcaactccaagagggcaccttcatcagccaaacanagtatactc

SEQ ID NO: 23526 - DNA, 442 bp, Zea mays
  unsure (1)..(442): unsure at all n locations
ctatgttatggattgcctttgagtcagncctattgtcttctgtccttctggcagcatcctgactttcatgaatagcgatgggtccttgatccgaaggtatcttcatgcatagataagcaggatgaagaactgcttcgaaagcattgagggtgccacgaccaataattgcattggtagggtatttcatgtcaacaatgtcaaacacaacctgctcagttctagtattgttgatgaacccgacagtcactgacatggtaatcttgcccagtgctacaatatgtcttcctccgaagccacagagaggatgggtagcatcatgaatcttatcttctggctcttgcatttgtctgaaggccttagcaaatatgatgtcagctgcactgcctgtgtcaaccaagacattgtggaccaganatcctctgataacacaagagataaccat

SEQ ID NO: 23527 - DNA, 498 bp, Zea mays
  unsure (1)..(498): unsure at all n locations
tgtaaagctaacacaagtgttcaagagtgatggtccaaaggctgagttgattatggttgtggacatcacaagcgaagaagaagtgcttaagtgagacttgtgtgcataactcggagacaactgatcaagccaaggatggaggcaagaagagctntgaggtacagagtgcacgggaaaaggtcatggaggccgaggaacccaaagctaggggtgaagaagaagacttgcaaagtcaaggctggtcgagttgagaagagatatggtgcatcgaggatcatacttaagaacatgacttatatccaatgaggtaatactatggttatgtggtgtgagtcacaaggctcaagatgaagatcaagaagtgaataaggtcactagcactacaccaaaataagcaacttccgagaggctaataacttcctacggttttttntcanaaccgtaggacattaataatntccgagaggcgactagtgcctctcgaaagtaagttacttc

SEQ ID NO: 23528 - DNA, 464 bp, Zea mays
  unsure (1)..(464): unsure at all n locations
tcagccgagacattgcctcaccagagaagcgagcgcgacaccgtctgacttcggtcgacctncgccacgcgtggaccaggtcacacggtgagctattatccaattccttgcacccacggcgtcactgacatcccatgaagctccccgagcactttgatttgactctaccaccgtgagcaggccggagcacgcaccaccggcgagcccgaccgcctgcgcatgcggncagcccacctccggtcaccaccaccgacgaccgacacctcgacgtgatcgctagagacccccggacctcacccgacccttcgccggacctctaccgtcgccggtaaaacgtgccaccgctntttccttctcggttactgtttaagcgagggaggagcgcgggttagagggggtaaaaagcaagggggttcagtgctaagtcagtgacacatatgaatagttcttcaggggcacgggtt

SEQ ID NO: 23529 - DNA, 496 bp, Zea mays
  unsure (1)..(496): unsure at all n locations
taagacctgtgcgtcggtggaagcttactgctgatgatcattatatctcaacaacgctgtcgtaatcccacacattatccataatcttcgttctgttcggcggttcaccacccacagatcttgatacattgaatatgacccctctggttttttctgcgaaggacctggccaccaagacccctatcgtccggattgacagcgtggggccactctacacgctccggactttcaccacctactcgtacncacctaccgtactggtctccacttggcaccgtcagctcggccatccagtacccgacatcatgaccaagattaccaatgcgtgagatccttcatatagtangagggcattatgatgggctatcgcatgcttgtcagttaaggccacatactcatctaccatgtattacttctctggctgagcaggcatttgacctgcatcatcgagatctctagacctcccgtgacatagtctatctggttataaatacta

SEQ ID NO: 23530 - DNA, 507 bp, Zea mays
  unsure (1)..(507): unsure at all n locations
tcggctcattttcttcagcatcatcatcctgtacatattataacggtatgagagaagtgcagacttcaaggagaaggtaaagtaacaggcataaattttttaccggcttaaggtggcttcgagcttcgtggccagccatttttcgcccgccttttacccaaatttgagttatgaatctgtttcctatactccgagctaggctagggatatcaattaaatctgtcggagataagttaaaatttggtctgttgacaatctttccatgttcacagccagatttcatgaaggcaacagttgtgccccgagaagctagcagagcgcanaaatcggtgtgtccacctacaacttcatcgagtgcatcaacttcgccctcaaaatgttcgaaggtttctggcangttatcaaccgaaggactaaatntctcagcgtcggctcaaactgagtgaaaacctgtttaagccgtgaggcaccgntgctgaacctatgcactttcttgaagtctttcag

SEQ ID NO: 23531 - DNA, 340 bp, Zea mays
gaagctctcatcatgccaaaaatgtgatgacaacatcaagacccctggaggtacttcacatggacctcttctgacccgtcgcctatctaagtataggaggaaagaagtatggtcttgttatagatgatgattttttccgcttcacttgggtattctttttgcaggataaatctgaaacccaaaggaccctcaagcgctctctaatgagagcccaaaacgacgttgagctcaaagtgaagaagattatgagcgacaatgggtccgagatcaagaaccttcaagtggaggagtatcttgaggaggaatgaatcaagcacgagttctccgctccctacacacc

SEQ ID NO: 23532 - DNA, 432 bp, Zea mays
  unsure (1)..(432): unsure at all n locations
taaagaaagatatggttagaggattaaatgatgtggtgtttgaaaaagacaagccatgcagtgcatgtcaagctggaaagcaagttgctaatacacatcctactaaagctttcatatcaacatcaaggccactggaactacttcatatggatttaattggacctacaaattatgtaagtgccggtggcaacctctactgtctagtggatgttgatgacttctcaagatacacttgggtgttctttctccatgacaaatctgaagttgcatctatattcaagaaagttgccaagaaagcacaaaatggaattgattgcaagatcaagaagaatagaagtgacaatggcanagaatttgacaacaccaacattcatgagtactgtgatgaaatggggatcaagcatgaagtatctgccacatacacacctcaac

SEQ ID NO: 23533 - DNA, 274 bp, Zea mays
tgaagaccctaggagagttctatatatgatactctactttcgatctagattcttttgacaagtagattcccataagaggaatatcagcttcctaaatggaacattctttgccagccaaagtaactcgagggtttagggattcaggatattgacatgtaaattaaacgcttgctaaacaagtggcattttaaagctgatcaatgacgatggcatggtgtaaaatctcgtacatacaaatacctaaagaatatactctgtctaatgttcatataag

SEQ ID NO: 23534 - DNA, 106 bp, Zea mays
cgctgatatgattccaaaagaaacaagtttaatgactggctagaatcactgtgaacatccatcataggacagacataagctccgtaactaaaaaacctagccatta

SEQ ID NO: 23535 - DNA, 465 bp, Zea mays
  unsure (1)..(465): unsure at all n locations
tcttagacaattttataatnnttctatttctagagcattatcattttttaactttacaaaatttttaatttctttaacgagccagtactcttggcattccaagagaacattcttctcgntaataggttcaattaaatcattccattttttcttttggtccatgggaagggtggcaaaaagagaaactaaatcatcttcattatcactagaactaccctcatcactagatgtagtatatttggaggtacttctagaantgatcttctttttgccatcctttggcatgagacatttgtggccaacgttgaggaagagaangtcncttgttgacngcgatgttggcgggcgtctcgtcngaggagtcggttgagctctcgtcgtaatcccattcccaccccatgtgcgcctcgccgccccttctcttgtagtactttctctattcccatatcgtcttccccttctatc

SEQ ID NO: 23536 - DNA, 487 bp, Zea mays
  unsure (1)..(487): unsure at all n locations
tgtgaagattcttcattccaacatgtgctagtcggcgatgccagagtcagcccatgttagtcttagcaattaagcaagtgtcgagttcagctctatcaaactctactaagtatagctgaccctctaacactcccttaaatgctattgaatcatcgcttcttctaaagacagtaacacctatatccgtaaaaagacagttgtaacccattttacataattgcgaaactgaaagcaagttataatctaaagaatctacaagaaaaacattggaaatggaatggttaggagatatagcaattntacccaatcctttgaccaaaccttgatttccatccccgaatgtgatagctcattggggatctttgattttctcgtagcaggagaacatcttcttctccccggtcatatggtttgtgcacctgctatcgatgatccaactngagcccncggatgcataaacctacanaacannattagttcttgattt

SEQ ID NO: 23537 - DNA, 446 bp, Zea mays
  unsure (1)..(446): unsure at all n locations
ctttcgcaagcgcgctggcgtcgtccacttgctcgggtttggcgtgtctcggagagacngcgctcgtcttcatctcaggcgcgaagtcgacacccggtgcgcccctcgttggggtgccggcgccgtcgactcgctcgacagccgacgaggcgctgcctcctgcttggccttggttgccctgccttcccctccgccgacggngaagaaggcgggacgagctcgaagaatgctcttccgccacgcggggaagacgtcgccgattccgccgccggcgggcgggctgtcggccgccattgtcgtcgccgcacggcggtggaaggagtatcatgtcgtagctgccgtcgaaggacatgaactcaagactcccgatacggagcaccgtcccgggttggagagggtgctggagactgcccatctggagcttgacggngaagctgtcgtcaaca

SEQ ID NO: 23538 - DNA, 447 bp, Zea mays
tttatctatcagggcttgatgcgttctaacagcttcgctcagcaacacactatgtgcacaataaccgttatcagaaacctttgcttgatcgcagaacaataaaagattgaggaaaagactttaccttagaactcgaatagaataagctaccgaccttatgctgacatctggatctgctaatgttagcttcaagcttcatgaaaacaacactcttttacagagagctgataatcttcgacccaatgcgctcttgaatacattctatagcttcttcattaattctaccaaagagcatggctcttggctggagtcataggatatatcatacttctatagctcctctttctaggccttgataatgcttatcaattagatttgaaacttgaaccattttttctgactacctatgcactctccttcctttctaggcactatggaaggactttt

SEQ ID NO: 23539 - DNA, 504 bp, Zea mays
  unsure (1)..(504): unsure at all n locations
acaagtgctgcacttaccgctgagtgcgaagctttcttatattataacacaggagcccctggcgtccgtggggttaatgttgttagatctattaaatactgtttcagcttttcaaaggccttctactggattggtccccattgaaagacttctgctgacttcagcacttcgaagaatggtaagtttctctctgctgatctagatatgaatctgntgagagacgccagccttcctgtcaatctttgagccccctcttttgtacttggtggttccattcgaagaattgcttcgattntgcttggattagcctcgattccctttgttgagactaggcaaccgagaaatttccccttctttactccgaagacacatctttctggatnntaatttagaccagcctgtctaanattagcgaaggtctcctgcaaatcagcaatggtggtatcttgcttcgtgctttttacaatgatatcatcgacataagtaacacattctttctatctc

SEQ ID NO: 23540 - DNA, 338 bp, Zea mays
  unsure (1)..(338): unsure at all n locations
acagagcaaatgcatgtttcgatgaaaagcttctgccgaactttaattggccggtactgagagcaataaggggctacaaacgagctagaacacggagcaattgggaaattactaacccaaagagcattgatcacggtggagtttctcgcgacggagttaagaacagggagaaaggggaattgtggactgtgtgagttcttcngtgaaattgaatcgagtgcttagtcactgaggtgcgggatgtggtgaagaagcagagtccaagctcaatttatatgccgtcgaccggaatcggaggaggagtgtggattcccgatcgcgctggcgagctcaccgcg

SEQ ID NO: 23541 - DNA, 447 bp, Zea mays
  unsure (1)..(447): unsure at all n locations
tttgtcccttgctcggctgatgtgcctcttcatactatctccccggagatcaatgagtggcaccaacatgcctatggggtgccttatatgtctggccaccatgtagaagaagaagcctatgttgatgatcaccatgaagttgcctgcctccctaccatggagatccgggtcaattatccttccacccttcggcttcttacccgggttcgggacccattcctggtgaccctaggccatccggctctggttaccaccaacaccctccaccttctactgatcatcgtacatctttggcatctgttttttctgcggctgatgagccacctcgggactncacttttgaggaggacgcgatgagggactttttccctgactacacttcatatcctccatcatatcctccgtcatatcctcgctctggaggatattgattcttggatcccttgc

SEQ ID NO: 23542 - DNA, 441 bp, Zea mays
  unsure (1)..(441): unsure at all n locations
ttgataacaataaagagtaagtgataatactacagactagagtcatctatatattatgaatcaaatgcacataatagaaacgtagccaacataaataaacccaccatatgtagctgactgtgggaggtcgctagcctaatcctctaacttgtcgatgtccttgacctgccggaaatccacctcgacactttcttctccttctttacctaagtatagattgcaccaaaggcaacctggtgttttgtgaaagcaagggtgagtacacatcaatgtactcagcanatgttccatttggctgaggtggactagctttatgtggngttagggtcaaagcagttgcttttagttcatcatgtatttattattagtagaagccaagttttagcaataaccaacttgtgaatcatttgctcatcgaggaacatcattatcatcatcgta

SEQ ID NO: 23543 - DNA, 334 bp, Zea mays
  unsure (1)..(334): unsure at all n locations
gcagaggaggaaggcgtgctcatcangagcaggtagcaccacaggatgaggcaccccagcaacagtatctgtcacccccaccctcgatgactattgagcaaatgtttttgatgcagactcacgcagntcaagccatctgtcagactctggtcgncattcatcagcagcagcaccagccaccaccttagcctcagatgcctcaaatgcctatggacaagcatgctgaagtcatgagaggtcatcccctagtgtttgctcactcttctgaccccatggatgctgaagactggctacacacagtggagcangatgtgcatacctctcagtgtgatga

SEQ ID NO: 23544 - DNA, 487 bp, Zea mays
  unsure (1)..(487): unsure at all n locations
gcttgcttccttggtaagatgaccaaggcgcncttcacgggtttaccggataggacgttagatttattggaactcatacatactgatgtgtgcggaccaatgagtacgacagctaggggaggattccaatacttcataaccttcactgatgattntagtagatatgggtatgtctacttaatgaaacacaagtctgaatccttagaanagttcanagagtttcagaatgaagtagaaaatcagcgtggcaagaaaaataaagcactgcgatcagatcgtggtggtgaatatttgagtcatgagtttagcaatcatctaaagagttgtggaattgttccacagcttacgccgcctggaacgcctcagaggaatggcgtgtctgagcgacgtaatcggactttattggatatggttcgatcaatgatgagccagtcggacctacctttgtcgttttgggatcgctctagaacagcagcntcacactaat

SEQ ID NO: 23545 - DNA, 482 bp, Zea mays
  unsure (1)..(482): unsure at all n locations
tatgaagattcttcatcccaacatgtgctagtcggcgatgccagagccagcccatgttagtcttagcaattaagcatgtgtcgagttcagctctatcaaaatctaccaagtatagctgaccctctagcacacccttaaatgctattgaatcatcacttcttctaaagacagtgacacctacatcagtaaagagacagttgtagcccattntacataattgagatacggaaagcannatgtaatctaatgagtcaacaagaaaaacattggaaatggaatggtcaggggatatagctattttacccaaacctttgaccaaaccttgatttccatccccgaatgtgatagctcgttgggaatcctgggttttctcgtaggaggagaacatcnttcttctccctgtcatatggtttgtgcacccgctgtcgagtatccaacttgagcccccggatgcataatcctacanaaacaagttagttctt

SEQ ID NO: 23546 - DNA, 402 bp, Zea mays
  unsure (1)..(402): unsure at all n locations
cagcgagagaaccctctctcactgtttgtttactacgcgctcgcggtctggtcctcgaatagctcgcgcacgcgcaacggacggcccgcgaaccgcacgccccatcgcattaacttcgcggcgggacaggtagcgcctctggcaggagaagcaagcgacgcttcgccttcgccataatgaccgcgtcaaaaaaggtacgccgcgtcgctcganttcgtataccttatcttgtcctctctctctctcttacaacagggaccgggaaagggggataccccgaagaggatccttcttcgtgaaggaaccaggctccgagcctccctactgatcagacgttcgaaggctggcccctcggaggggttcaacagcccgctcagagcgcgtgggcgtcacacccactac

SEQ ID NO: 23547 - DNA, 507 bp, Zea mays
  unsure (1)..(507): unsure at all n locations
tgtcaagcatattttggtacccatctcttgatgggtccatcaaggttagtctacaaagatctgggaacccaagagtcctttgtgttagcactatgtaaactcattacctttctagcacaagttgcaattttgggttgcctagttacatgagaattaattgacaagctaggagtgggattgttaccaatgggacaatccttgcattgatgtcccttctttcggcatatgtagcaaaggcgatcttcaagtcttgaagatttcttcctttctcgtttcttgcttgctacatggntagtaaatattntcttttctagccctatgcctttttgtttcaaatggngacaagatttaataaagtgtcccttctttgagcatttaanacaaagtttatcatccttgttaataatcaagccatttttaatatanggatatgatctaaccaagtgccccttttanagcattcactacacatcttatntctatntgtatgaagtgtgacttgatatt

SEQ ID NO: 23548 - DNA, 410 bp, Zea mays
  unsure (1)..(410): unsure at all n locations
taaactccttccggggaagttaataaacaaaagatcctaagtggaggaccgagtccttccgcacttcaatcttctttttcctcgttgggtaccacctttggagcnnagaagcaacaaaagtttgtcgcttcctcacctaanaacaacanagggataaaccctgagtatggaatactcagcaagtcttacccgactaaggaaaagactctcaagggtatgctggataaataggagtcaaggagaggctttagcaaanatcaacttatacttttgcagaagtagcttactanagtgagtccttactttcaatctttaacgccatgttaagtattaatagactccatttgcatctagtctaatttcacatcacatcaagaacaacatcattttatccatcgtgttcacatcct

SEQ ID NO: 23549 - DNA, 461 bp, Zea mays
  unsure (1)..(461): unsure at all n locations
tatgaagattcttcatcccaacatggcctagtcggtggtgctagatcctacccatgttagtcttagcaattaagcaagtgtcgagttcagctctggtaaaatctactaagtatagctgaccctctaacactcccttaaatgctactgaatcatcacttcttctaaagacagtaacaccaatatccgtaaaaagacagttgtaacccattntacataattaagaaacagaaagcaagctgtaatctaaagaatctacaagaaaaatattggaaatagaatggtcaggtgatatagcaattttacccaatcatttgaccaaaccttgatttccatccccgaatgtgatagctcgttgggggtcttgtntatctcatccttttctcccctgtcatgtnggtggtgcatccgctatcgatgatccaacttgaggcctcggatgcataaacctacannaacaaatt

SEQ ID NO: 23550 - DNA, 515 bp, Zea mays
  unsure (1)..(515): unsure at all n locations
gtcaagcatatttggtacccatcgcttgatgggtccatcacggttagtcaacanagatctaggaacccaaaagttctttgtgttagcactaggtaaacttattacctttctagcacaagtttgcaatttgggttgcctagttacatgagaattaattgacaagccaggagtggaattgttaccaatgggacaatccttgcattgatgtcccttctttcggcatgtgtagcataggtgtttttcaagttttgaagttntcttctttcctttgttgttgcttgctacatggttagtaaaaactttcttttctaaccctatgcctttttgttntaaatggngacaagatctaagcaagtgtcccttcttagagcatttanaacaaagtctatcatccttgttaataagcaagccatttttaatgtanggacatgacctaatcaagtgccccttttcanagcattcactacacctcttaatgtgaagtgtggcttgatcattaccttgggatgttacct

SEQ ID NO: 23551 - DNA, 478 bp, Zea mays
tcaatccttcggaccgcgtctaaatatgactcaagcttgtggtctcttgctttacaaatcttgtcaatatgaccagaagtaacctgagagttagctgttagaactgcccttctaattgccattgcctttaacttccaaagacccaaaagcaaagcttcgtacttagcaatgttatttgcgcagctaaaatcaagtcttgctgcgtagcaagttttaactttggagggagcaactaacacagcggctgctcctgccccgaatgttccccaagaaccatcgcataatactggccaagcttcagcatctttactcgctgcttcttcctgagcccctggcgtccagacagcaatgaagtctgctaacgcctgcgactgaatcgaagatctatgcacataatcaatgcagaactcattgagttgtcgagtccattttccaacccttgcagtagcatctctatttctcataatatccttcaatg

SEQ ID NO: 23552 - DNA, 345 bp, Zea mays
ggaagctctcatcatgccaaaaatgtgatgaccacattaagacccctggagatacttcatatggatctcttcggacccgtcgcctatcttagcataggaggaagtgagtatgggcttggtataattgatgaattttcccgcttcacttgggtattctttttgcaagataaaactgaaacccaagggaccctcaagcgctttctaaggagagctcaaaacgagtttgagctcaaggtgaagaagataatgagcgacaatgggtccgagttcaagaaccttcaagtggagttgtatcttgatgaggaaggaatcaagcacgagttcttcgttcctacacaccacaac

SEQ ID NO: 23553 - DNA, 217 bp, Zea mays
tgagctccaatgattatattgagtggttacatttgagtattacaatatcaatgatgatcatttttaggaaataaataactatgtgcatgttatcatttaaccatgaggttgctaagagttgaatgaagtgacatctacatatgattactatatgatcattatatcaaagatataatgaatctagcggaagtaaatgatctgaatgatcctattaaat

SEQ ID NO: 23554 - DNA, 528 bp, Zea mays
  unsure (1)..(528): unsure at all n locations
gacactatagatactcagcttgacacatggttaggtcttttggggtcctcataaccgggagggtgttctacatacactagttcactaatcttaccatttaggaaggcactctttacatccatttggtagagcttgatattatatgcacaagcataagccagtagaatccggattgcttctaatcttgctacgggagcaaatgtcttcccaaaatccaatccttcaatntgagtatatccttgtgcaactaatcttgccttgtttcttactaccacaccatcttcattgtgcttgttgcgaaacacccattatgtaccaataacattgtggttctttggtctctcaacaagctcccaaacttcatttcgagcgaagttatntaattcttcatgcattgcattcacccaatcaacatcaagtagagcttcatctacacggttaggttccatacaagatacanaagagatatgtcacaanacgaagctatgcgagagcgagtttgaacacncttactaatatcacccacaa

SEQ ID NO: 23555 - DNA, 540 bp, Zea mays
  unsure (1)..(540): unsure at all n locations
gcgaccttagaaactaagcctgggtgttcctntgcatctagcccattgaacctctactatgactactatggggctatggggcaagctaaggagccaaggaaccaccagaanaacaaacacgtactgcggaagtttcacctcatatgtgaattcattaggcggggtgagataaagatatgcaaaatacatacggatttgaatgttgctgatcctttgacaaaacctcttccacaacctaagcatgaggcacacgtgagatctatgggtattagatatcttctagactaactctagtgcaagtgggagactggtagaaatatgccctagagataatcatagagatgagcgtatntctttgatccatgatatatatatggcttaattgaatatccatggaaggcaccttgtattgatagcaattatgtgaattggttgtgagatctntacttatatgcgtattctaaatgatgtccctagtcagagtcgatgactagcacatgtattagttgagactacatttcacaagtcatgaacatggag

SEQ ID NO: 23556 - DNA, 453 bp, Zea mays
  unsure (1)..(453): unsure at all n locations
ttggtttcacaagcttagataaatctggaatgaatcggcggtgataaccagccagcccaaggaaacttctgacttgatgtaccgtggttgggggtntccactccaaaatatccttgactttgctgggatccatcgcaatccccttggcagataatacatgtcccagaaattgaatctcctccagccagaatgcgcacttactgaacttagcatacaattggtgttcccttaagcgcgtcaatacgatctgcaactgctgagcatgctcctcttcattcttggagtatatcaagatatcgtcaatgaataccaccacaaacttgtccaactcgggcataaatatcgagttcatcagatatgtgaagtgngtaggagcattcgttagtccgaaagacataaccaaatattcaaataatccatatcgcgtggtgaatgcccgttttggtatatctt

SEQ ID NO: 23557 - DNA, 432 bp, Zea mays
  unsure (1)..(432): unsure at all n locations
cggaagcgtcgattggntgtctacttggtgtagactcctccttcttttctttcgtcgccttgaatgcgatgggttgagcttcggatgtggtgggttcgtcaagatcgttgattttcctcgagccttcgatcatgcactcaaaacttacaaaatgcccgattacttcctcgggggtcattttagtatatctaggattaccacgaattaattgaacttgagtagggttaaggaaaataagagatcttagaataaccttaaccacttcgtggtcatcccactttacgctcccgaggttgcgcacttggttcaccaaggtcttgagccggttgtacatgtgttgtggctcctctcctttgcgaagccggaaccgactgagctccccctcgatcgtttcccgcttggtgatcttggtgagctcatctccctcgtgcg

SEQ ID NO: 23558 - DNA, 450 bp, Zea mays
  unsure (1)..(450): unsure at all n locations
gatgcctagaacccaaaaccctagccccctggcttatgaacttcactatagactccgaaaaccctaggttcttcgagaaccgtgaaggaaaggtatattccagacattagattataaacttttattatcttagcattttcatgagcattacatgagcattcatgattatatatgggtatatctagaaaacgaggagggaaatagaagtgaagaagcanggacttcaccaccaccaccacctgaagaaccttaggcaggaaactgcttttactntgatatctgtggagtagagcctgattcacctatcacgcaaggcaagccccggtgcaatggccacctccttggtagttnganatctttctcacttacttgatgcattaggtgataggaagngtgtgctaaaccagttgctgcattccttccttggattcattacttctctaatcctga

SEQ ID NO: 23559 - DNA, 505 bp, Zea mays
  unsure (1)..(505): unsure at all n locations
tgtgaaaccaatcacaagtttattgaagaatgatactaaatttaattggtcttcaagacgtagtgaagctcttgagcagctgaaagtattattgaccactgctccggtattagctcaaccagacattgagaagcgctntgatgtgtattgtgacgcataaggcagtggtctgggctgcgttctaatgcaagagggccgagtgatagcctacgcttcaaggcagttgcgccggcatgaagaacattatccaactcatgacctagaattggttgttgtggttcatgccctaaaaatatggcatcattatctgctggggaatatatgtcatatttatacagatcataaaagcttgaagtacatctttacccagttagagttgaatatgaggcagaggagatggcttgagctgattaaagattaagaataggagaatcattatcacccaggcanagttaatatagtggcagatccttaagtcgcaangtttctgtcattgcttacaatg

SEQ ID NO: 23560 - DNA, 260 bp, Zea mays
tacgtaggcatttcactttaacaagacccgcgtggggtaagtgtaacatcaaacgctcatttcaggctcgtgatgcccatgaaatcactgcttaccttcaaaggagtctttgtgcaattaatggaaagcacctctgactgaccctttgactgggcatcaaatctcattatggtggctatcctggactacacaaattcctttattaaccttcgatacttacacgtaaatcgagtctaaacagggactgttcttaagtatac

SEQ ID NO: 23561 - DNA, 413 bp, Zea mays
  unsure (1)..(413): unsure at all n locations
ttagaatttctaccacatcggtagcagaaggtgatgcaggagtttcttcttctatatcagtcgccttctgcttcagagctgcagcttttctcttctttggagcaaccgctgntggctcacggttcaatttccttttcttcagnttttcttcatcttcttttaccattctagcggcctgtctgcccacaacactgacaactcttttccttttctgcccttcggcgcccttgttcaaccgctcataatcaggatatccaaaatgtagaacatccattacccgattcaatcttcacttcggtcggtagccgaaggctacattcatcaactgatcttcttctttcgtatagttccctaaaatctcgttacacataacttcgatcgtgccaaccattcttggtagggtccttgaagtg

SEQ ID NO: 23562 - DNA, 339 bp, Zea mays
  unsure (1)..(339): unsure at all n locations
aaaaccaccgaaggattaacccttaatattggaatacttcaccagtcctaccccacttaagaaaaaaactctcagggtatgcctggtatatgggagtcaaggtaaggctttcaatgatcaaaactctgtttggaaaatgctactaaagggatcttanaatcaatttattgtcaagtaatacagtacctgcactagagtcttctacctattcatcactgtcctgactaccaattcttacanaacccgcatcttaatggatgctctgaggtcaggacaatcttataccgcaagtcgggaccaatcatatctactgagattcataccactatggactaccct

SEQ ID NO: 23563 - DNA, 363 bp, Zea mays
  unsure (1)..(363): unsure at all n locations
ccttgatctagcttataacttcanggagcatcatagctcggctaatatccttatttctctccccacataccacattgcataccaaccatcgcaccagacaacttgggcttttatcacctttcgcttctggatagaggacttcaccctaactctctccttccttaataattttactaatgcttctttgtttcacacgggagacgacgacgcatgacgcctgtggctgatcatctgacttatcatataaacctgaaaatgaatgcaaaactgagccaaccatgtcaattataacaaaatgtatcacnctatccctatgcgcatactatctgactatgcactctctagcgtgacaacgtaaaatct

SEQ ID NO: 23564 - DNA, 362 bp, Zea mays
  unsure (1)..(362): unsure at all n locations
tactaagcttatcnatggacgtgaaagtgccttcctaatggaccaatcattgtttttgtctatgttgaacaacctcccagctattgaagacagtgagtatactaaccatgtctataagctctctattgcgcttaatgggctcaagctagctccaagagcatggcatgaatgccttagagaattccttactgctaatggcttccaagtccgaaaagccgatcctacactctttactaaaacccttgaaaatgacttggtagtatgccaaaggtatgttgacgatattatattcgggtctactaactagtctacatgttacgagttattatgattatgacgcataaatttgacatgtctatgat

SEQ ID NO: 23565 - DNA, 367 bp, Zea mays
  unsure (1)..(367): unsure at all n locations
atagctcttgtcaatatgaccagaattatcttgtgagtgagctctaagaatggcccttctgatatccattgccgtgaacttccgaagacccaagagcagagcttcgtactcagcgatattatttgtgcaacttaaatgaagacttgccgcataacatgatataactttggaaggtgaatatagcacagcagtcgctcctgccccgaaggttcccgaagacccatgcgataatattggccatgcttcagcatcgttattcgatgcttacttctgagcccctggcgtacagtcagcagtgaagtctgccaacgctttggactgaatcgaagatctgcggacataatcaatacancaatgattgagctgt

SEQ ID NO: 23566 - DNA, 367 bp, Zea mays
  unsure (1)..(367): unsure at all n locations
ntatttcagtgtacccaggaccacgaagaatacctccaggcgtacgttctaaggtttctgcgtctgagggcacaagcgccaacagtgcccaatgaaattgtcattgaggccatgattaaggggcttcgaccgggaccttcagcgcagtactttgccaggaaaccaccacaaacgttggagaagctgctccagaagatggacgaatacattcgagctgacaatgacttccgccaaagaagggaggaagcattcaggttctctgaaatgaccagnggcttcggaggaagatttcacccgaggcacgttaggtcgattcataactctactcaaactaccgatcgagggagtcagcagcaaaggccacaac

SEQ ID NO: 23567 - DNA, 433 bp, Zea mays
  unsure (1)..(433): unsure at all n locations
gtgtgatcattattacatggttgctcctggtgctcatatgaccacgggtcacactctttttgtgtgggctctgttgtaagtggccatctctcagcttgatatcaagaatggctttcttaatagtaaagtgcgtgcggaggtctatatgcagccaccttctaggtattctattcctganggccatggttgccatctttatcgctctctttatggcctcgagtaggctcctcaagctgtttagagttttcttctgtgatcactattgctagttttctgctagtgcctatgatctttgcttttttgtgcactcgttatcttgtgggaggactcatctttatgttgaccatatgaatatcaccggtgggcgaaagggcctctagctgagttggttaggtggtcttagtagcactcaagtcttgaatagactcctcgt

SEQ ID NO: 23568 - DNA, 411 bp, Zea mays
  unsure (1)..(411): unsure at all n locations
ggtgaaggttcttcatccttacatatgctaagcggcgaggccgcttctatcccatgctagcctaaggaataagcaggcatctaaaccggcctcctctttggcaaaaacaactaattaaagttggccgtctaatacacccttaaaagctatggaaccatcacttcttctaaagacagacacatctacatgtgtgaatagacaattatatcccatattacataattgacctacgaatagcaaatgatatccaagcgactcaactaagaatacatagaaatagagtgctcggatgaaataccaatttacctaacccttcaccttgccttggtctcatcaccgagtatgattgaatcttggggatccttgtctngacgtaggaagagaacatcgtctntttccccgtcatgtggt

SEQ ID NO: 23569 - DNA, 388 bp, Zea mays
  unsure (1)..(388): unsure at all n locations
ttatggcaccctcttgtcatagaggacgctagaagtatgacgtcatttcaatcaaccggctgaaattatntgcataacatcttcatcaatatgaccatccttttgtaccattgttcctagataccgacaagactccttcccagccaccagttgcccatcgagggtaacatctccatatcttcatgtctagtcgcgctaaaaatgaacatcgtgtactcggtcttggtcctactaagtctaaaacttttcgactccaacatgtgcttccacaactctaacttcctattaaccccttgtggnggacagatatcccctgggtccactagaaggttagaaggactcacagaaagtttttggacttactgtctcgcaagtccatcccttcgtg

SEQ ID NO: 23570 - DNA, 484 bp, Zea mays
  unsure (1)..(484): unsure at all n locations
tatgcccaagtcgcacgtttggactcttaggagacctcctctcctgtggctatgctagagtcaattcgcatattgttagcctatgctgctcaccattctttcaggttgttccaaatggatgtgaagagcgctttcctcaacgggccaatcaaggaggaggtgtacgtggagcaaccccctggcttcgaggatgaacggtaccccgaccacgtatgtaagctctctaaggcgctctatggacttaagtaagccccaagagcatggtatgaatacattagagactttntaattgctaatgaattcaagggtgggaaagccgatccaactctntntactaagacttgtgatggtgatcttttttgtgtgccaaatttatgtcgatgacataatatnntgttctactaaccaaaagtcttgtgaagagtttatcanggtgatgactcaaaagttatgatgtcgatgatgggcgagtaagctattttct

SEQ ID NO: 23571 - DNA, 417 bp, Zea mays
  unsure (1)..(417): unsure at all n locations
tatggcacatatttataaaccaacataaagataataatgcaatggttttttatctccaggtttggtggtttgccagccacttaatctctattgagccaagctcaaaattaccgtccaccctcttactaatggtaatcacacaaacaagatcactctctctatcaaagagagcgttcacacaagagcttatgacactcagacccgatcagaccatttggtgctcataacacctcattctaccattagttgtcctccgtgaacttccgtgggctgagccataatacccctcacaataacaattatttgaaggtggaaacaattaccaagagcctctcaaggattctccccanacacaaagctagatgggtgataaaattcaccaagtgtaacagaaaattcccaatcacaaagattacc

SEQ ID NO: 23572 - DNA, 71 bp, Zea mays
gctgcttgagtctatttaccagaaggttttcgcctggttaaacttgtcatgcgactaatttttttaacaat

SEQ ID NO: 23573 - DNA, 455 bp, Zea mays
  unsure (1)..(455): unsure at all n locations
ggatatccgtcggatatccgacctgacggatcaagatatggatatgttntttgactcgcgggttagacctgtatctgagccgatatgaagtgggcatggatttggatattaaatctcacccgcgggtaatccgttggatatccgaaattaaccattagtctattattgccggccgacacatggacactaatgaacaaatcaccagcccaccattgtccattgagcccagccgccaggcgccagctaaccaaagcaccattcagctcaccanagcaccaagccaccctaaggctatccgcaggcgttcccctaaatnnttcccctaaatgttactatgcagccacgtcagcaagaatccctccnctatattcactcgtcccgcaaccggttcccctanatnntaccctacatatccctctactcattaaatatacatatccatataactaacataa

SEQ ID NO: 23574 - DNA, 509 bp, Zea mays
  unsure (1)..(509): unsure at all n locations
tcgacattattttcaagcgtaccatataatcgntccttcatcacatctctttaaggatattatgagaaacagagaagctactggaatgattggaaagtgggctgcggaactcaatgagttctgcattgattatgtgcatagatcttcgattcagtcccaggcgttagcagatttcatcgctgactggacgccaggggctcangaagaagaagcaagtaaagatgccgaagcttggacagtattctgcgatggttcttggggaaccttcgggacaggtgcagctaccgttttaattgcactttccaaagtcagaacatgctacgcaatgaaacttgattntagttgtataaataatattgctgaatacgaagctnntgctttgggtcttcggaagttgaaagcaatggngataagaagggcggttctcanaactgattcccaagttatttctggccatgttgacanaagttgcanagcaagagattcgaagcttttgaaaatattggata

SEQ ID NO: 23575 - DNA, 460 bp, Zea mays
  unsure (1)..(460): unsure at all n locations
acacaaaaactaagcttganaatatctggacatggttcgaagagtcgaagcttccttcgatttattttctgtcaaanatatcccccgacgacaaaatgagcatgctgatttgctagctaagtcagcagcacatgggctgcccttaccttcggatgtcttcttcgaaacaataaaagcaccatcggtggaacttcttgaaagagcagtcctcaatatatctccttgttatagcgaagatcggagaactgagatcatctcttacctttagggtaaattcctttcagatgacgaaacttataacaggaggatagaggcaagagctcgtccatatgtcatgatagaatgngagttgtacaagcatggagttngtgctccgttactcaagtgtttatctagaaccgaatgcatagagttgatgaaagacatacatgcaggcttgtgtggatctcacattggatct

SEQ ID NO: 23576 - DNA, 508 bp, Zea mays
ttaagctctttgacaatagaaccacttcatctagttttattctatatgcaataatgcatgagtgaaactttaagaggttaaactaggtatgaagcacggataaatgcaaaggacatgctttctcttccttatgtataagatatgcaaagaatgcttataagaggaagatttaggtacaagtttaaatgaaaggaagtgattttacccttttgtaccttctcatagagacactctcttcattgtgctttgtccttagtcttagatgcttaagacctataatgacaatatgtggaaatactttgcacaagagagagttctacaactagtgatctttttcaagttattgttagcatatatcaaatggatcacaagtttcataaatgaatcatgaattctcctttttccttagtgcatatcaagatagatgtcaattaataattaccaattgagatcaaattgaaattacatgaggcactaagaagcataagtgataaattgaagtgtcaat

SEQ ID NO: 23577 - DNA, 341 bp, Zea mays
ttcaactagcttgaatagaaatagaatgtgaaaaggattttcttaagaacttttctcctgaaaatacgggataactaatatattaaatgtggtatttacttggtaatgacatgaaattgactaataagtaattattgataaataaatatggaggaaaaaaagattaaactgtattttgataaattaaccatcttatgccaataacatcagtgatgatgtttaattgatggaaatggaaggaatagaattaaaaaagagttaattataatttcaggttctagtcataataacagtgcagtgattaatgataatagtgataaaggatataaaaatactgtgcg

SEQ ID NO: 23578 - DNA, 150 bp, Zea mays
  unsure (1)..(150): unsure at all n locations
tgttcattntgagaaagacagggtttgtatcgcatgtcaagcanggaggcaagttggtactcaccatccacacaagaacatcatgacgaccgacagggcgcttgagctacttcacatggatctattctcgccgatcgcttacataaacat

SEQ ID NO: 23579 - DNA, 80 bp, Zea mays
  unsure (1)..(80): unsure at all n locations
tcagctttgattaaaaatagacatgctatgacagggttaataacttagatcacctatgtgtgcctgcactgngcactggc

SEQ ID NO: 23580 - DNA, 193 bp, Zea mays
  unsure (1)..(193): unsure at all n locations
tctcccacctggaagccttgtggccgaaccctcgggcgtggtggcgtggcagagactgctgataccgcgccgagtgtagtaaagccacatcccgagcttcttcgagctggtccagtgagtcttctcggctggtctgggtgcttcngtcatcgtacacctttgtcctctgggaaccgtattctaagtctgtggg

SEQ ID NO: 23581 - DNA, 321 bp, Zea mays
cacttggctgccaccttctattgaacacttgaagccaatatttctgtctaagtcctagtgccgattgctctggataccctatatacaccatcgcaattcgggtggaccctctggcgtcatattgcacgggggtctggtctctcctaagatcaactctaacagactctgaaccaacctctccttatcatcgtcaactttgacgtagaaccattcagatatccagccagctggccacttgcttcgataactgatcacatgaaaatttgagtcttgcatatgcacaatgtacacgcgaagtttcatgtaacccatctctctatc

SEQ ID NO: 23582 - DNA, 247 bp, Zea mays
agcaacacccggctgtgaagatagtgagtatcctaaccatgtctatcgactctctaaggcgctttatgggctcaagctagccccaagagcatggtatgaatgcctaagagatatccctatatctaatggcttcaaagtcggcaaggccgatcctactttattcactaaaactcttgacaatgatttgttggtatgccacatttatgttgatgatattatatttgggtctactaacgaatctacatgt

SEQ ID NO: 23583 - DNA, 202 bp, Zea mays
gcagcttgtcaagcaggtgaacaagtgggaggagcgcatcacagcaagaatgtgatgaccacttctagacccctggagctgctacatattgacctcttctgacctgtcgcctatctgagcataagagggagtaagtatggtttacgtattggtgatgatatttcccgcttcacttgtgtggtctttttgcaggataagtctg

SEQ ID NO: 23584 - DNA, 184 bp, Zea mays
agagacacagtatcaaaacttccccttacttattgagcatatgcactaccaacatttaagtaagatataaatacgcaaaaagattaatacttccttttgtacctttaccatcgtgtagtgtacttcccatcttgaaagtatttaatctctcgagagcttctccacacttgtgcctaattcttta

SEQ ID NO: 23585 - DNA, 215 bp, Zea mays
  unsure (1)..(215): unsure at all n locations
agagcttncgaacgtgaagacttgttccgtccacggagtcgctttattcgagcgcgaggtacttatcgcagaaggtgatgagtgaggtatccgtatcccggatgcgtaagagtccctcggctcggtcagccttggctgcttacgtgtactccatcgtttccaagatccgctttccgaagtagtcgagaagcacgaaagaaatcctgctaaaaaga

SEQ ID NO: 23586 - DNA, 355 bp, Zea mays
  unsure (1)..(355): unsure at all n locations
atatgttctctctctagataattgggatgtagtattgtgttgcgtaaatatccaacatgttngtcgtctttttagtggtgtaatggtgtgcgctcgacgatatgtagttagctaacgctagtgggtgtggttgcttgtgatgtctcgctacttagtgtttaattcgctagcgtgtacttaaagtgtcttgtgctattccattatattcatacatatgcatcttgcacctcatatangaccgagagatgatgatcgagccactgatgtggtgccaaccacaagatgtcgtggtggacgaccttattgatggacataaccagtggatgctcgccaagcgagtacccccagcaaacac

SEQ ID NO: 23587 - DNA, 179 bp, Zea mays
  unsure (1)..(179): unsure at all n locations
acatgtatgttcacatctgactatctaacataagtatcttctgcttgcaatggtgcatgcactggtggagcgtaacaggtacaatcacgtctcgttnttacagaagaagaagttgaatatagagtgcgtgatgttcttgccaatgttgaatcatctttatctaatgggtcattctcatg

SEQ ID NO: 23588 - DNA, 355 bp, Zea mays
  unsure (1)..(355): unsure at all n locations
tcgcacctctgaactaactcagctgcatcactcttcgctgttggcaatataattctgtacctgagacgcttccgactagtgtcctggacgctgcatgtatttcacattgcccagcatggacctcctccagaagtcgctctccagtagatgagagaatgcacttcatgaggacgcctgatgcaccccttctgtacaatgtctccccaatgagtgtgtaatgagccgactgtctggcaatgcgctcggctgcatatatgtcatctgggtcctcttcattctttatatacctgatgaatggccttctncagtcatcagagtctgactctagttgattcacaatattacactcttctac

SEQ ID NO: 23589 - DNA, 244 bp, Zea mays
  unsure (1)..(244): unsure at all n locations
ctctggatactcttgttctgaagttctcagtttatcaaagtaaaattatacacaattggagaaggtgttgtatgctgntttaatggcctncacgaagcttcgacattattntcaagcataccatataattgttccttcttcacagcctttgaaggatattatgagaaacagagaagctactggaaggattggaaagtgtgctgcggaactcaatgagttctgcattgattatgtgcatagatct

SEQ ID NO: 23590 - DNA, 171 bp, Zea mays
gctgctgactcccccgatcatcagtattagcacagttatgtaatgacctaacgcgccgtcggtgagatcttcctccgaagaccctagtcatttcagagaacctgaatgcttcctctcttctttggcggaagtcagtgtcagctcgaatgtattcgtccatcttctggagca

SEQ ID NO: 23591 - DNA, 273 bp, Zea mays
  unsure (1)..(273): unsure at all n locations
gccttattgcatagcatgttctgactctagaaggtgcaactaagacaacagccgcacctgccccgaaggttccctaganaccgtcaaagaatattgtccaagcttcggcatctttattcgcttcttcttcctgagcccctggcgtccagtcagcgatgaagtctgctaaagcctgngactggattgaggatctatgcacataatcaatgctgaattcattgagttccgcagcccattntccaatccttacagtagcttctctgttcctcatga

SEQ ID NO: 23592 - DNA, 169 bp, Zea mays
aaagaagagcatggccctgtcatcaagacacttctggtccatacggtccagattggctcctgatgactgacttttctggctaattaaacttctaatgtagtggcggaccggatgcaacattacacatattccagatacaaattaactggagccacacttatcatgcaac

SEQ ID NO: 23593 - DNA, 328 bp, Zea mays
cctatgcatgtcagatcaatccacagctccatctagaatgatgacaaaggaagccacgtttataggccacagcatatctcacagtcttcatgacagcagcaaagctccttcaggccaccagctccaatgggcagaggcggcaagggctcccgaggtagatatggggatcagcccagaaaaatctatcgcttattctgtgaagacaagggccacacgacaagaacgtgtcataataccattcaaaagcaaaaagagatcgccgaagcagaagccctgcagaatcacgcgaagtaagcctacatactgctcatgccactctcctatatac

SEQ ID NO: 23594 - DNA, 296 bp, Zea mays
  unsure (1)..(296): unsure at all n locations
atcttcccttctgcagttggagccattttctgtgtcactggtgatactaaccagattgtcatcatactctgtctggatattcctctttcaatttgcatttgacagagatcacatatgagtcagcaactagaaggcaaccaacacttaccaaatnctattcattccgctcttggagccaaaataatgtggtcatgtggcttgtacgttgaggcacataaactctatagctcattgaggcacaatggtcttcttccatgcttatggtcaagaaataatattactattatttcattatt

SEQ ID NO: 23595 - DNA, 186 bp, Zea mays
  unsure (1)..(186): unsure at all n locations
atcttctcgtgctttcagatcatttttcacataataccattctgtcatctagtcgccgggccatctctttcgaaagggtggcacgggacagcttgacccagaccgagaaacanaattgtagcagccaaagttattgtgatactgttccttaccccaagggtntgtctcgtatgataattcgtgtat

SEQ ID NO: 23596 - DNA, 186 bp, Zea mays
tcatttgagaagacaggatttgttcgcatgccacgcgggaaagcaagatggagcccatcatccacacaagaacatcatgacgaccgacaggccgcttgagctacttcacatggatctattccgcccgaatgcttacataagcatcggcgggagtaagtattgtctcgaatagtggatgaatattct

SEQ ID NO: 23597 - DNA, 80 bp, Zea mays
gaatgcagagcttacagcgaataataaacgctgataccgccttagtaaaaagtgaagcgtgaaaagtcaacgcgaatacc

SEQ ID NO: 23598 - DNA, 496 bp, Zea mays
  unsure (1)..(496): unsure at all n locations
ttcagacttcaatggtgactgatagccatacatcaagtccatttatctnncaattttgtacagcatcaaggctcagntacttaagcaaagntgtgctcctatcatagctctanaaatntatgtattgacctatggcaganatcctcaagaattaagaaatacaagggctccaaaatggctccatttcactataattcagacttatccacttatgggttcttgggtccttttgccaataagtccaaatttctccatactacttggnaatacttcaatgtnaaaagtactttggnntttgatgttctattcttttgatantttgcactttggtcagaagtatatagaattngaactttaccccnctgngttcaattatggtttctatggggtttgcacactanggtctttgtgccatcaaatcatactcttatctctttgggtgggttcaaactttgagatntactcattttgctttatatacctatataccctatct

SEQ ID NO: 23599 - DNA, 182 bp, Zea mays
aacaacatttctgcgaaaattacccttaacaaacttggaacatgatcaataatttgttttcacaccgagaaaaagccaaatcaagctcgatgaaagtatccgttacctaagcggatgagtatatattaattcgaataaccatattaatgatatctattaaatgcgcaaataaatcattactt

SEQ ID NO: 23600 - DNA, 267 bp, Zea mays
  unsure (1)..(267): unsure at all n locations
tctgctgctggctcccctcgatcatcagttgagcagagttatggattgacctaacatgcctcangtgaaatcttcctncgaagcacctggtcatttcagagaacctgaatgcttcctcccttctttggcggaagtcattgtcagctcgaatgtactcatccatcttctggagcagcttctccaacgtttgtggtggcttcctgtcaaaatactgcgctgatggtcccggccgaagccccttaatcatggcctcaatgacaatttcat

SEQ ID NO: 23601 - DNA, 155 bp, Zea mays
aagcaagttggagcccatcatccacacatgaacatcatgacgaccgacaggccgcttgagctactccacatggatctattctgcccgaatgcttacataagcatccgcgggaagaagtattggcctgtaataatggatgattattctcgcttcac

SEQ ID NO: 23602 - DNA, 249 bp, Zea mays
tgatcattgaccacaggatcgtacacctcaccccacatatgtgtccttgccatagatcacattcttagattatgggtggagaccatttcttggtcaaaggtctgtaagtgttagccttcggtaatattgaacatggtcgtccatggctatcttcgacacaaatggaggttatgtggccattgatcattgaccataggctcattcaccttaccccacatatgtgtctttgccatatatcacattcttgga

SEQ ID NO: 23603 - DNA, 259 bp, Zea mays
  unsure (1)..(259): unsure at all n locations
catactacgagcaaatatnaatttctcattntgtagttcatgctctggcaatttagcatctaattntgctatatgatcattntgtgtgttaatcatggcaaggtgatcatggatagcatctacattaacatctctacatctagtgcanatagtaacatgctccaccgtagatgtataggagtttcacgtttttatttcaacaatttaacatgtgaaatagcatttcatctctaagattggaatagaacattgcaacatt

SEQ ID NO: 23604 - DNA, 100 bp, Zea mays
  unsure (1)..(100): unsure at all n locations
ctcagcttctagtgcggaagcagatgtcgtaaagagcttcgntgtcgaagaccatacactcatcagcattctcaacaaagtgatgaactgagagcgtggc

SEQ ID NO: 23605 - DNA, 280 bp, Zea mays
  unsure (1)..(280): unsure at all n locations
ctcagctttcaaaactcttggacactctctttggtgatctgaagattaagatatgtatggttaaagtgtgtagactgaatctgtccaattctagacaacaaagctctctagtgtgctttatccttaattacatattgaatcaccttgagatgtgtataaattacttgtagaanattcattatctttctagaaagctatgatcacctattttggatgcatgagtctctgggtatgaatatntgaaacaaagggcctgaatttatccnacctggacagatct

SEQ ID NO: 23606 - DNA, 178 bp, Zea mays
  unsure (1)..(178): unsure at all n locations
caccacaccatgctcatcttgcttgttgcggaagacccatttggttcctacaacattttgattangacgtggaactaaatgccatacctcattcctggtgaagttgttgagctcctcttgcatcggcaccacccaatccgaatcttgaagtgcttcctctatcctgtgtggctcaata

SEQ ID NO: 23607 - DNA, 317 bp, Zea mays
  unsure (1)..(317): unsure at all n locations
atctgcagatggtccggcatttacagccggattgtctgccgtacctgtagagagctgtggagatgctgtctcattctctatcttcgtggctgtttgatntatctcaacggcctctggtctccacctcttttgcggtggggggtactgtggatgcgtgtcattgaatattattcaaccctctttttcttgggtctctttgctcttaggtgcttgaattccgcttttcgatcgtgtcaatccgataacactatcgaggcatgagtatttgatcgactggttacatcactatacttctctttgctgtgtggcgattacca

SEQ ID NO: 23608 - DNA, 381 bp, Zea mays
  unsure (1)..(381): unsure at all n locations
gctctacaagtactagtcctcagatgggtacaannattatttgaatagatatcatatgaacataagagtaaaccacgcctccactgattttgggtggatggatttgtttggaagtcacaacaaatggtatgacgagctaagtaacatttagtctttttcctctgacaaacttgtctatattatttaaaataatctcttactacatgatccttgagatggtggtgaactccgattcatggacatttgcatcaaggggcaccaaagttcatatttagagcatcattgaaatttatgtgatgacaacgtgatagaaaagctaggtagtgtaactaaataatatcgattcataattaaacttgcaactagtttcatatctaacat

SEQ ID NO: 23609 - DNA, 66 bp, Zea mays
ctatgtgaactgaatctacaattcagttttcgaaaactggtctgtcagtggacagaacacaacaac

SEQ ID NO: 23610 - DNA, 201 bp, Zea mays
  unsure (1)..(201): unsure at all n locations
ctctaacgatctatgggtctatagttatcttggtcttgcaggcgggattgccataagactggtgtncacgctgaggtgagcggtactggtgctgagtcccgactggagcggtggaaccaccattcaggtgacgacgttccgcgcgctcagcccgcagcagggcgatctcagcacgagccctactcagctcgtctaatgcat

SEQ ID NO: 23611 - DNA, 250 bp, Zea mays
gtatgtggatgacatattattgaatgggaatgacattcctatgctggaatccgtcaaggcttcactcgaaaagagttcttctatgaaggacttacgggaagtagcatatattttgggcataatgatctatatagataggtcgaagaggcttataggattaagtcaagatacgtacattgacaaggttttgaaacggttcaacatggaacaatccaagaaaggggtcatacctatgtcacatggtaaacac

SEQ ID NO: 23612 - DNA, 268 bp, Zea mays
  unsure (1)..(268): unsure at all n locations
tctacagggagaacacactttgngactaacagatgttcattntaagaaagacaggtattgtatcgcatgtcangcanggaaagcaagtggtgttcatcatccacacaagaacatcatgacgactgacaggccactcgagctcctacatatggacctattcggcccgatagcttacataagcatctgcgggagtaagtactgtctagttattatggatcactattctcgcttcacttgggtgttctttttgcagganaaatctcacacc

SEQ ID NO: 23613 - DNA, 324 bp, Zea mays
  unsure (1)..(324): unsure at all n locations
ctcagcttggtcaccagaaaattcgtcttcaacagacgcagaaagccttgcanagtatgtcttcatganggaagagatgtacaggaaggctaaagagtatgaatctaagatcattgtgtntgagctagctattataaggccatattttcatgtcaagcctcttgacaatccagagcttgaanattggcataactaccttgactacatcgagaaggaagaagacattaataaggtatgctcttacacttctagaaacccctttgccttatttactatgtnttattatcgaacgcttggaatcctataacttacaatccagtctta

SEQ ID NO: 23614 - DNA, 64 bp, Zea mays
gcactatacatacatgatattgaagatgtcgagaccacaagggatcatcaccgtgcgtgctgac

SEQ ID NO: 23615 - DNA, 263 bp, Zea mays
  unsure (1)..(263): unsure at all n locations
caagatacatagctcttgctatgtaccaagaatataccgtgtctagatacaagtataaactacgtatctatgaaaaatctgaacaacttacaatttggaatagagagagtacatgctctaaactaaagtgtgccctctgcaaganaacagattcccttgctgtcaaccccggaggagcaggtgcgtctcttctgtctatgtgcaagtttggtcctggctcggcgtcctggtacccatgattngtggagctgaagaactgagat

SEQ ID NO: 23616 - DNA, 291 bp, Zea mays
  unsure (1)..(291): unsure at all n locations
gcagcttgtcaagcaggttaaccagtgggaggagcgcatcacagcaagaatgtgatgaccacatcaagacccctggagctgctacatatggacctcttcggacccgtcgcctatctaagcatatgacgatgtangtatggtctagttattgttgatgactgttcccgcttcacttgggtattcttttgcaggataagactaataccccctggaccctcaagcgcttcctaaggagagctcacaatgagtatgagctcacagtgaaaaagataagaaacgactacgggttcg

SEQ ID NO: 23617 - DNA, 229 bp, Zea mays
tgttcatattgagaaagacaggatttgtatcgcatgtcaagccgggaagcaagttggaaccaacattcacacaagaacattatgacgaccgacatgccgcttgagctacttcacatggatctattcggcccgattgcttacataaacatcggcgggagtaagtactgtctagatggtgtggatgattattctcgcttcacttgggtattctttttacaggaaaaatctc

SEQ ID NO: 23618 - DNA, 190 bp, Zea mays
  unsure (1)..(190): unsure at all n locations
agcacatcacagcaagaatgtggtgaccacatcaagacccctggagctgctacatatggacctcttcggacctgtcacctatctaagcatangaggaagtaagtatggtttagttattgttgatgacttttcccgcttcacttgngtattctntntgcaggataagtctgaaacccaagggactctcaag

SEQ ID NO: 23619 - DNA, 227 bp, Zea mays
  unsure (1)..(227): unsure at all n locations
gcagcaagcgctgtcacatggtcgcggaatagtctatcctcatcatagagagtgatgtacctctcagaggttcatcagatatccttccttcttcatctgacaagccaagctcgcggcatattctatcctcatcatagagttngatgtacctctcaagggtttcatcagatatacttccttcttcatctgacaagccaagcttacagcaagcggctgatgctgaaact

SEQ ID NO: 23620 - DNA, 239 bp, Zea mays
aataagtttattgtactgagcaagtcattgttatacaaataaagtcggtaaaaaactaactgcagataaacctgactgctgttataccaatctcctgcttcgggcttaaaaataaaacaaactgctatatgcttttatgaaaataagtgtaatgagctgcactacaggatgtaactttcactgatgctcactatctaattgacttacgcttatgaagtaatgtgcatttaatctttcac

SEQ ID NO: 23621 - DNA, 188 bp, Zea mays
cccctggagctgctacatatggacctcttctgacccgttccctatctgagcataggaggaagtaaggatagtctacttattgttgatgactttttccgcttcacttgggtgttcttcttgcaagataagtctgaaacccaacggaccctcaagcgctctctaaagagagctcaaaatgagtttgagct

SEQ ID NO: 23622 - DNA, 209 bp, Zea mays
  unsure (1)..(209): unsure at all n locations
ctattcttcttaactaagtctgtctatgtgtaagacatcgtanattatgcgtacttaactagnttaataataagtaactaatgaatgatataagtgaacgtggcgaatgcttgtacttatgatagtcgcgttgctatataaaattatangaaagtgtttgtgtttccagtgatgattgactatgtatgcccgatgacgtatagataact

SEQ ID NO: 23623 - DNA, 302 bp, Zea mays
  unsure (1)..(302): unsure at all n locations
catctcttaacatagattttctatggatanactgaacacaagagatgacattagtagcacaagcactagtttcttatntagcaaccctttatatgtgaaaggcaaacgagttgctaaaatagagaaacctcataatatggactaaatttcgcttgagccctcatgcataatatattttgaatgacatggataatatgcatcggttttcactgaaggttaaagggctgacttaatccatattatggtgagtgtctaatatagaagaatcaaatccaantaactagatagagaatacgtcacat

SEQ ID NO: 23624 - DNA, 258 bp, Zea mays
  unsure (1)..(258): unsure at all n locations
gcttaattgtgattattctactaataccacaattagctatctatggagttgcaccttaacctgcaagctaggatacgaagccatggggccgacaccgtcggtgtggatctccacaagttgctggcgcttgtaacagtggtggatctccttggngaataattgtgaaaantaaaagaatacattcattaaaatacattaaaataaaaatgattggaaagtggcatcgatcgtgcactggcactagcatgatcaagcaac

SEQ ID NO: 23625 - DNA, 447 bp, Zea mays
  unsure (1)..(447): unsure at all n locations
aaatgttcattttgagaaagaccggatttgtagcgcatgccaagccggaaagcanggtggcactcatcatccacacaagaacatcatgaccagtgacaggccattggagctcctacacatggatttattcggcccgatcgcttacataagcatcggcgggagtaagtactggctagttatggtggatgattattctcgcttcacttgggtattctttttgcangaaaaatcccatacccaagagaccttaaagggattcttgagacgggctcanaatgagttcggcttaaggatcaagaaaattagaagcgacaacgggacggagttcaagaactcgcanatagaaagctttcttgaggagganggcatcangcatgagttctctttctcctacaccccacaacanaatggtgtagtggagaggaagaatcgaactctactggacat

SEQ ID NO: 23626 - DNA, 479 bp, Zea mays
  unsure (1)..(479): unsure at all n locations
acccttatcacattcaatggtttaacaacagcggtaagttcaaggtaacaaaaacagcaagggtgcattnttctattggctcttaccatgancttgcttgatttgatgtggtgactatggatgcttgctctcttttattgggacgtccttgggagtttgatactaatgctattcaccatggtagatctaataaatatactttcatgcataagggaaagaaaattgtgttgcttcctatgactcccactgaaattgccactttgaacatgagaaaaagactaatgctaagcaaaaaggtggtttgaactctgaanatcagcaacctattaagtaanaactcctactttgctgccactagatctgatctgatgagtacatgcctctgtggactttgtatccttagtggcaaaatgcttctattcatgatgaaagctatacttgccccggtatggtaacctttgacatatatggatggtttc

SEQ ID NO: 23627 - DNA, 152 bp, Zea mays
  unsure (1)..(152): unsure at all n locations
catgctatgcaacaatggcttgacttcagctgtacaaataatattgctgaatacgaagctttactttntgcgcttcgaaagttaaacgcaatgggaataagaatggcagtccttaanacagactctcaagtatttctggtcatgtcgacaag

SEQ ID NO: 23628 - DNA, 236 bp, Zea mays
  unsure (1)..(236): unsure at all n locations
cacatcgacacagtccttaagcgactcagacggagacactacatcgagacttncttctcgtgtagtcacccgctcggtctcatctatatatttaaaacccaaagtctgtacctggcagagtacatatttcatatgttgaacccatatggccgcgattgattcaccatcataagtcttttctgtgtaaaattctcatccactatgaagcatttcattttgtattaaaacaaaacatt

SEQ ID NO: 23629 - DNA, 358 bp, Zea mays
  unsure (1)..(358): unsure at all n locations
cgctgcagcttgtcannctgatatatcatatggatcactcttgttcacacattattaataccctacttaaccttgacgatatgatgcttggtcgtttcttgtcttatatacatgttcgtgtgcatcagtctgatttattatgcatgcattgcatctatgcatattatttaagtatatattatggtggatgatggatcaataggtggtgtatgaagtcaatacttacgatcatatagtatggtgggatcaagctcattagatggaaatgatctgatcacgctgctatagatgaacaaaatctatctttctatatacaaggctaaccctagtcaaagctttgtgcatacctctaatttac

SEQ ID NO: 23630 - DNA, 405 bp, Zea mays
  unsure (1)..(405): unsure at all n locations
gcagcttatctaacctgagaagacagcttatccttatgtgtgatgacgtaattaatactagagggtgatgtgttaatatgagccttgctagcgtgntatcgtgtaatcgataactcttatcatatgcttcttgcagattatatgtggtgcatcatatggaccagcgcttctcgtgctatgaattaaatggcatctattgtgtgcattctgtactagatcatcgtatgggtaatggtgcatgtggataatggaataatggagctataagattgctttatctggaatcttagttatatcggatcttaatggcgaatactggagagtgatattcctgcgtatatccactcaatcgaatggtgttaactctgattctgagcattgtgtggatacgcatccacagggcta

SEQ ID NO: 23631 - DNA, 326 bp, Zea mays
  unsure (1)..(326): unsure at all n locations
gattcaagcctagctacaggtgcgtaggtntcaccganatccaaaccttcgacttgtgagtatcccttggccacaaagtcggctttggtccttgtcaccacaccatgctcatcttgcttgttgccgaagacccacttggttcctacaacattttgattacgacgtggaactaaatgccatacctcatttctagtgaanngtgtgagctcctcttgccttgccaccacccaatccgaatcttgtagtgcttcctctaccctgtgtggctcaatagaggaaacanaagagtaatatttacanaaatgagcaacacgagatcgagtagt

SEQ ID NO: 23632 - DNA, 423 bp, Zea mays
  unsure (1)..(423): unsure at all n locations
gcttcgcacgaccgcgtgactcgattcgcggcgcagattatcgcgggccagtaaaatccttgacnggtcaccttggcagcgagggccctatgccctgagtgggagctgcaagttccgctgtggacttcgcggaggatttgaatgccttcggtttcggtgacgcatttaagcatgggttgactgacccccttcttgtatagctggcccccaataagtatgaagtcccggcttcggtgcttgaggcgcttggcctcgttgacgtcacttgggtggtaatatccttgcangaacagggttatgggggcccgctagttttcggtcatgatgaggtngacaatgcgatggccctcagcnngtgtggttacttgtagaccctctagaatgcngacggctggtgtgctaatgacatggtagaacacgtca

SEQ ID NO: 23633 - DNA, 364 bp, Zea mays
gaccgcgacctctaagcacctgggctgcagcttcgattcaaccgcttaagataaagactttatccataagctgatcatgtgaagctttataggggctattgtattctacagctgctctggctataaaggacaatcttacgtacctttggaatgcaccatttcgaaccacttgcagaagatatggtcatgtcattataagaaataatatcgctatatattaccttatccttgctatgattatacacatgaaattatacaaactgacttggatattctatacctctcaagtatatctaggatatgtatgacaagatacataaattatgtgctgtctaatctacatgaacagtccaatgcccactcg

SEQ ID NO: 23634 - DNA, 481 bp, Zea mays
  unsure (1)..(481): unsure at all n locations
tatgcgtattgattcaagcctagctacgggtgcatagggttcaccgaaatccaaaccttcgacttgtgaatatcctttggctataagtcgggttttggtccttgtcaccacaccatgctcatcttgcttgttgcagaatacccacttggttcctacaacattttggttaggacgtggaacaatatgccatacctcatntcctcatgaagttgtgagttcatcttgcattgccaacacccaatccgagtctctttagtgcatcctcaccctatatggctcaatagaggacacaaaagagtantgttcacaaaaatgtgcgactcgagatcgagttcgtacccccttatggatatcaccaaggatggagttcacggngtgatctcgttgtatagcttggtggactctngggtgtggcggtctttgaccctgtacttcatgatcatcttccttggctggatcattngcatcttccccttgatca

SEQ ID NO: 23635 - DNA, 407 bp, Zea mays
  unsure (1)..(407): unsure at all n locations
caagatctaagaacccgagagttctttgtggtagcaattggtaaacttaatacctttctaacacacagtagcagttttgcgttgcctagttacatgagaaataattatacaagccagatgtgggatagttacccatgggacaatccttgcattgatgtcctttcttcgcatatgtacaaaggcgatcnttagactagaagatgattctatcttgttcttgctgcacatggtagtaataattcttcctacactatgcttttgttaaaaggacaaattaataagtgccttcttgacgttaaaacaagttatatcctggtatataagcattttaaataggactgactatcagtgtcctttaaacatcatacctttacttttatataagggattgtatacctgagtacctt

SEQ ID NO: 23636 - DNA, 471 bp, Zea mays
  unsure (1)..(471): unsure at all n locations
agcttgtggcgcccctcgacgtcttgtcacagccgaagtaccaattctcccacctggaagcctcggggtcgaacccttcgggcgtggtagtgtcgcagagactgctgataccgcgtcgagtggagtaaggccatgtcccgagcctctntgagctggtccaatgaatcctctcggctggtctggttactgcggtcgtcgtacgcctttgtcctcggngagccgtattctaagtccgtgggtaggacagcctcngccccatagactagaaagaacggcgagaaactcgtggctcggctcggcgtcgtcctcagactccagaccaccgagggtagctctttcatccaccgcttgccaaacttatngagggtcgtgtagatcctcgatttaagtccctggcaaatcataccgttagcacgctccacctgcccattcgtcatggngcgagctacngcggcccagtccacacggatg

SEQ ID NO: 23637 - DNA, 487 bp, Zea mays
  unsure (1)..(487): unsure at all n locations
ttcaaatgcttttcctttgactaaacaaaactcccnctaaataaaattctcctcttagtgttcaagaagggtttgatatatcaattttgaaatgctactttctcccccttttgaacacaataagataccaatttgaaaatttatcaattgagaatcataacaattgaaaaactcttttaaaattaggtggtggtgcggtccttttgctttgggctaatactttctcccnctttggcatgaatcgccaaaaacggagtcattagagcccttggaattgctctctcccctttggttataaataaatgagtgaagaatataccanagtagaagagtgatctcttctccaaagatggagagttgctcggagcgacggcgaangatgagttacggagtggaagcctttgtcttcgccgaagactccaattccttttcaacacacctatgactnggtttgaaatagacttgaaaaacattagtcatagcatat

SEQ ID NO: 23638 - DNA, 484 bp, Zea mays
  unsure (1)..(484): unsure at all n locations
agctngacctanggaaacagagaccgcacgttcgagttatgcgcagaccggaacgctaatgtcgcgcgcgaagaggttgcgcacacctgaagggctaaatactcgacgttaactgaaagggaaatatgcctttagaccatttctataatgttntggtgattaagtgcccaacacgtttaattaagttcttatgtgccaaataaagtgagaagtgaaaatcaaggcaaaaggtatgtttctagacttggtgaattgtttatgtactaatatggntatccaagtgctagaaacagtgactaaagaagaagggagaaaaagggaaaagcttggccccaatcttctgctcggtctggcacaccggactatccggtggtgcaccggacagtgtccggtgcgccagactggtccacggtgaactcgccgctcttgggtttcgacggcggcgtacggctataattcaccggactgtccggtgagccaacgg

SEQ ID NO: 23639 - DNA, 525 bp, Zea mays
  unsure (1)..(525): unsure at all n locations
agcttctanagggagaacacantttgngactaacatatgttcattttgagaaagtcagggtttgtagcgcatgtcaggcagggaagcaagttggtgttcatcatccacacaagaacatcatgatgactgacaggccactcgagctcctacacatggatctattcggcccgattgcttacataagcatcggcgagagtaagtactggctagttattatggatgactattctcgcttcacttgagtgttcnttttgtaggaaaaatctcatacccaagagaccttannaggattcttgagacgggctcaaaatgagttcggattaaggatcaaaaagaatagaagcgacaacgggacggagttcaagaacgctcanattgaaggcttccttgaggaggaggaggggatcaagcatgagttctcttctccctacacccacaacaaaatggtgtagtggagaggaagaatagaactctattggacatggcaaggaccatgctngatgaatacaagacttcagaatcggt

SEQ ID NO: 23640 - DNA, 529 bp, Zea mays
  unsure (1)..(529): unsure at all n locations
agcttcggcatgacagtagaaaaggggaaccgacttatatatgaatagccaaattagaccctaaagaattactatagagttattgataaatgtaaagggcactaatgtaattctgcacaggctgcgtcccatgcctataaatagataaacagtactcccatactgttcacgctgacttggcattcgcatcacgcttgtaccctcgctttccttcangccgaaggtacatttgtgatttngtaccgtttatacaagtaanatgaaatagaaataaatcaataataatgtctaaaataatcatgttattctctctaattcatgtgtaaatcttttcttgtctcttattatgattatgaaggtatcgccttcataaccttcgtccgaaattcattatacccaaggggaaataatgtttcgaaggacgaagggctnntgatattaatattctatgttgccttgttcttaattcatagcatttgagaacaagtccncaacattggcgcccaccttcggtgaaactcacttcatt

SEQ ID NO: 23641 - DNA, 458 bp, Zea mays
  unsure (1)..(458): unsure at all n locations
anngctttactttacacaacaattcataataaaccaattctcntttttgccgaagcaaccactttggtacataaatgctatgaatgaatgcttatgtatgcaaatgccatgatgtaatgtaatgtgcaaatgaatgtccgaagcgtatatccgaagccacactcatccatcattttcttgggagcaaaacacacgtcagctctgcattcccttaggaacgactntggagcatctttgccttttacttaagcagtatcagcgttgactnttcgctgtaagctctgcatccccctaaggacgtctttggagcttcttcgtcttttacttagacggtataagctctgcattcccttaggaacgactttggagcttcttcgccttttactttcggtggaatcagcgttgacttttcgctgtgagctctgcatccncttaaggacgtctntggagcttcttct

SEQ ID NO: 23642 - DNA, 480 bp, Zea mays
  unsure (1)..(480): unsure at all n locations
gcttgtgaagattcttcatcccaacatgtgccattctgcgatgccagagccagcccatgttagtcttagcaattaagcaagtgtcgagttcagctctatcaaaatctactaagtatagctgaccctctaacattcccttaaatgctattgaatcatcatttcttctaaagacagtgacacctacatccataaaaagacagttgtaacccattntgcataattgcgaaactgaaagcaagtngtaatctaaagaatctacgagaaaaacatttgaaatggaatggtcaggtgaatatagctatttacccaatcctttgaccaaaccttgatttccatccncgaatgtgatagctcgttggggatctnggttnttctcatangaggagaacatcttcntccctgtcatatggtttgtgcacccgctatcgatgatccaacttgagcccncggatgcataaacctacanaacaagttcagttc

SEQ ID NO: 23643 - DNA, 490 bp, Zea mays
  unsure (1)..(490): unsure at all n locations
agcttctanagggagaacatgtgataggttngactaacgtgcaattcgaaaaagatagaccttgtgcagcttgtcaagcaggtaaacaagtgggaggagcacatcacagcaagaatgtgaccacttcaagacctctggagctgctgcatatggacctcttcggacccgtcgcctatctgagcatagtaggaagtaagtatggtctagttattggtgatgactnttcccgcttcacttgggtgttctttntgcaggataagtctganacccaagggaccctcaagncgcttctaaggagagctcanaatgagtttgagctcaaggtgaagaagataagaagcgacaatgggtccgagttcaagaaccttcaagtggaggagttccttgaggaggaggggatcaagcacgagttctccgctccctacacacctcaaaaaaatggtgtggtagagaggaagaacaggacgctcattgatatggcgaggactat

SEQ ID NO: 23644 - DNA, 507 bp, Zea mays
  unsure (1)..(507): unsure at all n locations
agcttcgcacctctgaactaactcggctgcatcgntctttgctgttggccaatagaatcctgacctgaagactttcccgactagtgttctggaggctgcatgtatcccacattgcccagcatggacctcctccagaagttgctttccagtggatgggaggatgcactncatgaggacgcctgatgcaccccttctatacaatgtctccccaatgagtgtgtagtgaaccgactgtctggcgatgcgctcgggccgagtcttgtcatctggttcttcttcattctttatatactcgatgattggccttctcagtcatcagaagtctgactcggttgatctataatgttgcactcttctgcttgatccattgagatactcggatgtagaatttcttgcacaaagactcccggtgggaccngagttcgactggatcctgcttggacagacatcagctgctggtccgatctcttctcgtgagaaattcagacctcaattatcttcagcttc

SEQ ID NO: 23645 - DNA, 150 bp, Zea mays
agcttacaaaaaatgtctttatttgctctccgctctgtcttcaatccatatccgcgtcttggtgaatccaagacaccttttgtttcttcatgagaaatggcaacctgatgcattcttgtcaaccgtgacaaagacacatatgctgttatc

SEQ ID NO: 23646 - DNA, 400 bp, Zea mays
  unsure (1)..(400): unsure at all n locations
agtctttgatcattgataaactttaccttgactcccaatcagctagcatacccttgagagtcttttctttagtcgggtaagtcttgctgagtaattgcgtactcanggttntatcccctgtttgttttgcaggagaagttctatctccttatctcttggttagttacttcatgtggaggccttgaagcttagaatggttttatctcttatggaaaggcttcaccctttcaattattgtaataagttatgcacatcgagtactatcanngacttgaataaatacatctctttctaccatgtaaaacttgagttctgaaatgaaagtgtcctttgtaaaagtcttccgctctatnctcaatgtgtgtgtatcaaatgtgatatctgtaatatacctgtatgt

SEQ ID NO: 23647 - DNA, 488 bp, Zea mays
  unsure (1)..(488): unsure at all n locations
aagcttggcactaggccgggactgccgacagccacgacgtggccaggccaacgtcgcacaggcagagacggaggcggaggaggaggctctgctcctagcacatgcaagcatcgagctatttccagcggcaccggccgcagcggcactcctccaccttgatgactcgaaagcacgcgctttcctcggggacggctccagcaaagacatgatcgaaggatggtacctcgacaccggcaccactcattacatgaccggccgacgggagttcttcaccgagcttgactctagcgtncgaggctctatcaagtttggggacgcctccggcgtagagatcaagggcgccggctcagtcgtcttcaccgccgtgtctggtgagcacatgctgctcaccggagtctactacatcctgaaagggaaatgtgcccttgggccatctctataagtattntggtgaatagatgtccaacacannnataataaattcttat

SEQ ID NO: 23648 - DNA, 417 bp, Zea mays
  unsure (1)..(417): unsure at all n locations
attatctaantgtctaacggtacagtatatttatacgacaacattactactgaactgaagggtagcataagtttacgggaagtggttttggattggatgatctccggngatagtgagattcgtgacctttgatggcttagatgcagagacgctaaatagtggcaggatatgccatctagctcgacccgagtaacacttgtgttcagtctagactctgagattaacgatctctatgacacatagatatcatgtggaaaanataaaatgtgctatcctggatgatcgattgtagtttgtactgctagatacttcaataaggtgttttcgctgtaaagggtctctgaatgcattcatgtccgcatcatatgaactcctgaactgggcagaattgcttaatctaaagagcattattgacgt

SEQ ID NO: 23649 - DNA, 519 bp, Zea mays
  unsure (1)..(519): unsure at all n locations
agctntccatgttgtgctngaacattccaatccgatcccgcatctgaccgtggtgaccgtcacaagttggtgttcttctgcagtccgaatccagcatgttcaaatccttttccctttcggtcttctccctggttcctaagcaaaacaagagtgcacgggtctccatggtctaaatatgatggacatgaactcaagagtgtaatcacctgatggttgagttgacgagcacgagcgcgagtaatgggaccagaaattggtacttgtattggcatagatgtatcagtagtgtggatgtcttcatcagttccggtggcaaaaactcgtgctttgtatgcacccgacacctcgtttcggaatgggtgacgtgcgacaatgatattgcgcgaaaccaccccaaacatgagttctggacctaaagtagtggattgtgcatgttcgttgaaaaaacgaagaaatggtctggtggacaaactatgctttgatcacccgacacccgttacgaatgtgtgatcgcacaac

SEQ ID NO: 23650 - DNA, 513 bp, Zea mays
  unsure (1)..(513): unsure at all n locations
caagcttctnntctgtccttctnntgntggcganaggtgccagatatatctagctnggcgggccctctatncctgtttggcttctctttttcctcgtaatcccgtgtccccattttccgtggatgtggtggacaacggggttttctgggtaaacgaatcctctgctcctagctngtaggaggtagtcttcgcccagggcactggaggtcgtgctatttcctgcttcgtctcggctttgtcggagaattttgaggaaggcttcttctccggtggatccgctatacgatgcagaatcccttcttcgtctgccacggatgagatggttccgaagcanaacacagatcctaggtggagagaaatcttatgctggaaaatgatggccattgagctagcttggatcagtaacacacctcctacctggcgcgccagctgtntgtgttaggacccgaccgacacctggggtacccctcaggtgctatgggtggacaatgtaccaactgtactcgttgtcgt

SEQ ID NO: 23651 - DNA, 442 bp, Zea mays
  unsure (1)..(442): unsure at all n locations
agctntaccgcattgaagcatgagcgcttccnctnggctttggtcttgcttggctgtcccttgcgacctttaagcaccgtcttgaatctnttgatgatgagagccatctcttcatcattaagtctggccgcctcaatctgtgccaccttgctaggtagcacctccttgcttcgtgttgccttgagagcaaggggttgcggctcgttgatcggaccattcaaggcgtcgtccacgtacctcgcctncttgatcatcattcgcccgctaacgaatttccaagacttcttcggcgacatctggtgacctggatttcacgntattgtcaccnatgaggacaagacggaaaggacattacatcagcggacgacgtctggccgccatcgcggctccgtactcctatttgtgaaagggcttgaccgatattgttgagcgtcctgcctat

SEQ ID NO: 23652 - DNA, 399 bp, Zea mays
  unsure (1)..(399): unsure at all n locations
cgctgcagcttacgacctccaggggagctatccgagggcttgtatctagcgtaggagggtgggaaagggtttggccacggtggttgccctcgggcggctctggcgggtcgcggtgaggtcaccggagctgcgagcgagctcgggagagttaggcgcggcgcatatgaggcaacggngaagatggtcgggcactgtggtgggctttatagccgcggcgtgggcgtggtcacggtgcggccgcgggcgcgcgggcgttcgcgtgcgggcgtgctctgagcgcgccctcgagtgtcagcccacgtcgaacacgtgggggttacttctgccttggttcaacggcgattgatcgcctagcgtgcgatcatggaaaaccccatgtccctgcccaaatctaccttt

SEQ ID NO: 23653 - DNA, 425 bp, Zea mays
  unsure (1)..(425): unsure at all n locations
ttctagaatcaagaatattgagtcatgcctaagtctggtaaaagattgtgcgtggagtggctnggtaaagatatcggctaattgatctttagtattaatgtaagaaatctcgatatccccctttntttggtgatccctaagaaaatgataccgaatggctatgtgcttagtgcggctatgctcgacgggattgtcggccattntgattgcactctcattatcacatagcaaagggactatggttaatttgtaaccgtagtccccagggtatgcctcatccaaagcaattgcgcgcaacaatgtcctgcagcaatgtactcggcttctgcggtggaaagagcgaccgatatttgcttctttgaagctcaagacacctaggatcttcccaagaactggcaagtccccgatgtgctcttcctattgat

SEQ ID NO: 23654 - DNA, 399 bp, Zea mays
  unsure (1)..(399): unsure at all n locations
agctngctgccaaacaccgcattgatcagcgtacttttttctaccncggcatttccggatatcagaacattgaccttgcccatcctgaccaagttggccgcgcgttcgttctcgaaggctgcgcgagcttcagccgcaatatttgagagttccgaaggattcatgatcagttcccctcgaagaagtataatctgttgagcgttggcaggcgaggcccttcacgctgttggtgcgcatcaggggcgggatcgtggcgatcgtggactgcgagctcagtgaggagagatcgtgtgaaaccgacctgcgctgttggacccaagattgcgaccacattgtcgccagacaacgtgctgtcctcaaccgatgccttcgctcgatccgatgcaaccagggctacgc

SEQ ID NO: 23655 - DNA, 519 bp, Zea mays
  unsure (1)..(519): unsure at all n locations
agcttaatgcccctaagaaattgtctaactntgttaatggcanagctcccatggttcaagataacgagggctatattttatatcatgttggttatcccaaacataagattaggagaattcattctaggaagtctcactctggctctcatcatgctnttatgtataagagtgaggcatctagttctagacgttccactcatgttaaaatggcctaaaagaaatctcctattgcatcaaatgaacctaacatttcatttaagactnttgatgcttcatatgnntttaactaaaaatcaggcanagtagttgccaaatatgttgngggcaaacacaagggctccaagacttgtgtntggtacccaaggtgcttgnttctaatgtaaaaggacctaagaccgttngggtacctaagaacaaggcctaatacttgtttgaggtttatgcattccgggggctcaagtggatcattgatagcgggtgcacaaaccacatgactgggaagaaaggatnngtctctct

SEQ ID NO: 23656 - DNA, 359 bp, Zea mays
  unsure (1)..(359): unsure at all n locations
agctngcttctacacagagtatgctgttaaacanagctttgatgattgcaacaggaccttgaagacaaaaaacatgagatcataattgaaggtttagaaggcaaaataaaagatcaagtagctgctcttgaaaagaaagatttagaacttcagacaatggaaggcttactggcagaagctgaagcaaaaattgcgaagttggataaggagcttctctcaaaaatcagaaagcttcgaacaagaaaagcnagaaattgatacgaagtttgaggctgaggtcgaaaaaagttcaaatttgcaaaaatcattgaaagagcttcaaggtaaatgtttagaagtcagcaaccgatgcgtgcaat

SEQ ID NO: 23657 - DNA, 530 bp, Zea mays
  unsure (1)..(530): unsure at all n locations
nngctatcttaagaagaacacaaggtctgcactnngttctcaagctgcaatgtcctcctttgttggttctgctcctccgaagccagttactcaaaaaggtagtaaatcagtagctgccatgctntgcaagagcccagaagaagtgattgctgaacggcacagcaacaaagcttcccagtccactctagagcactgcacgaagaaaggaaggaggtccagcaaattgttgatgaccacgttgctgatntcttgtacgagaacaatattccgctgaacgtggtcaactcaagaagctgggagatcatgttggagtcgatagggcagtatggtcctggctaccgtggcccatcgtaccacgacattagnggtccgtggcttgaagggctgtcgagaggacatcattaatgacggcgaagcatgaagaatcgtggaaggagtatggctgctcattgatgtcagattcatggacagatgttagaggacgtcatctaatcaactttttgganacagtccagcagggacacactttt

SEQ ID NO: 23658 - DNA, 471 bp, Zea mays
  unsure (1)..(471): unsure at all n locations
ggcagccacgacgtggtcaggccaacgtcgcacaggcggaggcggaggaggaggccctgctcctggcacatgcaagcatcgagccatctccagcggcaccggccgcagcggcactcctccaccttgatgagtcgaaagcacgcgctntcctcggcgatggctccaacaaggacatgatcgaaggatggtgcctcgacaccggcgccactcatcacatgaccggccgacgggagtcttcaccgagctngactctagcgtccgaggctccgtcaagttgggggacgcctccggcgtagagatcaagggcgccggctcagtcgtcttcaccgccgcgtctggtgagcacaggctgctcaccggagtctactacatccncgcgttgaggaactctatcatcagctggggacagctggatgagaaacggtcgcgcgtggaggtngagcacggagtcatgaggatctgggatccctc

SEQ ID NO: 23659 - DNA, 468 bp, Zea mays
  unsure (1)..(468): unsure at all n locations
agcttatgaagattcttcatcccaacgtgggctagtcagcgatgccagagccagcccatgttagtcttagcaattaagcaagtgtcgagttcagctctattgaaattaactaagtatagctaaccctctaacactcccttaaaggctattgaattatcacttcttctaaagacagtaacacctacatccgtaaaaagacaattgtaacccatcttacataattctgaaactgaaagcaagttataatctaaagaatctacaagaaaaatattggaaatagaattgcaggtgatatagcaatnntcccaatcctttgaccaaaccttgattccatcctcgaaatgatagctctttnggatcttggttttctcgaggaggaaacatcttttctccccatcatgtggttgggcacccgctgcgatgatcaacttgaccccgaatgctaantacaaacaattaggcctgtct

SEQ ID NO: 23660 - DNA, 421 bp, Zea mays
  unsure (1)..(421): unsure at all n locations
ttgaatgcaacgggttgagcttcggatgtggtggcatcatcaagctcgttgatcttccttgagccttcgatcatgcattcaaagctcacaaaattcccgataacttcctcggnggtcattntggtatatctaggattaccatggattaattgaacttgagtagggttaaggaaaataagtgatcttagaataaccttaaccacctcgtggtcatcccactttacgctcccgagggtgcgtgcttggtcaccaaggtcttgagccgattgacatgtgttgtggctcctcccctttgcgaagccggaaccgaccgagctcccctcaatcngttccgctggtgatcttggtgagctataccttcatgcgcggtctgagtaaatccaatctcttggnctcttaacccttgtacttgtatactctc

SEQ ID NO: 23661 - DNA, 508 bp, Zea mays
  unsure (1)..(508): unsure at all n locations
agcttaatgccccgtctaanagattgtctaattntgttaatggcaaggctcccatggttcaggataacgagggttacattntataccctgctggttatcccgaacacanaattaggagaattcactctaggaagtctcactctggccctaatcatgcttttatgtataagagtgaggcatctagttctaggcaatcaacccatgctaaattgcctaagaagaaaactcctaaagcatcaaatgatcataatgtttctttcanaacttttgatgcttcttatgtgctaactaacaaatcaggcaagttagtggccaagtatgttgngggcaaacacaagggatcaaagaacttgtgttgggacccatagtcttgatctaatgcaaaggacccaaactgtttgggacctaaatcaagactaaatctgtttgtaggtttatgcatccggggctcaagtggacatcgacagcggtcacaaanatatgactgggagaaaggatgttctctcta

SEQ ID NO: 23662 - DNA, 498 bp, Zea mays
  unsure (1)..(498): unsure at all n locations
gcttattgtctntctcccgggactccattntccttcaatgagactactacacgtaatggacttgaaagcaggtattagtctcaaagatttagactatagagtaacctccccctgaaggtgtgcatacaagttttgaatacttatataaaacttgcactttgattttgatatcaagaggggaaaattatctataatccgaactttggcacgtataagttaaaatgataccaattgaagcaaatcaattttaggatatgacatatgaaaatacaaattgaagtatcattttcttaggaatgttgaataagctatgtgtcgtgcttaactaaacattttanaccatgtangcttgctcgagaatatgaattgaaagcgagcattcctaccatatgattgtcctaatgatatagttaattaattagtagatgtgataggagatagatatgtgactcgccctcccttggaggctctgagttgtacttctttgatctaatttct

SEQ ID NO: 23663 - DNA, 503 bp, Zea mays
  unsure (1)..(503): unsure at all n locations
agcttctcatatctggaataatctatggtattctggatagtcgacttagaattgatgtagacaaacttatacacctgagaaatgatcaactaggcaaactagttagtccataagatttgtgatggtcatcaagcaccaaaatcaattatagaaaatggttaagaccatttccctttcaatctgcccctntttggtgattgatgccaacacaaaccaatgcaaatataaagtatagaaatgtagctagtttgtattttgatagatttgcataagttactntgaaatgaaagcagttctaagtatatatgaatgttttgacatagttaaaatnttggaccacatttgcaccacttagctttgttttganatcttttgaaaagtcttttanattatttgcaattaccatggtagaaaataaatttcaaaacattttcactttgaaggatccnccttttcanatgcttntcttgactaataaagctcccttaaaaagtctcccttac

SEQ ID NO: 23664 - DNA, 510 bp, Zea mays
  unsure (1)..(510): unsure at all n locations
agctntagctgatttagagtcccttgttagattatccncaggtttagctnttccatctcttgacacanagtgttgtcagaggtcttcaccgtaagacagtgacatgaaaccttacggcttaacgcatctgccacaacattggctttgcctgggtgataatggatctccagttcatagtccttaataagctcaagccatcgtctttgcctcatatttaattctgactgggtgaaaatgtacttcanacttttatgatctgtatatatgtgacaaatatttcccagcagatagtgacgccattatttcagggcatgaaccacaacagctagctccagatcatgagtngggtaatgctcctcatgtcggcgcaactgtcgtgaagcatacgcaattactcggccctcttgcattaatacacagccgagtccactgcctgacgcatcacaatacacatcanaaggtttagtgatatccggttgagccaataccggagcagtggtaataatgtct

SEQ ID NO: 23665 - DNA, 515 bp, Zea mays
  unsure (1)..(515): unsure at all n locations
agctngcttgcttgcctgcctgcctctgatgttgattatttaaggttccaacttccaaggcatgagaatccgtctgtttcgtttcgctcgttacatctttgtgtgtactgtgtaggtatagctgctgctgctactctagtcgtagctagcagcatcccgtctctcccgtcccatgcatctcttcttttcttgcatctcagctgtacagtactagattagagacagatcagaggtgcattgggaaatggtgccatggctgacctgttcttcttcacctgtctcaactgtagtactcctactcctactgccatcgtgctgggttgagcagcacaggcgtctcagtgtgtgtgtgtgagagagagatagtcgccgttcgtgtcttccggggggtgctgccggcctgctntgcatctggacgtgcaggcggtgcagctactacagtgtatttgcagatttgtgtttatgctacacagggcccaggggggagatctgtgtggaactgttctacgccactc

SEQ ID NO: 23666 - DNA, 457 bp, Zea mays
  unsure (1)..(457): unsure at all n locations
ggatgagggtagagaaatgatcgagaataacaagtgactaaacacccaagttatgcaatagatgttgtactgtgtttgatgtaagtatagacatcagacgatctcttcatatactaagctgaaatcaaatcacgttttagttttgtactaagccaaacttgctgatttgaaccaagcttactgaanaatgcattaacatctacgatatcaaacaaatctcaaaatacatttcatggnggtatttattaatcttggttggtggtttagttggttgtgccatttttcttttaacgtggtcaaagatttaaaaaaagtttgacttatgacanaacanaaatggatacaattgaacaacaaagggagaaaatcataggattatngtattaggaataggatgggggggatatttgaatatatatcttcttatgactggcatactgattgtccgtttctatgt

SEQ ID NO: 23667 - DNA, 516 bp, Zea mays
  unsure (1)..(516): unsure at all n locations
agcttcggagcgccgaaagtctaaaaaacaccttccctgagctcgttgtcgagaaatgattcaatttctcagcgtgtagcggccccaccttgcagagttactgttcggtctctgcggtccaccacgcagcgagtacgagcgggtgtccgcctggtgtaaaaatcctggcgcttcgccttcttacctgcaacactatataaacagacgagtaggtgtgaagttaccacagcatttactgctatttacactggtttgctgccaaaattnttaaccgtcgccgaagcttgtctgtcggaatcgaacgaagcttcagtttgatacctgcttcggaggaagaaagtattaacgttccacaagttcataattaaatggccagagtgcgttctaccgccagggttgagcgtgagggggacgagactgaagcttcggagactggtcccatctccgaagctatgcaacgatccggngctggtgacttcggaaagatccctcatgatgatgcagaacaagcagaac

SEQ ID NO: 23668 - DNA, 379 bp, Zea mays
  unsure (1)..(379): unsure at all n locations
aacagtacaatagcaatgaatgttgtggtaacttcacacctacccgtctggttatatagtgctgcaggtgggaaggtgaatcggcaaggtctccagcaccgaacaaacagtcacccgcactcactgaacggtgggccacagggtccgagaaggtgaatcgctggcgcgcacgtaattggtgcaagatggggcgcgcgcgccaacgatattntaatcgtttctcgccaacgagttcagggaaggtgtnttttggatcttcngcatcccgaagcctagaagatttttcacggatcaagctcgttacgaaaaacgatctaacaccgcgaaggggctactggttggggtatgcttcatagccgaagatccctaaaaagacacc

SEQ ID NO: 23669 - DNA, 463 bp, Zea mays
  unsure (1)..(463): unsure at all n locations
ctcccacttggaagcctcggngccgaacccttcgggcgtggtagcgtcgcagagactgctggtaccgcgccgagtgtagtaaggctacgtcccgagcctcttccagctggtccaatgaatcctctcggctggtctggttgttttaggtcgtgtatgcctttgtccacggtgaaccgtattccaagtccgcgggtaaggtggcctcgaccccatagactangaaaaatggcaagaaacccgtggcccggctcagcgtcgtcctcatacttcaaaccaccgagggtagctctttcatccaccgctttcaaacttgttgagatcgttgtagatcctcggttttagtccctagcaaatcatgccattggcgcgctccacctgcccatttgtcattgngtgagccatggccgcccagnccacacggatgtggtggcttcgcaaaagccatgaactttttccatgaact

SEQ ID NO: 23670 - DNA, 502 bp, Zea mays
  unsure (1)..(502): unsure at all n locations
ngctngtggaggttcttcatccncacatgtgctaagcggcgatgccacagccagcccatgcaagtcttagccattaagcatgcatctagaccggcctcttcttttgcaaaatcaactaggtaaagcttgtcgtctagtacacccttaanagctagtgaaccatcacatcttctaaagacagacacnatctaaccctttaccttgccttgattcccatcaccgaatattattgaatcttgggaatctttggttttgacgtaggaggtgaacatcttcttctcccccgtcatatggttggtgcatccgctgtcaataatccagcttgaacccccggatgcataaacctgcaaggcanattaggcttgngtcttangtaccaactcatgttgggtcctgcaaggttagcacaaatatccttagggacccaaatggcaagtttgtctcccttgcatcttgcccctaattntctagcaactatcttcctatcctttctacaaatagc

SEQ ID NO: 23671 - DNA, 522 bp, Zea mays
  unsure (1)..(522): unsure at all n locations
agcttactcaatctttattggtgcttattaaatatactttaatggttatanttggcctaagccatgattctatctttntcataccctnttgctctctttcttgaattctgtttatagggcttcaattagggttttattgnggttgcaacatttntgccctttttgaaaatcccatttgctttgaacatgatattnttaagtttaagcttagtggatcttttattcttaagtcaatntgatgctcatgctcaattnggntcacataanatgatggntcttgggttagtacttgagaanaaccctaggtgacactgnngtgtcacanagtangtaagggtgttgtccatttctatctangtttcgtcctatagtcaacattatctctaataccacttctgtcacacccgggctttaaggaacaaagtcgggtgcatctcatacatgcgtcanagaagacaacatatattataatagagtgtatagagatatatgtcacaataatcagagtacttattacatacc

SEQ ID NO: 23672 - DNA, 238 bp, Zea mays
  unsure (1)..(238): unsure at all n locations
tgaatgcctatgctcttgagtgaattggtgtgttgagggggcttgtttctatatctatttatagccccaagccctcaagtagtcattggaaggagcatgcacagatctgctctctgatcatcggaacgggaanagtagcatcagccctaggaatcctgatggtgctttccaaactcaggtggcaccagaccggtctagntccaccaccgaaccgcacgtgttaggtagcccgtggagt

SEQ ID NO: 23673 - DNA, 463 bp, Zea mays
  unsure (1)..(463): unsure at all n locations
atcctcagagtcacctgcngctgcagcttgtgaggttcttcatccncacatgtgctanacggcgatgccacagccagcccatgctagtcttagcaattaagcatgcatctagaccggcctcctcttttgcaaaatcatctaaataaagttggtcgtctagtacacccttaanagctaatgaaccatcacttcttctaaagacagacacatctacatttgtgaataaaccagtatatcccatattacaaagttgactcacagacaatagggtatatccaagcgaactcactagaacacattagaatagagtgctcgatgaatagcattttttctaacctttcacctgcctggttccataccgatatgattgatcttggggggccatgtctgacgaggaagagaacatctctttccctgcatgtggtggtgcatcgtgcgataactagctgaccccgatgataac

SEQ ID NO: 23674 - DNA, 528 bp, Zea mays
  unsure (1)..(528): unsure at all n locations
agcttggaggagtcgatggggagcctacttgatgtagactcttctttcttctcctccgtcgctttgaatgcgatgggttgcacctcgggtgtggagggtgtcgccttgctcgacaatttgtttggagcctttgatcatcaactcanagctcacaaactttcctataacctcctcgggagacattagcttatctctaggatcaccacgaattaattgaacttgagtaggattacgaaatatgagtgatctaagaataacctttgaccatttcatggtcatcctatttgtgctcccgaggttgcgcacttggttgaccaaggtcttgagccggttgtacatggcttgtggctcctctccttnggtgaggatgaatcgaccgagcctcccctcgatcgtctcccgctgggtgatcttggtcacctcatccncttcatgcgcggtctntagcacatcccanatctccttggcactttntagcccttgcaccttngtatacttctctcgacatagagaggtgaggagtatagt

SEQ ID NO: 23675 - DNA, 470 bp, Zea mays
  unsure (1)..(470): unsure at all n locations
agcttatgaagaatcttcatcccaacatgggctagtcggcggtgccagagccaacccatgttagtcttagcaattaagcatgtgtcgagctcagctctatcaaaatctactaagtatagctgaccctctaacacacccttaaatgctattgaatcatcacttcttctaaagacagtgacacctacctcagtaaaaagacagttgtagcccaattgacataattgtgaaacagaaagcaagttgtaatctaaagaatctacaagagaaacattggaaatagaatggtcaggagaatatagcaatttacccaatcctttgaccaaaccttgatttcatccccgatgtgatagctcgttggggatcttggttnttctatatgaggagaaacatcctttctcccctgtcatggtggttgtgcacccgctgtcgagtatccaacttgagcctncggatgcataaacctacaaaac

SEQ ID NO: 23676 - DNA, 450 bp, Zea mays
  unsure (1)..(450): unsure at all n locations
agcnttgtagcaaggcaagagacanccaatgtgtggtggtccttgtggggtctaagtgacccgtgagattaaggaagaagcctcactcggtctaagtgaccgtttgagagagggaaagggttgaaagagatccggtctttgtgaccacctcaacagggactaggttctatagaaccgaaccttggtaaaacaaatcaccgtgtcatccgctttattttcttggttgatttggtttcccctctctcccggactcggattntattctaacgctaaccccggcttgtagtgtgcttaaagttgtggatttcagtttccgcctattcccccccctctagggactntcaattggtatcagagctcggtacttcattagagtctaaccactcgaagtgatgtcgagaggatccgccaatagggagatggaacaagcacaaccacggaaggctcatc

SEQ ID NO: 23677 - DNA, 497 bp, Zea mays
  unsure (1)..(497): unsure at all n locations
tgggtaaattttcaccgacatctgggaaaatggtggccgggagatggctcaagaaattataaggaanagtgaaaaaggtattcacgacgctagaaatgtagcagaggccgctgagaanagtgcggatctcgagaggcgaataggtattgactacntaagtttgactttatgttgtaattatatgatttcgaacttatttacactttgtaacacagtcgcactatcttctccccagagcccgccgagccattggcggatcccaacacanagggagatgacgaaattatgaaaatggctgaagctattatggataanggttgttgatcaatactaaacgaagctgcggaagtagtcttaagagaagatagctgctattgaaagacattgagaatgaatatttgctgacaaagtgtgtaatattttataaccttgaatgaatatataagctgcttataactaaattctttacgatgcatganactntacgtacattaccg

SEQ ID NO: 23678 - DNA, 453 bp, Zea mays
  unsure (1)..(453): unsure at all n locations
agctntanatgaagatgagaaagaaccaccaaaagagaatattattccgaagaagagaanagtatcatctccgaagcgaaaagtatccgacgaagaagagactcccgcatcacgctctgccactgacgtggaagagattttgaaggtaatgactgaatccctgcctgtgaagctaagtccattagagcctcaactgacgaagttttntcagaaggaaaaggagcccgaaaaaacgaaggatacaactaatacaaagagacaaagaatcatcgcagtgacagaagtcattgacaagacaccaccgagagcctcagcccggaagataccagcggctgaggaaataacaaatgttgaagtcgcaccttcggagatcgcggctaccgaagctacctcaaccgaagatntgaactttgaaaccacaatcgaacatatcgacanaatactgctaaacat

SEQ ID NO: 23679 - DNA, 491 bp, Zea mays
  unsure (1)..(491): unsure at all n locations
ccgacttaaagatgaanagccaaattagacctcgaagaattactatagagttattggtaaatgtaaagggtattaatgtaattntgcatgggctacgacccgtgcctataaatagatgaacagtattcctgtacggttcacgctgacttggcatttgcttttgcatcacaccagtattcacattccttcaagccgaaggtacattttgtaattaccgntgtttacatanagtacataagtaanaataaattaataacaatgtttacagagaaatatgtatnttctggattctgggttngaatattctttggcttttatcatgatcatgaaggttngccttcatgaccttcgtccgaaatccattatatccgaagggaaataatgatttaaaggacgaagggttttgatattaacatttttggttgccttgtcttgattataacatttgagacaagtcncaacattggcgcccacctcgtgaactacttcat

SEQ ID NO: 23680 - DNA, 396 bp, Zea mays
  unsure (1)..(396): unsure at all n locations
tttggttgaagtggtgaagatatttcagatatttcttcatcaaattactcctgaagctataatcagaatggggatatttgtttgggctgtgagaagccaagggctggaaccgagtgcatagtatttttgcaatatgcacgaactattgtacgagacgaaggccacttgcaaagagcagtatcacaacaacttcggttggtacggatntatngctcgtcccaatgcaagctaccccgttccaacatttcagaaaaggtggcccaggtgtaacatcccannanatccaacccgaggttggaaccctaatctcctngacccccttatctctccctaatntctnctcataggacatctcatcatatgcatacaccttgatagttagaagcacctcacata

SEQ ID NO: 23681 - DNA, 454 bp, Zea mays
  unsure (1)..(454): unsure at all n locations
gatcgcanacgtgcgaatcttggcaaaaatccggcgcaggccctcttctggcacctatggctatctcttgtatgtgagttccaagggggagataagccctangtcagaagaattgcggacgccaaatctggcttgtcccactatccactccgcgacanatgtgatgccaaatcaagtcaaacaaatttggctcggnnttcaaattttccagtgggtgccttanngtggttggcacctttntggtattcagactaaggtggtttgcgccatttactaagcgaacacatctgatcttagaatagnggtaaatttgacttagagagaatagagagctctagtgtgctctctacttaangggctgatttgnggtcttaaggngtcttttgtaatgttccctctgcttttgaggttataagttacttaacttggttaggttaactatggttgacattgt

SEQ ID NO: 23682 - DNA, 458 bp, Zea mays
  unsure (1)..(458): unsure at all n locations
tcttctgaccccatggatgctgaagactggctgcgcactgtggaacgagagttgcataccgctcagtgcgatgacagggagaaagtcctgtatggtccccgtctattgagaggagcagctcagtcatggtgggagtcttatctcgtcacccatgccaaccctgacaccatcacctangaagagttcagaggtagctctcgtcagtaccatgttcctgatggtctgatgacagtgaagaatgaggagttcctggccctcaagcaagggtcatcgtctgtcagtgagtaccggcacaggtttctgcagctgtctcgctatgctcctgaagatgtcaacaccgacaccaagcgacagtactgtttcctgagaggcttggttgaccctcttcagtatcagctgatgaatcataccttcccgacattccagcacctgattgacagagcaatcatgacagagag

SEQ ID NO: 23683 - DNA, 315 bp, Zea mays
  unsure (1)..(315): unsure at all n locations
gtgggacatggactcccatangtaagacatccgtatcgaagaagcgaccacttgagcccttgaccctttacgaacaacaggcaagacttgtctgaaatccccaccgaagacaatggttntaccaccgaatggtagttcgggccgacccattatatcgcgcatgctattgtccagtgcctcaacggcttgtctcttggtcatagaagcctcgtcccagataatgagagatgctttccgtagcaactcttgcggttcactctgcttcgtgaagctacatacagcgccatcgtcaatagtgagaggtattttgaagcg

SEQ ID NO: 23684 - DNA, 549 bp, Zea mays
  unsure (1)..(549): unsure at all n locations
atccttaagcacctgggctgcagctaaccttgtacgaggataagctaccttgggttcaaaggtggagggtccttaagtccctttgaaatccttaagggtaattgcttanaatgtttccaacatgctttcataagtgcatagtctgtcgtgagcatcacacttttgttatgatacattgcacttcaccttttctatgatatagatatgttctcattaacctaattatgtgcacttggcatttaaggccaaaatntgtattcttctcaaagcacatatttagggggagcaatctatattatatagaactggctaagcttaattgacatatcctttntaccatgtccctttcgttgggaccattgcatatttcctatctctcttatgccaaggctaagactaatatgtntccatgagtnatcttgtgtttaagtcttagattgaaagggaaatagagtattcggcaaagacaccgcttccactctacaccatcagtattatctatcctttngccggtattccgacatctctcanaattggataatctttact

SEQ ID NO: 23685 - DNA, 437 bp, Zea mays
  unsure (1)..(437): unsure at all n locations
agctntatcanatggacgtganaagtgccttcctcaatgtaccaatcaaggaggaggtctatgttgagcaacttcccggctttgaagatagtgagtatcctaaccatgtctataaactctctaaggcgctntatgggctcaagcaagccccaagagcatggtatgaatgcctaagagaatttcttatcgctaatggcttcaaagtcggaaaagccgatcctactctctttactaaaacactngcaaatgatnntgttgcatgccanatttatgttgatgatnatcatattgggtctactaacgaatccacatgtgaagagnttagtangatcatgactcanaaattcaagatgtctatgatgggggagtcgaagtatttcctaagatttcaagtgaagcaacttcaagagggcaccttcattagccaaacgaagtac

SEQ ID NO: 23686 - DNA, 117 bp, Zea mays
  unsure (1)..(117): unsure at all n locations
agctntatcanatggacgtgaaaagtgccttcctcaatggacccatcaaggaagaggtctatgttgagcaaccctcccgacttgaagatagtgagtatccttaccatgtgtataaac

SEQ ID NO: 23687 - DNA, 520 bp, Zea mays
  unsure (1)..(520): unsure at all n locations
cccgcgtgcaagcttataagtttctggatgagaagtggtcacccatgtttctttgatgaagcactagaagactaatcgaggaagaaatccatgtgggagttcgcaagagaaaggtttgtgtgttggcatcgatgcttcttcaataagctagctgccaagcgaaacctagaagcctgaagatgatcttgagtagccagaatcagcatttgcaatcggcaaccagatgctcctcaaggctagatcttgttgaagttccatctcctcgaagagttgcaaagtgaagatatgtagctgaagtaaagctatacccataacccttctaagccgaatctcgaggacgagattccttttaagtggngtagatttgtagcatcccaaaaattcaaatctttggaatttctcaaactcgctcttaaattcaaatgaatttcaaatctcatttaagaatgtttgtttgcgagtgatatcaacaataaatatagtggctatattctctncaaatccttcttanatatctaca

SEQ ID NO: 23688 - DNA, 454 bp, Zea mays
  unsure (1)..(454): unsure at all n locations
catgtcgtcagctgagagagcaaactctggctgaacaacagccttaactccatcttggtcaccgcggatgaatttttgctcagaggagaaggctccaattntagcaaagctgctctttaaattttctacgcattccatggatatctcataacatttttctttggtagcacgaagctcatcagcattcttctgggctcttcaatttttgatttcgcatatctcatgcttcaccacatcaacttcannattttcagttgcttcaacaaccttcctctttagctcttgtacttaagctttgtgagcttcggcttgggcggcatgctnggcctcgttagatttccgtttacctactaangagagtaatattntgtctttttcaagaagcttcgttcttagcgtgataacttatgagcgcangttcccaagagctatgtgatagctctcatcctctgca

SEQ ID NO: 23689 - DNA, 387 bp, Zea mays
  unsure (1)..(387): unsure at all n locations
agctnggacgcgtctattgnntgtctacttggagaaaactcctccttcttctcctccgtngcctagaatgcaacgggttgcgcttctgatgggtcgccaagctcagtgattttcctcgagccttctatcatgcactcaaaacttacaaaatgcccgataactttctcggtggtcatgttagtatatctaggattaccacgaatcaattgaacttgagtgggattaataataatgagagatcttataataacacttaccaacttcgggtcatcccacttcttgctcccgatgtgcgcacttgtgtcaccacagtcttgagccggttgacatatgttggggctcctcccttgtgaagccggacacgaccgagctcccctccatcgtttc

SEQ ID NO: 23690 - DNA, 397 bp, Zea mays
  unsure (1)..(397): unsure at all n locations
catgtgtccttattggattcngtctcatatatagagtcctttgggcacacggtctctatcctatattgatatatatatttgggcctaatgccctcatattgaatacgagttctattcataacagatactagcctaaagcaatactgattagcttagccaaagcaagatcattactttggtgaataagttccacagcttgctcagaaatcggctcatagcatgagtcaatctcatcaataagatcaccaatggctgcgatgacatcatgcttcagttntctagttgagctctttatctcagctgctatagtagaacaaacatgacttcagtgccaataatgacatanaaaggcatanaacacctacaanggtaacatanatgaccctggtattattat

SEQ ID NO: 23691 - DNA, 233 bp, Zea mays
  unsure (1)..(233): unsure at all n locations
agcttatggagattctntatcccaatatgtgctagtcggngatgccagagccagcccaagttagtcttagcaattaagcaagtgtcgagttcagctctatcaaaactcactaagtatagctgaccctctacactcccttaatgctattgatcatcacttcttctaagacagtgaccctacattggtgaataacagttgtacccattttgcataattgagaaacgaaaagccaa

SEQ ID NO: 23692 - DNA, 423 bp, Zea mays
  unsure (1)..(423): unsure at all n locations
ctaatggcagggcatctcccactatagagcatacttctagcannatntaaattttcattttctaactcatgctcggcaattttagcatctaactgtgctatatgatcattntgttgtttaatcatagtaatgtgatcacaaatagcatcaatgttaacatctctacatctagtgcaaatagtaacatgctcaacggtagatgtagagggtctgcaagaattaagtcaacaatcttatcatgtaaaatgtcattctcatctctaagatgggagatagaaacattgcanacatctaattccttagccttagcaatntaattttcattctcatttctaaggctagcaagagaggcattcaatnnttcaatcttagcaattgaactagcattattatttctaagaatggcaattgaatcatcacaaa

SEQ ID NO: 23693 - DNA, 328 bp, Zea mays
  unsure (1)..(328): unsure at all n locations
ccgaaacggcaaacaatgttttgccagaagaatttttgggcagtctttgatgttattgtagaaacagccctcgcctcgatcccattggtgaagtactcgacagcgacaaaggcgaacttaaggttcccctgagcggtgggcaggggcccgacaatgtccaggccccagcgctggagaggccatgtatgggcgatcagctntgtatactgcgaggggctgcctgaccgaggagaaaacttctggcaggcttcgcaggaccttgtgacctggttggcggcgcatatcattgcgggccagtaaaaaccctggcggatcaccttagcagcta

SEQ ID NO: 23694 - DNA, 510 bp, Zea mays
  unsure (1)..(510): unsure at all n locations
tgcaagcttcgtatatccaatgttatccatcatgaagcgacacacgtcaattcctctactatctaggtagcaagagttgaagagaaggatattntagccccactgaagacagttgctcctgatggatattntagcccttcagcataagcttacacgtgagcaatttgcttcaatgatagctcctttccagccatatgtcgaataatgtatttaggaggcccaaccatctcctcatncgttggcattggcatctcctctttagtgtagtccttttgaattagaatgggttcttcaactttctcatcttctttacactttaatttttcctttgcaatattctcttttggagcattgtcaagagtttcaatcaactttgacagcaccacagtcagcgcaccttcagtggttttagcgctttccttctttggagagactggtgagagcccgatcacggagggctcttcggcagtcgcggtatcgaagaagcatgtcatgaatgagttcattctc

SEQ ID NO: 23695 - DNA, 517 bp, Zea mays
  unsure (1)..(517): unsure at all n locations
agcttatcatcacctnttaaccattatatnnttgtgttcatcatggacctctacctgtttcagtggttgagatctataaaatacgatgatttgcatgctgcactctagtggtagctgatgaaaaattcagttgttattntaattttctctgatagaatgcactacgagccaaggcgtagaattcaaccacagagattatcctctataaattggattcaggttcctattgngatttcanggttaaaggaacttgcgatctacatatcccatcatgaatnttgttcatttctagagtaaactttttgtgtgatgagaagaagacatancttttactgtgcactcttccttgcctaccacactttacattcaagtccggtaggttacataggggctgatnggttctcnggctatctcatgcctgcttcgagcgggcctggaccgcgagggaagcccactctccacttctccacgcgtgcaggccagacagtgaaaaagggctaaactgatgcgccatgca

SEQ ID NO: 23696 - DNA, 410 bp, Zea mays
  unsure (1)..(410): unsure at all n locations
gctaaggatngttcanaaaaggtaagcaagcaatccatatggtatccatgtttgtaaattcatatgtgatccaacaatatattttcctaatgcagagaccaacatcacacagaaagaggtttacataggtgcaatttatttgctagtacttgatttactcgtaacctagaagaagtgagtagaatagtgcccataatattccgatgttgcaaaaaatgattccccatagaatggatannttttctaatttagaatntacatatgcaatgggctcctcaagctgcgttgatctcagaacttggtgaaagtcacctaaaggggggtagataggcggaaactggaaattacaactttaaacacactacaagtcggggttagcgttagaatataatctgagtctgagagagaga

SEQ ID NO: 23697 - DNA, 473 bp, Zea mays
  unsure (1)..(473): unsure at all n locations
agcttcaactcatcgctcatgaaaaaaataaaatgaattgattntggtaatgtgcaatgttattcattnttataataaaaacatgtattccaaaccaaattacctcatcaaatatccacttaggagttccagagttctgcagcaactttatatatctgaacaatagtccgagagtatcctccatgtgttctatcaccagtaatcaggtttatgatcttcagttacatttaaaaagttgatatcaaaatggcccctcagaaagtaccaactcaccctgcctacatntgtgagctgaataacaacgcagaagaatgaaaaatcatgactccaatccccttcaccagcttccaaactcatagcccatcctgaatatagaacagaactggaattaaccatgaatccggataccaaataagaggataagaacagattctcttgagaggaataaaatgtcagcaataagttcatacatg

SEQ ID NO: 23698 - DNA, 450 bp, Zea mays
  unsure (1)..(450): unsure at all n locations
agcttcagctccatctatgttatggattgcttttgagtcagtccaattgccttcggcccttcttgcagcttcctgacttccatggatagcaatgggtccttgatccgaaggtatcttcatgcaaagataggcaggatgaaggattgcttcgaaggcattgagggtaccacgaccaataattgcgttgtaggggtattccatgtcaacaatgtcaaacacaacttgctcagttctagtgttgttgatgaacccgaaggtcactgacatggtgatcttgcccaatgctacaatctgtcttcctccgaagccacagagaggatgtgtagcatcatgaatcttatcttctggctcttgcattngtctgaaggccttagcaaatatgatatcagctgcactggctgtgtcaaccaagacattgtggaccagaaatcctttgataacacaagagat

SEQ ID NO: 23699 - DNA, 463 bp, Zea mays
  unsure (1)..(463): unsure at all n locations
tgtcccaatctgatccttctttccataactataatgcggaagaagaacaacaatatttaagtagtcttgactcttganaagctntgctggcatgataattcattgttatgagttattggtactgcatttatcttgtgaatatgccgttgattangtgcactanatattctttctcctaatcatcctgttggtattttcattgtttctgcagttccctgacaaatttgtgctatacaacgcaatactatatctagaatcatgtttatactcaatcaatngtgttcagctatgatgcttggtcatctcaatttcttttactntgcttggatgggtggaggcctgtaatgtggggaagttgaatgacatctctgaacctatggtactgatactgtgtaccactatccctaatggtgctaatctttctgtgttaatgatatcacatttatctgcacagcttaaacct

SEQ ID NO: 23700 - DNA, 504 bp, Zea mays
  unsure (1)..(504): unsure at all n locations
agctngaagccatggtaagtagcataggcaagtaatatacgaattgattctagcctagctacgggtgcataggtttcaccgaaatccanaccttcgacttgtgaatatcctttggccacaagtcgagctntgttccttgtcaccacaccatgctcgtcttgcttgttgcggaagacccacttggtccctacaacattttggttaggacgcggaactaaatgccatacctcattcctagtgaagttgttgagctcctcttgcatcgccaccacccaatccgaatcttgtagtgcttcttctaccctgtgtggctcaatagaggaaacaaacgagtaatgtttacaaaaatgagcaacccgagatcgagtagttacccccttttgaatatcgccgaggatggtgttcacagggtgatctncgtggattgcttggtggactctngggtgtgtcggccttggacttgtcatcttctcatcttgacatgagcatcntccccttgatcat

SEQ ID NO: 23701 - DNA, 449 bp, Zea mays
  unsure (1)..(449): unsure at all n locations
actatagagcatgcttctagcanatataaaattntcattttctaagtcatgctcattaatcttagcactaagttgagctatgtgatcatttttgttggttaattaaggctaggtgatcatgaatagcatcaacgttaatgtctctacatctagtacaaatagtaatatgatcaacactaggtgtagagggtttgcatgtatttaattcatcaatcttagcatgntaaataagcatttcattcctaagatggaaatagaaacattgcannacattaaatctttagccttagcaatttaattcttcattctcaatttacggctagagagagattcatttaacttgtcaatcttagtaattaaactagcattatcatttntaaggttgacaagagaatcatcactaacatttaatttatcaaccttagcaatcaatntatcattctcaattc

SEQ ID NO: 23702 - DNA, 339 bp, Zea mays
  unsure (1)..(339): unsure at all n locations
acatgtgatatgtctaactaatgttcaattcgaaaaagatagaccttgtgcagcttgtcgagcatggaaacaggtgggaggctctcatcacaccaaatatgtgatgacaacatcaagacccttggagatgctgcatatggaccttnttggacccgtcgcctatctgagcatangaggaaagaagtatggtttagttattgttgatgacttttcccgcttcacttgggtgtctttttgcaggaaagtccgaacccatggaccctcaacgcttctcatgagagctcaaatgagttgagctcaagtgagaagataagacgacacggatccattcagaacttc

SEQ ID NO: 23703 - DNA, 465 bp, Zea mays
  unsure (1)..(465): unsure at all n locations
ctcgacccgcgatctctgagtcacctgcngcatgcaagcttaccgcatttgaagcatgagcgcttccncttggctttggtcttgcttggctgtcccttgcggcctttaagcaccatcttgaatctnttgatgatgagagccatctcttcatcattaagtccagtcgcctcaatctgtgccaccttgctaggtagcgcctccttgcttcgtgttgccttgagagcaaggngttgtggctcgttgatcggaccattcaaggtgtcgtccacgtacctcgccttcttgatcatcattcgcccgctaacaaatntccccaagaacttcttcgggcgacatcttggtgtacctgngattttcacgaatattgttcaccaaatgaagatcaagaatggtaaatgaccttagcattaggcggacgacgtcgtggtccgtcccatcgcgtgctccgtagcttcttaattttgt

SEQ ID NO: 23704 - DNA, 504 bp, Zea mays
  unsure (1)..(504): unsure at all n locations
agctngagcatggatganaatctncagatgatcgcaaagattgctgcngnntgcaatgatgcgagcatttgccacgctgagcatcagtatgttgctactgggatgcccacagaagctgctctgaaggtacaatctgttcaagcgataagatttcctttcatttggggtgctgttatagttaaattgtttttctactgcaaaattatcttgcatgtagttttggagcaggtaatgtatatccgcaaaaggttaatagcantatattcaacaaaagaaaaatatgataaaagaactagtagctactttcagtgatctatgtacaattaanaagattgaacacaactctttcatcaaggtacctganattngtgaatntacattctcgtgtgactggttctacttctggcaggtttggttgagaaaatggtgcttcctggtggctatactncatctttggaatcatctgattngctaagtatgtattcctttctgctntgtaaatgt

SEQ ID NO: 23705 - DNA, 441 bp, Zea mays
  unsure (1)..(441): unsure at all n locations
agcttactctgcgtcccttagaacgactntntccttgctccgaanaatacatatcgtggtggaggcaagcttattcgcccttctcttgcanattcttaacaattgaacctgtgaagaaaatttactttcctcgtggcaaacgacaaaaccattacatgaagtttaaaaagtgttctttattacatgaaaaatgaaacttgaatagagaagacttctatcanagtaggatacttgtcaatagatgtgctttgactctggcacagtgctattaactgtgcgagcttcggactgttctctgaaatcccgttgattttgagtatattggcccccttctggctgctggccttgttgtaacggtggtggaggcggaggttgttgccangaagcctgatgctgactcgccgaagcaacagaagctgcanggtgattgcctacatattc

SEQ ID NO: 23706 - DNA, 538 bp, Zea mays
  unsure (1)..(538): unsure at all n locations
agctntgcggaaccatgaccaacacaagcaatgtactgcttcattgaaggcatctgttcctgctcccatgtgtaccacttcaattgattcgctgcaagctcaaagcgatttagaacctcaggaactcttgtggtgtgagatggccaaggaattggacgtaaagcagcacttccacacccaaactcaacatgaatatgaggtggtgccaaggctgctgtagcacccaaaaaatcaaatccagaanatttctcaaacttgctctaaattcaaaatgaattntaaattnntgttcacaatgtttggttacgagttgatctcaacanataaaatatagtggtatatattctctccaaaatcctcctcanaatatcctacaaatatttcctagtaatccccctcaaattctttccaaaatactgcccagatattccaccgataattctccaaatattntcctcctgagaaataccttcggaatttattntaaagtctctatanatattntcttcatacctttcctcatgctcatatgtatatg

SEQ ID NO: 23707 - DNA, 501 bp, Zea mays
  unsure (1)..(501): unsure at all n locations
ggcgtgcgagcnttgtcagttgtccgtcggtttaagaacttgtggatgtataacttgngatcatgttgtgttgaccatactntanaagtccagtgtatgtatgctggcaacttgcgtgtgtgcgagaatgctnggacaccatgaagtaatataattagtgatgttgtcgtgaatggattattatgcctctgttttaaattaccacagntactccccctgtcaatttattcggggatgattacattcgtttgcaatccttgcaacatcacctgataattacnttgtgctganacatgcagatggtggatactcgccacaccgctattggtgccagtggagctagcgacagtggtatcgagaacgatggccaagaaaattcactcccgccttcaccgcccattaccgctgagcaattctttgcccattcctgngtgctcagaggaacatggaaggcatgcaacggaacatggaggccgccttgacaacatagcaacaacaccc

SEQ ID NO: 23708 - DNA, 458 bp, Zea mays
  unsure (1)..(458): unsure at all n locations
gagacacctgcggcgtgcgagctntattagaacagcgcgcgcatccgccattgcgaggagcatcgtatgcaagcgatctgcttcaagtgtgctgcttgccgtgttgttgtcacgagcaagattgctgatgtggctcaacttggatacctgaacagatcagacaacaaatcttgaggacagtggaaagaaataaagaactaccctctctgcaccaaattataagtcattctaactttttgngggactcacagcatatcatggttgacaaaatntatataactaaataataacattcgtgatgaccaacaattattactacatttgtaatcaattatatctctaaagtatacttacttagtggcatacaattntataattccatctatatattaagtcaaacttgagatgttatgactctgcacgatcgtaaagtaactatagtgtaagagcagactaat

SEQ ID NO: 23709 - DNA, 415 bp, Zea mays
  unsure (1)..(415): unsure at all n locations
catctcgtcccgngatccttagagcgactgagctgcagcttagtgcacaacaagatctttggaggatntatttctcttagagctccaagctactagacggttagggcgtgcttatgagactccaaagcttatgaaagaccataagaagtttgtattacctgctattntgagcaccactagtaagtgacctcacttaggtgatgtttggttcacatatttgtaatgtaatgggtaacaaataacattaaatcatttntgtttaaatccaaccgtaatcagataacatactangaattgataccgacctatacaaacttngttaccgttgtaatcgagtgcgaaccattaccgttaccatttacgttacattttgtgaaccaaacgacaccttggatctttgtggtcaatgagggga

SEQ ID NO: 23710 - DNA, 372 bp, Zea mays
  unsure (1)..(372): unsure at all n locations
gcagcttgtgagcagtacaagtatagaagagagaatgctgcttcngctgatcagccgaagcccatgcttctatgtgaagacattgcagagcaaaaggtattgctagggtctcaattatctgaagagcaggagaaaactttgataaggtttttattcaacaacaaagatgtttttgcatggtcggccaatgatctctgtggtgtcaacagggatgtcattgaacattcactcaatgttgatccatccttcangcccagaaagcanaggcttcngaaaatgtctgatgataaagccaaaggtgctcgaaagacttctcagtgctggtgtcatcagagaggtaaaatacccaaagtggctagccaatactattat

SEQ ID NO: 23711 - DNA, 476 bp, Zea mays
  unsure (1)..(476): unsure at all n locations
ggcaggggcactccactcacatgcactgttagctgggcatgcanggctgcaggccggccatagtgcaagtcacatgcatggccactcgcacacacagttgcaaacttgcaattcgcgtgccccaccccactcacgacacctttcccgccacaaaggcaaaaataaaggtttgtgcgtgcaacaacacaatcgtgtcaactttactacttgcacgctagctgtccgtcagttgactgctcgtcgatgtcatcatcaagtctttttgtaatatctgacgcacacgcacgcactactaccaataacgaacccagctaatctntaaatttgtctgtgtccgtcgtcgtctctgtgtactatacaaggtgacggtgctggtgctggtgcggtgggagctcgagaccccggcggcgaagtggcggtgaggatggacatcgaggtcaacgactactctgngtcctgtgcaacaaccgcatgac

SEQ ID NO: 23712 - DNA, 421 bp, Zea mays
cagctatagttctgaggaaagggcactctcttcttgatgaacctaaagagcacaagaaggaccatgaaagttgcagaaaagttgtggtggatcatcttttaataacactgctgcaaactaaacctgaatatttgagagcaaatacgttgtatacaccgatgctctaagccaatttgtgagttcatctcttagagctgaaggagatatgtctaataattattccataccttctagccatctcagacagatctttaatgggggattgagctcccaaattaatttggattctcactccttaatcaatgattaatttcattaagttgtgcacttatacaattattatggttatgctcaatctcctcaatcacatgtttcagggccttaatcttctaaactgccattttccgtactgtaagttcta

SEQ ID NO: 23713 - DNA, 248 bp, Zea mays
  unsure (1)..(248): unsure at all n locations
tctgtatgttcatgatccgaatacanagatacctgttcacatanttcactcgtgaaatattgtcaaatcatgtttgtgaggaccttctgaagccgaaagcccccaacaagttctcaacattgagaagaagaataaagaccatgaggctaccttggagaaanaagacttcatacttctaaccatggaaggttcactggcggaggcccaggccacaattgatagattgaatagtgaactcttcatggaaa

SEQ ID NO: 23714 - DNA, 267 bp, Zea mays
caaactactgttgcaactctgataaccaacttctggccatctctttcctaatatcataaacagagtagctgtttgagaacctaaataagcctcaagtccctaaaataatgtcatgacacattatggaacacaagctaccaagatgaaacacttcttctagaagcaacttggtccgggcattacatgggctggtattataagttcatacaaattcggcacactcggtgattgtgtactacgatttacacatgttaacttgttttaaca

SEQ ID NO: 23715 - DNA, 154 bp, Zea mays
gttctccagcaaaaacctcttgtaatacctctgaatggcttcattaccccacgtatcgctcgaatattgcctttgcccctcgtattattgttgccgatgtacttattagctgtaacgtttagtcaagcgatgtaagttgtatacttctaaaaac

SEQ ID NO: 23716 - DNA, 495 bp, Zea mays
  unsure (1)..(495): unsure at all n locations
attcaagcaagaacatatgatgatgtcaagggacagcaaggtgttaaggatgagagacacatgaccaacacntccccttacttattgagcatatgcactaccaacatatatgcaagaagattaatacttacttttgtacctttaccaagntgtagtgtaccttccatcttgaaggtatttaatctcacgtgagcttctccacacttgtgcctgattctttatcctaactanttctttgttgctaagacatcanacttataaacaagtattagtattgggcacaagaagaaacttctattctaatgattatcataggatgtcanttaatgcaaactaccatggctaccaattgagagataccaattcaaagtcattattatcgtagctcatgtatttaaaataacattattataccagattttagacatgagcattacggattacattctatgactaaataccatactgactacagagaccagtctgatgtcatta

SEQ ID NO: 23717 - DNA, 161 bp, Zea mays
  unsure (1)..(161): unsure at all n locations
gcttattttctttgaatttgctcatggggttcacttagagttcttaattaagggtgcacattcttatcttctcaaggactcaattgttntgatcatgacaccttcaaacatatacttggtgaattctctgtcacttaaggtattntgaagctcatgcttac

SEQ ID NO: 23718 - DNA, 217 bp, Zea mays
  unsure (1)..(217): unsure at all n locations
aagacagggtttgtatcgcatgtcaagcacggaagcaaagtggtgttcatcatccacacaagaacatcatgactactgacaggccactctagctcctacacatggatctatatggcccgatagcttacataagcatcggtgggagtaagtactggctagttattgtggatgattattctcgcttcacttgggtgttcttttngcacgaaaaatctca

SEQ ID NO: 23719 - DNA, 385 bp, Zea mays
  unsure (1)..(385): unsure at all n locations
ctttcataaggggcatacttgttatccctcacaggctgcgccctgtgcctataaatagtgaacagtattcccttactgttcacggattctggtaattgcaaccggatattctggaattcaaccttttgtcaaggcagaggtattattgtattcaatgattggatatgttaagaacatataatataattcggccatgacttatttaatctctttgacctcttatttatgtcatcttgaatatctatgaaatctatacgaaaactaactcgaatttactctataaccttcgccaagaccattatctaanggaataatgttatggacaaggacgtgacattaacatnntatgtgcttgttctaattatacacttgaaacgagtctcac

SEQ ID NO: 23720 - DNA, 118 bp, Zea mays
  unsure (1)..(118): unsure at all n locations
ctcagcttaacgtcagaatccacggcagtgatgacgtggcanaggcaccggactgtnctgtgtgcaccggactgtccggtgcgccatcgagcagacagtactccaacgaccacttttg

SEQ ID NO: 23721 - DNA, 179 bp, Zea mays
actccagaatatctttgaccttgctaggatctaccgcaattcctttatctgataataccgtgccccacaaatgaatttcttccagccagaacgcgcacttactgaacttggcatatagctgatgttccctgaggcgcgtcaatacaatctgtagatgctgagcatggtcctcttcattc

SEQ ID NO: 23722 - DNA, 220 bp, Zea mays
gagatcgtcagtaccagtgtagtgcggatcaatgataagaaatgcacaatctccactggcttcgttataatcaactcccacaagggtgtaagccaagactccaccacctggatatgccaattctatgtcagcgaacactgtatatcaaacacgtttaatactatagacaaaagcacataccaatcatcacaggagttccctgggtttctaaatgcctggc

SEQ ID NO: 23723 - DNA, 174 bp, Zea mays
  unsure (1)..(174): unsure at all n locations
caagtgggaggagcgcatcacagcaagaatgtgatgaccacatcaagacctctggagttacttcatatggacctcatcggacccgtcgcctatctaagcatangaggaagtaagtatgtactagctattggtgatgactnnttccgcttcacttgggtattcttttttcaggat

SEQ ID NO: 23724 - DNA, 481 bp, Zea mays
  unsure (1)..(481): unsure at all n locations
ctcagcttaactcttgcantaaatacttacctagtttaacaaaaatgcattaatgtatgaatgatagttntgagaggctaaactatgtgtaaagcagggatatgcatagacatgctttctcttnctcttatacaagataagcaagagatgtatagaagaggaagatttatgtacatgtataaatgagaggaagtagttttacccttttgtaccttcacatagagatgctctcttcattgtgcgttgaccttagtcttaggtacttaagacctataatcaagacagtgtatggtatatattttcacacgagagaagtctacaactagtgatcctcttctaagtcattcgtattatatatcaagtagatcacagatcgcataaattatcatgaattctccctttaacttaggcatatcaagagagatattgattgacattatatgaggcactaagaatcataagcgttaattgatagtattca

SEQ ID NO: 23725 - DNA, 220 bp, Zea mays
  unsure (1)..(220): unsure at all n locations
tcaactagctatgcaagcttgtagttcagcttgtgtgtgactgcacatcttaatggtatgcncaaagtgcctcaatctaagctgtatggtacatgagtaacttggctgcctaatgtattttatgattaaataggctctggacaactaatgtatccaagtgtaccgccaattcttcatatgagaggtgatctcatagctcgttcttggttggaaagctgtt

SEQ ID NO: 23726 - DNA, 452 bp, Zea mays
  unsure (1)..(452): unsure at all n locations
tcagctgtgttatncattaaacaagcacatctcttacatagattttctattggttatactcaacacaagagatgacattagtagcacaagcactagtttcttatttagccaccctctatatgcgaaagacaagcgtgttgctaaaaacacgaaaacctcataatatggactaaatttcccttgagcccttaagaacaatatactttgaatgatatggataatatgcatcggtattcaataaagtctaaagggctgacttaatccatattatggtgagtgtcctatatcagaagaatcntactccaattaactagagagagtacatcacattagtgtggatttgttgaccatatgattatatttcattatcttccaattggacctttatttcataatcaataattgatgtatattctcaagtgcttcttttccttagtggctcacaagcacaa

SEQ ID NO: 23727 - DNA, 173 bp, Zea mays
aagcaggttaacacgtgggaggaacgcatcacagcaagaatgtgatgaccacttcaagacctctggagctgttgcatatggatctcttcagacccgtcgcctatctgagcataagaagaagtaagtatggcctgcgtatatgtgatgacatttcccgcttcacttgggtggtc

SEQ ID NO: 23728 - DNA, 68 bp, Zea mays
cctttaactactgaatcacgtctaggatgtgcaagacccctctttttatttagtagtctgtttaaact

SEQ ID NO: 23729 - DNA, 201 bp, Zea mays
gcaagtgtcgagttcagctctatcaaaatctaccaagtatagctgaccctctaacactcccttaaatgctattgaatcatcacttcttctaaagacagtgacacctacatcagtgaatagacagttgtagcccatttgacataattgagaaacggaaagcatattgttatctaaagaatctaccagagaaacattggaaat

SEQ ID NO: 23730 - DNA, 138 bp, Zea mays
gctaatacaccctctaaaagtaatgaaccatcacttcttctaaagacagacacatctatatttgtaaatagacaattatattccatattacataatggactaacagatagtaaattatatccaagagactctaactaa

SEQ ID NO: 23731 - DNA, 351 bp, Zea mays
actagctcggtgtgtcgactacactgcgcgcatctctataggtttctttcactgggtcctgtggggcagggcccttactgagcataggaggctttcaaacttactctgctagcacaggagagctgtgtctgtctgtcgcggctctgctctggcagggtgtcattctcagggctactgctgtacggcggcaagacctccaagcagaggcaaatgatacactcatgccgcttaaaggccttcaaaaatgtgccagatgaatactttgaccatgtacaatcaggataaattgtgagattttatagatctaaatgcgatacacttgaggcccagtaggaatagctttctaacact

SEQ ID NO: 23732 - DNA, 147 bp, Zea mays
tgaagctgattactctgtggaaaaagatgctatataagggatcatgcttcaaactgtggaaaacatcaacaaataccaagctgaaacacataaatggcgtgatagaaagggtatgcttaagaacattgaaccaggacatttggtgct

SEQ ID NO: 23733 - DNA, 166 bp, Zea mays
ttactactttaagtgggatggcttaacctaatcaattggtggataaatcaatcaggataactattttttaatttcatagacaaaaggtgttttaattttatttagaatttatccaaaaaaaagaaactcgttgtattgcatgcctcctgcaacccccccccccgcg

SEQ ID NO: 23734 - DNA, 205 bp, Zea mays
  unsure (1)..(205): unsure at all n locations
acctcatacacctcagatatgttggtcttcttgtntgtgtttacctcatacacctcagatctgatgccacgcanaactatatttacttgccagtagccttcacctgcttctgtgtggtagaactaatctagtgttacatggatgatttgatgcacctcactagccggattaatatattagaaattagaatgtgctcttcacctac

SEQ ID NO: 23735 - DNA, 164 bp, Zea mays
gctgtgtgtgttgtcttcctgtgtgtgtgatgaccacagccaccaagttcactccaccatatcctgaacattctatggagttgctggcctgtatgaagcttgttccgcaatcatctcaggtcagtgaagctcacaccacttactacttgaactctaccactatt

SEQ ID NO: 23736 - DNA, 157 bp, Zea mays
tgctcatatgattttctctaacaatgtacctatgtgcttcaacaaagaaagatcatagagaagcgataggagatgctatggatgcaaggagataggccatgaaattgattcatgccctcacatgaagaatcaagaccttgcacgatcaagagagatg

SEQ ID NO: 23737 - DNA, 267 bp, Zea mays
  unsure (1)..(267): unsure at all n locations
ctatttcccagacaatcaagtcaaatatgaagacctcttattccgttaaaaatattacaatctatgaacgtgaaacatcgtcaggacttttctgattccttattgatagtaaaacaactagatggtgagtgtcaatgtttaaaggcggtacttaatatgtacctcgatgcataccttgatagtatgcttatttactaaattgggattgacattatctaagcatgagattatanggctacatgtgactcacaagcattaattaacatt

SEQ ID NO: 23738 - DNA, 277 bp, Zea mays
  unsure (1)..(277): unsure at all n locations
atgctagtcnagctattaacatgcattaaccggctctttttgaaacaataataagtgcgctaaacctaagtggacatatttttagacaaccttactttgaataacgtatccctatacatatgatacaatagaatattcagactttataaatcataagataaagtataaatcaattactacttactgctgatcatacgaatatgatctggatctatttacgagaggacactctctcccgctatgttggctcgtgcatatcactgacctcgagataact

SEQ ID NO: 23739 - DNA, 216 bp, Zea mays
cttgaactaactgatggtttgatgatcttgtctgatgaggggaagggaagtggatcttgaggggggtagagattatagccaacacatttagcgtggttactttgcacggcctcgaagccggccacgaatgactatattgctggctgcacgagtgctgtggttcgctgccctgtgggaccgaaagtcggacaccaaagctgtgacctgctgtgtgac

SEQ ID NO: 23740 - DNA, 195 bp, Zea mays
  unsure (1)..(195): unsure at all n locations
accaccgcagctagcgtcagatcatgagtatgataatagtcctcatgtcggcgcacctgcctatgaacatacgcaattactctngcctcatagcataacacacagccgagaccactgtctgatgcgtgacaatacacattaaagggcttattaatatccgcgtgagcccatacccgagcagtgtgtataatatct

SEQ ID NO: 23741 - DNA, 73 bp, Zea mays
ccctttaaggaccctaaggtggttatcccacctttttttaccttttttttaaacgatccaactgttttttccc

SEQ ID NO: 23742 - DNA, 116 bp, Zea mays
agaccataactactacattgcttgcttactgccggtacttattacagtgagatcggattctcctggattgatcccggacacttgctcacctggctgctcggttccatgacacattc

SEQ ID NO: 23743 - DNA, 180 bp, Zea mays
  unsure (1)..(180): unsure at all n locations
cattctatgtgagtatcaaattagactatacactatttcctaatgaaataagggggaataccctttcttgtaaaaaaacaaattagactaaatattaactctcagtcatgttaaatattngaagggcaagcctaatgtagtggtaaagagttgtctcactgagtcacctcaccaagtcac

SEQ ID NO: 23744 - DNA, 193 bp, Zea mays
catcgcgatacaacctatcaagggtatcgcgagaagctgcaaaggcatatttttcttcctgtagacaagattcagctcccatatccattaatatggaattctccaccgggtttaggacactccatcttcatccccatacccatatccattatgggtataagagtcatcgcatacccattctcactgtcttttt

SEQ ID NO: 23745 - DNA, 256 bp, Zea mays
  unsure (1)..(256): unsure at all n locations
tacctagttatataactcgcacacagcgagtgataaagcttaacttcgatcanacttgacangtcttagttntagcttttagcacttagatttctactctttatgcaattgttggttcttgacatatgcatgaagtactgcacttatagggagtattcacaactcaattcactcatgaaaacctctagtgcaaggccatnatgcaaatttaccaatttgctattttctctataaattatctagcctatggcaaaaa

SEQ ID NO: 23746 - DNA, 186 bp, Zea mays
  unsure (1)..(186): unsure at all n locations
acattattagtaccaagtactacatccgctatgttcctgtgcccacatgtcggagctcaatacccttgtacgtgctcccttagttataaaaggggaggcatgcgacacacacacacaagttagactcaggcccaacttagactcagactctcagctctcaagcttncacagcaatncaacatacag

SEQ ID NO: 23747 - DNA, 158 bp, Zea mays
  unsure (1)..(158): unsure at all n locations
ctttttctcgatagcatctgattgctcctttantttgctttctaaactttcaattatagcttcgtgtttcttgtcttcaaaatcttgctgcatattcaaggctttgctcaacagcatactctgcacgagaacaacctttgttagacatgtttttatta

SEQ ID NO: 23748 - DNA, 154 bp, Zea mays
actcagcttgcagtcattatactgtgacccggctgaaaccttgaggcttagttagcacttggatagcgtgtgctctatgctcaatacgcctttcaacggacaatgcgctgttaattttgaattttatccctcggttcaacaacaaaatatttat

SEQ ID NO: 23749 - DNA, 247 bp, Zea mays
  unsure (1)..(247): unsure at all n locations
atttacacccttcaaatacccaataccctagaaatgacccttgagaaccctaaacctaaaccctaagggggtaagtgcacaattagtgcacttttggacttaagcgtcaaaactataatgttaaagcatattaagtcacttggttcacattatgaagatttgcaatccaaaccctgaattnttgacctatttgcaaaaaggaccccatttgtgttcttgagctaagtcttgaaaattcagtgtttga

SEQ ID NO: 23750 - DNA, 400 bp, Zea mays
  unsure (1)..(400): unsure at all n locations
agcttccgctttattgactctttttctccatttccgaagaatagatgtctcacgacacataagtcgttgctgagacgaagatgagcgaagaggagaagctccttgagaagactgctggatttattgaatcaattgcacagacaaatatataatagactactaacgataatttataacgcttatctgaagatactgatgacagcgaccgttatgatgcggaatgtggaggcgaagactctgaaaaatggcctggcgaccaagtcatgcagtctttgagaaatcgactatcaaacagagtcatcttgatatatgagaagaatgtatgttcgagatatgtctattgagagggctgacacagatagggatgttccctgcctcgaagagaacgaagtngtgatct

SEQ ID NO: 23751 - DNA, 325 bp, Zea mays
agcttcagctccttatatctgtgagcacgggatccctctggggtcccgctagttgtctccaccggagtacgagcctccgacgaagacatccttcaggtccccctcgggtgactgatacccgaggtcccgttcagtcgcggccacctcaccgtcgtccaccttttctttgccaggcggcgatgaagtggggagtcgtcttggaagactgctcgcgccgctcgctgacgctgttcacgagggcaatgatctcgcgacacttcgcggcgctgtggcgtccgtggggtgcacaggatgggccgctgaacccctctgagccgggatgtta

SEQ ID NO: 23752 - DNA, 388 bp, Zea mays
agcttctaaagtgtgtactcgtgatacgtctcactaatgttaccttcgatatagatagaccttgtgcagcttgtcaagcacggaaacaagtgggaagctctcatcatgccaagaatgtgatgacaacatcaagacccctggagttacttcatatggacctcttcggacccgtcgcctatctaagcatacgacgaagtaactatggtctggttatagttgacgacttttcccgcttaactgggtattcttcttgaggataaatctgatacccaagggacccttaagcgcttcctaaggagagctcataacgagtttgagctaaacgtgaagaagataagaagcgacaatgggtccgagatcaagaaccttcaagtggacgagtatcttg

SEQ ID NO: 23753 - DNA, 445 bp, Zea mays
agcttcatactcttttgtgttgttagaggccgggaatagcaatcggagagcatacttgaggtgttcgccctcaggtgcagcgaagagaattcctgctcctgctccctgcagcttcagcgagccatcaaaatacattcgccatacttctgcagtttctggattatccggtacttgctgttctgtccactctgataccaagttcaccagtgcttgaattttgatggcagtgcgaggtcggaactcgatatcatgggaccccaactcgcaagcccacttggctattcggccaatggcctccttgttgtgaagaatgtccctcatgaaaaccggtactactgtactttgtgatcgcaaagagtggcgcactgcggcagtagaagactgcattatagttctgacttgggatcttttcttgatggccttacctactgtgaagtacagatgt

SEQ ID NO: 23754 - DNA, 465 bp, Zea mays
  unsure (1)..(465): unsure at all n locations
agctttctactgtatattacatcagctttcgtatatatatgatgtataaacaatcagaaatgcctatgctggtcttcaccactaaatcatgcatttacttcagtgacatacgctagcatactgaaaaattaagaataaactatagaagtgtcaagtgtgtatttataaaaatatcttaattggttctcagcatgtgcatcaganaagcctattctgggcttcaccactaaatcattgccattacttcagtgacttgcgctggcatacagaaatatacaaaaataaacaatataagtgtggatttacagaaatatcttactggttctcaacatgttcatcccaataatcagccacagacttcttagcctctcgaatacaattgtcgatatcagggcttcctcatcaactggtatggcgtaaaagccacatagaacacacagagagacctactggctcacatgtata

SEQ ID NO: 23755 - DNA, 469 bp, Zea mays
  unsure (1)..(469): unsure at all n locations
agcttttatagtataatgtctntaacgactaacatatatgttggcttgttcttgactcacagtattcgagaacaagtgaacaacaactagatctaccatgagatggatttctatattgtatttatctactgtcataaatatttaaaagcttatctacatacatttggtccagcatatacatggtaattaaaaatacattatgagttatttaatttttgaacaggtgtaatatatatttctagtgtagatttgttcaattcactctttgtttgctacacccaagtccatagggcagggtgtcccaaggggcgtgcaagtggtgcgaccgcacaactagggatggttctagaagtgtgctgggtggggcttgagccttgctaccgctctgagtccataaatatacatagtataatctcattacatattctatagttctctcaacgttcatcaatggtttaatatatactat

SEQ ID NO: 23756 - DNA, 341 bp, Zea mays
agcttgtttattgtatttcacattaatccttaattcattgttcccgtctcatggacaaggcattctccctggatccaagttcatagaccaacataaatcacgttatctagatgaatacaatcaattcctgacctcgcgcgagtgctcgataaatcactcgacttctaccgagatcctgattagcaagcagctacttgacctagcatactagtattcatctcaaataggaatcctaagttcatgcagctagaggtttcaagcaactcctacacttaagtgcacattgcaatcctacaagcattaagtgtagtaaagtagcatataataacatgattatgcat

SEQ ID NO: 23757 - DNA, 320 bp, Zea mays
  unsure (1)..(320): unsure at all n locations
agcttaaagttttttacgtgtgtntatacaagagaagcgaaacggtctctagttgagttggntaggtagtctaagtagcactcaagtcctgagttcgactccccatggcccgtgggagtgaattccaagctgggtttaaaacataacctttgttgttccacgccaaaatacagggattaaggtagctttggacgtggttgttctcacatggactacagggagagtcgctgtgtatgagatgggcaagggttcacgatatcttcaacctatatgaagtcttcttaacgcaatacccaggtacactcgcacgttgggttata

SEQ ID NO: 23758 - DNA, 467 bp, Zea mays
cgggacctctaagcaccgcagctgcaacctaggctaatcttgtcttgtttgtttgagcaaacaggcgttaccagacattacctgtcttactctataaggaccctcctagcttggcgaaccatttacaaacttccggacctatataccttagatgcaagatggtactccacaccacaaccactacttgaaatgactttgcctcgacctccctgttgaaggccatagctaacatgatcttgaccttctctatcgctcccaaagctatcaccctcatgtcggttacctcaccaatactatccatcattgatcataacaacagtgacggctagacaatttgtctgcaaacctgcagcatcacactaattcacagacacactgttcctgctataacaagctaaaggagaacctatcgcctatgttaatatctagacccataagctcagacaaacttatccacgctagactat

SEQ ID NO: 23759 - DNA, 432 bp, Zea mays
  unsure (1)..(432): unsure at all n locations
agcttagttcagttttgatggntgagcagctgcggntttggagaacctgcattctcctatgggttttgatagctcactttgcttgattctttccctgtttgtggctggtgcgtagtcgtccctgatttaagaaactaagtgaacacaatgtctttgtgaagttagtttcgttgctagagagtcatatcttgtcttagctgctcttgcacaaaggttaccacttcttcattcagtggagcagcttgccatcaagatctgggagtttctgccagttatattgagacatgttcttggagccatgttgtccgatggttgactaagcttatcttggtacatcttatgatattcctatgatgtcactatcccgacagaaangaaacaacacatgtaagagagtatctgtttgtgattctccggctagcctctctttta

SEQ ID NO: 23760 - DNA, 467 bp, Zea mays
  unsure (1)..(467): unsure at all n locations
agcctcaactcttctaaccatatacaaatactttgcaagcttcggatccttagccttgcaactcttgtcaatatgacccgaaacaacctgggaatcaagtttaagtatggccctctctgaatcccattgcttataacctccgaagacctagaagcaatgcgttgtactcggcaatgttatttgtgcaactaaaatcaagctttgtcgcataacaagatttgactttggaggtgaaaccaacacagcagccgctcctgctccgaaggtttcccaagatccatcacaaaacactgtccatgctctcgtgactttattcgtttcttcgtcctgagcctctggcgtccagtcagcaatgaagtctggcaacgcctgtgactgaatcgaagatctatgaacatattcaatacanaattcattgagctctgcagcccatatccaatccttgcagtagcttctcaagttctcat

SEQ ID NO: 23761 - DNA, 240 bp, Zea mays
agcttattttttgtcgtgtaagggtcctcagggccagtccacgagaggattatgttgtcaacctcccggctttgaagacagtgacgatcctaaccatgtatataacctgtctaaggcgccttatgggctcaagctagcctccagagcatggtatgaatgccctagagactctcttactgccaatggcttcattgcggaaaacccatcctacactctttactaagtcttgaaaatgacttg

SEQ ID NO: 23762 - DNA, 337 bp, Zea mays
  unsure (1)..(337): unsure at all n locations
agcttatctatgttcggtgaacaagaccggcgtnccatctggctcgctccgccagacaagtaatgatgacgccccgcacgctctatgacgacggcggctctcagcccccttacggaagcaagaggacgtcagcaaggactcgacagccccgatagctggcctttcgccaggctccagcgctcctccgactgtcatgacaccacacgaaccgggtgccaaaacctctccggctgccacgatggcatgtacttacggcgctagctctcctccgctagacatgttagcacactgctacacccnccattgtacacctggatcctctccttgcgcctataaa

SEQ ID NO: 23763 - DNA, 399 bp, Zea mays
agcctattaaatgtctggtataaatctgcgataatatccagccagtccaaggaaacttcggacctgatgaacagtggtaaggggttttcactccaaaatgtccttgaccttgctggcgtctaccgcaatacctctagcagatagaacatgttctaaaaatatgatttccttcagccataacgcgcacttgctgaacttagcatacaactgaatgttacctcacgcgcgttaatacgattctgaaatgttgggcgtgctcctcttcaatcttgaaggatattagaatgctcataatgaacaccactacaaactgtctagctcggcatgaataccgagtcatctatatgtgaaggtgccggagcttcgtagcccgaagaattacaatatcaacacccatat

SEQ ID NO: 23764 - DNA, 201 bp, Zea mays
ttatattctgctagtatgctgagcacaaaattaggagaattcatgcttggaaatctcatgctctttctcatcatgctcttatggaataaaactaagcatttagctctaggcaattcacccacggttaatgggctaataaggatactcctactcatcaaatgagcctattatctcatttaagacatttgatgcttcttatgt

SEQ ID NO: 23765 - DNA, 292 bp, Zea mays
agcttcaccgagcaagcgaagcacggaaaaacgcaagtgaagagaatgtcgtggaactggaagacgccagacatggtcgaagcaagctccaggctataagacgttggacatggtcgaaaggaagcagctcgacgaaaaaacaaacatacatcgagcacgtaaaggaaatgtgagtgtaaagaatattgtggaagtggaagacaccggataaagccgaatcaagaatccccaagctaggatacgccggatagcgaatatggcggaagtaaataacttggaaaaaaaggaacat

SEQ ID NO: 23766 - DNA, 432 bp, Zea mays
cagcttctaaaggtataatattttatatgtctaactaatggtaccttcgataaagatagaccttgtgcagcttgtcaagcacggaaacacgtgggaagctctcatcatgccatagatgtgatgacaacattaagacccctggagttacttcatatggaccctcttctgactccgtcgcctatctgatcatacgaagaagcaagtatggtctctgtataggtgatgactctcccgcttcacttgcgtattctttctgcacgataaatctgaaacccatgggaccctcaagcgcttcctatgtagagctcacaacgagtttgagctcaaggtgaataagatacggagcgacaatgggtctgaattcaagaaccttcacgtggaggagtatcttgatgaggacggaatcagcacgagttcttctgtccctacaca

SEQ ID NO: 23767 - DNA, 337 bp, Zea mays
acccgggaccttaagcaccgctgcatgcagctcgcccgttgtttttctttctaagatttgactcaggcaaggcactgccattctagatgaagcccatctaggcgaagcctgaccgtatccaatggatacaattgagtaagggctttggttgtagcccgccagagttattagtagcgaaacagtgcgcttatacggtgaggctgtgaagcttatccagatagtacattctctaggaggacatgtctgaattactctgcctgcggagctgacatgtgagatacgcagcccttgtatgaggtagaacgctattgattgtctagctgctcaagagagggaa

SEQ ID NO: 23768 - DNA, 441 bp, Zea mays
  unsure (1)..(441): unsure at all n locations
agactgtgaaggttcttatccccacatgtgctaagcggcgatgccatagccagcccatgctagtcttagcaagtaagcatgcatctagaccggcctcatcttttgcaaaatcaactaaataaaggttggcgtctaatacacccttaaaagctaatgaaccatcacttcttctaaagacagacacggttacattggtgaataaacaattatatcccatattacataaatgacttacggataacaaattatatccaagagactctactaagaatacattggaaatagagtgctcatttgagattgcaatcttgcctaaacctttcaccttgccttggntcccatcaccgaatataattgagtcttgggatccttgtcttgacgangaagaaacatctttctccncgtatgtggttgtgcatcgtgcgaaatcacttgagcccg

SEQ ID NO: 23769 - DNA, 410 bp, Zea mays
  unsure (1)..(410): unsure at all n locations
agccagtatagttttctgttatgtgtccnngcgagccttctgtgcacgagcagttgccgtcctagtggcacctctaaaagtcaaaacatgctatgctatcaaactggagtccagttgcacaaataattgtgctgagtatgaatcacttctattggggcttcggatactaatggcaatgggaataagaacggccattctaaagactgattctaagttattgctggccatgtggataaagcccaaggcactaatccaagcttgaaaatatctggtgcagttcaacgttggaagcttcttcgaagctttacgtcaaatattccagatgtaatatgacatgtgattggtagcaaatatcgctatggctccactacctcgaagatctttgaacataaacaccttagtgagctcat

SEQ ID NO: 23770 - DNA, 363 bp, Zea mays
tcagctcggacccgggatcctctgagtcacctggcgcatcaagctgtgaagttcttctcccacatggctagcgggatggccagccagccagctagtttaactttaacatgccttaaacggctcttttttgcaaatcgataaagaagtttgcgcttatgcccctttaaactaggaaccatcactcttctaagacaacactctacatttgtaataacagttatccccatgttgctaatgactacagaagcaatttattcacaactcactaaaacacataaattgaggccattaaatgcgattactaacctttactgcctgtccatacgaacatgaactggatctatttacgagaggacttttttc

SEQ ID NO: 23771 - DNA, 447 bp, Zea mays
  unsure (1)..(447): unsure at all n locations
agcttactctgctcctttataacgactttntccttgctccgagaaatacatatcgtggtggaggcaagcttattcgcccttctcttgcaaattcttacaatttgaacctgtgaaaaagatttactttcctcgtggcaaacgacaaaaccattacatgaagtttaaaaagtgttctttattacatgaaaaatgaaacttgaatagagaagacttctatcaaagtaggatacttgtcaatagatgtgctttgactctggcacagtgctattaactgtgcgagcttcggactgttctctgaaatcccgttgattntgagtatattggcccccttctgngctgctggccttgtgtagcggtggtggaggcggagggtgttgccaggaagcctgaggctgactcgccgaagcaacagaagctgcanggtgaattgctacatattctgggatg

SEQ ID NO: 23772 - DNA, 288 bp, Zea mays
agcttctcgtattatggatgagtacagtgcaccgcgcagcacgggcacactatttcgacaacggactggacaggtgcgccgtctgctgggtggccctggcgccacctgccagcggaatggacagggcgcaataaatgccgtgggggcacatcatctgtcagaagggtggacagacgacatgtcctcttcgcaatatatgaagaggccgtgcggctcagagcccttacataatgctccgcctgctggcctacgtcacggacaataaaccatgtggctgcattagaccct

SEQ ID NO: 23773 - DNA, 384 bp, Zea mays
  unsure (1)..(384): unsure at all n locations
agcttgtactaactgatcagtcacaagtcatgttggttcttgctacaaaatagtttgtgctctgaatagagaaagaaccaatacaatatatcttatgcttgagcagagattcaactattatacgagacgtaggaggaacagagaaactaaaaggtcaatgctacagaacatgtcagaatatgcagagtctctctttcacagtagtctactgaaccactttacattttcgtgatatgttgggtttgatcacaaatcctgtaagtctgctgatcttgntatttttcaaactagttatttagaatcaattgtttatatttgtcgtggtggtacgacacttgggtaccggagtacccaaaatatgagtattggaaagaatggatacct

SEQ ID NO: 23774 - DNA, 379 bp, Zea mays
  unsure (1)..(379): unsure at all n locations
agctntaaaggttattcttcatctatnagaaagaatacgaatgctcaacgcaaaggtattgaacaaattgcttcaattgggtagtgatcaatactagttcctatcaagtggcattctttcaattgcaataatatattctatggaaaggaatgtccatatgaagggtaaattccttctaggctaaaattgtacaataaggcatattgtgaattcactgctccatgtgcattaacttagaggaatttaattatgcctttatgcctcatacatgatgatctattgccattcatatataaatatcatcattcattaaatacttccttgactacaatacctcttttcaagtgctgtttgactagttaaaaggaaagagatacaa

SEQ ID NO: 23775 - DNA, 383 bp, Zea mays
  unsure (1)..(383): unsure at all n locations
agcatgcnagcttatcctgtcttcatttcattgtatgctgatagctcagatagtccttgctctatcaagcctacatacgcattcaatccttaaacaacctgcgtagaacatctcctgcttctaacccaagtctctaattaagcattaccatccttaggactgatatctagtcctttatgacgaaaagagcatttcaaggaactttgcgataagatctccacatgctccacatgaaaataattcttgcaggtagatgacatcttttctcaagataacctctgagcaaagccttaacgcataagacaacttccatcacaagaactcatctggctaaacattttgtatatcaatttgaactttctaaaagattttaactgtatgat

SEQ ID NO: 23776 - DNA, 184 bp, Zea mays
agcttgagcaatgttcatctttctcaccaggaagctatctggcggcctgaatcgaacggaggaggactggagaggggttggccacggctgtggctctcggtcggcactggcgggctgcggggaggtcgccagaggcaatggctggctcgggcgagtccggcgaggtactaatgaaccaatgggg

SEQ ID NO: 23777 - DNA, 436 bp, Zea mays
agcttgtttatgttttttttctccacatgtgctaagcggcgatgccacagtcacgccatgctaatcttagctattaagcatgcatctagaccggccctctcttttgctaaaacaactagataaagctcgccgtctaatacacccttaaaagctatggaaccatcacttcttctaaagacagacacctctacattcgcaaataaacatgtataccccatgttgcataattgactaacagatagctaaatataaccaagagactctacttaaaacacattatagatagagggctcttagagatgcaattcacctaaccctttatcttggcgtggattcatcaccgaatcaattgatcctgggaatcttattttgacgatgaggtgacatcttctctcttcgtatatggttgggcatcgctgcgatatccagctagacc

SEQ ID NO: 23778 - DNA, 395 bp, Zea mays
  unsure (1)..(395): unsure at all n locations
agcttctccatatattgacatcatttaaanccgcggctcaaccntctaggctaggagctttcgctcatgggtctgttttccactacgaagcatattgtgttattgggcaaccagtcaagctacaatgccaatattgtacccggaagctgctcttactttgcatgagcatatatttcttgttacatgttcatataaaaaaaaacctattgctgatatagtccacagccaagcgaaataatcatttatgttacgcaacatcatcagattgaagaaaaatatgcacatacatgttactcaacagaacacacacactgcaatgtggataagaaaaccagctagcatttattaaacacataacacatgtgcccattaagtagagagcctacaaggaaacc

SEQ ID NO: 23779 - DNA, 385 bp, Zea mays
  unsure (1)..(385): unsure at all n locations
tcttattttatgcattacacaatggagnanggtattacgctccggcgggccgaaccactctatacccttttgtgttcctgagttcatcggtcatctaccaacaggcaaaacgctttagccccctcctcatcttaagatttagggagggtgcacttcgccaccctgccggagaattcccttctcgacatttggcgccgcaggtaaggggcttggctttaggtttcacttgtttccagctcgacgcatagtccacatcgtcgagcaccatgattcctttgccgaggacgttatggtggatgaagaagcttgttctttcacgccacgagctactatacctccagcgcctagtgtcgctgctgtgcactctacacgatagcacactcct

SEQ ID NO: 23780 - DNA, 466 bp, Zea mays
  unsure (1)..(466): unsure at all n locations
tatcttacaatatctttaacatctaagtatttcttatatttgaattcaaagggcaggtgggggtggggttttgggattacctaccgactcctttgggcagaaagtctgggaagtgagaacgtagaatatcctcagtctcccaggtagcttcttctactgaatggtgactccattgaaccttatacattctgatcgactttgcccgcgttgatctcttcttttgatccaataccttgacggngtgctcttgataagacaagtctggttctatcttaatttccggtttaggtagtacttcagtgggtaagtggacacatttccgtagctgagatacatggaacacatcatgaactgctgacatgtggggtggcaactccaattgatatgctacgggtccacaatttgctttgatctcatagcgcccaatgtagcgaggagctaacttgcctttgattccagatctctg

SEQ ID NO: 23781 - DNA, 463 bp, Zea mays
  unsure (1)..(463): unsure at all n locations
agcttagntggngtaaatgtctncaccgacatccggcgaaaatggcggtcgacggatggcccacgacattattaagaacagtgaaatagatacttccgatgctagagaagcaacaaaggccagctgaaaagactgcagaacttgataggcggataggtattggcctaattgctttcgactatatgctttattctctgagactgcggaactatttatgtttatatcgcaaccgaactatctcctccaccggagcccctcgagtcactggccgaccctcgagcanatagggaagatgatattactaaaatggctgaagctattatggatgaagctgctactcgactactaaacgaagctgctggagcagtttaaaagaagattgctttattgtaaaacattcgaatattatgtattattgtgacacaggtgaatatttgatattgatgaaatataactgttgaat

SEQ ID NO: 23782 - DNA, 439 bp, Zea mays
  unsure (1)..(439): unsure at all n locations
agcttcgtaactatgctcttgttattcttcgttcgaaaacattattctcaagagaataatgtttcatggacgaaggatgttaacatttaacatttcatgttgccttgttcttaattcatagcatttgagaacaagtcctcaacattggcgcccaccttcggtgaactcactttcactttctgagctgatggctccgttcatgatcgagctggtgctacttcggacccgaagctggtgctcccgattacaggcggttcgttctcagagccagccaataagaagcataataaagacgcactgagaagggtacagcatgttggngtgaaggacccttaatcaagtaagatggctcacattcctattaccttttcaagagaccttagctcaagatacccaccaacatgcctggtatctttgtgtataaaggattctggtcaca

SEQ ID NO: 23783 - DNA, 447 bp, Zea mays
  unsure (1)..(447): unsure at all n locations
agcttctaaaggtatatctctttntatgattaacaaatgttcattttgagaaagacaggatttgtagcgcatgccaagcagggaagcaagttggtgctcatcatccacacaagaacatcatgactagtgacaggccactggagctcctacacatggacctattcggcccgatcgcttacataagcatcggcgggagtaagaactgtctagttattgtggatgattattctcgcttcacttgcgtgttctttttgcaggaaaaatctcatacccaagagaccttataaggattcttgagatgggctcaaaatgagttcggcttaaggatcaagataattagaagcgacaacgggacggagttcaagaactctcanattgaaggcttcttgatgacgatggcatcagcatgatgtctctctcctacacccacaacaaatggtgtaggag

SEQ ID NO: 23784 - DNA, 420 bp, Zea mays
  unsure (1)..(420): unsure at all n locations
agctctgaatggtgctgctctngttgctacgactatccaagcctatgctaatagggatcctaaaagaatatcctttgtccttaataacacaccaaatatttctgctagaaaagcttatacacaatacgatgttcgtatattctgaataagggaaaggttacttgacttgacagaatcatttcacaatgaaaactgacagcaacactgtaccaatactagcacatgttatatgtgtcaatcgaagtaatcgattccgaaatcttcacatgcacaattttggtcaatgcttggagttcacctgaattatttgcatgaaggcccatggacatacagggcatgctgcatcgcaacatatagattatctactgatattatctgaaataacgataacatgatgtttgttatggaaactatgctgct

SEQ ID NO: 23785 - DNA, 383 bp, Zea mays
  unsure (1)..(383): unsure at all n locations
agcttgtgaagcctacattagtttattgaagaatgatattaaattcaattggtcttcaaagagtgatgaagctcttgaacaattgaagacattattaaccactgctccggtattggctcaaccggatattaataagccctttgatgtgtattgtgacgcatcaagcagtggcctcggctgtgtgctaatgcaagaaagctgagtaattgatatgcttcaagggcagtacgccgacatgaggaacattattctactcatgatctggagttagctgcggtggttcatgccctacanatctagcgtcattatttgctgggtaattgctatcatatttatacagaccataanagcttgaatacatcttacccagtcagacatgatat

SEQ ID NO: 23786 - DNA, 416 bp, Zea mays
  unsure (1)..(416): unsure at all n locations
ctgcagctttttttttgactatggcggccactctctagtgaacctctatctcacgcccttgcctctcggtttggcttacgggtgggcccgggtagtcagtacccatctctaacagccgcgtcgagcatggcggagcctcaccgtggatctctgagatgctagttgcgagcgcccangctggtctacagggatttaactaccgagtattcgaagccttgaccctctctcctcatcgcgcctcagtcatcctcgtcgtggaccgggtttgagagagaaaagcatagtgaagtgagattaagggcgccgtcgcgccttcccattcatacgccgtcactagatgccgcagaaggtgtcggtgccatcaccagggtgcnccanactcacgcgtgggatctgcgggcatcggaggggagcac

SEQ ID NO: 23787 - DNA, 434 bp, Zea mays
  unsure (1)..(434): unsure at all n locations
caagcttatccatttgaacttgagcgctctcctcttgcttggtcttgcttggctgtcccttgcgacctttaagtgccgtcttgaagcgcttaatgatgagggccatcttcttattatttagcccggccggctcaacttgtgccaccttgcttggtagcgcctccttgcttctcgttgccttgagaacaatgggtagaggcctcgtgatcggaccatttaaggcgtgcgtcacgtacctcgccttcttgatcatcattcgcccgctaacgaaatttccgagaacttcttccggcgacatcttggtgtacctgggatcttcacgtatattggttacccaatgaggatcatgaatggaaatgaccttacattggcggagacgtatggccgtcatccgtgctccgacttctatttgtgataggtcttgaccgntgatg

SEQ ID NO: 23788 - DNA, 341 bp, Zea mays
  unsure (1)..(341): unsure at all n locations
caagcttgtgaacaatatcttattcagaagggagaaagcagcttcagcagatcagccgaagcccatgctcttatgtgaggatatagcagagcagagggtgctgttgggctctcagttatccgaagaacaagagaaaaccttgataagggttttgttcaacaacaaagatgtttttgcatggtcagccaatgatctctgtggagttaatagggatgttatngagcactcgctcaatgtcgatccatccttcagacccagaaagcataggcttctgaaaatgtcagatgataaggccgaatgtgctcgcaacgaaatcaaaagactccttactgcaggagtta

SEQ ID NO: 23789 - DNA, 268 bp, Zea mays
gcttttgaagtgaaacaccgataggttaactaacgtacaattcgaaaaagatagaccttgtgcagcttgtcagacaggtaaacaggtgggaggaacgcatcacagcaagaatgtgatgaccacatcaagacccctggagctgctacatatggatctcttcggacccgtcacctatctaagcatatggggaagtaagtattgtttagttattgttgatgacttttcccgcttcacttgggtattctttttgcaggataagtctgagacc

SEQ ID NO: 23790 - DNA, 285 bp, Zea mays
  unsure (1)..(285): unsure at all n locations
agcttcgcaagctcagaataacacacatgcnagcaagagcaggctacggccacctacatgtgtgtcctccagatttacatactatgctagtagcaaggcctcaagcagcacatgctatgctcatgctagtctagagagatggatagagggagagactagagaccaaaccatcgagctaggataagcacaaaattctcaagctagcanatgattctaaaccgaagaggcaaaaaaattacaagccacagtgcttagaaactactaccttcattttcttttatttga

SEQ ID NO: 23791 - DNA, 396 bp, Zea mays
  unsure (1)..(396): unsure at all n locations
agcttctcctgtccagaatattctatggtattctggacagtcaacttagaatagatgtagatgaacttatgcacctgacaatgatcaactaggcaaactagttagtccataagatttgtgatggtcgtcaaacactaaaaatcaattataggaaatgttgaggccattttcctttcagctagttaggcaactccattttcccaagggatttctattttcaaagggaaaatgaactaatttcccttgggaaaatagaaatctcttggaaaaatggggctcccaaactagccctaagagggagaaacttcacttggattaacatgcaagataatccccttcttgtgcagcatgactagtgtnttactacaatcaactggacctcatcctacctcaata

SEQ ID NO: 23792 - DNA, 346 bp, Zea mays
  unsure (1)..(346): unsure at all n locations
agcttaaaggatactattctacttatgtaagatgaagtcgattagaggccaacgtatgaaaacttnctttccttaagttgatttagtattctatccttagtggaatgtactatagtatacgtaaattccttgcaatataaaatgttcaatggtgcataaatgaacacccactttgtagtgttagaaatatatcatagagaaacaattcttcttatgtgggttaccctttatgcatcattccatgtgaacaccatattcaaaggcaaataactaatataagaatacatgccatttaaattatgcatcatgctggatattattattgtggtgtgcatttgtgacatat

SEQ ID NO: 23793 - DNA, 315 bp, Zea mays
  unsure (1)..(315): unsure at all n locations
agcttgacacattatttttatcttaaataaaanttctgagatcaagtatatntaattcattcatcaacatgcanaaagcggtcttatcaagtggcttagtgaaaatatccggctattgatccttcggccccacttcttctaaaatgatatcttctttagcaacatgatctctaaggaagtgatgacggatatcaatgtgcctggtgcgagagtgttgatagtattattagcaattntaatagcactctcattatcacacaacagaggtaccctttctagaactacgccatagtctagaagagttggttcatatat

SEQ ID NO: 23794 - DNA, 459 bp, Zea mays
  unsure (1)..(459): unsure at all n locations
agcttctaaagggagaactcgtgataggtttgactaacgtgcaatttgaaaaagatagaccttgtgcagcttgtcaagcaggtaaacaagtgggaggagcacatcacagcaagaatgtgatgaccacttctagacctctggagctgctgcatatggacctcttctgacctcgcctctatctgagcatangatggagtaagtatgggctagttaattgtgatgactcttcccgcttcacttgggtgatctttttgcaggataagtctgaaacccaagggaccctcaagcgcttcctcatgagagctcanaatgagtttgagctcaaggtgaagaagatcatgagcgacaacggttccgagttaagaaccttcaagagaggagttcttgagatgaatggataagccgagttcttcgttctatcaccacagcaaactgtgtggagagtgaagacacgaccta

SEQ ID NO: 23795 - DNA, 354 bp, Zea mays
  unsure (1)..(354): unsure at all n locations
agcttgtgaatgttctttatccccacatgtgctaagcggcgatgccacagccagcccatgctagtcttaactattaagcatgcatctagaccggcctcttcttttgcaaaatcaactaaataaaggttgccgtctaatacacccttaaaagctagtgaaccatcactttttctaaagacagacacatttacatttggaaaaagactattatatcccatattgcataattgacttacagataataaattatatcccaaagactcaacttaaaacacattagaaatngagtgctcattagaaattgcaaatttacctaacccttttaccttgccttgatttnatcaccgaatatga

SEQ ID NO: 23796 - DNA, 343 bp, Zea mays
  unsure (1)..(343): unsure at all n locations
tgcttttatgttatcatgagtacaaagnngagatttagtacggcttatcaccctcagactgatggacagactgaaaggactaatcaagtattggaagatatgttgagagcttgtgcccttcaacatggaggaagttgggataaaagcttaccttatgctgagttctcatataataatagntatcaggccattctgaagaagtcacctttngaggctttatatgggatgaagtgcagtgcaggactcctttgtattgngatcagactggagaaagacagtctttggacctgaactgattcaagaagcagaagaacaagtccatataattcgagagaatttgagg

SEQ ID NO: 23797 - DNA, 323 bp, Zea mays
  unsure (1)..(323): unsure at all n locations
gccggatgcattctatcttgacggagagcttgctccaccggccacggtcggtgatccttgcgtgggaagaaatagaaaggggagggacctttttgctcatgctagtgagacaaatgaacagtgcataagactgtntacaggtttttcagacgaccatggatctctgtgcagaatagacacctgtggcgcgcgcggtctccatctgtctgtcgagggcccgctctagtacattaagcccatcactgatatacatttcgcttttctttttctaccaaactaagaagtgctaaggatccagaccaatgctcaaatctgagaccgat

SEQ ID NO: 23798 - DNA, 378 bp, Zea mays
  unsure (1)..(378): unsure at all n locations
tagctngaagaaactctgcattctttcgtcctagacctctggctttgtaattccaatggagatattaaggaactgatagagcagatgccacaatgccgcaagaacaaactgcagcaattgcatctgggatataacaatattactggaatgatgccaagtcaaatagcacagttgaccagcttagttgttcttgacatctctagtaaccaattatatgggatcataccatcagtgatggggcagcttgctagtttaagcacccttgacctctctagcaactacctttctggacatgtaccatctgagattgcgatgcttgctaatttaactgcactagacctcgaaggtatgaactgaatggtagatcacagaaaacac

SEQ ID NO: 23799 - DNA, 412 bp, Zea mays
  unsure (1)..(412): unsure at all n locations
agcttactccacctctgtgaatggccgttcatcatcgccaagattntgaagcccggaacatacaagttggccaacgatcaatgcgaggtctacagcaacgcttggaacatccaacagctacgtcgcttctacccttaagatgttttcaaagtcgtcatatacctcgttctctctacatacacaaataaagtctaaccgtcaatgaaggatcagcccttgcctcggcgaagcccgaccctctctcggggctagaaggggggaaccccctctgcgtcaaattctccttgaaaagtcttttgcagaacatctttcgcgcttatnactacttcgatagcgggatcctgaaaacgacgagagtacacgtaagcggcaaggccgaccgagccaagagacntcctacgcctcgggatac

SEQ ID NO: 23800 - DNA, 283 bp, Zea mays
  unsure (1)..(283): unsure at all n locations
actcgaccgggatctctaagcacctgcagctgcagcttatgatttcgattcaaggaggaccttcgaattatcaaaaattcttcgaagcaacaagaagtcgttctaaggaacgcagagtaagtttgctgaaggtacaaaaagccggtccaaagggagcgcagtgtaaggtttctgctccaaaggcgttccaaagtgaatgcagagcttacagcgaanaataaacgctgataccgnctaagtaaaaggcgaagcacgaaaagtcaacgcgaataccgctgaaagt

SEQ ID NO: 23801 - DNA, 206 bp, Zea mays
agctttatcagtttcattatttattattactccacacgcagtgataagttaataggtagctgatgacatggcgtgactatcatcacaggagatatgatcgtggtgtgaaaagtgtctactaataacactccccttgcatattgcatgttctctctgcgttggaaactctgagacgacgactgtcttcgcaccgcgagttctttttt

SEQ ID NO: 23802 - DNA, 268 bp, Zea mays
  unsure (1)..(268): unsure at all n locations
agcttatggactcatagttctatcaattggaattgccacctcacatgtcagcagttcacaatgtattccatgtatctcagctgcggaaatgtgtccgcctacccactgaagtgctacctgagccagacattgagatagagccagactttgtctaccaagagtaccccgtcaaggtattagatcagagnggaagatcaacttcgccaggtcgatccgaatgataagggtcagtggagtcccattcagcagaagaagctacgtgggggac

SEQ ID NO: 23803 - DNA, 373 bp, Zea mays
  unsure (1)..(373): unsure at all n locations
tcttcttctacacttagacaaatctcaagatgaagggtcgaaccgacttaaagatgaattgacttaaagacccatgatgttntgtgtcattattgtagttgattgtaaaggacataaatgtaattttgcgcaggttgcatcttgtgcctataaataggtgaacagtatcctggtactgttcacgcgatccggtaatcacagaatcatcacggttgtacttttgctttcattcaagccgaaggtacacttgtaatttaatgtcatttctatttttncgtgttaataaaatagaaatgatttaataattgatatataaatgttgtgctaatcttttgatancatatgttntccattaacactatcatatattata

SEQ ID NO: 23804 - DNA, 346 bp, Zea mays
  unsure (1)..(346): unsure at all n locations
agcttgcctttgctttattttatcatccgcagnccaacggagtcgnggagcgcgccaatggganaatattcacagctggcaaaaagatgctactcgaagaaagaaacagcaggtggaccgatatattaccaaacgcagtctgggcgctcaacacatccgagtgtaagcaaccgggatcacttcatttcggcttttatacggatcggaagcaatgaccccgcaagaaataagcatgggtcccacgtacagtccgtcaccgtcccgacgtgatgaccaacttcaaagatctattgatgagaccggtcttcccttactgcccttgacaatatatgcccagacaaacatg

SEQ ID NO: 23805 - DNA, 386 bp, Zea mays
  unsure (1)..(386): unsure at all n locations
agctnggaggcgtctattgtttgttgactggngtagactcctccttcttttctttcgtcgccttgaatgcaacgggctgagctgcggatgtgtcgccaagctcgttgattttcctcgagccttctatcatgcactcaaaacttacaaaatgcccgataactttcttcggggtcattgtagtatatctaggagtaccacgaatcaatggaacttgagtgcgacttagataaatgacggatcttatnataacatgtaccacttcgtggtcatcccacttcttgctcccgaggttgcgcacttggtttaccaaagtctcgagccgcgtgtacatatgatgtggctcctcccctctatgaagccggaaccgaccgagctccctctcgatc

SEQ ID NO: 23806 - DNA, 357 bp, Zea mays
  unsure (1)..(357): unsure at all n locations
agcttcgtgacttctctgtcttgccgcgctgcttctttcttcctttttattgatctcgtcccgaccgagtgactgggtctccagattaataccacccagatcagatgaccaagaacacaaactgagaacggcaaggcgccggaacccaaaagctacccaggaccaggaggatataattgactgaccagcaggacaggagaaagtaaaacagagctggaatccagcagaagagttgtgcaagaagaaccaacgccaaataacgcagaggactaaatggcgacctgccctgccctgctgcgcaacggaagccgggcgcgcgcgcgcangtgcgcttgtggagacccggacggggagggg

SEQ ID NO: 23807 - DNA, 407 bp, Zea mays
  unsure (1)..(407): unsure at all n locations
agcttcttatgtcttgtatgattcaaaatcaagcgaatttaatagcccatcagaatgaagcttcttcatgcgattctcacttatatgacccaaacgacagtgccacatgtaagtaggacttaaatcattaggtcgaggccttttagcactaatattacagataggtgcatcatcaagaattaaaatggataacctattcataatggatgctaaagccacaaacatgccattcttagagatcacacaaccattgttttcactcgcaaatgaataaccatccttcatcaaacatgaaggagacataacgttntgactcatactaggaactagataacaattatttaactccaaaataaatcctgatgggaggtggagttgcatcgtcccgacggtcaacgcagcaactc

SEQ ID NO: 23808 - DNA, 425 bp, Zea mays
  unsure (1)..(425): unsure at all n locations
agctttctcttatctttctatggcattcagactctgctcccgcgcattcgctttgntgtgttagggatttgagctccattcgagtcgaaaactccctatatgtcatttgagctcaagtctttacttgtgtgcgttggtgtgcttgcgtnttgaatcttgtgtggtgctctttccaaccttactcttgggtggtctttgtgatcaatcttgtaacggcgagaggctacaacttgtggagattcctcgcatacgggaaaagatattagggaagaaaagcgtggtattcaagttgatcattggatcacttaaaaggggttgagtgcaaccctcgttcattgatacgccacaacgtggaagtaggcaagtgttacttggccgaaccacgatgataaatcgcgtgtctcttgtgaatggtccttctttga

SEQ ID NO: 23809 - DNA, 387 bp, Zea mays
agcttcatcttcatctatgttatggattgcctttgaatctatccaactcccttcagcccttctggcagcttcttgactttcatggacagcaatgggcccttgttccgaaggtatcttcatgcataagtatgctagatgaagtatggcttcgaaagcattaagcgtccctcgaccaatgattgcattgtatgggtaatccattgtcacaatgtcatagataacctgctcagaccttgtgttatgaacataactaaaggtaactgacattgtgattctactaaatgccacaatatgtcttcctccgaagcccaaagagggtgtgagcatcatgaatgttgcctctggtcttgatctgctgaaaccttgcaatatatgtcctgcctgctg

SEQ ID NO: 23810 - DNA, 457 bp, Zea mays
  unsure (1)..(457): unsure at all n locations
catctttgcttgaagtatatgaaagggcaagccaaactgaaccgtcgccatgccaaatgggttgagtttatcgaaacatttccatacattgtgaaatataagaaaggtaaggacaatgtggtcgctgatgccttgtctcgaaggaatgtgttgttgaatcaactagatgtaaaagttttgggtcttgaaaatttgaaagaaatatataatgatgatccttgaatttcagaaccatacaattattgtaaagatggaaaaggttgggaaaaatatcatatacatgatggatttttgtttagagctaacaaactntatgtaccaaattcttcggttagattgcttgtattgcangagtcacatggagggcggctaacaggtcattttggacacgagaagacttatgatatgctcagtgataatttctggttgcccaagatgaagagagacgtcatcatat

SEQ ID NO: 23811 - DNA, 291 bp, Zea mays
ctatacgcgctcactatctaagggttcgggccagcttcttggtatgctcacagctcaacaccgaagatccgcttacactggacctcagactaaagggtcaaggtatggatctccgcctaccgttattacctcgcaagagctgcttgacgctttagagcatgttgtgacccagcagacctcgactgagctctacagcctgttgtgcccgcgacgaaacctctgctatcgccacactagggtaccccatggcaaaaagagctctgcgtaagcgcttttacatgttcaataact

SEQ ID NO: 23812 - DNA, 347 bp, Zea mays
  unsure (1)..(347): unsure at all n locations
agctntacttagtttgatttgcanaagaagaggccagtctatatgcatgcttaatggctaagacttgcatgggctggctgtggcatcgccgcttagcgcatgtggngatgaagaacctccacaagcttctaaagggagaacacgtgataggtctaaccaatgttcatttcgaanaagatagaccttgtgcagcttgtcaagcagggaaacaggtgggaggctctcatcacaccaaagatgtgatgacaacatcaagacccctggagctgctacatatggacctcttcggacccgtcgcctatctgagcataggaggaagtaagtatggtctagttattcgtgatgac

SEQ ID NO: 23813 - DNA, 379 bp, Zea mays
  unsure (1)..(379): unsure at all n locations
acaagtgggaggagcgcatcacagcaagaatgtgatgaccacttcaagacctctggagctgctgcatatggacctcttcngacccgtcgcctatctaagcataggaggaagtaagtatggtttagttattgttgatgactcttcccgtttcacttgggtgttcttcttgcaggataagtctgaaacccaacggaccctcaagcgcttcctcaggagagctcataatgagtttgagctcaaggtgaagaagataaggagcgacaacgggtccgagttcaagaaccttcaagtggaggagttccttgaggaggaatggatcaagcacgagttctcctgctcctacacaccacagcataatggtgtggtagagaggaagaac

SEQ ID NO: 23814 - DNA, 312 bp, Zea mays
  unsure (1)..(312): unsure at all n locations
aattctcatatttggaagatcagagctccaaagttgagccaatgtcacttgaaatcagacttaaacatttgagaaaaagtgtggctcttttgcacttaagtccaaatctcagggtttagatngcannatcacatatgagtgacccanatgacttaagatacttatttaactnggttnttgcactttagtccaaaagtggactaaatttgcacatangtccctanggtttggatttagggttttcaaaggttccaattanggtttctgggcatccaggggtataaatgtgattaactttacttttgggacatt

SEQ ID NO: 23815 - DNA, 395 bp, Zea mays
  unsure (1)..(395): unsure at all n locations
tgcagctttaagtactaagacatctgccgtaggtcgtgataaccgccganggcgctgcctgcgtctaagtctaggtaccattgttaccccaagtacgtgtgtttgttctttgtggctgctgaggcctgaacatttgggtataaagtcgtgtttctttcctcttgtttcgagcattaggactttntgtcggtagcagaatcacttatccgagcgtgagttacctttcgtggaaggtgacgagtgaggtatccgtatcccggaggcgtaggagtccctcggctctggtcgccttgccgttcaagttctctctcgctcgtcattaggattctgttatcgacacagtcgaaaggcacgaaagtcgttttggcggaaaactttttcgaggaaaaattgac

SEQ ID NO: 23816 - DNA, 355 bp, Zea mays
  unsure (1)..(355): unsure at all n locations
catacactagntcgcgtaatttaccatttaggaaggcgctctttacatccatttggtagagcttgatattgtgtgcacaagcataagcaagtagaatccggatggcttctaatcttgctacnggagcaaatgtctccccaaaaatcaatccttcaatttgagtatatccttgtgcaactaatcttgccttgtttttactacccaccatcttcatgtgcttgtgcgaatacccatttgtaccataacttgtggtctttggctctaacaagctccaaacttatttcgagcaagtattaattttctgcgtgattacccatcactcaagaagcttattacacgtaggtcacacaaaaca

SEQ ID NO: 23817 - DNA, 295 bp, Zea mays
  unsure (1)..(295): unsure at all n locations
ttatgagcactaactgtaaagcatcacatatacactcaaaggggagaaaacatcaaagcgaaatcatttttgaaatgccctagtgggccacacaaatagagtttttcaaggcacgggactacacgaatacctctcatacatgcagggctctagccaaagtgaaaaaaaacttcactacccaatgcatgcagaggactgggcatactaacttcaggccaggcaacttctcttctgggcaggctgacgcacaacttcaatctgagatatctnctggatgggtcaacagggagctgat

SEQ ID NO: 23818 - DNA, 222 bp, Zea mays
  unsure (1)..(222): unsure at all n locations
gcgccgagtgtagcaagggcatgttcccgagccttcttcgagctagttcagngagtcttctcagctgggctggttgcttcggtcgtcgaatgcctttgcctcgggaaccgtatttaagtctgtgggcagatacctcggcccataactaaaagaacgtgaaaaccgtgcccgctcggcgcgtctcagatccaactacgaggagctcttcatcaccgtgcaact

SEQ ID NO: 23819 - DNA, 418 bp, Zea mays
  unsure (1)..(418): unsure at all n locations
agcttattactaatcctctttagagcctacataaggatattctctgctgagggccaagctcgcaaccaggtaacttcatcgatagtcatgagccttcttacacgcaagtggacccatgatttcggcctctcttggatgctcctcgtagtctacactattgagtttcccactaaaatgtagtgtgcatcattccctccaatacacggtggcgccacaccgtacatagttggtgtaatctcgcaagatacaggccgtctcgatacaatacaatgacgtgtgcaagcatcaagagatacaatggtgcatgcaagcaccaacgcgttgatgggtgtctagccacagtctaatcactangatatcctagagcaagcgctacaatagcagtctaactaacctaaacacttcgcanagcacctat

SEQ ID NO: 23820 - DNA, 280 bp, Zea mays
  unsure (1)..(280): unsure at all n locations
gtatagctgaccatctagcacttcattaaatgctattgaatcattacttcttctaaagacagtgacacctacgtcagaaatagatagttgtagcccattttgcataattgagaaacagaaagcatattgtatcttaagaatctccagaaaaacattagaaatggaatggcaggggatatagctatttacccaaacctttgaccaaccttgattccatcncgaatgtatactatttgggatcttatnttctatatgggagaacatcattctccctatcatg

SEQ ID NO: 23821 - DNA, 394 bp, Zea mays
  unsure (1)..(394): unsure at all n locations
tatggtgagcaaccttccagctttgaagattgtgagtaccctaaccatgtctataaactctctaaggcgctttatgggctccagcaagccccaagagcatgatatgaatgcctaagagattntcttatcgcttatgggttcaaagtcggaaaagccgatcctactctctctactaaaacaattggcaatgatttggttgtatgccaaatttatggtgatgatattataattgggtctactaacaaatctacttgtgaagagtttaataagatcatgattcataagttcgagatgtcaatgatgggggacgtgaagtatntcttatgattcaagtcaagcaactcatgagggcacctcattagccaaacaaagacattcaagatatcttaccaag

SEQ ID NO: 23822 - DNA, 428 bp, Zea mays
  unsure (1)..(428): unsure at all n locations
agcttaccctgtcccattctagggcatgtggctatatattatagtccttgatcaacaggcctacatacgcatccaatccttaattgacccgggcggagcatcacctgttcctagcccaagtctcgatttaagtgttttcatccttangattgtgtctgttccttangatgagagagcatcacggngaactttgcagtaagatcccactattgctccaaatgaaaatattcttgcaggtagaagccatcctctcccgggttaaattgagggcaacctttatccacaagatctaagcaaggctaagcanttttgtaatcataattttgatcttacagaagatcttaaaggttggattaaggaagcatgctcaagggttaagcattctatacctatgccattcactgacttagtgtgcaaagtttaaaacc

SEQ ID NO: 23823 - DNA, 116 bp, Zea mays
cggtatgatgtattgtatcgcgcgcatattaactgttccttgtgatataatgccatgggtaacggggcgaaaagtgtcatatggcacgttaataaactgggaactaccaggttggt

SEQ ID NO: 23824 - DNA, 340 bp, Zea mays
  unsure (1)..(340): unsure at all n locations
tgttttcctcggttgtaccaccttggagcanaaacaacanaaagtttgtcgcttcctcacctaanaacaacnaaggggatagaccctgagtatggaatactcagcaagtcttacccgactaaagaaaagaactctcagggtatgctggataaataggagttaaggagaggctntagcaaaaatcaacttatactttngcagaaatagcttactaaagtgagtccttactttcagtctttttaacgccatgtaaagattaatagactctatttgcatctagtctaatntcacatcacatcaagacaacatcanttntatccatcgtngtcacattcctgac

SEQ ID NO: 23825 - DNA, 90 bp, Zea mays
agaatcaagcaatgaaaggttacagagagcaactcttgtgctgctgctgctgggggggtactaccactacgggtaccagcgctagcaacg

SEQ ID NO: 23826 - DNA, 324 bp, Zea mays
tcatcgaagcttataagtttctggatgagaagtggtcacccaagttttggtgatgaagcaccagaagaccaatcaagggaggaatccatgtgggagttctcaagaaaaagggttgccgtgtggcatcgatgcttcctcaataagcttagcgaaacctagaagcctgaagatgatctttgagtagcccgaatcaacatttgcaatcagcaaccggatgctcctgaaaggccagaattttgttgaagtccatcttctcgaagagtcttcaaagtgaagatatgtagcttaagtaaagctatacccataacccttctaagccgaatc

SEQ ID NO: 23827 - DNA, 441 bp, Zea mays
  unsure (1)..(441): unsure at all n locations
tcatgcgcagcatgctagtacattctacatnattacaattggtaatattgttcacaattgcttggcctttctcatccatagcacttaacgggccatatgtgattgatgacgtgcagcttgtgctaccctaaacctactcatgaaggatgcataaataacagcaacaaaagcagccgcttgattgacaagcattgttctctgattcactggtgccatctaatacataccaggagtggaaattcatggctcaaaacatgtgctcacatcanaaatgaaacatcaatgactaagacatgtgctcagataacaaaatgaaacatcaatgactaggacatgtgcttagataatcaaatgaacatcaggaacggcatcaatcatatgcaaagttcaaccctaatctctggaattcaagatctnggcgcctctaagtactgcgctttt

SEQ ID NO: 23828 - DNA, 263 bp, Zea mays
  unsure (1)..(263): unsure at all n locations
cttatcactaattgtttcaaagtcggaaagccgatcctactctttttactannacttgtgcanaagaaattgttgtataccannattatgttgatgatattatttttgggtctactaacanattcacttgtgaagagtttactangatcatgantacaaaattcgagatgtcaatgatggnggagttgaagtatttccttggattcannatcagcactccaagatggtacttcatcagcccaacaagtacattcagacatact

SEQ ID NO: 23829 - DNA, 210 bp, Zea mays
cgggcacttagcgcggccgatccgaacgaagccacaaatggactggtacagaggaggacacagaggttttcacaacgtacccctggttgatgtactcatctgtgggcgacaccactctggttaaagaaaatgtggtgtactcaatattaatatactgtgaatatactgtgtagcatgttcttcgtatgaaatggaagaaggacggaggaa

SEQ ID NO: 23830 - DNA, 470 bp, Zea mays
  unsure (1)..(470): unsure at all n locations
agcttgtgattntaccaatttatagagcacaatctctacttatgaatttctatgaaagatcttaaaagagattgtattagtaacacaagcaatagtttcctatttagcaacctctagtatatgaatgacaagaaggttactaaaataaggaaacctcatgatatgaactaaattacccttaccagcatcatgcataaaatcaattgaaaaaagatgaaagtagcatgattatttaattaagtttatagggcaactctaattcataacatggtgagtgtttaatggagaagactcacaaccaatttaaacaagaatgaatacatcacatagtattggttcgatctttctttgaatgtgtgttggaacttgctctcagtttgcaggggatccaacaaggataacaatgacgtcaacagggttctcgcgtaagatggcaatagctcttgtaatctgccctctcacgggcactg

SEQ ID NO: 23831 - DNA, 420 bp, Zea mays
  unsure (1)..(420): unsure at all n locations
agcacatctagtacactagctattctttttctcttgggggttgctgctagacctttttgtgtctntggcacctccactcttgccgaagggcttatgacttctaatggttttgccccttcgattcttgatttttcaattttgtcaatcttcggcattgcagccggctcttcaatcctctgcgtagggcaggccctttggtttcaatagccgaagaggtctcaccgccaaattcaggcactatggccggttcaatgtagcgcggtcggtgggtaagggctttcagattttcctcttcggcgtaggctcgcttggagcagccgaagcagcaacgtttccagaagttgtactctttctcttctgcccncgtggcgggtagcggtagtcagggtacataaatccaatagcatcaaaaactctatt

SEQ ID NO: 23832 - DNA, 285 bp, Zea mays
  unsure (1)..(285): unsure at all n locations
tctgcgtctgagggcacangcaccaacagtgcccaatgaaattgtcattgaggccatgaataagggacttcggtccggaccttcagcgcaatactttgccaggaagccaccacaaactttggagaagctgctctagaagatggacgagtatatccgagctgacaatgacttccgccaaagaagggaggaggcattcangttctctgaaatgaccagnggcttcggaggaagatntcatttgaggcacgtcaggtcaatccataactccactcagaatgatgatag

SEQ ID NO: 23833 - DNA, 492 bp, Zea mays
  unsure (1)..(492): unsure at all n locations
gtatcggaaatagattcatgacccagatcttggttagtggcggacggaaaatggcgggcgacgaagctcgaaaccatcttaaaccggtaagaaacttatgtttattacttntaccttcttctttgaaatttgtacctttcttactctggtatttggtatatacaagatgaccgaactgaagattgacaatgctgaagcttggcaaaactgaagacgaagccttagctaaagcttaaaagttgttataatgtgctttcctgcaaaaattcttggagaaactctttgtatatagatatggaatatcttatgtaaatttgtacataccttggaatatatcctggtctccttatccgtattcaatctgctttgctgcggacgaaacttctcttttgagccgaanggcgaaaacaccttccctttctttcgtacaaaacgaagcatagaaaatttttccttcgaatcttttctttatttctgagcacctgctctttt

SEQ ID NO: 23834 - DNA, 413 bp, Zea mays
  unsure (1)..(413): unsure at all n locations
acattttgggactaacaaatgtttatttttagaaagacaggattngtagcgcatgtcaggcagggaagcaagttggtattcatcatccacacaagaacatcatgacgactgacaggccgcttgagcttctccacatggatctattcggcccgatagcttacataagcattggcgagagtaagtactggctaagtattgcggatgaatattctcggttcacttgagtgctctttttgaggaaatatctcatacccaagagaccttaaagagattcttgagaccggctcataacgagtttggcttaaggatcaataatattagaagcgaccaatggacggaagtcaagaactctcaattgagagccttctgaggaggaggacatcaagcatgagtttcttctcctaccaccacac

SEQ ID NO: 23835 - DNA, 370 bp, Zea mays
  unsure (1)..(370): unsure at all n locations
gcttgtcattgttgatctggtccaataacatctgagcatatattatctgacctgatctacgttaatcgggaaaacaaacttacacatacgcgatataagtaccaaccaccccatacaaaatatagggtacaatgttttgcttgtttgaaactgtctaaatcttatgtcctttgtgtggaatatcgacttccttttcaacaaaaagtgaattcaccacaaattcataatataaagacaatgactaatagatgcctaacaaatattctctttaataaaatatgagaaggtatacttcnaacacatataattcatataatacttgcatgatgagtattaagtgaaaataatacacataaacanaaacaacaat

SEQ ID NO: 23836 - DNA, 141 bp, Zea mays
cattacagagtaagattcttgaattgtgatactattctcatacttgagttttttgcagaaaatacaacccagaactttaagaatttcaacgctcaactgttggatggatcaaagataaaggatatggtaagccagactcca

SEQ ID NO: 23837 - DNA, 426 bp, Zea mays
  unsure (1)..(426): unsure at all n locations
tatttcatacttctggaatattgtatctgcttatgaattaatagaagtaggatcactatgctacttatcctcaataggtcaataatggtcttggcttggcttgggggtaaacgacccatgtcaaatttgtaattcatttttaaggcagcatactttgggtctgcattntangtgctgctattaatgaagtttgaccctaagttctgatagaagccatntgctgatgtattctcagcttcatgaatggatgttaaaataccactcttaaggcaattgcttgatcaatgatttggttgacacattggatctgtatagttctattgtttgctcgttactctagacatgtatttctactggagtgtttacacttgatctangaacattccattctggcctccaactaataccttaccattgctctaatcg

SEQ ID NO: 23838 - DNA, 326 bp, Zea mays
taaacgccagcatatacttaagagttttttccttagaccggtaagacttaccaaagtacactccgtacttatggttttcaaacccatgttgttgtaggtgatgaaactgctgagttctgttgtttatgcttcaagggttgtccaaagcaggaggaagaatactaagacctacctttggaaggtgttttgccttcctatgatgtaataggtttaagcactcagtacccggttatgtaataatcaactctttctatattacacttatgaatgtaactatgttattgaatcctttcccttactctgatggtgtgaatgtgtgtgtatgg

SEQ ID NO: 23839 - DNA, 474 bp, Zea mays
  unsure (1)..(474): unsure at all n locations
catgcaagctngaagccatggtaagtagcataggcaagtaatatactaattgactcaagcctagctacgggtgcataggtttcaccgaaatccaaaccttcaacttgtgagtatcccttggccacaagtcgggctttggttcttgtcaccacaccatgctcatcttgcttgttgcggaagacccacttggttcctacaacattntgattaggacgtggaactaaatgccatacctcattccacgtgaagttgttgagttcctcttgcatcgccaacacccaatccgaatcccttaatgcttcttccaccctgtatggctcaatggaagacacanatgagtaatggtcacaanaatgagcaacacgagatcgagtggttagccccttctgaatatcgccgaggatggagttcacggagtgatctcgttgtattgctcggtggactcttgggtgggcnggnctcgatcatcatcat

SEQ ID NO: 23840 - DNA, 201 bp, Zea mays
  unsure (1)..(201): unsure at all n locations
gaaagacagtgtgttaatgtattacacatacctgcttgtgtgagaagaaaataaacactggtaagagcatagtatgtctcttatattaacaggagataactactactatctctattcttttntggttggcacgngttagtttaaaaataaactagcggcgacaaatatttaagaacagaggtagtagagcatgtcccaact

SEQ ID NO: 23841 - DNA, 441 bp, Zea mays
  unsure (1)..(441): unsure at all n locations
ctcgaccggatccttgagtcacctgccgcatgcaagctngagcgagtagntactcccttgcttatgttacccataatctggtcaacgaggtgattcctttgaatcgctgctcggacttgagttggaggggccagtggtgcttcttcctccaaaacttgttcttcttgtgctcccccttgatcacacgcatcttcttgaggaacctgttcatcatcttgagttgggggattcacgatttgtgaggaagaaggttgatcttgctcttgttgttcctgtggtcgcacatctccgatcgccatggtgcgtattacggncgntggaacatcatcttcatctacatcatctagatatcaacttgctctcttggagagccattagtctcatgaaatacaacgtcgctagagacttcaaccanacccgatgatttgtgaagactctata

SEQ ID NO: 23842 - DNA, 472 bp, Zea mays
  unsure (1)..(472): unsure at all n locations
tttgactaaacanaactncgcctcaataatattcttctcttagtgttcaagagggttgtagatattatatttgaagagggtataccaatttgaaattatatcaacaataagataccaatttgaaaattaccattggaaaaatcttttcttaacacaactttaaatttttcaatttgtggtggtgctttccttttgctttgggctaatactttctccccctttggcatgaatcaccaaaaacggatactttgagtgaaatataatcctttgatctccctatggtaaataacatatgagtgaagattataccaaagttggagagcggcgcggagcgacggcgaaggatgagtaatgtgatggagtggagtggaagccttgtcttcgccgaagaactccaattcctttcaatctatgactnggcatganatgtacttngaaacacattagtcatagcatataaaacggatatgat

SEQ ID NO: 23843 - DNA, 354 bp, Zea mays
  unsure (1)..(354): unsure at all n locations
accctagaccccttaaagcactatacttncaagcaagggattagtgggcaagctaatcaaatggccaattctttgttctaatccttaaccaagatttaagtacactaatgtatctacaaaaaatagtaaaggaatcattacaaaaagggcccttaaagaccccaaatccattccttaagtagagagcacactagagctctctaatcttctgtaagtaaaaataaaccctagnttaaagatcagacgtgttcacttagtaaatggcgccaaaaccactttgtctgaataccaaaaaggagccaaactaccttaagaacccaccnngaaaatttcaatataaaatagagtgtgaca

SEQ ID NO: 23844 - DNA, 475 bp, Zea mays
  unsure (1)..(475): unsure at all n locations
agcttgcttctgccatgggtcaacggcggattagagcgccatatcgtgcgtatcttggcaaagtcactgtgtacggtcgcttctctgctccaaatcctacctttttgctgtgagttccaagtcgagatatggtcggggtagggagatagagaggggagaagtttgctgtgtcagccaggcccgaaccgagacaaaagtggtgccaagtcgtgtctagcgttctaggataggtgtcatctctttccagggtgttctagggttaatntggcgccattttgtcaattgggtcgaacgggtttgaaaattggattaacgtgaacatgtggagtctttgtgcaacggttagtttttgtacttaggcaanaactgaattctcccttgtgctgaaccttanngtgaacttttagggcttttctgaaaacttttaggggtacttccttactattaagtggaggttatcaagtatattacaact

SEQ ID NO: 23845 - DNA, 470 bp, Zea mays
  unsure (1)..(470): unsure at all n locations
gcaagcttggtgtgatcctgctagtctatcgaagacaatgggtcttcttgagaggcatattgtgtttccactggacttattgagttagtattgttggtaccggcggcgactgccacagtggaaagagccttctcagctatgaagattattaagactgagttgcgcaacaagatgtccgatggttggttaaatgacttgatggtgtgctacattgaaagagaaattcttaaaggactggaccttcagaatatcaagaatgcatctcataataagataactagacatatgccattgctagatctcctagaactagactcaactagaggtatattcttattttcacttgtccaacaattgttacttcaatttgccatcccgaactcattnttcttttttcagatttattcctatatacatttggtgtaatgaatgtatcaaatgactttaatcatgatttgcaactctattac

SEQ ID NO: 23846 - DNA, 244 bp, Zea mays
  unsure (1)..(244): unsure at all n locations
cgcagtgtcgatgtccgtgtgaccaaacttgaaaattagttggggagtgattgcacaccataaaacagggatcttttgttttaatctaggctttgccaaacccaggcggtgccgcggcgcgttttgctaaccggctgcatggctactttacccacctgtcatattntctttcctttctgtaactangaaacctagaaatataaaaatgtcaaattgaaccatttgtggctctagtcttagatta

SEQ ID NO: 23847 - DNA, 337 bp, Zea mays
tcatggatgacttcgctgacgtaatagactggcttctagatggttcggacccctgtccgtggtcccaagccctcaaactcttgaccttccatcaccatcgtggtggtcggaccaacacctttttctatgggaactttttgactcccctggggatgttgtgccgtcctttcgacgaccaacaccatgctcaccacctctgtagccgctgcaatgtataagtataaatggctccctgggctcggagctaccagtataggtaggggcacaaggtgctgcttcaactcttgaaggctcgttctgcctcctcggcccagagaatgggtcagaacttcataat

SEQ ID NO: 23848 - DNA, 406 bp, Zea mays
gagtatcctaaccatgtctatatgcttctctaaagcgctttatgggctcaagcaagccccaagaacatggtatgaatgccttatagatttccttattgcaaatggcttcaaagtcggcaaggccgatcctactttattcactaaaactcttgacaatgattcgtttggatgcccaaattatgttgatgatattatatttgggtctactaacgaatctacatgtgaagaatttatatgatcatgacacaacaaattgagatgtctatgatgtgggacgtgaagtatttgctaggattccaagtcaagcaacttccagagggcaccttcattagtatacgaggtacacttcagacttctaaccaagtttggaatgaaggatgccaagccatcaaacacccatggaacc

SEQ ID NO: 23849 - DNA, 427 bp, Zea mays
  unsure (1)..(427): unsure at all n locations
gcttgcacgagctcgaaccgagcacccgcgccaccggtatatctaaatcatgctcgccggagttcagaaccccggcggcgcacgtggacagggtaagtcactgcgccatttttcgattcaatgcacagatagcctctacatcaccccgtgaagctcaccgtgccattggattgaactagatcgtcgtggtttgaccggaacactcgtcgtcgacgagagcccccgcctgcgcgcgtggaccggacgattccgtgccaccgccgccgtcgagccgtacacctgttgtaaccgccagagcctctccgagccaacctcgccccttgtcggacctctctcgccgccggtaagccgcgccaccattttctttctctcgggtactggttatacctanggagggaccgcggcggagagaaaagaaagctagggg

SEQ ID NO: 23850 - DNA, 55 bp, Zea mays
tgccaatctgcggcggttctttgcaaaaggggggcgttaaaataatccctttggc

SEQ ID NO: 23851 - DNA, 264 bp, Zea mays
  unsure (1)..(264): unsure at all n locations
gcttctanaggagaacacgtgataggtctaacttatgttactttccgaaaagatagaccttgtgcagcttatcaagcagggaaacaggtgggaagctctcatcatgccaaaaatgtgatgacaacatcaagacccctggagttacttcatatggacctcttcggacccatcgcctatctcagcataggaggaagtaagtatggtctccgtataggtgatgaattttcccgcttcacttgggtattctttttgcagataaatctg

SEQ ID NO: 23852 - DNA, 374 bp, Zea mays
  unsure (1)..(374): unsure at all n locations
agcttatgaagattcttcatcccaacatgggctagtcggctgtgccagatccaacccatgttagtcttagcaattaagcatgtgtcgagttcaactctatcaaaatctaccaagtatagctgaccctctagccaaccttaaatgctatngaatcatcacttcttctanagacaggggcacctacatcagtaaagagacagttgtagccccatttgcataattgagatacagaaagcaaattgtaatctaatgaatctacaagaaaaacatttggaatagaatggtcaggtgatatagcaattttacccaatcctttgaccaaaccttgatttccatccncgaatgtgatggctcgttggggatcttggnttttt

SEQ ID NO: 23853 - DNA, 442 bp, Zea mays
  unsure (1)..(442): unsure at all n locations
atgattcaccatgaatcttgggtctccatagatgaatttaggaacttccttcagcggatagattttaaactgaatgatgaagaagaacttaaagaaaggatggatgagatctgtaatcgggcgtcttatatgggtcaaattcttaccagaacaggtaaaatgagtagtgcaatcctgtgattcatcaaaatataacttgctctctgacttctttgtttccattttttgccaaactactgttntctattttcctattaagaggaatgatgtactacagaaaggcacttgaaatccatgccttcaagatttacagatactgtaagatcaatgtgtcatgttgtcttttccgaaccatgttatcatcatatctttgatacatgttatttttgaactaaagctgacgaacagataatggatctaccaaagtgcatctgatttgaat

SEQ ID NO: 23854 - DNA, 55 bp, Zea mays
ttcttccggggtgagggtttaacgaggcggagccatgtaatatatgtgtgaaaaa

SEQ ID NO: 23855 - DNA, 435 bp, Zea mays
  unsure (1)..(435): unsure at all n locations
ctgccgcatgcaagcttctcctcaattggcgccactcctactctctctcgtatatcatcattccggactcgatctctccttgtgtggccacatatccagcgcaacatacgcatctctgccacacttagttgttggacatgtcgtcttttagtgggccaacattctgctccatacaacatagccggccggatggctgtcctgtagaatttgccttttaatttgtgtggtacccgggggtcgcataagacacccgcagcttgtcgccactttcaccatccagctttaattctatgactgacatcctcatcgatgtctccctccttctgaagcattgatcctaagtaacgaaaagtgtctttcttgggtaccactngcccatcaagactaacatcgccatcctcataccccatggcactgaaatcacacttcatatac

SEQ ID NO: 23856 - DNA, 441 bp, Zea mays
  unsure (1)..(441): unsure at all n locations
agcttctaaagggagaagcacatttgggactgacaaatgttcattntgagaaagtgttgggaatagcatggnttatatggttgagggacaacccctataaggctagcttnttgggagtgttggcccaagagacctanagcccgctgctatacgtgcgggtgcgtgtgtcgcggcccgacagcctgngtgggtgcgccgtgtgtgcgggtggccccgacggacacgccatgtgtcggcggtccggttccaacatttggtatcagagccaggttggcccagtgcattctcagacaaatctcggctcacaatgtgtgagggggagagtgttgggaatagcatggtttatatggttgagggtacaacccctataatgctaagcttttgggaagtgtggcccaagagacctaaagcccgctgctatacgtgcaagtgcgtgtgtcg

SEQ ID NO: 23857 - DNA, 107 bp, Zea mays
atatatatattaccattaaaataaatacacttccttttttaaaaaagaaaaagccggtaaaaagagggacacctaatttggggaaataagaaaaaatttatccccca

SEQ ID NO: 23858 - DNA, 362 bp, Zea mays
  unsure (1)..(362): unsure at all n locations
acaagaacatcatgaccaccgacaggccggttaaggtacctcacatggatntattcggcctgatcgcttacataagcatcgacaggaggtagtattggcttgaaatggggatgactattctcgcttcacttgggtgtctttttgcaggaaaaatcacaaacccaagagaccttatagggattcttgagacgggctcaaaatgagttcggattaaggatcaagaaagcgatatgggacggagttcaagaattctcanatagaagaatttcttgaggatganggcatcangcatgagttctcttctcctacacacctcaacaaaatggtgtagtggagaggaagaatagaactctactggacat

SEQ ID NO: 23859 - DNA, 475 bp, Zea mays
  unsure (1)..(475): unsure at all n locations
agcttatgaagattcttcatcccaacataggctagtcggctgtgccagagccaacccatgttagtcttagcaattaagcaagtgtcaagttcagctctatcaaaatctaccaagtatagctgaccctctaacactcccttaaatgctactgaatcatcacttcttctaaagacagcgacacctacatcagtaaaaagacaattgtagcccatttgacataattgcgaaacggaaagcaaattgtcatctatagaatcctacagaacaacactagatatggaatggtcaagtgatatagcaattntacccaatcctttgaccaaaccttggtttctatccccaaatgtgatagctcgttggggatcttggttnttctcataagaagagaacatcttcttctcacctgtcatgtggnttgtgcacccgctgtcgataatccaacttgagcccncggatgcataaaccctacaaacaa

SEQ ID NO: 23860 - DNA, 333 bp, Zea mays
  unsure (1)..(333): unsure at all n locations
ataattcattggtggggctaaacatcttggaactatttttattaaatactagagaaaattatgagtctatgtaaattggtcccatgattttatttttttctaaaatttcctattaattccataagcctggtagaaaaagaatagggaaaatgatgaacagtggaacgcgcccacgccgcgcgtctgcgattgtaactttacgcagaggacctcggtcattcaaataatcggtanagaaccctgcacattattcttctgtgtctctgagattcacaggtaggcccctacacttctgtttcttcgtagcgccaagtccacgacggtgaacggtga

SEQ ID NO: 23861 - DNA, 434 bp, Zea mays
  unsure (1)..(434): unsure at all n locations
gcttctaaagggtgaacacgtgatacgtctaacaaatgttacttttgaaaaagatagacgctgtgcagcttgtcaagcaggtaaacaggtgggaagctctcatcataccaaaaatgtgatgactacatcaagacccttggagttacttcatatggacctcttcagacccgtcgcctacctaagcttatgaggaaagaagtatggtcttgttatagttgatgatttttcccgcttcacttgggtattctttntgcgggataagtctgatacccaagggaccctcaagcacttcctaatgagagctcanaatgagtttgagctcaatgtgaagaagataaggagcgacaacgggtccgagttcaagaaccttcaagtggaggagtaccttgaggaggaagggatctagcactagttcttagcttcctacacaccac

SEQ ID NO: 23862 - DNA, 351 bp, Zea mays
  unsure (1)..(351): unsure at all n locations
tctatgagaatggataccctgagcatctatttggngaacgcaagtgacctctgacccattatgtgccatttactctataatacattgtcccgtatactatgaacaacctaaagatttactagctntctatttaccttgtccttgatttaccttttgggttactatggttagctacatgctagccctttactttaatcaatgaacatgatgagatacaatgatgatactatgatcttattctggatatgatgatatacttgtagtatttaaggagacctcggctgtttcccgagtacctctcccgaaggacctgttccttgagagaccaccccagataacagtgcaaccatg

SEQ ID NO: 23863 - DNA, 306 bp, Zea mays
  unsure (1)..(306): unsure at all n locations
actaagcaccgagctgcactgatcatatttgcnagaattttgtttctttataatatctggctgaactctgcgaagaaataagggggattgccaattttcacgagacatcaggtggattggttaaaccgcatttgtccaaatacaaaacttcgcacgaaatctgtaacacatttatcttatgattcttccgagtctatatgttatgattaactacttttgttgcaagataaatcaaatgcccatgggctatggaactttactgttagcctcactgaattgtggccttcatcttgcttccacatgaat

SEQ ID NO: 23864 - DNA, 170 bp, Zea mays
  unsure (1)..(170): unsure at all n locations
gacctctaagtcacgctgccgcgtgcagactgcatatacacctgcntgtgcataatgatgatcttctttattcatgagcatgagcatgtgaaagtgcattcacttgtgcatatgttttacttaatgagacgcctatgttctatgagtgaccttatatgttcatactccct

SEQ ID NO: 23865 - DNA, 331 bp, Zea mays
gcttgtacatcgcctcaacatggcatgtttggtgattggcgcgtcgtttcaatgcgtctgctgacgcactccccgtcaatcagcctttagtcacgccaactgccatatctgtccccgcggctgacagacccgcggtccccacgcctggtggtttcgtcgggccatgcgtggggcacctcgataccgctgcattggtttaaaaattaccttctctgtcttctacggcagcccagaggaggcgcagtactggcgcgagctgcggttcactctttccgcacccgagaaccggcacccaaggagtatgactcgtgggcctaggcccccgtgtcat

SEQ ID NO: 23866 - DNA, 368 bp, Zea mays
  unsure (1)..(368): unsure at all n locations
catcaatatttccatattggcaatacttctgaatgtctctgcgggaggattttcccttatcaagtttgctaatttggtcatcacattctgatctttagctttgaagacttcgtcacgcgcaagacgcattcgatgcgataaaagaggatcatcatcgtagaagtacaactccaggtggtntggatcactttctcgacgaccaaaagagtgtatccggtgatatacctgaccatgtgctttgaatgtataaacaccatctcttgaacttgcaagatnttggtcatactcgcacgtgaatgtggtgaatgaaaagtgaccatttaaaaaatctagtggtatccacaaaatggttgtgaatcagcgtccta

SEQ ID NO: 23867 - DNA, 318 bp, Zea mays
tgcagcttctaagggagagcacattttatgattaacaaatgttcattttgagaaagacaggatttgtagcgcatgccaggcagggaagcaagttggagtccatcacccacacaagaacattatgacgaccgacaggccgttgagctactccacatggatctattcggcccgaatgcttacataagcatcggcgggaggaagtattgtcctgctattgaggatgattattctcgcttcacttgggtattctttttacaggaaaaagtctcaacccaagagaccttatagggattcttgagacgagtctcaaatgagttc

SEQ ID NO: 23868 - DNA, 179 bp, Zea mays
gctatgcgccatggctttggaggaaaattgggcgatcaccacaagaatcttctgcttattctgcggcgagaaccaaggccatactaccagaatggtgccatgttactattcacaagccaaaggaaatagctgaagcagcagcacaacaagctcagcctaagcacgtcatgcatacagct

SEQ ID NO: 23869 - DNA, 370 bp, Zea mays
  unsure (1)..(370): unsure at all n locations
agcttctaaagggagagcacattntatgactaacaaatgttcattttgagaaagaccggatttgtagcgcatgtcaagcaggaaagcangttggagtccatcatccacataagaacataatgatgactgacaggccactcgaactactccacatggacctattcggcccaatcgcttatataagcatcggcgggagtaagtactggcttattattgtggatgattattctcgcttcacttaagtattcttcttgcaggaaanatctcanacccaagaaactttaaagagattcttgagacgagctcaaaatgagttcagatggagaatcaaanagaatagaagcgataatgggacggagttcaagaattc

SEQ ID NO: 23870 - DNA, 425 bp, Zea mays
  unsure (1)..(425): unsure at all n locations
gacctgcattccgacgaaccatagtcttgggtattaaccttatatgtcacaaccacacgacgtctcttggatgtggaactagatagcgtgtattacccacaattactagcattatcatctttaacgtcgatgacatcgttgacattggcatcttggatacgtgcttcaatgtcgtggggtagcctaccactagttggggcccgatgatcatcaccagtgttgcgaatatattaaacgtacacacaattttttacatatcgaagtgggttgcttgtaacttgcaatgccttgaattgtatgatcataaataacaaatgcangtatcataattgttacaaagtagcatggcatgtacagtggacggaactacttattgcttcttcacaccatctgacaactacacttttgtaggtccaacactctat

SEQ ID NO: 23871 - DNA, 335 bp, Zea mays
  unsure (1)..(335): unsure at all n locations
agcttggtatcacaaacactagataaagtatattccacgcttagnttctaaacttgcccgccccctccggaagatttgtcaaactctgctactgcttctggtgctccacattataggctattgtgcattagtgctttgattactattaaacaaaanaaatgtcacagtgatgggtgcaaacggtaagaaaactaatcgtaccaactatgattcgtttaggtatttgaaatgtaaggtcgctcgcaggtaaagtaagggagttagtttaggcacccactaagaaacgcgaaaatatcttatgcgtccaagagactataataaagggtcagagatga

SEQ ID NO: 23872 - DNA, 440 bp, Zea mays
  unsure (1)..(440): unsure at all n locations
agatggatgagtatatcatagaagacaatgattntccgtagagggaggaggaagccttgagatatttcgagatgatcaagggcttcatcggacggttcaatccaagacttattatgaccatacataatccaaatcagaacgaagacaaaaataatcacactcagggacaacaatgtcaacctcattctacaagaacccaacaaaataccttcataccatcggcccaatgggtggaagaggaggaaagagttttggaggaagattcaactctcaaccaaggaaaatgttctaccttttctgtggagaggacaagggcctacaacatgatcctgtcaagtcacaatccagaagcagaaggaaatcgccgaagctaaagcacgacatagtcaatcagagcaggtcttttacaccgcttcgtattatccccatacattcacaat

SEQ ID NO: 23873 - DNA, 344 bp, Zea mays
  unsure (1)..(344): unsure at all n locations
ggtggaactcttgaatattggggatttgaactccttgaagtacctcataacaatggagttatggggccttttctgccattgctgcttgagcaagctgcaaagagatgactgatatatggttgtgtaaggaaaatggaccccgggccattgggcttaatagattttggtgtttgatgatcaacttaacctatggactaatgtgtntgctattgtttgtgttggtaagtcacaggatgctaaagttacttggaccaaagcattgatgaaagcaacactctcaaagaagacattatgaagatcaagttaagtccaagaaaagaagaagtgttgcacagtctgactgt

SEQ ID NO: 23874 - DNA, 493 bp, Zea mays
  unsure (1)..(493): unsure at all n locations
cacttctttgatgtagaagctctatgagaaaccttcttttgagcagctgtagataacatcaaaaatttgggagaacctcttgtgaacatcatatctattatagagaatcaccacgccaaaagaaactatgaacatcatttctacttttatttntgtgacacaaggaatgaactgtgacccacccccaaccgaaacactagcaaaaaggaaggctgtgattngccatcacaaaatatccattacagcagtaatttgcaaaataaccattacagcaaaattcagcagcttacaaaaatacacttgattattctcaaaacaagcggaatttgccatcacaaaatatccattaccaaatatcatcacaagtatgtagtccaattgaaatgacatttattgatcacacaatatccattacagaaataattcactgatttctatggtgctcataatcttgccacatatgataagctatcatatctctttaagtattccc

SEQ ID NO: 23875 - DNA, 438 bp, Zea mays
  unsure (1)..(438): unsure at all n locations
tgcagcttctaagggagaacacgtgatatgtttaactaacatgcaattcgaaaaagatagaccttgtgcagcatgtcaagcaggtaaacaggtgggaggagcacatcacagcaagaatgtgatgaccacatcaaggcccctggagctgctacatatggatctcttcagacccgtcgcctatctaagcatatgaggaagtaagtatgggttagttattggtgatgactnttcccgcttcacttgggtgttctttttgcaggataagtctgaaacccaagggaccctcaagcgcttcctcangagagctcanaatgagtttgagctcaaggtgaagaagataangagcgacaacgggtccgagttcaagaaccttcaagtggaggagttccttgaggangaanggatcaagcacgaagtcttcgcttcctacacaccaca

SEQ ID NO: 23876 - DNA, 150 bp, Zea mays
ccttcagcgaacgcggcctgatagattgcagcaacctgcgcgcggctgacatctagttgactaaaaattctgctctcggtattatatcaggtccccgtcgtaggacaaatgcataaaaacgcgctgcctagcgacgaggactagtttccc

SEQ ID NO: 23877 - DNA, 478 bp, Zea mays
  unsure (1)..(478): unsure at all n locations
gcttgggcgtgggcaaaggcgtatatcgatcgtggctattctatggaggagatagatggtatccgccagacagaanaagataagaagcggtggggcgccagacatcggttggctagagttaggatgtaagcaaggacgagaaaggtgatgtggtatgtgtgttggatgtgcaaacgtggctcgttcatggtgggttgcataggaggcattaggttggtcttaagacttggttagggatgttactaaaacatccgacttgtatcacaaacctaatattttagcatagatatacatagaatttagagctaatttttggcaatgttattaagaatattatgaagtacttaaataattnttatattatttnttatggataatattctctcccttcaacaaagagnggtgaaaaacattcgaatccgtattcgaatagacatccgaatttatattaattatntaaaatatatagaatgaatta

SEQ ID NO: 23878 - DNA, 351 bp, Zea mays
  unsure (1)..(351): unsure at all n locations
cacttatagtcgactagcttgcagnccgtaagtcgatctataacctcacatgttccatttgcagtgatggagtccatctcactaccgattgcattcttccaacattctacatcgggcggtgcatatgcctctactatggttgtgggggtatccttgacaaggtacatagtgaagtcttcaacaaaggactttgcaatcctcggtctcttactccttggagctaactcactatcaccttctttgtcttcaagtggattttcaattggctcacgattaaattcatttagaacactangcaaagaagaagtttctttcatcagaaatatattctcaaagaaagtgacatcccat

SEQ ID NO: 23879 - DNA, 342 bp, Zea mays
  unsure (1)..(342): unsure at all n locations
gcttgcacttacgagcaaccgcacccgcattcattcacattctatggctcaacaatagtggtaaggtcaaggttaccaagctgggacgaattaattttgctattggtttatatcgcgatgttgttgactgtgatgttgtgcctatggatgcttgtaatattctgctaggtagaccatggcaatttgattcagaatgtatgcatcatggtagatcaaatcaatattctctcatataccatgataagaaaattattttggtttccatgtcccctgaagctattgtgcgngatgatgttgcttaagctaccaaagctaatactgagaacaacaagaatattaaag

SEQ ID NO: 23880 - DNA, 162 bp, Zea mays
  unsure (1)..(162): unsure at all n locations
gaagaaagcaanaacttttcttcttacaaatgcttgaactttggcaataattgtgttggacgagtaaagaacatattttactctggtggagccagcagtgggaaatttaacccttctgcggaaaatttaccccacgccttctatcatattgaagctgaaatc

SEQ ID NO: 23881 - DNA, 339 bp, Zea mays
  unsure (1)..(339): unsure at all n locations
ctttttctccataagaaccttactggaacactaccccacttaaaataaatgagggtagaactctcgaattttggggatttgaactccttgaagtacctcataacacgggtggtacggggccttcttctgctggtgatgcttgagccagcancanaagagatgactggcacggtgttgaatctgggagaaccttcttcttaacttctcttcactatcttcttttcactgaccctttctttctctttgctctttccactggaggattctatcgatgaagtttaccatcataccgaggaggaagcccaagactatgaaccatgtaccacagtcttcaacccc

SEQ ID NO: 23882 - DNA, 352 bp, Zea mays
ctgatacatggattaaacatcgccatatcactgtgtgtcaagagactgatggtgtatggagattctctggtagtcatcagtcagataaacaacgaatgggattgttcaagtgattcaatgggaaaatactgcgccgtcgtccggaagctagaagataaattctagggtctggagtttcatcatatataaagagatcggaacacggcggccgatgtactgtgcaagctcggatccggtcggactcaggttccgcccggaatctttgtgcaaggaattcttcagccgagcatctctacggatcaaatagaagagtgcaacatcatagatcaacctgagtcagactctgatgact

SEQ ID NO: 23883 - DNA, 352 bp, Zea mays
  unsure (1)..(352): unsure at all n locations
ttgtatcttcaatggaaaacacagcttccgcttgggccagaatcttcacatgctcgcatcctgccttttctaagatggccgcaatccccctggcacctgagaaggcgcaaacatctccgcgaccactcaaaactttcttaaaagctttggcttcggccctgatccattcgattggacgttncggatcgcctactatgaangtgtcctcatttgagtatgcgccaatattggcgaagctggtttttattnttttgacgcatgccatagaattttcatagcatctttcttttaaataacgaaggctcacaacnntgtttttcccagtgattttcagtatcactatgcgtctcgc

SEQ ID NO: 23884 - DNA, 229 bp, Zea mays
  unsure (1)..(229): unsure at all n locations
agcttggatattcttcatagaacactatggatatctgtgtgataaacgaanattcaattcttcacgaagcatgaaaagagaggaaggggtgtttttttcgtcaagacttataaacgggacgtatgtaagcttcatgcatcgtatagaattggaccattaaaaaaacaagtatattacattcaggggtacaaaatattacacatattacattccagatgtgtttacaata

SEQ ID NO: 23885 - DNA, 348 bp, Zea mays
  unsure (1)..(348): unsure at all n locations
ctcgcgagacctgtcccgcgtccttctaaccattatgaatgtgagatcgaatggcatacttgatgcgtatttactttaatggttcccttgtatgacgtactgcttgttcccaatttgaatgaatgaatgtatgtatgcttgcaatcgcatagagaaccatccggtcgaagagcccgaagaactcgcaagagaagcccctgagccgcagtcggttggtggaggcaagtggcccttganctatctctggcctattcattctttaattcacccccccgcattacacatttatacctaagggatgactagcttttgtatccatgtcctgattacctatttgggttggatatt

SEQ ID NO: 23886 - DNA, 256 bp, Zea mays
  unsure (1)..(256): unsure at all n locations
cttcatcttgaagcctgcttcggagaanaaagtattaaagtttcacaagttcataattaaatggccagagttcgctctacaactatggttgagcgtgagggggaccaaactgaagcttcngagactgtgcccatctccgaagcgatgcagcgctccggactggtgactacggaagaaatggctgctgccggagcaaacccgacagctgccgaaggagaagggaacattgaagaaaccgactccgaagatgactacc

SEQ ID NO: 23887 - DNA, 397 bp, Zea mays
  unsure (1)..(397): unsure at all n locations
ctgcagcttctaagggagaacacgtgatatgtttaactatatgtgccattcgaaaaagatagaccttgtgcagcttgtcaagcacgccaacaggtgggaagctctcatcacacccaaaatgtgatgaccacatcaagacccttggagatgcttcacatggacctcttcggacccgtcacctatcttagtataggaggaagtaagtatggtcttattatagntgatgacttttccagcttcacttgggtatttcttttgcaggataaatctgaaacccaaaggacccttcaacgctttctaaggagaagctaaaacgagtttgagctcaatgtgaaaaagaataggagcgacaatgtgtccgagttcatgaaccttcatgtggaggagtaccttgagg

SEQ ID NO: 23888 - DNA, 476 bp, Zea mays
  unsure (1)..(476): unsure at all n locations
cgcctactccacgatgtggcgtctcgatggatggggggttgtactctacccctctcaagtgatcaaaaaatcaaacttgagtaccacaattctttcttatatctcacaatcccatttgtgagaaatctccataagttggagtttctcacgccttacacaagatgatcacaatccacaattagtgctagggagggagtaaggatacactcatacacacaagtacacaacgcaacaactacatgcacaaaagtaaagacaagagcgcaacaacaaaacgacagagtaacagctcanaaatgcactcaaatctctcttaaatcactgagtgtccaattgagatcgaatctcattcttgctgaaacactccctatgttgcttcacctagaggacacanagccaacatcgtgaagaaaattacttgaattcgatagcatattggaaacaacttctattaaagactntacataatgtccata

SEQ ID NO: 23889 - DNA, 327 bp, Zea mays
agctacacgaggatggagcacactcctactttatgcgaatgcatgcctccatggatgcatgaatactatacatgcatgcaacacatccattgttgatgactttcacctatagtttacacaaccacccatcacaaggggcggattcgtgatacatctctggctggagggtaaatatcttctcttttatcatattatccaaaacaaaatacgcctctcctcttgctctgtttctctatctctctcttcctcatcttcttcatttctctaacttcattctcttctttctccctgccgcttcctttcttcactgttttctcatgcgcaggg

SEQ ID NO: 23890 - DNA, 401 bp, Zea mays
  unsure (1)..(401): unsure at all n locations
agcttaacagatgctccaaaagactnttctgcatatgattcgagagaaatttttgtaatataattgtaaagaaacttatgtaaatttgtgcataccttgtaatatatcttttcccctttatccgttgtacaatctgctttgctgtggacgaaaatttatttttgagccgaaggcganaaacagcttcccttcttttcgtacacaacgaagcatgaaaatatcttctttctccgaagctttatccttatagccgaagcatctgccttttctgtatgatatgatgataatgatcctatgtatgtctaaatgaatgtttatgaatgcaaatgtcatgatgtaatgtatcgtgcanatgaatatccgaatatatatacaaaaccaaaatcatagtcttcattccc

SEQ ID NO: 23891 - DNA, 231 bp, Zea mays
actgggaccacaactagctctcgcgggatgtcaacgcgagaaacaggcacacggggatcgtcatccttcggcataccaaggtgggtgccttcgtcgcgatccctcagaatgacgtggaaacattcgcgacttgggccacaaccctcgtcgtcaaggctgtggccatcatcagagcaaccggagaggcagtagtcacatgccgtcatgaagtctcgcatggcactgggatca

SEQ ID NO: 23892 - DNA, 313 bp, Zea mays
  unsure (1)..(313): unsure at all n locations
acatctcatttatactgtggcgagtgaataatccaaatatatataaaaataaaaggggtctaagtcattntttacctttctcacgacacacaagtaagcaacctagacttgcctatcgctttgcgcccttgccggttgtcgcgtccgcccgtgagaactgagaacggctcgctaccagcaatgcctccgacctccgcgtgcgcgtttgcacgtacctgggtcaagcgagaggaggcgtcgttccgtggagatgtgtcggcggtagcgctccgtgcatctgtcatccatagacgacgaaatacgaatatatgat

SEQ ID NO: 23893 - DNA, 439 bp, Zea mays
  unsure (1)..(439): unsure at all n locations
acatagtgatgccaagatcttcataacagtgtggcttcctcctccgtggtggcgaggagcgatgtcttctccttcttccgctcacgatagtggcgagataggtgctcgctcttcccgcaatcaaatagcgcccgcggttgtggcttccaccgggccggctacgcccggaacacgcgctactcgtgttgtcgtcgctctcgctgcttcctcccttgtcgtcgntgtcgtgccgcccatttctgccatgcgcatgctccttcccatgttgatgacatcatgcctnccactgttcctctataagtagtaactgctcaacgccctccgtagtagcctncttcacgtcgtcgttgtctggcttctctgacacccacaaccggtcgatgaagctctctatncgtgtcgtattaaggtaggtgagcatcttaatcgccatgaccac

SEQ ID NO: 23894 - DNA, 418 bp, Zea mays
  unsure (1)..(418): unsure at all n locations
tatgatactcagcttcgcatctttgttacttcttcttcgtgagctcctggcgtgcaatcagcgatgaagtctgctaacgcttgggactagattgaggatctatgcacatagtcaatggtgaattcgttaagttctgcagcccattttccaatccttccagtagcttctctattcctcataatatccttcagtggttgtgacgaaggaattattatgtgatatgcttgaaaataatgccgaagctttctggaggccattaacacagcatattacaccttttccaattctgtgtaattnttctttgacggactcaaaacttcngagacgaagtatattggagcttgctttttgacttgaccatctagcttctnctatacaagtgccgcactcactgcagaatgtgaagctgcaacatata

SEQ ID NO: 23895 - DNA, 408 bp, Zea mays
  unsure (1)..(408): unsure at all n locations
agcttcacgaagaggacccttcggctatcttatgctaacagcttcagccgaggaccacttctttctataagaccttcggcgacgaagcatagacccaacactactgataccgcgccgagtgtagtaaggccacgtcccgagcttcttctagctggtccaacgaatcttctcggttggtctggttgctttggtcatcgtaagcctttgtcctcggggaaccgtattctaagtccgtgggtaggatggcctcggccccatagactagaaagaacggcgagaaacccgtggctcggctcggcgtcgtcctcagactccaaaccaccgagggtagttcctttatccaccgcttgccgaacttatngaggtcattgtagatcctcggctttagtccctgcaaaatcataccgt

SEQ ID NO: 23896 - DNA, 207 bp, Zea mays
aataagctcatgagttccgaagaagctgctgcatctacaagggagtctattcttggtaaagggaactcatccttctgacatgccttgttgaggtctgtgaaatcaatacacattcttcatttcccattaacctttttcaccataacagtgttagctagccactctggatatgttacttctctgatgacaccagcattgagaagtctc

SEQ ID NO: 23897 - DNA, 476 bp, Zea mays
  unsure (1)..(476): unsure at all n locations
gcttgatcgttcattcctctgagcgtggaaacatatcacgatctaatcgcaacgcgaagcgaagacgaataagcacaagccaaccaacatatatatatatatgccttagaacattacaccctacaagataaaatggtattaaaacatgttgcataaaatagagctcgattctatggtcacgcgagggaaagaaaccgtcaactcgaagctatggttgangaagtagcgcgttaacgttgaacaagtattaactataacttttagttcaacattatcaaatatgaatattatacatcagtcagttcgattaatctgctacactaacanatgtcagttaattaaataaattaattaaaacgagtgattctaagtgagataaagttatgacacgtgaaacagcacgatagcgtgcanacaacgcgcggacacgcgcgacatagcatgctgacgatacacgaaacaacgcgagcgacgcg

SEQ ID NO: 23898 - DNA, 180 bp, Zea mays
gcatgtcaagcacggaagcaagttggtgtccatcacccacacaagaacatcatgacgactgacaggccgcttgagctactccacatggatctattcagctcggtagcttacataagcatcgcggggagtaagtactgtctagttattgtggatgattattctcgcttcacttgggtgttc

SEQ ID NO: 23899 - DNA, 481 bp, Zea mays
  unsure (1)..(481): unsure at all n locations
ctgcagctaanagactntttcacggtcaagctcgcacgaatacgatctagcaccgcgaaaggggctgctggtgggactatgcttcatcgccgaaggtctntgtaggaagaagctgctttcggctgaagctggttgtatgagatggccgaagggtcctctttatgaagcttcngtattacacaccggcttatagatagaatgatcctttggtccatataggtctgagtcaatgtngtaaacttttatgaggcggcataattgtaattcctcacaggcttgtgtcctgtgcctcataatagtgaacagtattcctttactgttcacgttntttntggcaattgaatcgcatctttcgggattctatctttgccaaggcagaggtataattgaattcagtaatccaatacattacacaaatataaattaattcatcatgactcatttatctttcataccctttatttatgctatcgtatatcat

SEQ ID NO: 23900 - DNA, 373 bp, Zea mays
  unsure (1)..(373): unsure at all n locations
ctatcanatggacgtgaagagtgccttcctcaatggacttatcttgaagaggtctatgttgagcaacctnccggctttgaagatagtgagtaccctaaccatgtttataaactctctaaggcactttatgggctcaagcaagccccaagagcatggtatgaatgccttagagatttccttttcactaatggattcaaagtcggaaaagccgatcctactgtattcactttgactctagaaaatgacttgtttgcatgccaaatttatgctgatgatattatatttgggtctactaacgagtctacatgtaaagaatttagtaggatcatgacacaaaaattcgagatgtctatgatgggggagttgaagtatt

SEQ ID NO: 23901 - DNA, 363 bp, Zea mays
  unsure (1)..(363): unsure at all n locations
gctttactaaatggacgtaaagagcgcctctctcaatggaccaatcaaggaagaagtctatgttgagcaacctnccggctttgaagatagtgagtaccctaaccatgtttataaactctttaaggcgctttatgggctcaagcaagccccaagagcatggtatgaatgccttagagattntcttatcactaatggattcaaagtcagaaaggtcgatcctacactcttcactaagactcttgaaaatgacttgtttgtatgccaaatttatgttgatgatattatatttgggtctactaacgagtctacatgtgaagaattagtaggatcatgacacanaaattcgagatgtctatgatgggg

SEQ ID NO: 23902 - DNA, 373 bp, Zea mays
  unsure (1)..(373): unsure at all n locations
tgtcttttttaggaccaatgatgttcccacatgtggctcaactggtggtgaatcagatgcagacacataccgctgattgataacgttgtgtgtgtgtgccggggggcggggggtgtcgcctttgatccgtcgtgcctcaacctgtggctgcaactgtgagcctgttgtgtaattgcttaagtagtcattaagatgatagcgtgcatagatgtgttgggtggatgcttgaacaacggtgaccggtgagttgcgattctgaatgtgtagcaaaaaaaccacaggcgaaatgaaacatctgtatagattatcgaggaagttttttatcatgaaaccgtgcgaatcaanttgtctattgtctgtatgggttatatac

SEQ ID NO: 23903 - DNA, 270 bp, Zea mays
cccatgcgagtcttaggcgttaagcatgcatctagaccgggctcttcttttgcaaaatcaactaaataaagagtgccgtctagtacacccttaaaagctagtgaaccatcacatcttctaaagacagacacatctacatttgtaaataaacaattatatcccatttgacataattgactgacagatagcaaattatattcaagactttccactaagaatacatttgatatggaatgctcattagaaattgcaattttacctagccctttt

SEQ ID NO: 23904 - DNA, 92 bp, Zea mays
cccggcggacgctacatcagccggtgcgaaaaatgcccgtgccgcgcctttggcatgagttctccaaactgcccggtgcgcatatggaccac

SEQ ID NO: 23905 - DNA, 439 bp, Zea mays
  unsure (1)..(439): unsure at all n locations
tgccgacgaccgctgccggcgtgcccttcggcgcgacgatgccgtttcatccgatggcctcgaagccgggaatcgtctctgcgacggcgggcacatccggcagttgcggaatgcgctgccgggtcatgacggcgatcggtgccaccttcttcgcgcccagcagctgcagcgccggttcaatgctgctgaaggcaatctccacgtggccgcccatcaagtcggtcagcgccggcgagctgcccttgtacgggatgtgcttcatctgcacgcccgccatgctttccagcaactcgccgccaaggtgggcgggactgccctgcccgtacgaggcaaacgtgatcctgcccggnctggccttggccgcggcgagcagatccgccagcgtcgcgtacggcgtatcgagaatgcggatgatgatcagcggcaccttgggcaccag

SEQ ID NO: 23906 - DNA, 378 bp, Zea mays
  unsure (1)..(378): unsure at all n locations
gcagcaacatctaccagcacagcaactgctgaccataccggtgacttggcccttcgcatgctggggactagatatgattggacctttcaagaaagctcaaggaggatacactcacgtgttggtagcaatcgacaaattcactaaatggatagagttcaaacccattgcttctttaacctcagctaaagccgtggaattcatacaagacataatattcaggttcggaataccgaacagtatcataaccgacttgggatccaacttcacaagttcagagttcttcgatttctgcgagcaaaanagcattcaggtcaagtatgcttcggtagcacacccgagagccaacgggcaggtcgaacgagctaacgggatgatatt

SEQ ID NO: 23907 - DNA, 362 bp, Zea mays
  unsure (1)..(362): unsure at all n locations
ctgtatgacactatcttctttggcgcaccatgaagaccaacgatgcgagacatgtacaactctgccaatactgcactggtgtagctggtcttgacaggtattaagtgggctgacttggtcaaaccgtccactactacccaaatggaatcgtagccggctcgagtgccaggcaatccgactatgaaatccataccgaattcatcccatttccactganggatctgcaacggttgcaacaatccaccaggtctctggtgctcttgcttaattcttcggcaactatcgcacatagccacatgctctgcgattccctcttattccgaccaccagaatttctcttcagatctgatacatcttctact

SEQ ID NO: 23908 - DNA, 338 bp, Zea mays
  unsure (1)..(338): unsure at all n locations
tcatgctcgccggagttcggaaccccgccggcgcacgtggaccgggtgagtctctgcgccattttccgattcactgcacacatagcctctacgtcatctcgtggagctcatcgtgccgtttaattgaactagatcgccgtggttaggccggagctctcgccgccgacgagttcacccgcctgcgtgcatggaccggtcgattccggccacccncgtcgtcgagccgtacctcactgtgaccgccaggacctcccgaagttaaccccgcccctcgctggacctctctcgctgccggtaagccgcgccgccctattcctttccgctggtactgtttacat

SEQ ID NO: 23909 - DNA, 324 bp, Zea mays
ggtactgtgcgccgctctgtactggcgcactgtttgccaacagactggtcaggcgtgttgtctgctgggtgaccctgacgccgtctgccggcggattggacaagacacattaaatgctgagagggcttcgcgtccgtcagcgtggtggcaggcggcgcgtcctctccgtaataaatgcaaagactgcacaaccgtatgggccttacgttaggctcggcacgttggcttatgtcacgggccacaagccacgtgggcgcggcgggtatccgcctgagcggcgagcgtatggcaaggcctggacacgtgtttgcatcgaacccttgc

SEQ ID NO: 23910 - DNA, 274 bp, Zea mays
  unsure (1)..(274): unsure at all n locations
ngactcctttcgccttgagacaccggaatgtcacttcaaggtcggagaggatgtcggaagcctttcttgtcttgactacgatgtcatcgacgtaagcctcgactgtgcgaccgatgtgttcgccgaacacatggttcatgcaccgctggtacgtcgcgcccgcattcctcataccgaacggcatggtgacatatcactacatgccgaacggcgtgatgaaagaagtcgcgagctggtcggactctttcattcggatctggtgataccctgagta

SEQ ID NO: 23911 - DNA, 147 bp, Zea mays
  unsure (1)..(147): unsure at all n locations
tacactctttaccaaaacactagagaatgattngtttgtatgccaaatctatgttgatgatattatatttgggtctactaacgaatctacatgtgaagaagttagtaggattatgacacagaaattcgagatgtctatgatggggga

SEQ ID NO: 23912 - DNA, 362 bp, Zea mays
tgctcagaccatcgaccatgggtttgatggtcactgcgcgacgggcaccaccgtaccggacttcgccacagaggagcagttcacgcgcgtccgccgggctctgcgagagaagaggtgagagaaacacagttgaactatgagatagagacgaacgattgaaagtagaaacccagggcaggggcaattttgactcttagatgattaatacatgggaacaaattattaaaaggaataatacacatcaaatggtagtataatcaattagaatatatttatagtccctttttacgaagaaaatctttcgaatggcatttgtgccaagcgtaatggttagagtcctaaatatgccattatctctacat

SEQ ID NO: 23913 - DNA, 382 bp, Zea mays
tcatgcaactgcgtaccaaaatgagaagtgaactcagtacctctgtctgatactcatcttcttggaacactatgcaggcacacaatccgacatgcataattctgccaacactgcactattatagatggtgttgactggtatgaaatgagccgcctttgttaaacggtccactactacctagatggagtcataaccagcacgagtgcgaggcagaccgactataaagtccatcccaatctcatcccatttccactaaggaatctgcaacgactgcaataaaccagtgggcctctgatgctctgccttgattctctgacaactgtcgcatctagcaacatactctgttatctcccttttcataccgtaccaccagaatcttttc

SEQ ID NO: 23914 - DNA, 336 bp, Zea mays
  unsure (1)..(336): unsure at all n locations
ctcagctctgggtcacacttganattcagttcagcttacccgctatatatgggcagattgagagaaccaaccagattcttgaggatatgtttagagcttgtgctttgcaagacaagttatgttgggacaagaggctaccgtatgcagaattctcctacaacaacagttatcaggccagtctgaagatgtcaccatttgaagcgctttatgggaggaattgcagaactccattgcattgggaccaacccggcgaaagacaggtatttgacccggagattttgcttgaagctgaagagaatatcagaatggtccgggaaaatctgaaggtagtgcagt

SEQ ID NO: 23915 - DNA, 367 bp, Zea mays
  unsure (1)..(367): unsure at all n locations
tctctgaaccactgctgcacacccgtntcacagggcagaaccgggtgcatcgcatatgtgtgccaggatctattttcacacttatgtcgacatcacaagtgtaatatatcaaaaggacaatgcataatagtgtaaataacgaatatattaacataatacacttcgaacaggcataatgtcttaacctttattcatcacaggacagcgaaacatggacattcatccacaggaagatgaaccggggtatcactatactagcatccatggagctcagcatcataacttcatctgcaaacctttgatcagaattaagccagggtgagctcacttatggtcggcgctcatcaagtggnggaaaaactaatgc

SEQ ID NO: 23916 - DNA, 291 bp, Zea mays
gcaagcttggcctgcatcttgcggagatgctcgagctgtgtgccctgaccccccgcaaggacccgggccacagctcgctcccgcgggatctcaacgcgagacacacgcacaagggcgtcgttgttttctggcacgccgaggtggttatcctcgtcgtgatccccctgatcgatgtggaaacactcgcgagttgggtcgtaaccctcgtcgtcaaggctgtggccattgtcagaagtaccggagaggtagtggtcacatgcggacatgaaatctcgcatggcactgggatca

SEQ ID NO: 23917 - DNA, 386 bp, Zea mays
cagctcgtggagagatttcattcacacatgtgctaagcggcgatgccacattcagcccatgctcgtcttatgtattaaacatgcatctagaccggcctcttcttttgcaaaatcaactaaataaagagtggcgtctatatacacccttataagctatggaaccatcacttcttctaaagacagacacatctacatttgtgaatagacagttatatcccatatgacataattgactaacagattgcaaattatattccagactctccacttagaatacattagagatagaatggtcattagaaattgccattgtacctaacccttttaccttgccttgattaccatcaccgaatattattgaatcttgggaattcttattcttgacg

SEQ ID NO: 23918 - DNA, 250 bp, Zea mays
actgctctttcaaaagttcaaccgaaggtgctcttattgtttcaaaaaatactttctaaggtgagggcagcccctgtgctgctgacttggctagcaaatcagcatggtcattttctcctcgaggaatatatttgacagaaaacccttctaaggaagcctcaatccttctgaccgtgtctaaatatttctcaagctttgggtatcttggtttacaactcttggcaatatgaccagaaataacctgggaatc

SEQ ID NO: 23919 - DNA, 372 bp, Zea mays
  unsure (1)..(372): unsure at all n locations
taaagggagaacacattttgtgactaacaaatgttcattntgagaaaaaacaggatttgtagcgcatgtcacgcacggaagcaagttggtgttcatcatccacataagaacatcatgacgaccgacaaaccactcgagctcctacacatggacctattcggcccgattgcttacataagcatcggcgggagtaagtactgtctagttattgtggatgattattctcgcttcacttgggtgttctttttgcaggaaaaatctcatacccaagagaccttaaagggattcttgagacgggcccaaaacgagttcggcttaaggatcaagaaaataagaagcgacaacggggcggagttcaagaactcacaaatc

SEQ ID NO: 23920 - DNA, 366 bp, Zea mays
  unsure (1)..(366): unsure at all n locations
atcggagtacaaaagatagttctccttgattagaggtgctcaatcaatgcggataactctttggagctaactcaaattaatatgagcaagggaacttttatagagaggaagggagggaaacaaatccagtgaagatcaacaagtgaacacagtgatttgtttaccgaggttcgggtccaaagaacctattccccgttgaggaggccacaaaggcaggtctatttcaaccctttccctctatcaaccggtcacacagaccggtcgaggcttctccttaatcacttgggtcactaagacccgcaaggatcaccacacacttaggtgtctcttgctagctntacaaagcacttagagaaacaagaacgg

SEQ ID NO: 23921 - DNA, 385 bp, Zea mays
agatgccgaaaggcattcagcctcatgcgcgggtgatggcatgctgcgactatggtgcgttgcaagtgtggtgcaccatgaagaatgtgtctgatgcgcagtgtcctggtctacttatgcacacccgggcagtccgatcttggtgattggatggtctacagagggatcggacgggctggtattgtatctggaccatcctaccgtgcagggatttgcctgcgagacttgtgacaggctcggtgcgactccaaactatccggcgtaaggtgccggacggtccgtgatcgtgcgcggacttgtcggccgtgcctatagccgatctatcatgttatgaggatggtgacaatatttttcctcggatatgagtcatcgacataacattata

SEQ ID NO: 23922 - DNA, 271 bp, Zea mays
  unsure (1)..(271): unsure at all n locations
actcacttatcacattctttcctttccacctgcgcgcgcttttgggggggagcttttctgtaccatgttacagattttgccatgtgttccattgtgctctccacgntcaaatcttcagctgaagcagcttctgcagctgcgaccttcgaaggtgtaatttcaatatctgtcccttccgcagccgctggtggtttctgagctgaagctcttggcggtgtcttgtccattacttctgtcacagngataattctttggctctttgctttgaata

SEQ ID NO: 23923 - DNA, 266 bp, Zea mays
  unsure (1)..(266): unsure at all n locations
gttcttgtcaccacaccatgttcgtcttggcttgtgccgaagacccacttggttcctaccacattttgattatgacgtggaaactaaatgccataccttattcctagtgaaattgttgagctcctcttgcattgncatcacccaatccgaatcttgaagtgcttcctctaccctgtgtggctcaatagaggaaacanaagagtaatgctcacaaaaatgtgcaacacgagatcgagtggtacccccttatgaatgtcgccgaggat

SEQ ID NO: 23924 - DNA, 251 bp, Zea mays
  unsure (1)..(251): unsure at all n locations
ccggtagctcggctatgtgtggtccggntcccccatagcacagacggaagctcgttgacccaatttgcaccatgctttttcaagcagtcataggtgcgtgtcttgagtcccctgaggatttctgcctttgtcctctccgcctggcagttgctcttgggatgagccacagacgccaagcagagctgggtgccgatgccctcgcaatactccttgaagagccgacttgtaaactgggtcccattatctgtata

SEQ ID NO: 23925 - DNA, 326 bp, Zea mays
  unsure (1)..(326): unsure at all n locations
aacttgtgactttgctgttgcaccggactgtccggtgcgccatcaaacagacggtcttcaccaactgtcaagttggttgaggcccgtcttnttaatgctctactgtaagtctctatacccatctcttactcttatctttattctttaccgtcattctaatatcttatctaatttcttattttatccctaatctttatctctatatataattgtttatctttatcttatcccttatcaaattctctacactcaactatcgttattttttcttttatattcattcctcctccaacctatattatctcttacttctattcttatattca

SEQ ID NO: 23926 - DNA, 463 bp, Zea mays
  unsure (1)..(463): unsure at all n locations
taccaccaagtttgttcctgaacaatatgggtattctcactattcagtttcacatgcagagntccaactaaagcacaatgttctgtgatctaatagtgacacaaagtctcaaaaacttttcccaggaaagcaagaaccataaaggacagaggcatcttgttagaggtagatcattacatctttttcacaggtagtgatgctagtaagtcttgaactgatgaagaagggacaactatttgctgagcaggcttgtacattccactgacaagtttagctaacatctgcacagtataagaacaatgagtggaaaactaagatagcaagagaaatgaataaaggaatgcagaanacagaanaacaggaaccttagctgattntctgagcacaacataactaacacgataataaccatgggctactgaacattnttgtcaacagaaagaanagcatctactcactatta

SEQ ID NO: 23927 - DNA, 385 bp, Zea mays
cagcaacctcttcaagccgagacgatactctggttttggagtctagacttcatgtccctcgacagcagctactacatgatactccttcctccgtcgcgcgacaacgacaatggcgaccgtcagcccgcccgcctgcggcggaatcgacgacggcttccgctcgtggcggaagagcaacatccgggtctgtcccatcaccttccccgccgactgaagaggaagcggtgcacgcatggcctaacaagaggcgacacctcgtctgctgtctagcgagtcgacggcgccggcgccccagcggaggacacgtctggcgtccacctcgcgtctgagatgaagaccagcgtcgtttccccgcaacacgccaactccaagcagactgacgatg

SEQ ID NO: 23928 - DNA, 194 bp, Zea mays
ggctgctctgagagcaagaccaaagttgggaagtagtcgcccagctaggaagggccttacagaatcaccaggtgatgtcggaaccctactgtgcaacattacagcaagattgccaagcgtaaacgtgcgttttcttcagcagtatcatcctaatatgtggcaagatgcctaaggaaaccgatgtgattgcatcg

SEQ ID NO: 23929 - DNA, 210 bp, Zea mays
  unsure (1)..(210): unsure at all n locations
tacctgatcaacaatttattatttgcattgacattggattcaatgtcccaatctttatagtcactggtgaaaggcctgctatttggaaatttccatctccataaagtcccccggcgtcaataaacctaaaaagcttgtgtacttgttcaaccttgttggcanggacataattgaccttggctacatctttaccactttcattaccccgtg

SEQ ID NO: 23930 - DNA, 407 bp, Zea mays
  unsure (1)..(407): unsure at all n locations
atgcgtctgacgtagcatcaacttgtgtgacatatatatgtattggcacaaagcccacattagaatcattgttattgagacacagctacatgttangataattattgagcaaatggacaagcactcaaccaagtaaagctaaaagctcccttggcagttaagcttgtagcaccgttaggatgtgtgtttgatacaaaaaaaataaacattacttaatggtgtctagaatgtaagaatcagagctttaagacacatgtatattcactgaagaatcacagctagaagtcaacgaatgctataaccaaatcaaccgcgcattactacattagtgtacccgtaaacagcgaagtctagagcgaaactaaactacactctgacgtcgcaaggcaacaatggcataccctgat

SEQ ID NO: 23931 - DNA, 373 bp, Zea mays
  unsure (1)..(373): unsure at all n locations
tctaaagagagagcacattntatgactaacgaatgttcattttgataaagacaggatttgtagcgcatgttaagcagggaagcaagttggaaatcatcatccatacaagaacatcatgacgactgacaagccgcttgagctactccacatggatctattcggcccgatcgcttatataagcatcaacgagagtaagtattgtcttggtattgtggatgactatatttgcttcacttgggtattctttctacaggaaaaatctcatacccaagaaaccttaaagagactcttgagacgggctcaaaatgagttcggattaagaataaaaagattagaagcgaccatggaactatggcggaaccacctgaattat

SEQ ID NO: 23932 - DNA, 287 bp, Zea mays
  unsure (1)..(287): unsure at all n locations
gcttaactaacatatgagagaactattataacattcagctcaaaatggcctatgtgtatcagatatgccttatatttttcctttctaccatggaatggacatgcaaaggatattgctaagtggagggcaaaagatatcaaattgaaattggaatctatgaaacaatacctgcagagggagaaacgtattaatagtatatctctagtcacagcccgaagtgctcaaagggagaatgctgcaactccgcgggtgacacgggcggngactccgccaccaccacaacaccc

SEQ ID NO: 23933 - DNA, 443 bp, Zea mays
  unsure (1)..(443): unsure at all n locations
actactacacgaaataaactagaaaacacgtgttagtctcaaagacttaaactatagagtaaccttccnccccccccgaaaatgggcatacaagttttgaatacttgtaggagacatgcactttganttgatatcaagagatgcaaattgtctatattgtgagctttgacacatatacatttaatgatacngaatgaaacacaatttgaagtattataccacttctagtatatcgatagtaatataagtcatatgaaaatatcaattgatgtatcattttcttaggaatggtgaataatctatgtgtcgtgcttaacattntaaaccatgtaggtttgctcaagagtatgaaatggaaagtgagcaatcctatcatatgaattacctagtatgcatgcatttntaaacanaagtaataccaatttgagcactaggtatgaaag

SEQ ID NO: 23934 - DNA, 193 bp, Zea mays
ctgacacgccactctagaatctacacatggacctattctgccccatagcttacataaacatctaccggaggcacgattgtctaactattatggaagactattctcgcttcacttgggtgttctttttgcacgaaaaatctcataccccagaaacctttaagggattcttgagacaagctccaaacgagttccg

SEQ ID NO: 23935 - DNA, 343 bp, Zea mays
  unsure (1)..(343): unsure at all n locations
tctctttctataacaactatcaagcacgtcttataatggccccatttgaagccctttatataaagaagtggtgacacctttgttttataatcaaacaggacaaagtccaggtttcggactataaatcctgtcagaggcaaaaaatcaagttcaattcatcagagaaaattctcaaactgcctagtcaagacaaaggagttatgctgaccatatgggaagagaattggtcnttggaggtggagactatgtgatttcaaggtttcacctatgagaggcatgataagattcaaggtaatggaaaatataccttgtacatcgaccatttcggtctggaagaaatgtg

SEQ ID NO: 23936 - DNA, 472 bp, Zea mays
  unsure (1)..(472): unsure at all n locations
tcaattgtgtcaaagttccatgttgtatcatccctagatttaacttttccatttcttgacatagagtggtgttaggggtccttactgtaagacaatgacaggaagctttgcgactcaatgcatctgccaccacattggcttttccttggtgataatggatttccaaatcataatccttaattagctcaagccatctttgttgtctcatattcagttctaactgggtaaagatatatttcagacttttgtgatctgtatatacatggtatatattccccagcagataatgacgccatatcttgagggcatgaacgactacaactagttccaaatcatgagttggatagtgctcctcatgccgacatagttgccatgaagtgtaagctatgacttggccctcttgcttangacacacccgagtccactgtctgatgcgtcacaatacacatcanaaggctnttcaatgtctggt

SEQ ID NO: 23937 - DNA, 420 bp, Zea mays
  unsure (1)..(420): unsure at all n locations
agcttgtgacagaaaaaaggatgcagttgattacaatgagaaaacaagggatntccgttttcatttggcagaacatataaaggagttggtcaaaccaatatggaaaanaggtaatctgagtaaagatgctcataaactggtagtgagaaaatctgtcgagaaggttgtggactccattgagccaaatcaagtaccaactactgaagagttgattacgaagtacatagccacatgtggaccaaagatagaaaaacttgtgaaggtaaatatcttgcacttccagtcgattgcaagcaatcagctcacattatttacttctgtctgttcaatcacaggcatatgttgataggcacagtacatgtcatccaaccatcaaatacagcagctctgagatgggagcttgagcttaatggtgatgac

SEQ ID NO: 23938 - DNA, 252 bp, Zea mays
  unsure (1)..(252): unsure at all n locations
agcttgacatggtgtgcgatatgcttccttatacatatacatcaaatgatagagatgcgtgtgatatataaacttgcccatgtttattagtctcatacttagaggtgtgtttggttaaaagtcaaaatggaatgaggcgggatgaaaccgtcacctccggccgatttgatgaccaataatcacgagagattagaggggattgagggagaaattaantcatttcccctttataaccccccaatccccttgtga

SEQ ID NO: 23939 - DNA, 380 bp, Zea mays
  unsure (1)..(380): unsure at all n locations
ctcagcttgtcagcatattttggtacccatcgcttgatgggtccattaatgttagtcaacaaagatctatgaacccaagagtcctttgtgttagcatttggtaaactcattacctttctagcacaagttgcaattttgggtttcctagttacatgtgaaataattgacaagctagaagtggggttgttaccaatgggacaatccttgctttgatgtcctttctttcggcatatgtagcaaaggcgatcttcaagtcttgaagacttcttctttccttgtttctttcttgctacatggntagtcaatattttcttttctagcactatgcctttctgtttcacatatagacaagtcttaattaagtgtcccttctttgagca

SEQ ID NO: 23940 - DNA, 264 bp, Zea mays
  unsure (1)..(264): unsure at all n locations
acaagaacatcatgacgactgacaggccgctcgagctcctacacatggatctattcngcccgattgcttacataagcatcggcgggaagtagtactgtctagttattgtggatgaatattctcgcttcacttgggtgttctttttgtaggaaaaatctcatacccaagagaccttaaagggattcttgagacgggctcaaaacgagttcgacttaagggatcaagaaaatagaagcgacaacgggacggagttcaagaactctc

SEQ ID NO: 23941 - DNA, 144 bp, Zea mays
  unsure (1)..(144): unsure at all n locations
gcatttgaagcatgagcgcttccccttggctntggtcttgcttggctgttccttgcgacctttaagcaccgtcttgaatcttttgatgatgagagccatctcttcatcattaagtccggtcgcctcaatctgtgccaccttgct

SEQ ID NO: 23942 - DNA, 357 bp, Zea mays
cgttcaattcgaaaaagatagaccttgtgcaacttgtcaggcaggtaaacaggtgggaggagcgcatcacagcaagaatgtgatgaccacttcaagacccctggagctgctgcatatggacctcttcggacccgtcgcctatctgaacatagggggaagtaagtatggtctagttattgtggatgacttttcccgcttcacttgggtattctttgtacaggataagtctgagacccaaggaaccctcaagcgcttcctaaggagagctcaaaacgagtttgagctcaaggtgaagaagataaggagcgacaacgggtccgagttcaagaaccttcaagtggaggagttccttgagga

SEQ ID NO: 23943 - DNA, 437 bp, Zea mays
  unsure (1)..(437): unsure at all n locations
agagcacaatctctactaatgaattttcatgaaatatcttaaaagagattgtattagtaacacaagcaatattttcctatttagcaacctctagtatatgaatgacaagaagggtactaaaacaaggaaacctcatgatatgaactaaattgcccttacaagcatcatgcataacatcaaatgttaaaaagatgaaagtagcatgaatatttaattaaagttacatggccagtgtaattcatagcctggtgagggattaatgtagaagactcanaacccattttaaccagaatgaatacctcacatagtatttgttcgatcttctttgaatggtgatggcacactccatttgggaacacattctcattgtgtgtactacagaaatcactcagataaaaacattagtctcacaactctatcatatagagattcccttt

SEQ ID NO: 23944 - DNA, 342 bp, Zea mays
  unsure (1)..(342): unsure at all n locations
cgaccgtgatacctaagtcacctgcggcattgcagctttaagggagaacacgtgatatggtngactaacgtacaattcgaaaaagatagaccttgtgcagcttgtcaagcaggtaaacaggtgggaggagcgcatcacagcaagaatgtgatgaccacttcaagacctctggagctggtgcatatggatctcttcggacccgtcgcctatctgagcataggaggaaagtagtatggtctggttattgttgatgacttttcccgcttcacttgggtgttctttttgcaggataagtctgaaacccaagggaccctcaagcgctttcttaagagagctcataat

SEQ ID NO: 23945 - DNA, 384 bp, Zea mays
  unsure (1)..(384): unsure at all n locations
atactaagcttcaaagggagaacacnatttgggactaacaaatggtcattntgagaaagacagggcttgtagcgcatgtcaagcaggaaagcaagttggtgttcattatgcacacaagaacatcatgacgactgacaagccactggagctactccacatggatttattccgcccgatagcttacataagcatcggcgggagtaagtaccggctagctattgcggatgattattctcgcttcacttgggtgttctttttgcaggaaaaatcacaaacccaagaggctttaaagggattcttgagacgagctcaaaatgagttcgacttaatgatcaaaaagattagaagcgacaacgagacggagttcaagaactcacaaataga

SEQ ID NO: 23946 - DNA, 368 bp, Zea mays
  unsure (1)..(368): unsure at all n locations
ctttgagagctgtaaatggatgggacaaagctatgaaatggccatacttagagaatttgttcaccaccacccagatgcaattcataattcttgatggaagtaaaccctctatgacatccatagtaatagtatgccatgaatgcagtggtactggcaagggcaccaacaagcctgtatacctaacgcgttcaaacttggactggtggcatgctacacatgtttgaacaaaacgatgaacatcatgtttctnttctttccaagcaaacaagtggcttgagtcttctatatggcaaaggtaccccaaaatggccacctattactgattcatggagatcatatatcaccttaagttgcaactaagtggtaat

SEQ ID NO: 23947 - DNA, 241 bp, Zea mays
cgtggtagcatttcagagactgttgataccgcgccgagtgtagtaaggccacgtcccgagcctcttcgagctggtccaatgagtcttctccgctggtctggatgcttcaatctgcgtatgcctttgccctatgggaactgtattctaagtctgtgggcaagaatggctcagccccattgactagaaagaactacgagaaacccgtggctcggcttggcgtcgttcttagaactcaaaccac

SEQ ID NO: 23948 - DNA, 313 bp, Zea mays
agagatattagcgcaagttaatcaagtctatgaggcgagctcttgcgaacacaaaccatcacagagaggagccacacaagagacactctatttttatactgtgggtcggccaagtaacacttgcctactttcaccttatggcattccaatggacgagggttgcactcaacccctttcaagtgatccaatgatcaacctggataccaccggcttttcctttcaagtggtttcccgtttgcgaggaatcttcacaatttggagcctctcttccttaccatagatatcacaaagaaagcacagagttagggtggga

SEQ ID NO: 23949 - DNA, 415 bp, Zea mays
  unsure (1)..(415): unsure at all n locations
atgaaaatgttccgtccagaggttagttgcaaccgcgggacagcgacagcagcaacacgattgcttgctttgttttaacgatttttttttctgtggcgttccaattccatcgaagacagagacggaggcgtttcttgttgtggctcccctctcctttcctcgtgttcctcgcggcaggaacaggaacacaaggacctccagtccaaggagattagaggaaggcgagagcattattctcatatcattngtaaaataaataaatgtacttacttcgaccacgttggctcatcttcattggtggtatcatcatcatcctctgttcctgtgatggactgcattctctctctctctcgtctgccccatcccgccatcattattgtccccacccaccaaaacagcacaaaacaacgggagg

SEQ ID NO: 23950 - DNA, 455 bp, Zea mays
  unsure (1)..(455): unsure at all n locations
ctagctgtngagagcacaacagctaccgatgctacaccttcngaagccacagctgccgaagatattcatttataaaccacaattgctgatattgataagatgttgctagacatggccgcagaagaagttgtcgcagccaccgaataaactactgccctagagcccgagaaggggaaataaatagccaaagatatttcggaagatgaagtttttaactttcaaaacttagttggtcaagaactgacaaagactgaaaaagaagagctaaaagaatatgctatatcttgcggatattggccagaagcacttctcttcggtggcattgatgacgaaagggtgggctgtgtccgggatcagacctgtgcgaagttatcggtctctatcnagagtatcagtttcgaactaaaacaatatcgtcgctccgcnacaaccattgtcgagttatttattcattc

SEQ ID NO: 23951 - DNA, 356 bp, Zea mays
tcttcatggcgggaaccttgctggaacactacgccacttaaaatgaatgagggtagaactcttgaatctcggggatatgaactccttgaagtacctcataacaagggtgttacggggccttcttctgctgttgctgcttgagcacgctgcggagaaatgactgacacagggttgattctatgagaaccttcttatcttctcttcactatcttcttttcactgaccctttctttctctttgctcttcccactggaggagtctatcgaagagtattaccatcatacattggaggaaaccaaagactatgaaccatgtacaacagtcttcaacacaagaatcaccaagcattatgatct

SEQ ID NO: 23952 - DNA, 435 bp, Zea mays
  unsure (1)..(435): unsure at all n locations
ctcagcttacttgatttaaagccacatattcttgagagtctctttcttttacgggtgagacctgcgaaaggacacttcgtactcaaggttttctaacccatgttgttgtaggtgatgaaacaaccgaggtttgctgtttctactcaaagatggtgcccaagcacgaagaagaacattaaacttgtgtgtgggaaggtgttttgtcttccagatatgtaataataagtgctgcacttgaacaccctggtatgtaataactactccttctatattntatatgaatgtgaattatgttattggaatcctttccgctcattctcaactctgaatatgtgtaatgtctacgtgatgggtgaagcgctcttgggcgatatgatgaggatcaggatatcgacttgctagtattatgccacctgatgactgttgggtcttgaa

SEQ ID NO: 23953 - DNA, 145 bp, Zea mays
atcttctcgtgctggcagggcattctttacataaaaacattctgtcattcagtcgccgggccatctctttcgaaggtgtggcacgggacagcttgacccataccgagaaacgaaactgtagcaaccaaaattattgtgatactgg

SEQ ID NO: 23954 - DNA, 398 bp, Zea mays
tcggcgctgtcgaggggtagctctcctcggtggagatattgcaggtacggggtctgccagtttcggttcagcgtgaccccattctgctctccctcgatgcgcaaagcctcaccctcggcggccgaggatacctcgggctgggccgaggcctcctcgggctcgggcgtgtcgtcgatcttgacggagggttgatgtatgtctctggagaagacgtcagggggaaccgttgtcagccccgaggctatttttgccagctcatccgcagtctcgttgtaccgtcgagcgatgtggttgagctccagcccgtagaacttgtcttccaggcgtcgaacttcgtcgcagtaggcctccatcttccggtcgcggcagtgggagttcttcatgacttggtcaatgac

SEQ ID NO: 23955 - DNA, 305 bp, Zea mays
caaacccccttaaaccttaaaaattgcaagaccacgattgtttcaaatataggacccatttaaagggagggaaaatataaacaggaccagggatatgcgtcagaggggatgggggatataaacccttgggaaataattaaagggattactataataaaaagaaaactcatgagctgggaaaactttatggaaatcgtctaattcttctttaaaatatatgggggcattaaaaatggcacaaatagggcaaaaaaaactatcctcgacggcggtcagtgaaatatttttggggcaaaaaactggga

SEQ ID NO: 23956 - DNA, 195 bp, Zea mays
tctcaaagtcatcctcaatcagccatgaacactcactgagatatcgctctgtaggactatcacacaatagttcattgagaagataagtattcatcttcctagagtgacacagaatcttgaatagcctattatttagctcctctggaataccttcaagtgatccaatacatttataatggttcgcaagagaattta

SEQ ID NO: 23957 - DNA, 218 bp, Zea mays
gctcttggatcgaatgtgtatgaaaggagtgcttgcacgatatgaatagaggaggctgggggtgcatttatatcctccaaccacttcctagccgctgctccgattctgccgaccgcggacagggcgctcccttggtccagaccgtacagtactgcacatgaacggctgaaatcgccacggacagtggtaacgatatatcaatggctatagagcattta

SEQ ID NO: 23958 - DNA, 454 bp, Zea mays
  unsure (1)..(454): unsure at all n locations
tactcagctttaatccatggactgaacattgccatatcactgggcatcaagagactgatggtatatggggattctctggtggtcataagtcagataaacaaagaatgggactgctcgaatgattccatggggaaatactgcatggccgtccgaaagcttgaagacaagtttgaaggtttggaatttcatcatgtggaaagagaccgcaacacagcaactgatgcattgtccaaactatgatccagtcggacttatgtcccgcctggagtttttgtccaagaagtactgcaccagagcatttcactagatcgggtggaagaatgcaatattctgagccaatcagagtcagatcctgatggctggagggagccaatcatcaggtacataaagaatgaggaagagccagatgacaganatgcagcagagcgcatttgtagacagtcagctcattaca

SEQ ID NO: 23959 - DNA, 415 bp, Zea mays
  unsure (1)..(415): unsure at all n locations
atattcattttgagaaagacaggatttgtagcgcatgtcaggcanggaagcaagttggagttcatcatccacacaagaacatcatgacgactgacaggccgctcgagcttctacacatggatctattcggcccgattgcttacataagcatcggcgggagtaagtactgtctagttattgtggatgattattctcgcttcacttgggtgttctttntgtaggaaaaatctcatacccaagagaccttaaagggattcttgagacgggctcaaaacgagttcgacttaaggatcaagaaaattagaagcgacaacgggacggagttcaagaactctcaaatngaaggctctcttgangagganggcatcaagcatgagttctcttctccctacacgccacaacanaatggtgtagt

SEQ ID NO: 23960 - DNA, 95 bp, Zea mays
tggctgttccttgcgacctttaagcaccggcttgaatcttttgatgatgagagccatctcttcatcattaagttcgggcgcctcaatctgtgcca

SEQ ID NO: 23961 - DNA, 403 bp, Zea mays
  unsure (1)..(403): unsure at all n locations
ctctctgacagagtaccgattaccttcgctccgggtcggtctcggagacagcctaagctttcattgtccacaccggcgaagaagagcgtccctggttcatacccataggatatggcataggctctcaactcttctttttcaaccttcgacaattcttgtccaattaagttttgaaaggtgaaaatttcttctttcgaagtatcatcggctatttccttctctttcttaagcactatggccatggnttcttcggtggctgcagcagcttcttctacggccatgtccagaagtattttatcaatattagagagtgtgctgtctaaatttgcatcatcggctgttgcagcttcagtaggtgcagcttcggcagctgtaacgctctcgacagctggtgtctttgacg

SEQ ID NO: 23962 - DNA, 319 bp, Zea mays
tataaaattatctacaacttcttttaccaacccacagtttaattctgttgataaaattgcctaaatcctaagagaacagattctgcacagaattatgagacttgaaaactgcgttagtataactgcgataactttctggtcggatgtccgattgacgtgttcatcgcggtcacggaaagatctacaattatctacgactcatacatagacattttattattttgaagccactaagaccactgaaaactggcatgaacagaaactgtcgaattctgcattctgcaaaaaactaaattccagatcacaacctaaccccgca

SEQ ID NO: 23963 - DNA, 414 bp, Zea mays
  unsure (1)..(414): unsure at all n locations
agcttnctgaactattcatgatcatgctgaaaacatatggttaggcatatatttgaagacctttagaagagaaaggcccccaactggttcaataaacaaattaatacttccttcgttgtgaagtaagaattattttagttaattaatagggtcataccatacttgatggtagggttttatatatgcatctagtntatttgaatattaacattaaaataaaagctaaaataaataatatttttggatataaggagtaatacttttctaatttccctaccgcacaaccattccattgtctggcacataccctgactgccttccaatccttgtctggtttctattccctttcccgcaagtcattccaattccccgaaagccgcatttactaaaataaaaaataacatagcccaaggg

SEQ ID NO: 23964 - DNA, 435 bp, Zea mays
  unsure (1)..(435): unsure at all n locations
agtcaactcaagaaagtcgtgaacagtctatgaaccaaccacgttttcttgctagcttcttcttgaatctcggnggcgagattccagttaagggggttagatctgtaacaccctgaatttgagggtataaaatttcttttctaatatccaccaaattcaggtgttaccctcttcttcacttgcttttcttctctctttggtggttctaaataatggatattaattttattatatatatatatgacgtctttggngtagaaaataaaaatctggagaaactttgattgtgattcatttcgttgatagcgttatgagtgcaagggtattcatataaatcgattatcttgatcttgttcatttttttcttcggaacctgaaacgtttctcgagtataatatgattgcagctcttaatttaataaatacctaattagta

SEQ ID NO: 23965 - DNA, 523 bp, Zea mays
  unsure (1)..(523): unsure at all n locations
ctcaagcttgtaagatccgtaaatcaatgcacattctccatttaccggtggccttcttcaccataacagtggtggctaaccactctgggtatttcacctctctgataacgccagcattaagaagcctctttacttcgttccgagcaccttctgctttgtcgtcagacattttctgtaaagcccaatttttttgtgtaagggaaaaataataagataagtaaatagaaatatttataagtgggtgttttgggattatgaaacctttggtgattatatattagaaggtatttactcataaaataaaataagtaataaatattgaagttttggaataaacttctaatggactacacattcgaaatcctttcatataataaatattatgtgttgcatatcgaaaacattggctaanaaataagggaacanaaaaataaacttaatacatgaactgtgcgttcatgttgaatatatttctttttggtgcanatagaactttgttgaattaaatctaattgaatttgaa

SEQ ID NO: 23966 - DNA, 334 bp, Zea mays
acctccagaattactatagagctattgataaatgtaaagggcattaatgtaattctacacgggctgcgtcccgtgcctataaatagatgaacagtactcccgtactgttcacgctgacttggcatttgcttttcgcatcacgcctgtacctttacttttcatcaatccggaggtacatatgtaatttggcattataaaattgataatgcaaataaaaataagttgatgataatatctgtattattatatcgaattcatacatgtattctctctttgtatctatcgaagtcacgaaggtctttttcttcataaccttcgttcagaattcattata

SEQ ID NO: 23967 - DNA, 355 bp, Zea mays
  unsure (1)..(355): unsure at all n locations
tactcagcttcttgaggctggactacgatttcccttgagcaattttgtcgtggaagtactgaaggtatttgaagtctaccttcaccaacttactcccgaatcaatcataagaatgggcatcttcgtctgggccgtgaggagccaaggtttagaaccaaacgcaaaaagtttctgtaatatacatgagttgttgtacgagacgaaaccttgtggtaaagagcagtatcacaacaattttggctgctacagcttcngcgcccgatctaagtaaagttgtcccgtgccaacctttcggaaaagatggcccggcaactggatgacagaatggttntatgtgaagaatgatttaaaaact

SEQ ID NO: 23968 - DNA, 292 bp, Zea mays
  unsure (1)..(292): unsure at all n locations
gcttctacacattctttttcaagagccgggactcgtgtgcgagttgtctcatgtgctagcctacttggggatcccacccttgatagattgcttcgcgacaacgaagctctggtcacgggctttgtagatgatctataagcaactgcaactgcatttatgtcatctctgttactgattgctgcatcatgccccaccttccttcctggttcccttntatgtgcagatccattgtcttaaatcctacttgtggatgataatcgattttggctggtcaaatctctgcgtgtcattc

SEQ ID NO: 23969 - DNA, 260 bp, Zea mays
aactcagctagcaaagaaattcttaatcagaaattgagctctgccttgtctggtaaagatgttcataagtggcttggtaagaatcggctaattgatctttagtattaatgtagaaatctcgatatctcccttttgttgtgatctctagaaaatgataccgaatggctattgcttagtgcggtatgctcgacggattgcggcattttgattgactctcttatcacataccagggatttggtaatttgaaccgtaatccgca

SEQ ID NO: 23970 - DNA, 401 bp, Zea mays
  unsure (1)..(401): unsure at all n locations
tcaaccncgtagaccaggaagaacggggtctcctcggtagctcagctgggtgtggtctggttcccccatagtacgcacggaagctcgttgacccaatttgcgccatgcttttttaagcagtcataggtgcgtgacttgagtcccctgaggatttctatgtttgccctctcagcttgtccgttgctcatgggatgagccatagacgcaaagaagagctgggtgtcgatgccctcgcaaatcctcttggaagagccgacttttgaactaagtctcgttgtccgtaatgatacggcttgggaccccaaatctacagataatcgacttgaggaaggcaacagcaacaccctgngtgataatgaccataggggtggcctctggccactttgtgaatttgttgatag

SEQ ID NO: 23971 - DNA, 451 bp, Zea mays
  unsure (1)..(451): unsure at all n locations
acttccgcagcagcttgaagaaaggcagcgctctctcagccagcctcgaaatgaagcggctaagggcgactaatgatcccgtaagcttctggacgtccttgactcaggccgggggcctcattgcctcaatcgctctgatcttctccgcgttcgcttcaatgccccggtacgaaaccaggaatcctagcaacttcccagcggaaatgccaaaaacacatttgtccgggtttagctntatgcgggttacccacagcttgtcgaagaccagggttaagtcttccactatggttgaccctctcttagtcttgactacgatgtcatcgacgtagacttctactttgtccctaatcaggtccccgaaagtcttactcatcgcccgcacaaatgtangcaagggcgttttcagaccgtacgacataacaacatagcagtaaagcccatccactggtac

SEQ ID NO: 23972 - DNA, 210 bp, Zea mays
  unsure (1)..(210): unsure at all n locations
gatgacgaggggtacattttatatcctgctgggtatcctgagcaccaaaatatgagaattcattccaggaagactcactctgggtctcatcatgcctttatgtataagaatgagacatctaantctatacattctacccatgttaaaatgcctaaaaagaaatctcctgttgcattaaatgagcctaatgtttcatttaagacctttgat

SEQ ID NO: 23973 - DNA, 128 bp, Zea mays
actcagaaaacccaggagcaaaaatgaaatcctctgggtaaaatgacatcatctagcactgaagggtggtccttcagaactatagtagggaaccatatagacctttagctgagtattatcaaagaaag

SEQ ID NO: 23974 - DNA, 363 bp, Zea mays
tactcagcttggtgcccgatggaaaacaaaaatccttgaaatcttgatagtcaaactgcttgccggtgtcaactgttagctcggacggtactccgaagcggcaaacaatgttctgccaaaagaatttttgggcagtctttgatgtgattgtggacacggccctcgcttcaatccacttggtgaagtattcgacggctacgaaggcgaacttaaggttcccctgagcggtgggcaggggcccgacaatgtccaggccccagcgctgaagaggccatgtatgggcgatcagctctgtatattgcgaggggttgcctgaccgaggagagaacttctggcaggcttcgcaggaccttgtgactcgat

SEQ ID NO: 23975 - DNA, 342 bp, Zea mays
aagaagaaaataagaaagtgatctactacgagaccgattcttcgtcgccttctaccttcggcttcgacacaccgtccgtcacttctaagtgccatgagcgcaagaagtttagtaagaaccccttatgctaccctcgcatttccaaacacactcctttacttttggcccactaggcaaccaccggttttaacgggaagatattatatggggtgataaatgaggcacatctaactactccacctagcattgggacattgtgaattagacgcagaccatcatagggagaagtatgttcggacgagtgccaatcggactcactccagcatatatactctgctttag

SEQ ID NO: 23976 - DNA, 324 bp, Zea mays
ctaagcttcggagggagaacacgtgataggattgactaacgtaaaattcgaaaaagatagaccttgtgcagcttgtcaggcgggtaaacaagtgggaggagcacatcacagcaagaatgtgatgaccacatcaagacctctggagctgctgcatatggacctcttcggacccgtcgcctatctgagtataggaggaagtaagtatggtctggttattggtgatgacttttcccgcttcacttgggtattctttttgcaggataagtctgaaacccaagggaccctcaaagcgcttctcaggagagctcaaaatgagtttgagct

SEQ ID NO: 23977 - DNA, 259 bp, Zea mays
acacggtcactttactcatcatggacacttttctaccccatgggatgatgaaaaacttgaaggacctttggctcccgcattttttctaaggagtacagccaagagtaaccaataactagtaccaaatactaattaccaatcgcaagattcactatatatagctaactctgtaaacacagagaaactaatacgactctactttgacatctactacaagtaattgaaaatgcgacaactcgtcaactaccgaaactataat

SEQ ID NO: 23978 - DNA, 279 bp, Zea mays
attaacttactggagggtgaattgtcccatttggtgacggcatatgataaagaccgtattggtattaaccctgacacaaaaaacaaggaaaattaagttcattaccatatcaaccatgccttaacacaataagaatatgatctcaagttaaacgaggtacattaccggtggcatgggtgcctgctggtatggtgtgccttgtgcatacattgttgcatatggtggtggtgtcccataaggaagcatcatctatcccagtgaacaatctaatgttatatg

SEQ ID NO: 23979 - DNA, 430 bp, Zea mays
  unsure (1)..(430): unsure at all n locations
cgaagcatataagtttctagatgagatgttggtccctaagtttcgttgatgaagcggcagaagaccaatcaaggaaggaatccatgagggagttcgcaagagaaaggtttgtgtgttggcattgatgcttcctcaataagctagctgccaagcgaaagctgaagcctaaagatgatctttgagtagccagaatcagcgtttgcaatcggcaaccggatgctcctcaaaggccagattttgttgaagttccatctcctcgaagcgtctgcaaagtgaagatatgtagctgaagtaaagctatacccataacccttctaagtcgaatctcgagggcgagaattccttttagtggngtagatctgtagcattccacaaattcaaatcttagaattttctcaaactcgctctaaagtcaaaatgaatttcaaat

SEQ ID NO: 23980 - DNA, 413 bp, Zea mays
  unsure (1)..(413): unsure at all n locations
tatcatacatctcgnggatcagattagaatattagggccactatattngcatcatatgtttcagttggagcgatacctgggagtattaaaaggctatgtgccaaatcgcgctcacccagagggttcaatcatggacggatacactatagaagaagttattgagagctgtatagattacatcagtgaccggacaatgataggtgcgccttgtcctaaacatgaggtaaactatgtgggagagggacaatgggcaagaaaactttttgtgttgaggattacaagctagtacattgcgctcatggagtgtactacaacatcttacgatagcctatccttacatagaagaacaccttgatgagcttctcaagaaaatcagacccgacagaggactggatcatgagggagcacaaaca

SEQ ID NO: 23981 - DNA, 80 bp, Zea mays
tcattttgtttttatacaaatcaacatacggctgtttatgctacttctcacccctatttgactcctcaatagactccgga

SEQ ID NO: 23982 - DNA, 234 bp, Zea mays
  unsure (1)..(234): unsure at all n locations
gtgcagcttgataccaaaccatccaagcacacatgtaggcgaggatatcactaccaaaccgtttgtatggtgcttatccaaatcttaataaatgagcttaaagttggataaggaacataagaactntgtccaactatcaatttacacttgtgtgaaaagctagctttggaaaagaacaaaaacgataaatctttgtagagttgtcatcaaataccaaaaaagggggagattgtg

SEQ ID NO: 23983 - DNA, 421 bp, Zea mays
  unsure (1)..(421): unsure at all n locations
tacctgactccttcttctncactggcacaatattggagacccactctgcgtatctgcaaggtctgatgaaatcagcttctagcagccggtggatttcgtccttgatacgtgggagaagatctggacgaaatgttctagctctctgcttgaaaggtctgaaaccagatttaataggcagccaatgctctacgatctctcggcttaatccaggcatctcagtgtaattccaagcaaagaaatctgaatattccttcaatagaccgatcatcttatctctaggatcggtctccagggtcttgttacaaaagtcggccttggagttntaccatctcctatgtcaatctcctccaaaggatcggtcgatgtanacccctgtcctagtttatcaagatctctgaattcctctatcatgtccccacat

SEQ ID NO: 23984 - DNA, 384 bp, Zea mays
ccaattaaataacagaccatgattataacgaatcccataatgctatgcagataacacattagatatatatttcataaattactcatgttagtgtctgagccgcacttgaccgtgagcacaactgatataccaagtttacactctgcaaatgttgcacatttttacccactagtcgtgttatacatcaatcaagggatctagaaatttcattcatttctaccgagaagatgaagcagggtagccctacgaggcctttacaaagtttcactagcttcagaaaattcactaccgtttctgcgagaaaggggcaatacatggatcccttgtctaaaaagtcattacaacatgatcgacccgagaacctccctataccggcagcttctg

SEQ ID NO: 23985 - DNA, 392 bp, Zea mays
  unsure (1)..(392): unsure at all n locations
acatgtgctaagcggcgatgccacagccagcccatgctagtcttaggtgtgaagcatgcatctagaccggcctcttcttttgcaaaatcaactaaataaaagttgccgtctaatacacccttaaaagctagtgaaccatcacttcttctaaagacagacacatctacatttgtaaatagacagttatatcccatgttgcataattgactaacagatagcaaattatatcccaaggactcaactaanaacacattagaaattgagtgctcatttgagattgcaattntacctaatccttttaccttgccttgattcccatcaccgaatataattgaaactggggaatncttattcttgacgtaggaggggaacatctcttctcccccgcatat

SEQ ID NO: 23986 - DNA, 391 bp, Zea mays
  unsure (1)..(391): unsure at all n locations
tgtcttctcctggtccgccctcgacctgggcggagtcagccgatccataatcgagcacagcttgggaattgaccctctcgtgcgaccaaaaaagcaaaggcttcgcaaaatgtccgacgaaaagacagaggccgccaaggcggaggtgcaccgcctcctagaagctaaattcatcgagccagtggcttaccccacgtggctctccaatgtcgtaatggtgcagaanaaaagcgggaaatggcgaatgtgcttagacttcaccagtctaaataaggcctgcccaaaggacaatttcccgttgccgcggatcgacaaaatagtcgatagcgcggccggatgcgaagtcatgtcactcctcgactgcttctccggctatcaccagatatacatg

SEQ ID NO: 23987 - DNA, 323 bp, Zea mays
agcttcggcttttcgcagtgatcgtggaggtgaattcaattccaaggagttcaaagaatactgtgatcagcatggtgtgaagcatttcaccactacaccgtacacgccacagcagaatggggtagtataacggcgtaacacgactgtagtcgagatggctatgtgctttgtgaagagtaagaatttgccgggagaatttggggacaggctgtcacaactgcagtatacctgctaaaccgtgcccctaccaaaagtcttcaaggcagaacaccttatgaagcttggtacaatagaaaacctagtgtgcatcacttgagaacttt

SEQ ID NO: 23988 - DNA, 426 bp, Zea mays
  unsure (1)..(426): unsure at all n locations
taagtagcataggccaataatatactaattgactcaagcctacctaccggtgcataggtttcagcaaaatccaaaccttcgacttgggagtatcctttggccacaagtcgggctttgttccttgtcaccacaccatgctcatcttgcttgttgtggaagacccatttggttcctacaacattttgattaggatgtggaactaaatgccatacctcattcctagtgaagttgttgagctcctcttgcatagccaccacccaatccgaatcttgaagtacttcctctatcctgtgtggctcaatagaggaaacaaaagaataatgctcacaaaaatgtgcaacacgagatcttgtggtacccncttatgaatgtcaccgaggatggtgtcgacggggtgatctcgttggattcttgatggattcttgg

SEQ ID NO: 23989 - DNA, 485 bp, Zea mays
  unsure (1)..(485): unsure at all n locations
tggtaagtagcataggctagtaatatatgaattgactcaagcctatctactggtgcataggtttcaccaaaatccaaaccttctacttgggagtatcccttggccacaagtcgagctttgttccttgtcaccacaccatgctcatcttgctatttgcggaagacccatttggttcctacaacattttgattaggacgtggaactaaataccatacctcattcctagtgaagttgttgagctcctcttgcatcgccaccacccaatccgaatcttgtagtgcttcctctaccctgtgtggctcaatagaggaaacaaatgagtaattgtcacacccgggttttggggcaccaagacccgggcgcgaacataatcaccaggtgtgctgggaccaagtctcacacatatgatgaatcatggcacaggatcgaatgtcacatctntactacataacaggagttctatacaaaatanataattacattat

SEQ ID NO: 23990 - DNA, 283 bp, Zea mays
  unsure (1)..(283): unsure at all n locations
agcttatgaagattcttcatcccaacatgggctattcggtggtgccagagcccacccatgttagtcttagcaattaagcaagtgtcgagttcagctctatcaaaatctaccaagtatagctgaccctctaacactcccttaaatgctattgaatcatcaattcttctaaagacagtgacacctacatcagtaaaaagacagttgtagcccatttgacataattgagaaacgganagccaattgtaatcttaagaatatacaagaaaaaaattggaaatggaat

SEQ ID NO: 23991 - DNA, 439 bp, Zea mays
  unsure (1)..(439): unsure at all n locations
tcatggaaaggaaccttcggccatctcatgcaaacagcttcagccgaaagccgcttttcccttgaagaccttcggcgacgaagcatagacccaacagggccttagctcccttgtaacgtgtcacccttggactataaaagggatgacacttgcaccgtatgagggaggtcgattcacacttagacctacgactctcaagttctcaagcaatacaactcgcagtggatgtangatattatgcttcattggcctgaaccactctaagcccttgtgttcttgtgtctatccatcangccaggaaatccctaagccccctcctcatctaaggatcanggcgggtgcactccgccacacaaacggaagatttcccctctgacatttgtcacactaggtanggggcaggctctaatacatggccccttgattgatataacatcct

SEQ ID NO: 23992 - DNA, 378 bp, Zea mays
tatctttctctcgaatatgggttccactgttgtccaatcaccagtagccagcctgcgatggtgcataaggattccaatatatctgaaaggcatgccttcacttttatagctaaacaatcttgtgtacctcccttcctcctctttggccttcccatagtagaagacctcacccttgtggaaatttattttcagacccaacaactgctcaaaggcacataatatgagtttcatatccgttgccttgtccaagttgtgctccataaacaagaatgtatcatctgcgtattgtagaatggaaagcccttcatctaccaagtgcagtaccaaacctctacttgctcgttcacctttgctctattaatcaaagtgggcagcata

SEQ ID NO: 23993 - DNA, 260 bp, Zea mays
  unsure (1)..(260): unsure at all n locations
gtatgttgggggcaagcacaaggggtcaaagacttgtgtttgggtacccaaagntcttgtgtctaatgccaaaggacccaaaaccatttgggtacctaaagtcaagaactaaacttgttttgtatgttgttgcatccggnggctcaagatggattatctacagcgggtgcacaaaccacatgacaggggagaagaaaatgttcttcttctatgagaaaaaccaagattcccaacgagctatcacattctgngatggaaac

SEQ ID NO: 23994 - DNA, 305 bp, Zea mays
  unsure (1)..(305): unsure at all n locations
tctcgtacccgcgatcctctgagtcacctgcggcgtgcagcttgccatacttgttatagcaacaacacctgtcagcacagcaactacagaccatactaatgagttggcctttctcatgctggggactggatatgattggacctttcaaaaaagctcaagggggatatacccatgtattggtggcgactgataaattcactaaatagatagagttcaagcccattgcttctttaacctctgctaaagccgtggaattcatacaaggcataatatttagattcnggataccaaacagtatcaatcac

SEQ ID NO: 23995 - DNA, 388 bp, Zea mays
  unsure (1)..(388): unsure at all n locations
ctttaatctcagctcgtgttaaatgacatagctctccaatctttatcttgttatgctcgaagaagattttaacttcgtgaatcacattgagatttgatccanagatcaagatgtcatctacataaagacacaacataacagactcaccctcaccataccgatagtacacacacgtgtcagattcgtttacaacatagccaactgtcgtaagagtattatcaaacttttcatgccattgcttaggtgctcgttttaggccatacaatgattttatcaacctgcacaccttgttctcttgaccatccgcaatgaacccttctggctgatccatatagatctncttcatcaactcttcatttaggaaagttngtctacatcatatgatgat

SEQ ID NO: 23996 - DNA, 462 bp, Zea mays
  unsure (1)..(462): unsure at all n locations
aagaaaatattgaatacatcatctgncattcttcgggaaagagactnctctaagaagaagaacgagaagctcaacactatgcccagatgctgaaatatctgaaggggcactagtgttcaacggcagcggataagaggattatttgtactgtctctcggacagcaaagagatatctgtctgccgggagatgagcataagcttcggattcccaacattggaagatgggctttcagtactgtcaaaggatgaattggccgacagtttagcatataatagtataaaggtgtgtaaatcaattcttgtactttaanaacgaaatttttatatattttctatccgctatacttaatactatgctccttacagggcttgaccttagcatgccctcatgcatagaaaatatcgaaacaaggatgccaataatctgaacaacttcgtcggagtgaagaactataacaatgc

SEQ ID NO: 23997 - DNA, 331 bp, Zea mays
acatgtgctattctgctgtggcacaagcagtccatgctagtcttagctattaagcatgcatctagatcggcctccttttttgcaaaatcaactaaataaagactgtcgtctaatacacctttaaaagctaatgaaccatcacttcttctaaagacagacacatctatgtttgtgaataaaccattatatcccataatacaataatgactgacagatagttaattatattcaagagactcaactaaatacacattagagatagagtgctcattggatattgcaatcttgcctaaacctttcaccttgccttggttcccatcaccgaatatga

SEQ ID NO: 23998 - DNA, 154 bp, Zea mays
tcttagcaattaagcatgtgtcaagttcagctctatcaaaatctactaagtacagctgaccctctaacacacccttaaatgctattgagtcatcacttcttcttaagacagtgacacctacattcagtaaaagacagttgtggcccatttgaca

SEQ ID NO: 23999 - DNA, 497 bp, Zea mays
  unsure (1)..(497): unsure at all n locations
agctntacatttcaaagagaaacttatcctttntaaacgatcaagagaaactcattctcttcaaagaactacacagattcactaaaagaaaatgttagtctttaatgacacaagatatagaatgagctccccttaaatgtatgcatcaagtactcgaattacttgtaacatgcacttgattcaattaagattcttagaggagttcatcatatatcttggtcaaggcataatatatttgaaacaattgaacttatgctagagaacacatatcatttccccaatagaagtaatccatgtggtgacatgtggtaaatatttgatcatttccttggaaccacttatcctcatttgatgttctcttttcaccaaggtgtgagactaaacaacatgaacttgaaagaaatcattagtctcacaagatatangctaaactctccctcaatttgtgcatgcanngtacacatagtacacttatcatatancaatatgaggtaaag

SEQ ID NO: 24000 - DNA, 467 bp, Zea mays
  unsure (1)..(467): unsure at all n locations
agcttatcgcgaaagcttcttagaggtacaataccagtttgcacatgtgatatggtcatcttctgacacacagggtggtacatggtaacctatttgttgtatagatgacaggacacaacacaactaaaacaacaaatcactaaaattgacgtagttcataagtgcatattcctccaacacttcgaacaatggaagagtaataagtccctcccactaattataaaatgcaatgaaggggttgaataattgtcaccttcgaacacaggcctggggtaactaagagcgtaaccttctcatggcgagtccaccgagaaccttataacatacgactcagcctgggcaatagcgcagagcccacnggtgttcacctcttcatacagctcaacgccaccctgttcagcggattcttgtgcactggagttatcaccttgagcaatgagtggagttatcgaatgagattttatttc

SEQ ID NO: 24001 - DNA, 144 bp, Zea mays
  unsure (1)..(144): unsure at all n locations
gaccacccttcgnccaaatatgtgttataaatatacttcctatgcttccggcttcgccaggaatattaacaaaatctgtctaagataggctgaaggtaggtctattcactatcttcgtgtgcgtacagccagctttaaaaatgt

SEQ ID NO: 24002 - DNA, 494 bp, Zea mays
  unsure (1)..(494): unsure at all n locations
acgtatactgatgaagctgctgcaaaaagctctatagaaatntgaattatctctgtaaaagatattgtgatttaagaatgaaacaatgctctataaatttgtccatactttgtaatatatttttaccttttcatccgtgtattaattgctttgatgtggacgaaacttgtattntttgagccgaaggcgaaaaacaccttcccttcttttcatacacaacgaagcataactttgcttcttttatactcatcgaagccttgtcgtcagagccgaagcatctgtttgtactctatgttatgatgatgatgatcctacgaatgtctaaatgaatgtgtatgaatgcaatgaatgatgtgatgtaacgtgcanatgaatgtccaaacacacgcatacgaagctacacccagactctgcatccattangaacgtcttttgagtcttaagctctgcatccccttangaacgtcttttgagcttcttcaccttctatttct

SEQ ID NO: 24003 - DNA, 238 bp, Zea mays
tcttttcaagtctgcaatcacggttcgtgataactcttttgcataaagctagcggaagagatagatcaactcataaagagctagccagacatgctcacggacatagcctcgaaccatcgtaggaagaatacgctcaatccatatgtgtaagtcatgactcttcatcacttagactcacatagtagataagttcattccctactcaagttagctgcatacccatcagtggacatcaaca

SEQ ID NO: 24004 - DNA, 408 bp, Zea mays
  unsure (1)..(408): unsure at all n locations
agctntataagaaaatattgaatacatcatctgtcattcttcgggaaagagactctctaaagaagaagaacgagaagctcaacactatgcccagaagctgaaatatctgaaggggcactagtgttcaacggcagcggagaagaggatattatgtactgtctctcggacagcaaagagatatctgtttgccgggagatgagcaaaagcttcggattcccaacattggaagatgggctttcagtactgtcaaaggatgaattggccgacagtttaacatataatagtataaaggtgcgtaaatcaatatttgtacttagaaaacgaattttcttatatattctttatctggttatactaaatacatatgctctttacagggcttgatccttagcaatgccctcagggcat

SEQ ID NO: 24005 - DNA, 170 bp, Zea mays
tttaacccccgtgcacctctagggaaatattttaccccagggtttagttgaagacacaaacccagatgctcgtatagatccatcaagttattgaacaagaagtgccgcgcatctctttgagctctcgcaacatggttaagaattcggagtatgaggtagaaccccctccc

SEQ ID NO: 24006 - DNA, 229 bp, Zea mays
  unsure (1)..(229): unsure at all n locations
gagagccagaatacaaagcgcagcagaagataaagtagcccatgccactggcagaactaggtgcagacatagcctcctcaatcaagcatagcagaaaagaagtcttcagctgctgtaaaacatacataaatctaggtgaatacactatgtattccgcaagcccataccgctcccgtatagagaaagggacctatatcatacatgctntatatggtggaggtgaagtcac

SEQ ID NO: 24007 - DNA, 364 bp, Zea mays
  unsure (1)..(364): unsure at all n locations
gttaatagactcaagcctatctacgggtgcgtaggtttcaccgaaatccaaaccttcgacttgggagtatcccttggccacaagtacagctttgttccttgtcaccacaccatgctcatcttgcttgttgccgaagacccatatgggtactacaacattatggntacgacgtggaactaaatgccatacctcattcctagtgaagttgttgagctcctcttgcatcggcaccacccaatccgaatcttgaagtgcttactctaccctgtgtggctcaatagaggaaacaaacgagtcatgttcacataaatgagcaacactagatctagtatctacctccttatgaatgtcgccgagaatggtg

SEQ ID NO: 24008 - DNA, 324 bp, Zea mays
aatgggttggccgtattacgcataaagaacatataatcggatcataatgagcttgacgtcagtatcaacaactttgctgctagacatgttcgaggaaattgtatgatgaaatcatatcatgtacttcttaattcgtacttgatatggacagtctttagatatatatggcgtgtcctataagtacctctatacacctgtattatgtatgagacttattattgcagagggtctctattataatgctagcgcttagcctctaaaatgacacgaccggcactgtatgtcacttaattagtaattttttaacaattcgagaacatatac

SEQ ID NO: 24009 - DNA, 483 bp, Zea mays
  unsure (1)..(483): unsure at all n locations
tgcggcatgcaagcttattgagtgtcacacccggatttaacaaacatagcctgttctcatatatgcgccagaagagacagcacgtataatgacacagtgcctagagataaatatcataaatatacttattactttgcggaagtcttacaaaaataaatgattaagtaaattgaactaaatattattctctggcgccacaaagctgactgggagacaccacctatatcaagtcgaaagcctcagtgctaggcggcttctctatgaacacctattcttctgctgtggnggtgtgagacagcaagagtgagctcacatacgttcatagctcaacaagtcgtgaggaataatgtgcatgaactcaccaaaggtgggagttcatgtgaagtgtaacgctgaacaacatagtagagactgaagctgagcattgcttntatatgttggtcaaagtttattagcaattactaagtataagtaaataccaaa

SEQ ID NO: 24010 - DNA, 413 bp, Zea mays
  unsure (1)..(413): unsure at all n locations
ccaacattcacattcaccgcacaaactaccaagtatactaattaaattcttattaagaatgttacatatatgtaacctaactagaatactaatttgctaactaacttaataactatatatgtaacctaagtaaccactatgataactaaattaccaactaaccaacttagaaactcggttactaaacaactacctaattattaactaacatgtacataccttcactgtcaaggacgcggagcgcggtggccaggttggccggcggtcgcggtatcaaactatgccgccggaggcgatggcgcacgactgaaagctctcttgtgagttttggtggttggatgacaactcaattaaaggactaacaagtgtactatgtgttgaacaagtgcttaanggcactactacagcacacc

SEQ ID NO: 24011 - DNA, 448 bp, Zea mays
  unsure (1)..(448): unsure at all n locations
gcttttctacatatatatgagtgcagctacattatttataattgtaatgcanattatctttaccgtttggcactcgggtatttatttctacataaacattgtctgaatatgcaatatttctactccagagaggtgcccccattgaaggggtgatcaaaccangtgtagttccaagatttgtgcagtttctcacaagagaggatttgtcccacctgcaagtattttgatacagcataattcttgtatcctgttgttgctaaatgaaaatggattttcatcagctttgtaaatctttcgtagttcgaagcagcatgggctctcacaaatattgcttctggcacttcatgaaatacaaaggatgttattgatcatgtgatngttcctacatattgtgaaactttcttgcctctggtagtgatgaaaatggattntcatcagctttgtaaat

SEQ ID NO: 24012 - DNA, 478 bp, Zea mays
ctcagctatacagaaagatttacacaattggagaaggtattatattctatgctgatggcctccacgaggcttctacattattttcaagcatatcatataattggttcttcatcaccacctctaaaggacataatgaggaatatagaagctactgtaagaattggaaaatgcgctgtccagctcaatgaattcactattgattatgtacatagatcctcaattcagtcccaagcgttagcgaatgtcattgctgactggacgctaagcgctcacggataagatgtaacaaaagacgctgaagccatgacagtcttgtgtgatggtacttggggaacctcggcgcacgagcggctgctgtctagtagcgccctctaaagtcacaacatgatacgcaacaatgttggacttcagttgtacaaataatattgatgaatacgaagctcttctgtggtggcttcggaagctaaaggcaatggga

SEQ ID NO: 24013 - DNA, 418 bp, Zea mays
  unsure (1)..(418): unsure at all n locations
cacgcatctgtaattcagttcatcttattattcgtttacagatggccataccgaagggaccaatcatattcttgaagacatgttgagagcctgtgcgttgcaagatcagtcccgatgggacaagcgattgccttatgcatagatctcctataacaacagttaccatgcccgtttgtagatgtcaccattttaggcgctctatggaaggagatgcaaaactccgttgcaatgggaccagcctggagaaaagcatgtgcttgggccatacattcttgttgaagccgaagagaacatcaagatggtccgagagaatctgaagatagcgcactcaagacagcgaagctatgcatacacatgaagaagagagctgagtntctaggttggagactttgtctatctgaangtgtcaccgatcaca

SEQ ID NO: 24014 - DNA, 380 bp, Zea mays
  unsure (1)..(380): unsure at all n locations
agcttcacccaatcatgttgaacaattgtcatctttatccaaagaggttaagccctagagacccctaaaggcactatacttccaagcaagggatcagtggataagttaatcaaattgccaaaccttgattctaatccttaaccaaagtttaagtaacattgtaacctacaaaatgcagaggggaaacattacataaagaccccttgaagaccccaaattcaccgcttaagtagagagcacactagagctctctaatcttttctaagtcaaattttaaccctaatctaaagatcagttgtgttcacttagtaaatggcgccaaaaccacttggtctgaataccaaanaggtgccaaaccacctaaggcacccactggaaaa

SEQ ID NO: 24015 - DNA, 266 bp, Zea mays
caccggacgtgggcgccaatgttgtagacttgtccttaaatgctatgaattacgaacaaggcaacacataaattgttatacgttaaagtccttcgtccttcgaagcattatttcccttgggatataatgagtttccgacgaaggttatgaaggacataccttcattagcacaacacataatgaagaaagaatcatattatgtatgagaaataacataaacacttaaatatattattaactcatcctactttgtaatatggaaaata

SEQ ID NO: 24016 - DNA, 420 bp, Zea mays
  unsure (1)..(420): unsure at all n locations
agcttgttgtgctaaagagccatgataaccatgttttgatacagtatttactcccacttgctgtgagaaggattttaccagaaatagttagtgctgcacttattcgtgtgagcaattttttcaagcaaatctattcgccagttattcgtataagcgatatgcataagctagagtcagaaatagctgagactctaagcattcttgagactatattcttgccatcctttnttgatattatgggacacttaatggttcatctccctactcaagtcagaattgctggccctgttcaatttcgtaatatgtacccagtggagaggtaaattntaatatattntagcaataaattaaacttagttntactcanaggaaggtttaacatatatgccatttctcctttatagggttttaatgagatgt

SEQ ID NO: 24017 - DNA, 181 bp, Zea mays
ctaagcttaccaatggacgtgaaagtgtttcctaatgaaccaatttatgatgttgtctatgttgagcaaccttccggctttgaagatattgagtaccctacctatgtttattaactctctaatgcactttattggctcaagcaagccctcaaagcatggtatgaatgcctaagagaatttt

SEQ ID NO: 24018 - DNA, 462 bp, Zea mays
  unsure (1)..(462): unsure at all n locations
gactccttcttcttttcttccgtcgccttgaatgcgacgggttgagcttctgatgtagatggatcatcaagctcgttgatcttcctcgagccttcgatcatgcactcaaaacttacaaaatgcccgattacttcctcgggggtcattntagtatatcttggattaccacgaattaattgaacttgagtagggttaaggaaaataagcgatcttagaataaccttaaccacttcatggtcatcccactttatgctcccgaggttgcgcacttggttcaccaaggtcttgagccggttgtacatgtgttgtggctcctcccctttgcgaaagccggaaccgaccgagctcccctcgatcgtttcccgcttggtgatcttggtgagctcgtctccctcgtgcgcggttntgagcacatcccanacctccttggcgctcttcaacccttgaactntnngtatactc

SEQ ID NO: 24019 - DNA, 137 bp, Zea mays
ttcttgatatttacggcaacaatgatgcagaggtccctggtcttctcctgtcggctgccattgttgacatgatcgggcgcaagctctcgatgtcttccatgctttacatcagatgcctgtgcatatctccgcttatg

SEQ ID NO: 24020 - DNA, 486 bp, Zea mays
  unsure (1)..(486): unsure at all n locations
agctntaacccctgcgagacctttccccgtttctttctaaccttaacgaatgcgatatcggatgccatactttatgcatatttactttatttgtccccttgtgtggtgtactgtttgtttcctaatttgaatggatggatgtatgtatgcttgcatcgcatagagaacgatccggtcgaagagcccgaggaacccgcaggagaagcccctgagcagcaatcggttggtggaggcaagtgtctcttgacctatctctgtcctattcattctttaattcnacctccgctttacacatttatgcctaaggattgactnagttttgtatccatgtccttgcttacctatctgggttggattattattgcttagctntatgctatngctcaactctaatcaatgaacatgatgagaatatccatgatacgctgtttcccttcttatgtgatgtatactgtggcttcagggggctgagcggttctcagtgct

SEQ ID NO: 24021 - DNA, 270 bp, Zea mays
  unsure (1)..(270): unsure at all n locations
tcnggaaccccatacttctagccatctcccgacagacggataattctttgttgtctgggaggcagtatatgaaatcatcttcgtttgtcccattgaatactagtgcccccttcggatatttcaattctttggtatagtgattagcttcaaaaacttcttcttcggataactttttccccgaagcgtgtcgcacaatataatcgtatattttggaagatgcttctggggcagcagtatcaatttctttaaccaaaaatgtctctgacattt

SEQ ID NO: 24022 - DNA, 446 bp, Zea mays
  unsure (1)..(446): unsure at all n locations
gatcagcgcgaacctatgctcctatgtggagatatagcacatcaaagggannnnnnngggtcttagctatgtgatgagcaagaaaaaaactctgtataggtttttgttcaacaacaaagatgtcttctcttggacaaccaatgatctttgtggtgtcaacagagatgtcattgagcattcacttaatgtggatccatctttcaggccaaggaagcaaagacttctgaagatgtctgatgataaagctgaaggtgatcggaacgaagtatagagacttctcagtgctggtgttatcagagaagtaacatatccagaatggctagcgaacacttgtatggtgaagaaggctaatggcaaatggagaatgtgtattgacttcacagattcggagctcatgagtntattggacgagttcccattaccaagaatagactctctcgtagatg

SEQ ID NO: 24023 - DNA, 186 bp, Zea mays
  unsure (1)..(186): unsure at all n locations
agcttcgatcttattagatgcaatccgctctgtatgtttttgcttangctcagcangctccatctcggtgggcactgaaagcccagcttctgcttcagtttgagcttatgcggcgttcggttctgcttgcccagatttggcttcgacctgcgttattgtagcttcagcaactttctttgtagcaac

SEQ ID NO: 24024 - DNA, 237 bp, Zea mays
actcagcttctttcttaattgtgtctcttaccctcgttataatttcttcttttatcctcgaggcctgtgcatttgcaggctttcttagcacatactctgtagagatgaatcttcgtcgcaaatttgctttttcgcaaaacatagaaacatttcacttcatcacaagaatattaccttgaagttggagtaaaacaagctaccgatgatatgttgtcgtcggtaactgctaatatcatc

SEQ ID NO: 24025 - DNA, 438 bp, Zea mays
  unsure (1)..(438): unsure at all n locations
gcaagcttgtcgcagctgacttccgttntaagattcgcttacttctgaataagcataacacggtcactagaacaaagtggtggaagcttaaaggggatgtggcccacactttcaaggagagagttatcgaggagggcccttgggcagaagagggagactcatatatcatgtggaggaagatggcgatgtgcatccgaaagatagcttcataagagtttgggttgagtcaaggaaacagaatggaagttaaagacacttggtggtggaacgaagatgtccaaaaggctatcaaggagaagaaagattgctacaaacgcttacatcatgacaagtgtgcaganaacatagagaagtatatgatagcgaagaagtctgcagagcgagcggttagtagagcccggggcaagcctttgcaacctttataacggttggcacaaa

SEQ ID NO: 24026 - DNA, 210 bp, Zea mays
cccgcgtcactcgaatagcgaaaccgagctcgctggagatcattcccccaccggcgcacgtggaccgggtaaatcactgagccattttccgattcaatgcacagatagcctctacattcccccaggaagctcaccgtgtcgttggattggactatgtcgccctgggttggccggcacacccgccgccgacgaggacaaccgcctgcgcgc

SEQ ID NO: 24027 - DNA, 450 bp, Zea mays
  unsure (1)..(450): unsure at all n locations
ctgcgggcatgcagcttctaaagggagaacacattntaggattatatcttgttcattatgagaaagacagggtttgtagcgcatgccatgcagganagcaagttggtgcccatcatccacacatgaacatcatgacgaccgatatgccgcttgagctactgcacatggatctattcggcccgttacataagcatcgacgggagtaagtattgtcttgtaatagtggatgattattctcgcttcacttgggtattctttttgcaggaaaaatctcatacccaagagaccttatagggattcttgagacgggctcaaattgagttcggcttaatgatcaagaaatatagaagcgacaacgggacggagttcaagaactctcatatggaaggcttccttgaggaggagggcatcaagcatgagttctcttctccctacacgccacaacaaaat

SEQ ID NO: 24028 - DNA, 439 bp, Zea mays
  unsure (1)..(439): unsure at all n locations
catacctagccactacgatgtgtcggactagatattgtttgaccactacgcatagcacaaggcaacctactattcaccttcggtgctgtcgaatactttaccaagtacatcgaggcctgagccgtatcaataataacctcccaaacagcgcagaagttcttctatcagaacatcgtgtgtcggttcggagtcccatcagagctaacagccgacaacggagaacagttcgacaaccaagacttccgggaattctgcaactctatcggcacgaatgaagtgttcgcttctgtctaccatccgcaatacaataaagcggttgaacgtgccaacggcaagatttcagtgccatcatgaaaaggctactctacaacaagagatgcaaatgtggagaccagataccgaagtcatatgggcattgaacacantataatctagagcg

SEQ ID NO: 24029 - DNA, 459 bp, Zea mays
acctgccgcatgcaagcttatccgcattccaagatctaggaatgtctttgtcttatatatccttcaatctgaatgaaccgggtcttgatgaatatactaccaataaaggtccctcccattataactgcaacattgccactgtatctgggttagccactctcctaagcaccaaatgtcctggctcaatattctttagccgaacctttctatcacgccatttgattgtttccgcttgatatttattgatgttctccacagcatgaagcctgatcccttctatagcatctttatccatagaatgaacagcttcggaatctgattctgtcgaagctactactcttattgatccagtcttagcttcctccggagttattgcttcgtcaccaaacaataatatgaatggaatacagcctgtcgaccttgatgttgatgattgtggctcccaccactatgattatt

SEQ ID NO: 24030 - DNA, 228 bp, Zea mays
  unsure (1)..(228): unsure at all n locations
agctntattnttanaatgacatcggcttctcctctatctttcatgtcgagaatgctcgatntancaattgggacttgctcaatcacattaagaattgatccgtagatcaagatgtcatcaacatanagacatagcgtaaccgactcacgccgcgcataccgatgatgcacacacgtgatagattcatttacagcaaagacaggagctgtaacagtattatcaaacttt

SEQ ID NO: 24031 - DNA, 145 bp, Zea mays
gaaaatcttcacagctgacaagaagatgctcctcgatgaataaaagggcagatggaccgatttgatacctgatgcattctgcgcgctaaacacaacttagtgcacggcgactgggttcactcctttccgtcatattacggatcgg

SEQ ID NO: 24032 - DNA, 490 bp, Zea mays
  unsure (1)..(490): unsure at all n locations
agcttattagtttcatagcacanatattntacctattatgagtgtcggttcatcatccatgcccaaagcangatgtacttgctcttatagtgtcaagactagtcttccatcttatcgcacttgtggcagaagtcatggttccgcggtgtgttctcctttccatagcaggaatcaccatccttattcctctatggaagtgaccttccaagttgttgtctaataccttcatgactngacaagccactangcttttgctagtcgtgcatgtgagccacacattactcattcatgaggaacaactttctacccatcaccatctatgtcattatcgccttaactcctttccccatggccttcagtccctctattacattcttaatcatggaggtggagagaatgagtagagtgtcgatcaagagcacgaattatgcgaacttgggtgaaacacccataggtacttactaatgatctactgctcaagtccaacact

SEQ ID NO: 24033 - DNA, 249 bp, Zea mays
  unsure (1)..(249): unsure at all n locations
ccttcaactcgctgctgacaaactgatgcatcatctgtctcatcataanatntacagcattcaccattgtcatacacacattatgcagcgattagccgaacaagcctccgcaggcatattctttaccaacaagagttccatgttgcgacacaacacgattatgtgactcaagaacaactctgtatacatctcgacatagcatggcagcactaacgagaatcttcttgaatgatgggacatgctgcacac

SEQ ID NO: 24034 - DNA, 366 bp, Zea mays
  unsure (1)..(366): unsure at all n locations
gtactaagcacatgctgggaaaaatggttaccggtaaacctactacctgagtgaagccgggcgcaggctatatccctcatgcgacctgagactgggtctcccatgctagctatggtgggtacaagtgcaatcactgcacggcggcagtcggggtcagtggagcaattgatgccaaggctgtgaggcctgtacgctaacggcgaatctatggggacggattgcatgtgtggggtctgagtaccctgacatgccgtgtgtttaggtttaccatgtaatgttaaaactcgattcgaatcgtctgcttctcacagctaatgagactgctngattccttgtactgcattgataagaagtgaaatgtggtta

SEQ ID NO: 24035 - DNA, 297 bp, Zea mays
agcttggagttctatgtggaagttcaacttatctgttctctgctgtaaaactagtatattaaacagtagtgatcagtggcgaaaactgcagatgggcatttgagatctggtggggaatttgtaggatttatgggctatgcccaaattgagaaaatctaataaatcccaggaaaatctcataagcccatataagtggatggctagggaatatgtggaaccaatagcaccatattgctagttctagtggagtagagcttgcttaaatatggaagccacactcactcaccaagttatgga

SEQ ID NO: 24036 - DNA, 239 bp, Zea mays
  unsure (1)..(239): unsure at all n locations
gtccactggaactgacctttcgagaaactcgcccccagtgcttcatgttaccagagggtccaactcacaaagcaatgctcgaattcaaaataattgcagagaatattagtacaatggacctggtccaggaattcttggtcttcaaggttttcctagtgtaaaagagtgggaaatgccgaagcttgntggggagaagaaaaaacgtgaacttgtacgtttgcttactactttcaaattaa

SEQ ID NO: 24037 - DNA, 513 bp, Zea mays
  unsure (1)..(513): unsure at all n locations
tcctctgagtcacctgcngcatgcaagcttgacattacttccctgttggaaaccaatgttattcttaatgctagggcttctcccattatagagcatgcttctagcannattaaacttttcattttcaatttcatgctcattgattttaagagttaattgagctatatgaatcatttgttgtttaattagagcaaggtgatcatttatagcatcaacactaatatctctacatctagtacatatagaaacatgctcgacagtggatgtagaaggtttgcaaatatttaattcatctatcttagattttaacatggcattttcatttctaagacaggaaatggaatcattgcaaacatttaaatctttaaccttaanaattagactagcattttcatctctaaggctagaaattgtatcatggcaaatgttaagctccttagataaacattcacatttctctacttcctcagcataagcattntgcacttttaacatgttnttattntctttaat

SEQ ID NO: 24038 - DNA, 167 bp, Zea mays
  unsure (1)..(167): unsure at all n locations
cgtcaagagactgatggtgtatggagagtctctggtcgtcatcagtcagataaacaaggaatgggatngttcaactgattcaatgggaaaatactgcgccgtcgttcgaaagctagaagaataattcgagggtctggagtttcatcatatagaaagagatcggaaca

SEQ ID NO: 24039 - DNA, 492 bp, Zea mays
  unsure (1)..(492): unsure at all n locations
agcttctaaagggagaacatgtgttatgactagccgatgtttgttttgagaaagacaaaccttgtatagcgtgtcgagccgggaagcaggtgggaactaataatccaagcaaaaatgtgatgacaacgtcaagaccactggaactcctccacatggatctcttcgggcccgttgcttatcttagcatcgggggaagtaagtatggtcttgttattggtggagattntcccgcttcactttgagtattcttttgcaagataaaacagaaacccaaagtactctaaagtgcttcctaaagagagctcaacatgagtttgagctcaaggtgaagaagatcaggagcgacaatgaatctgaattcaagaatcttcaagtagaagagtttcttgaggaagaaggcatcaagcatgagttctccgctccctacacaccatagcanaatggtgtagtagagaggaagaacaggacgctcatcgacatggcgaggacaat

SEQ ID NO: 24040 - DNA, 257 bp, Zea mays
ctcagcttcggaagccgaggtccaaaaacaccttccctgagctcgttgccgataaacgattcatttcccgagatcgtgtcggtcccaccttgcagagtcacttgttggtctttgcggtccactgcacagcgagtacaagttactgcccgcctggtgtaaaaaccctgccgcttcgccttcttacctgcagcactatataaacagacgagtaggtgttgaagtaccacagcatttactgctatttgcactgttttgct

SEQ ID NO: 24041 - DNA, 502 bp, Zea mays
  unsure (1)..(502): unsure at all n locations
agcttaatgcccncaagaatagactttctaattntgttaatggcaaggctcccatggttcacgatagggaaggttacattttatatcctgagaactatcctgagcacaaaattaggagaactcatgctagaaaatctcatattggttctcatcatgtttatatgtatagtaatgaggcttctagctctaggcatacaactcatatcaaaatgcctaaaaataagattgctaatgcatcaaatgaacatagcatttcattcaaaacttttgatgcatcatttgtgtttattaacaaatcangaaaggtggttgccaaatatgttggcggcaaacacaagagtcccaagacttgtgtttgggtacccaaggtgcttgtttctaatgtgaaaggaccccaagaccgtttgggtacctaagtacaanggcctaaattgtantgangttcatacatccggtgggacaagttggataatcgatagcgggtgcacaaaccacatgactg

SEQ ID NO: 24042 - DNA, 421 bp, Zea mays
  unsure (1)..(421): unsure at all n locations
cctgcaagagaagattacaaaattcttcatatttatgacaaattccatttgttatgtgaattgcatgtttccaaactcaataattcaaaagctttttatcgtcttttagagaaaatgggtaggttgagaaaaaagaaaggggtggaaactttaccttcattaatatccccattgacaagaatactttgatctttgagagtcatggccatgaagaaccttgagaccagataagtgggtgggtttttgcacaacanaaaacacaggcacttgtaccatttgaattcacaacatattaaaacaaacgcttgtatcattgtagctggtagccaactattaatggttcaagaaaaaaattctttgtgactaaaaaagattgtatcactacatcccacttgtgttttctaatggctcaatgcacatt

SEQ ID NO: 24043 - DNA, 385 bp, Zea mays
tgatattcatgttcacctaatcatacatctcgtggatcagataaaaatattagggccactatatttacatcatatgtttcagttggagcgatacctgggagtattaaaaagttatgtgcgaaatcgcgctcacctagagggttcaatcatggagggatacactacagaacaagtgattgagagctgtatatattacatcagtgacggaacaatgataggctacgtgtgcctgtacctaaacatgagggtaaactatgtgggagagggagaatgggcaagaaaacttttcgcgttgaggaatacaagctagtacattgtgctcatggtagtgtactacaacatctcacgatagccgatccttacatagaggaacacctggatgagc

SEQ ID NO: 24044 - DNA, 417 bp, Zea mays
  unsure (1)..(417): unsure at all n locations
agctgtgaaggttcttcatccctacatgtgctaagcggcgatgccacagccagcccatgctagtcttagctattaagcatgcatctagaccggcctcttcttttgcaaaatcaactaaataaagtttggcgtctaatacacccttaaaagctagtgaaccatcacttcttctaaagacagacacatctacatttgtaaatagacagttatatcccatattgcataaaggactaaccgatagcaaattatatccaagagactctactaaaaacacattagagatagagtgctcattagaagatggcaatttacctaaccctattaccttgccttgattcccatcaccgaatatgaatgaatcttgggaatccttattcttgacgtaggaggtgaacatctttntctcccccgtcatat

SEQ ID NO: 24045 - DNA, 339 bp, Zea mays
gaacggatgtttctgcaacaagacattgatatatagtgcaagaattcttcttgatgaacaagcacagattgatatggcaatgagaaattcattgacggattctttatccacattggaacatgatagatgtccaccttttggtaagtcaacgggtagtgcatgtggagctgcaaagttgtctacagggaagcaaagtatgctcttaagttactacaagaatacacaagatacctctagagggtcctttgacatagacttggcatgcaataggacacaagtgcagccatgcatagatgttatgctagagaaggggcataaggagaagctagggatagcatt

SEQ ID NO: 24046 - DNA, 520 bp, Zea mays
  unsure (1)..(520): unsure at all n locations
ttaagtcaactgcggcatgcaagcttctatatggagaacatgtgttaggactaacctatgttgttattataaagacaaaccttgtgaggatgttaaganggaaaccgatggaaacaactcatccaagccagaacgtgatgacgacattaagaccattggagcttcttcttatggatctctttaggcacgttgcttatcttagcattggtgggagtaagtacgatcttgttattgttgatgactattnccgcttcacttgggtattctttttacaggataaacctgaaacccaagaatcccacaagcgcttcttaaggcaagctcgaaatgagtttgagctaatagttaagaagataatgagcgacaatggatctgaattcaagaatcttcaagtggaggaatatattgaggaggaaggcatcangcatgagtactcattatgtcacactcngtnttggaaggcanaccgaatgcanaccatgtacgtgccatgatcagaaattcacgtacacaacaattt

SEQ ID NO: 24047 - DNA, 291 bp, Zea mays
  unsure (1)..(291): unsure at all n locations
gctggcccaagatttgtggccgagcatgaggacacatggcattcttcgtagccttgcagtgccagcacggcacgtacatcggcgccataggctatggcgagaagcgagtctaanaacgacattatgtcgtctaggggtctaaacgttaaaatgtttcanaaatgactattatacaaaanaatcggaccagtcgccatgggggaaccaagagtcgtgtccccgccgtcatgagatccgtcaccgacgtcacagaatctgcaaacacaacgatgcccattgggtctagttgct

SEQ ID NO: 24048 - DNA, 488 bp, Zea mays
  unsure (1)..(488): unsure at all n locations
tcctctgagtcacctgcggcatgaagcttcgtattgaaaccgacttaaagaatattgttcttttagtccataaaggtctgagtcaatggtgtaagcttttataaggggcttacttgtaattcctcacaggctgcgtcctgtgcctataaatagtgaacagtattccattactgttcacgcattcgagtgattgcaatcgcatcttctggaatccaaccttttgccaaggcaaaggtattattgtattcaatgattccatacattaaataaatacaatgaaatttgtctttgatgtatttatcccttttatatctatttatgtcaccttataatttttactgaaattntattacgaagataaaacttcgaattatgtcttatagccttcgccaaggccattatctcaaggaatatgtccatggacgaagacttgcattaacacttatgttgcttgtctaatcataacagtggacaagtccaacatgcgc

SEQ ID NO: 24049 - DNA, 287 bp, Zea mays
tgcatgaaaattcacataccgtttgtgagcgcttcagcgagaaaacacgctatgcttgctttatatgcatgtgtgaaggaaagagatcccttatgacgagttctgataagactgtatcttccaaagcttacttcgtgccttagcacatattcatattgacgaagcatttgctgaagattggctacatattcgaaactgtggctgtagatcctatatgacgtatgatgttacgtcatgcacatatgatgtggttgtctgatgcacaatgatggtgatgccaatgacac

SEQ ID NO: 24050 - DNA, 269 bp, Zea mays
  unsure (1)..(269): unsure at all n locations
tcaagcttccgcaaggaccaccacacaagtggtgtctcttgccttgcttacaantgagatgatcgcacgaaataattaaagaaagaagcaatccaagcgcaagagctcaaaagaacacaacaaatctctctcactaatcactaaagccttgtgtggaattgggagaggattagatcactatggtgtgtcttgtattgaatgcttagctcttgtaagtagtcggaaggtggaaaacttggattacttgaatgtgggggtggtggtggtaa

SEQ ID NO: 24051 - DNA, 414 bp, Zea mays
  unsure (1)..(414): unsure at all n locations
agcatgaccgtcttatcttcttggcttacgcgagcgtatagtttctacaaatttctttcttcctcctcatactcatttgtgcttacgctatcattagcattagccacacaacacatgtgggaattgagatgggaagacaaaccttttggagaggtggattcatcggttggtctacaccgctcattttcttcttacttgcgagggttagtatcacagatacccaatgaacgtgaagcactatatgaactatcatgtttggactcaataaattngcttttaattctaagtcaaatatcatgtacatcacaaattgggtttgtcatattttattatgaaggcatgataatcttctttgctaagggattacttacgatgtcatagcttatagttaagcgtatcatcttaaatcttttc

SEQ ID NO: 24052 - DNA, 509 bp, Zea mays
  unsure (1)..(509): unsure at all n locations
gtcacctgcggcatgcaagcttgtgaaatgttactatgtgagggaacctactgtcttcccaaacaatagttaaaagattctatgttttaccaaaaataaatagcatacctctgaggccattagatttctgtatatctctgcaacgtaggtaacacacatttgaggatcaccattatttttgtcaatatctacaatgtttaaaccattagagacccctgtaacaaaataaagattctttagctgttatgcgcacttaatatggagatccttcaagtatctcagaatcagttgggcaaacacaaatttatagtcacagttttgttttttcaatgatccatggctaaagaatggccaaatgataatcaagagtctcctcagagaagatgcaagccagtcagcaattcaggataacatgacangccaatagtacccctaagtatttttgtggaaattagtgcacttgtgacctctactaatttaactatggtacatatatttaagatgagatc

SEQ ID NO: 24053 - DNA, 357 bp, Zea mays
  unsure (1)..(357): unsure at all n locations
aaagcacgaactactcatattccggggctaagcataactactattgctcggctcctaaattgagaactatgctaaatgcaacttatgagcactaacgttaaagcatctcatatgcactcaaaaagggagaaaacatctagcgaaattcattntgaaatgccctaaggggccacacaattagaattttgcataacacgaccctacacgattaccatttatacatgcacggctctagccaaagtgaagaaaaacttcactacccaatgcatgcagaggactgggcataactaacattagaccaggcagttctcttatgtcaggctggccacaactcaatatgaacatctctgatgggta

SEQ ID NO: 24054 - DNA, 493 bp, Zea mays
  unsure (1)..(493): unsure at all n locations
gcttctaagggagaacacgtgataggtctaaccaatgtacatttcgaaaaagatagaccttgtgcagcttgtcaagcatggaaacaggtgggaggctctcatcacaccaagaatgtgatgacaacatcaagacccctggagctgctacatatagacctcttcgaacccgtcgcctatctgagcataggaggaagtaagtatggtttagttattgttgatgacttttctcgcttcacttgggtgttctttttgcaggataagtctgaaacccaagaaatcctcaagcgtttcctcaggagagctcanaatgagtttgagctcaaggtaaagaagataaggagcgacaacgggtccgaattcaagaatcttcaagtggaggagttccttgaggaggaggggatcaagcacgagttctccgctccctacacacctcagcanaatggtgtggtagagaggaagaacaggacgctcatagatatggcgaggactatgc

SEQ ID NO: 24055 - DNA, 416 bp, Zea mays
  unsure (1)..(416): unsure at all n locations
agcttgtgaagggtcttcatccccacatgtgctaagcggcgatgccacagccagcccatgctagtcttagcaattaagcatgcatctagaccggcctcctcttttgcaaaatcaactaagtaaagtttgccgtctaatacacccttaaaagctagtgaaccatcactttntctaaagacagacacatctacatttgtgaataaacagttatatcccattttgcataattgactaacggatagcagattatattcaagagactcaactaaaaacacattagaaatagagtgctcatttgatattgcaattntgcctaagcctttcaccttgccttgattcccatcaccgaatatgattgaatcttggggatccttggtcttgacataggaggtgaacatcttcttctccccagtgat

SEQ ID NO: 24056 - DNA, 296 bp, Zea mays
  unsure (1)..(296): unsure at all n locations
ttcgcttcagtctatcatccgcagtccaacggggtcgnggttcttttttatgggaaaatcttcacagctgtcaaaaagaatgctcctcgatgaaaaaaaggcagatggaccgtattattgccggaggcagtctgggcgctaaacacaactgagtgcagggcgaccgagttcactcctttccgccttctatacggatcggaggcaatgaccccgcaagaaataaagcatgggttcccgcgtacagtttcgtcagccgttctcgacgtggacgagtcaacttcaaaagatctcattga

SEQ ID NO: 24057 - DNA, 450 bp, Zea mays
  unsure (1)..(450): unsure at all n locations
gtacctgtgagaacctttgaatgctcttctnnttatgtcaaccattcatgcagaattaaattcccctgaggccatttacgtacgaaatggatttcctcaaccccatcaaaattgttgctttttaagcaaccggcttctaacgaagaaacttccattactgccaatttgactggcagagtgggccccacatttaggtactaaactaactggaacttgtaaggtnnttttttgctattgtgattcacctcgaaggactctatcgcactttgtatgtactaanaaatctgtactactattctgcaaacatcaaattgtctgcatgtgacatcgcttctgatatagatctcgacactcacttcactctactggaacaagacatggatatgtcccatgttctaagttgtcagcgttggctgtcatttgctggtgttcaacctgttcactgaactc

SEQ ID NO: 24058 - DNA, 443 bp, Zea mays
  unsure (1)..(443): unsure at all n locations
atgggtatatagtattgggccccatcaagtgtcacatccggtattggaaagcaaaccgaatgcgaaccatgtacgcgccaggatcagaattcacgtatatagcgtttacataaatgactcatcatatcacaatgctttgaataataataaagagttaggtataatattacagactagattcatttacataatataaatttaagtgcacataatagaaacgtagccaacgtaaataaacccaccacaggcagctgactggcgaggctggtagcctaatcctcgagcttgtcgaagtcctagaactcctggagatccgcctcgacaccttcttcttggttacctgagcatatgttgcaccanaggcaacctggtgttatgtgaatagcagggtgaatacacatcaacgtactcangaaatgtcccgtttggctgaggtggactat

SEQ ID NO: 24059 - DNA, 378 bp, Zea mays
  unsure (1)..(378): unsure at all n locations
cactaccacctcatccttttccggcttcggagtaattttctcttctcaaaacttaccagctcctttnttgcttcactaaaatagcccagcttcatcagcttagacatatcaccttcggttacggtggatttcccaaactctaagtggctgggtttagatggcacagcgctgtaatcatcttcagattcaatttcctcagcatcaacctgttcagcttaagcggcaagtgcatcctccggtactaccagtcctgaccgttgcatacttcaaatattggagcggtttcggcatcttctgcttcctctccgatgcgagtaaccctagctgttgagcgtacccaagccatctaatgatcgaatttctttgtttttggtgaag

SEQ ID NO: 24060 - DNA, 497 bp, Zea mays
  unsure (1)..(497): unsure at all n locations
cttcaaagatgttcctaagggagcgcagagtangttccgaagctccaaagtcgctcctaagggaatgcagagctaaagataccacctaaatccaaggtgaagaagctcaaaagtcattcctaagggaatgtagagcttaaatgccacctaagtaaaaggtgaagaagctccaaagtcgttcctaaggggatgcaaagctgaaataccacctaagtaaaaggtgaagagactccaaagtcattcctaaggggatgcagagtctaagtgtgtattcgctgggtttttaccttcggcataaacatcattctgcatcatatcatcatatcatatcgtatagcatcacatcataccatcatttgcatcagcaaatagccatggagaagaaggaaaatngctccttcggagatacttgtcggatcatganataatgntgctgtagcacaacatataccttggcaggaatattttattacacgatgctaaccttcgtcaacagt

SEQ ID NO: 24061 - DNA, 336 bp, Zea mays
  unsure (1)..(336): unsure at all n locations
cgtttcttagtccccccacatgatctttcctcactctttaatcgttagaacgaggattangctctgataccaattgaaagttgcctagagggggggtgaatatgcaagttaaaactttttcaacaaaaactataagcaaactgggtaaaactgaattgatctcgaaattcacccagtttactttggaaatgagatgttctaaatgatccacagggttcaaaatagtagatctgagaagggtacttnctcaaatccacacaccaaaaagatatanacaattcttttccgggatggtgagagaacgaagaacatgaacaaacacaatgagcatgaaca

SEQ ID NO: 24062 - DNA, 323 bp, Zea mays
  unsure (1)..(323): unsure at all n locations
cccctactacgagcaccccggngcaagataatataagcctcatcccccctctcgtgtttcatcttgcatcaatccatctggacagggacacgcagcatcacattcactggtcggttgagggttctcgcgggtccaaaacgccgacaattggcgcgccaggtaagggcccgactgtgtgttggcaataccttcccgttgagttctagatggataatcttcagcaacctcttcggcccgggacgatactccgctttgggagtctcgagttcatgtcccccgacggcagctacgacatggtactcctccccccgcagcatgacaac

SEQ ID NO: 24063 - DNA, 350 bp, Zea mays
  unsure (1)..(350): unsure at all n locations
agcacattntatgactaaccaatgttcattttgagaaagacaggatttgtatcgcatgccacgcaggaaagcaagttggagcccatcatccacacaagaacatcatgacgaccgacaggccgcttgagctactccacatggatctattcggcccgattgcttacataagcatcggcgggagtaagtattgtcttgtaatagttgatgattattctcgcttcacttgggtggtctttttgcaggagaaatctcatacccaaaaacccttaagggattttgagacgagctcaaacgagttcggataaggatcaagaaaatataagcgaaacgggacggagttaaaactctaa

SEQ ID NO: 24064 - DNA, 491 bp, Zea mays
  unsure (1)..(491): unsure at all n locations
gtcacctgcngcatgcaagctatgggaactatgtctgtatccaatctatctgattttaatctantaagcgctggcagatgcccctattccggtcgaccacgaccagcgcccaacataaggcttccctagttatttagccaagggcgtcccataccaccctcatggtagcacttgtttttccgggtggtcactccatgttccaattaaatcatatgatctttgttaatcatcggattaacaacaataatgtatacttaccatttggaacattaatatcataaacaggagtgatngcataaagttaagttgtagcaatagcatagctacgaaggtaaagtataatacccaagtttgataaaggaatacagtagacaaggttatgtgtatccgaataggtaacccatcanattatgcatatatatatatacaagaataaactntattaaatgtattgcttggatcaaatagagtatgcagaggtagaagtccac

SEQ ID NO: 24065 - DNA, 449 bp, Zea mays
  unsure (1)..(449): unsure at all n locations
ctcagcttctaagggagaacacgtgatatggctaaccaatgttcatttcttataagatagaccttgtgcagcttgtcaagcagggaaacaagtgggaggctctcatcacaccaaatatgtgatgacaacatcaagacctctggagctgctacatatggacctcttctgacccgtcgcctatctgagcataagaggaagtaagtatgggctagatattgttgatgacttttaccgcttcacttgggtgttctttatgcacgataagtctgaaacccaagggaccctcaagcgccttctcaggagagctcaaaattgagttgagctcaaggtgaagaagataaggagcgacaacgggtccgagttcaagaaccttcaagtggatgagttccttgaggaggaanggatcaagcacgagttcttcgctcctacacaccacagcaaaatggtgt

SEQ ID NO: 24066 - DNA, 476 bp, Zea mays
agcttgtggcaaccttgggcatcctgccgcattcttataccaagtctcccacctggaagtctcggggccgaacacctcgggcgtggtagcgtcgcatagactgctgataccgcgccgagtgtaataaggccatgttccgagcctcttccagctggtccagagagtcttctcggctggtctgggtgctttgatcgtcatacgccctcgtcctcggggaaccgtattctaagtctatgggcaagatagcctcggccccatagactagaaagaacggtgagaaacctgtggccaggcttggcgtcgtcctcagaccccagaccaccgagggtattttcttcatccaccgcttgccgaacttgttgaggtcgttgtagatcctcggattaagtccctgcagaagcatactcgtggcacgctccacctgcccatacgtcatggtgtgagctacggcagccagtccacacggatgtggtggt

SEQ ID NO: 24067 - DNA, 415 bp, Zea mays
  unsure (1)..(415): unsure at all n locations
actaagctctcatttcttggttattggaatattcaacttggccaaacaatcttttattcgtcggtcagagaaattcaatcccttcttattcttattctttgaaacgtgtgattctttgttctctattgccactttattcatgatatgatatgttgtcattattatctcacccccaccatttcttacatagtctcgttgtctctaatatggtattaaccaactcagttaaaatgtgattctttctttcgacaatcctattggattgtggtgagtatgatagtgcactgtcatgaatactgtcatgaccaccatagaacttagaaaattcatttgagacatattcccccacgtgatcaggccttaaccatataactttcttctcaagtngactatctaccttagtcttatagatcct

SEQ ID NO: 24068 - DNA, 480 bp, Zea mays
agcttctaaagggtgagcacattctatgattaacatatgtttattttgagaaagacaggatttgtagcgcatgccaagcacggaagcaaattggtgcccatcatccacataagaacattatgacgactgacaggccactggagctcctacacatggatctattctgaccgattgcttacataagcatcgacgggagtaagtactgtctagatattgtggatgaatattctcgcttcacttgggtattctttttgcaggacaaatctcatacccaagaaacattaaagggattcttgagacgggctcaaaatgagttcggttcgaggatcaagaaaattataagcgacaacgggacagagttcaagaactctcatattgaaggctttcttgaggaggagggcatcaagcatgagttctcttcacctacacccctcaacaaaatggtgtagtggagaggaagaatcgaactctattggacat

SEQ ID NO: 24069 - DNA, 387 bp, Zea mays
tatgtgatgagccaaacaccttagttccatagcttaaacaaaagcaacaattttggcttgatcctactagccatgtaagtattggatttgaattctataactgatgtattctgtcacattatatggttcccttgactaaagtttagttcgtgtcatatcaaatatttaaatatcattatgagtatcacatataggcttattagggttaataaatatgtctcgtcttttagtcttcatatgtgtaactaggtttataattagactatatttaataatcataagtagtgtttaaacatttgatgtgaaaaaaccgaactttagttaggtgaaaccaagaacctataagtaggggtgtaaatggtatagatattatacgagcatccgatc

SEQ ID NO: 24070 - DNA, 186 bp, Zea mays
aaatcttcatgaagtttccgaatactccgtattgattaccacatcatctacgtaggcctacacacgcttgccccagtgatcggcttagcacgtttggatggctctctgataagacgctccagcgttattgacgccgaacggcatggaggtataacagatagcaccatacggagtgatgaacgctgt

SEQ ID NO: 24071 - DNA, 358 bp, Zea mays
agcttgtgaagattcttcatcccaacatggtctattctgcgatgccagagccaacccatattagtcttagcaattaaacaagtgtcgagttcagctctattgaaatcaactaagtacagctgaccctctaacactcccttaaatgctactgaatcatcacttcttctatagacagtaacacctaaatctgtaaaaagacagttgtaacccattttgcataattgagaaactgaaagcaaattgtaatctaatgagtctacaagacaaacattggaaatagaatggtcaggtgatataacaattttaccaagtcctttaaccaaaccttgatttccatccccgaatgtgatagctcttt

SEQ ID NO: 24072 - DNA, 425 bp, Zea mays
  unsure (1)..(425): unsure at all n locations
ctcttgcgctcggattgctttcttctttgattctttcttgcgaataactcaattgtaacatatgcaagaggcaccaattgtgtggtggcccttgcanggaagttttgttcccgtttgattgagaagaagaagctcactcggtccgagggaccgtttgagagagggaaagggttgaaaaagacccggcctctgtggcctcctcaacggggagtaggtttgcgagaaccgaacctcggtaaaacaaatacacgtgtcacactctttattcgcttgcgatttgttatgcaccctctctcgcggactcgattatatttctaacgctaacccggctcgtagttgtgattaactttgtanatttcnagtttcccctattcacccttcctctaggcgactntcaattggtatcatagcccgatgcttcatta

SEQ ID NO: 24073 - DNA, 99 bp, Zea mays
accagcccgtccaatcggtctggttcttggaacgattttttctttaagagggtagtggctctattggaaaacacttgagccttttcattccactaaaat

SEQ ID NO: 24074 - DNA, 467 bp, Zea mays
  unsure (1)..(467): unsure at all n locations
gactagagagagtgatttgtagtgtttattttagctcttgcgcttggatcacctcttttctttcgcattctttcttgagatcatactcacttgttatagaggcaagagacaccaattgtgtggtggtccttgcgggaagtttgattcccaagtgatttgagaagagaagctcactcggtccaagggaccgtttgagagagggaaagggttgaaagagacccggtctttgtgaccacctcaacggggagtatgtttgcgagaaccgaacctcggtaaaacaaatccttgtgtcacactctatatttgctcgagaatttgtttgcaccctctctcgcggactcatttttatatctaacgctaacccggcttgtagtgtgttatatatgtaatttcagttcgcctattcaccccctctaggnactataattgtatcaagccggtgttcattaacctaccgtcatgtatgt

SEQ ID NO: 24075 - DNA, 163 bp, Zea mays
gcgctcggaccaaagcatacaattctttgtcatacacagaataatttaattgagcacctgccaatttttcactaaaatatgctataagtttttcttgttgcattaaaactcctcctatcccaatcccactagcatcacattctacttcaaaaagtttagtgaa

SEQ ID NO: 24076 - DNA, 503 bp, Zea mays
tgcagcttctaagggagaacacgtgatatgtttaactaatgtgctattcgaaaaagatagaccttgtgcagcatgtcaagcacgtaaacaggtgggaggagcacatcacagcaagaatgtgatgaccacatcaaggtccctggagatgctacatatggacctcttcggacccatcgcctatctaagtataggaggaagtaagtacgggttagttattggtgatgatgttttcccgcttcacttgggtgttctttttgcaggataagtctgaaacccaagggaccctcaagcgcttcctcaggagagctcaaaatgagtttgagctcaaggtgaagaagataagaagcgacaacgggtccgagttcaagaaccttcaagtggaggagttccttgaggaggaagggatcaagcacgagttctccgctccctacacaccacagcataatggtgtggtagagaggaagaacaggacgctaatcgacatggcgaggacgatgcttgat

SEQ ID NO: 24077 - DNA, 478 bp, Zea mays
  unsure (1)..(478): unsure at all n locations
agcttgtgaagattcttcattccaacatgagcaagtcggcgatgctagtgccagcccatattagtcttagcgattaagcaagtgtctagttcagcattgttatcattgaaatcaactaagtaaagttggccatttaacactcccttaaaagctattgaatcatcacttcttctaaagacggtaacaccaacatcagtaaaaagacagttttagcccattttacagaattgagaaacagaaagcaagttgtaatctaaagaatccacaagaaaaacattagaaatgggatggtcagaagatatagcaattttccaaaacctttgaccaaaccttgattntcatccctgaatgtgattgctctntggggatcaatcattttctcatatgaggagaacatccttttctcccctgtcatgtnggttgtgcacccgctatcgattatccaacttgacccgccggatgcataaacctacaaaac

SEQ ID NO: 24078 - DNA, 141 bp, Zea mays
aatcctacgtacaacaagatgacgcccgacgaaatacttggaaagtttgttagcgggcgaatgatgatcaatgaggcaagatatgttgatgaggcgttaaatagcccaattcacgagcctcaaaacattgctctaaaagca

SEQ ID NO: 24079 - DNA, 413 bp, Zea mays
  unsure (1)..(413): unsure at all n locations
gagcttncacgtgttcgacgcgagctggcatccgggggctctctcatagcacgcccgtgcgcgaacccccgcgcgcccgcgggcgcccgtgaccacgcccgcgccacgggtataaagcccgccccagtgcttggctgccttccccgttacctcctccgtaccttgcctgacttacccgagccagccattagctccggcgacctccccgcgacccgccagtgccgcccgagagcaaccaccatggccagcccctctcccgttctccttcgttcggtccaggccctcagttagcttcctggtgaagccgtgagacttgctcaagcttgacccggtgaccctcgtcaccggaatagcccaatcgcgctcaccggagttcaagaacccgccggtgcacgtggaccgggtaagcccct

SEQ ID NO: 24080 - DNA, 248 bp, Zea mays
  unsure (1)..(248): unsure at all n locations
tatcttcagagctcattagcattccatgaccttataacttcatttccctccatgtcttctaatctgtagaagcctggttttgtcgaagatgacaccagaaagggaccctccaactttacttgcaatttgcctgttgtgtctgggttggccacactttggagcactagatgacctggcgttatgtgttttatcttggcccttctatctcgccaccatattngttctccctgatactttcttatatgctc

SEQ ID NO: 24081 - DNA, 504 bp, Zea mays
  unsure (1)..(504): unsure at all n locations
agcacctgaggcatgcaagcttcggattcccaactatagaagacggactntctgtgctgtctaataacgatctggctgacagcctagcttacaacagtttaaaggtgcgacaaatggaattcttgtattttttgttgagttcaaaattnttcgtttgtttaaaactattgacacagacatattcctgtttgcagggcctgatactcagcaatgccctcagggcacagaaagatgctgaggacgaaggatgtactatagccctgagcaaccttcgttccgaagtaattgaactgaggaacgaaggtcttgaaaaagataaaatattatactcattgataaataaaataaaggaagacgaagctacttttaaaaatcaagctgaagctcagaagcgtgaaattgaagaccttctgatacaactgtccagagccaaggaagaacgcgtacttgaagagacaaagcgtgaactgagcgatcaatgggcagatcacctagaagtgactg

SEQ ID NO: 24082 - DNA, 413 bp, Zea mays
  unsure (1)..(413): unsure at all n locations
ttcagctctcacgcttgcttcataatatttcttttcttgctcgaatatttctgaatgtcggagcaaatcattctttaatttgtcattttcagtttggacttcatccaaagagccctccacggtttgaataacaaaatacttcttttctaatgcaccttcgtgctctatgaccatgacttcaagggtttggaatgcgaagtctttcttttcagaatggcttcgtggtttcaacttttcagccaaatcttgataacggctttgttttctcctcctcagatcttgttcattttaaaaccttgctaataatatgctctgcnaaacgatcttcttagaacacgacctanaagatatataatggtataaaaaacaaaatattcgtacctcgaagtagcatacgcaagctccgcgatgtg

SEQ ID NO: 24083 - DNA, 436 bp, Zea mays
  unsure (1)..(436): unsure at all n locations
agctataagagaatggagctggatggtgttacttacattgtatgtatccgttgtgggatggagcgaagccatatgagtcgcccattgccgaacgatcttgttgttcctgtccaccttgaagttggccaggaactntgcctttacttcttggatcagctgctccatgtgctcctcgaactggagctgatcgtcagtcgacaaggtttgccaagtctgttctatgatattgctaggggagactttagagttatcccttgaactggccattgatggacgatatgatatgtctatatgtgttgtccatagcggagtcgacaaaaagtgtgttggcgccgatccgagcaccaatcactgcgatgataaccggcggcggtgctatttgacaggcgcagtctcctatccgtggccaggggccggacggtccatgacctagagt

SEQ ID NO: 24084 - DNA, 367 bp, Zea mays
  unsure (1)..(367): unsure at all n locations
tatctaacactgattgagatgatntgaaggtgttcaacatagacctctatagccaccagtgcatattgcgatcgtaagacgcgatggtaatgggaatagagaaatgggacagctgaaattgacattgaagaggtagtaaaaggagacttgtaaggatagaatataactaaagctttagtcttgaatatgagcaaatggaaaaaaaatccacatgtctaaatcttgatttgtggcttatattgagtttaactctagcctaatctaacttgctttggactaaaagactatcgttgatgtggattgcgtgcgttgtggtantangggcatgtacgatggatgcaaacgctggtggtatggtaaattgttg

SEQ ID NO: 24085 - DNA, 454 bp, Zea mays
  unsure (1)..(454): unsure at all n locations
agcttgagttatgttattacagaccagactaaacgttagtgcagagtagtagtattatacaaaccagggaggcacaaactcctcccgagaagctaaaagcaaaagatcttaagtggaggaccgagtcctcccgcacttcagtcttgattatcttcttatggaaccaccttggcacagaagcagcaaaagtctgctacttcctcacctaaaaacaacgaagggataaaccctgagtatggaatactcagcaagtcttacccgactaaagaaaagactctcaagggtatgctggttatatgggagtcaaggtaaggctnttcattattcaaagactctgttttgcagaaatgcttactaaagtggatccttaaaaatccagtnttatttgtcaagttaagtaaaattactggcactagagttcttttctaccctagtcaatcactggtcctgcact

SEQ ID NO: 24086 - DNA, 330 bp, Zea mays
  unsure (1)..(330): unsure at all n locations
acacattatactaagctctactttagcttcggcttgaaacagtattttagtgttttctaatatgtctgaagctgctaagaaggctgctgctgaaatgaaactgagtcttgatgaatagaagaacttanggtttcttatagcaatgtctaataccaacacacaaaagatcaccacggaaattctggaagggctgtctgaagatactggtgacagtgaaagttatgatgtggacagcggtggcgaagactccgaagatcgtccctggcgaccaagccattcagtttatggtaaatcaactatcacagagagtcatcttgttatatgagagga

SEQ ID NO: 24087 - DNA, 381 bp, Zea mays
  unsure (1)..(381): unsure at all n locations
ctaccattaattnttcagagctgtcccaaccaatgatgtcatgatctgcatctttatcacttataatgaaaaatagagaactaagttatgtcaatgggtgctccaacattttgctcacaagaaatataaggggaatgaaggatatatgatattgtgaaagatattacaacagaacaaccaatgtatgcccacacatttctttgctttgatatgacacaagacaaatattacagttgaacttagcagtcttagatgtagcaagaaccaacttcaatngaaatacgaaaggtatatttgcagcaacaatagatgggatgtcataatgtccagtagaaccatgagacacatccattcccaagatatagttgggaccttggatac

SEQ ID NO: 24088 - DNA, 144 bp, Zea mays
agacggaacctgcggccacttcataatgattggcacgcaaccctgcggcgccgggcgttacaattttgttgcaggtttatcaattttgctacatcgctaaatactattagcgcacaccatctttatgggccaaaatgctaaaaa

SEQ ID NO: 24089 - DNA, 438 bp, Zea mays
  unsure (1)..(438): unsure at all n locations
agcttctaaagggagaacacgtgataggtctaaccaatgttactttcgaaaaagatagaccttgtgcagcttgtcaagcatgtaaacaagtgggaggagcgcatcacagcaagaatgtgatgaccacatcaagacccctggagctgctacatattgacctcttcggacccgtcgcctatctaagcataggaggaagtaagtatggtctagttattgttgatgacttttcccgcttcacttgggtgttctttntgcaggataagtctgaaacccaagggaccctcaagcgcttcctaaggagagctcanaatgagtntgagctcaaggtgaagaagataatgagcgacaactggtccgagttcaagaacctatcagtggaggagtttcttgaggaggaagggatcaagcacgagttctccgctccctacacaccacaac

SEQ ID NO: 24090 - DNA, 451 bp, Zea mays
gtgcagctcgatagtgaatacaaccaagagcgattctagagatgctatcttatagacccacatgcatgtggggaaggctcgagggctatccatgtatttacctaactaagagttatgttcttatgaggacatctttgctaatggcaccaacaaagactatgaggaagcatgagcttctctatacctctataaaaatactagagccattagctggagttcgcatctattatttaaactctgatactttatttgttgcttaactaggttgtgtgtttactattagtgaaagtgcaatcaaccctaactgagggttttggtgatttaatgacaaaacaaataagggtactaacaagtttgttcctagtatatactcagtgtctacagaaattgaaggagttacaactttagttcataattggaaagaaagtttaaggacaaagcaacacataat

SEQ ID NO: 24091 - DNA, 383 bp, Zea mays
tgagctcgatggtgacaacatggtggaggggaatgatagtggtggacatgatggacggcacaacagatgagacgacagtatgagaggaggaggatattacaatgaacatggatcgagtgataagcccttggctccgataccatgttaattggcttagctcgatgccctattagggctgctgggacttgctttccgatgcaaatggatccaacgggggagtgtagcaacgcatacagggtttttgcacgagatggctatagctctgttaatctagcctctcaagggcactgtgcggtggtaaatataggtatctgtgtgctcagcgtcctgtgttaaggatgcatgtgccctcagacacctaggttatcccccgaatattccca

SEQ ID NO: 24092 - DNA, 382 bp, Zea mays
  unsure (1)..(382): unsure at all n locations
agctngttagcaatatgagggcaaaaaacgacccttggtttgcggagtatttgctgcacgtaggtggtggaactgaggtcacaaatagtgatggcgacatccgtcttcctgacgaggtatgcgtgccttatagtgggagtgacaatgatcttgacaatctaatagacttcgttttcccagatctcaacgaaaaaatgtcagattccacctacattacttcaagggcgatactgtcaacgcggaatgactgggtggatatgataaatgctaagatgaatcaatcgtttaaggggagcatatggtgtaccatagtttcgatagcgccatggatgatccccataactactacccacctgagttcctaaacacactgacgcctaat

SEQ ID NO: 24093 - DNA, 495 bp, Zea mays
  unsure (1)..(495): unsure at all n locations
actcagcttatgaccccaaaattgtctaatttgttaggggaatgctctcatttctcacgataacgagggctatattntatatcctgctggttatcccgagcataagattatgagaattcatgctatgaaacctcataatatttcacatcatgcttttatgtataaaaatgaggcttctagctctaggcattctacccatgttaaaatgcctaaaaagaaatctcctattgcatcaaatgaacctaatgtttatttaagactcttgatgcttcatatgtgcttactaacaaatcangcaaagtagttgccaaatatgttgggggcaaacacaanggctccaagacttgtgtttgggtacccaaggtgtttgtttctaatgtgaaaggacccaagaaccgttgggtacctaagaacaaggcctaaacttgttttgtaggttatgcatacggngggctcaagttggatcattgatagcggatgcacanaccacatgac

SEQ ID NO: 24094 - DNA, 373 bp, Zea mays
  unsure (1)..(373): unsure at all n locations
aaactgacggttttgagtataatgttgaggattgccttatattgagttaacccattcattnccacgattacatctatatactggccctttagaacaatcaatgttagctgaaagttccgttcgggcatagatggcacttcatatgccacctctttagttaaaatatggccccaggtgaatgaactttatatccccttctttgattcatggatagcaatatgatgttgctccacaaatgttttgcttatgaagggttgcgaagcaccagaatacaaaagaattagtgtgggtgactggccacatgaacgacccattatatacaatctcccacaattaccctaaataccctacatacactacttacttctataca

SEQ ID NO: 24095 - DNA, 227 bp, Zea mays
tgcttgaggcgcttggcctcaatgacgtcacttgggtggtaatatcattgcagaaacagggatattggggcctgccaatctttagtcatgatgaggttgacgatgcgatggccttcggcgtcgttggttacttgtaagccctctaagttgtggacggctaatgtgcctatgacatggaagaacacgtcggagggcaaggtctctgctctggccgctaccttagccaa

SEQ ID NO: 24096 - DNA, 209 bp, Zea mays
tgtgtgagccctcggcgtcttgtcgtatccgaagcaccagatcttctattgtaaacctcggagccgaatccttcgggcgtggtagcgtcgcagagactgctgataccgcgccgagtgtagcaaggctacgtcccaagcctcttctagctggtccaatgaatcttctcggctggcctggttgcttctgtcgtcgtaagactttgtcctct

SEQ ID NO: 24097 - DNA, 304 bp, Zea mays
taattaacaaaaggggggaatcataagaaacacataagatgtagaaaattgatgagtgcatactatgtcatgagcatcacatttattttatgacacactgcaccccatgaatagtatgatataagttgtcttcactctttgacccaaatatgtgcttttggcatatgaagtacaatattggtattttctgaaatgcacatatttagggggaggaaactatatcatatgatttaaaatcctatttatcaaatctttatgtagctttaaatgtgtcgtcatcaatcaccaaaaaagggggagattg

SEQ ID NO: 24098 - DNA, 347 bp, Zea mays
actaagcctgagggtctcggcgtatatgatgttgaggcagctgcctctcttttcttgttcttggtgagcctgacatcgacgacaactgtgtcgacaacgagcgggtatcttcacgggctctgcacatggtcggtgtggtcggtccggtcgaaagtgattggctcgtcagaccagtctaagtagactggcgccaccaccttcgccgagcagacctaccggcgctcttgcttgctgtgcctatcccaggatttcgccgcatgctcctcatagatcatgaagcattcgcggaccatcgggaaccccctgctgggtgttctcgatcttgacgactcgtggccctgccacat

SEQ ID NO: 24099 - DNA, 349 bp, Zea mays
  unsure (1)..(349): unsure at all n locations
atggacgngaagagagccttactcaatggaccgatcattgaataagtctatgttgagcaacctctcggctttgaatacagtgagtatactaaccatgtctataaactctctaaggcgctttatgggctcaagcaggccccaagagcatggtatgaatgcctaagagattatcttattgctaatggcttcgaagtcggaaaagccgatcctactctattcactaaaactcttgacgatgattngcttgtatgcaaatatacggcgatgaattatatatgggtctactaacgaatctacatgtgaagaattcagtaggatcatgacatagatactcaagatgtctatgatg

SEQ ID NO: 24100 - DNA, 430 bp, Zea mays
tcttaagtcacctgctgcatgcaagctttataatatgtgtaaaatcacacaatatttcttatttatgagaccaattctcttagaaccctaatttcctgtagtatttaataaaaataatctcatgagttttacaccaaatagggaattctagggcatttaaaatagcttaaagaataagtctggattttaaaagataatggaacccccaaatgtcacaattttattgaactcccacatattaaagcctgggttagttgaatgattggacatgttgatactaaaccaaaccccaccctgccttgaactcttaccactcgaaacctaatttcgagttcgtgaggaaagtgatcaaacataatataattatatatcttgctctctgccatacaggctcatctattattaccattgtatttaaaacaaaaaatga

SEQ ID NO: 24101 - DNA, 264 bp, Zea mays
gacacattaaaactcaagcttgtcacacacgagtgctacctaaggtaccctcgaactctttcttttaatgttcccaaattccttgagaaggcatcaatgcttgccagtgacatgttctccgtgaccgactcggttctgggagggttctcttcctgctgctcagattggcattcttggtttctggtcttcttgcggaattttcttgcggtggcgagcttcttcagtaacttgtcgtagtccattttgagggtgctgtaggcttca

SEQ ID NO: 24102 - DNA, 382 bp, Zea mays
taagcttacgtaaatctcaatctgaataagctctatcttttttgtgtgagagcgacattaagggctggacatgattcagtagtgctcattaatattgtgaatacagttttgtgacctcttagttccgatgctcaaaaatgatcctacggttattcttatgcggtatactctacagtatgtatgcctattattgactctatgatcacaaaaaacggcctttgctaattacacgttaatccagggtgcttatctttaattcccactatgatcggcaacgaaagtatttggcgtagaggaagcatttgtttataatttaacatagattgtacagatggattctctaactctatttaaaacacctgccatcgaaagaatactataa

SEQ ID NO: 24103 - DNA, 299 bp, Zea mays
  unsure (1)..(299): unsure at all n locations
tgcaagcttgtggtagaatatatgaagccattgcaccgtatatttataacattctgngaggatgngagcttccagatgtatgtccggaagaacaatcctgtagaatgtaaagcttcttaataatcaaagactttgttgtgcagaaatgcttacttacagtatatccttaataattcagttttatttgtcaaggtaaggaagaatacctgcagctagagttctgtctaccctagttcaatcacttgacctgcactagccaacttcgtaacaaattccttcatctttactggagttctacg

SEQ ID NO: 24104 - DNA, 266 bp, Zea mays
  unsure (1)..(266): unsure at all n locations
tcagcttatgctttacttctggcggtgatggttctggtcatgtgccgtanggatccacttctttntcaagaccaccccctccattccagtgggagaaggggagaacatggtcattcatgacgtctctcagttcatgaacggctgggcccaacagatgagaacatgcagcagcggaacattatctcggaggtggcagtttcagatttaatgagaacttttgaatctgatgaggggaccttttcttctatgctgttatagatactgat

SEQ ID NO: 24105 - DNA, 273 bp, Zea mays
  unsure (1)..(273): unsure at all n locations
tcacgacctatggaactcgagggagaataagatgaattatnacaaggcacacggcgaagctcatcctggcacagagtgggaatcacactggtgctctattgactactaaatgagggactatgtcgcactgtatactacacattatcccttcttctcaacgagtgtccacttgccttatggcaagagagacgacggaatcactcctaatgatgtcacttatgattctttctagaacgatgagtctagcgatgatgaaatacactactctagttt

SEQ ID NO: 24106 - DNA, 179 bp, Zea mays
  unsure (1)..(179): unsure at all n locations
acaacgctgttccagaatcgaagcacatatactgagggatatcctacttcttgaatnactgttatcttttatgccattatactatctgtatgagaaacaaggaatgaagaactcagtttcaatgtcttgtaataattctgcttacactacaatgaaatatatattcttcataaatatac

SEQ ID NO: 24107 - DNA, 178 bp, Zea mays
gtcttgaatctcttgatgattatagccatctttttctcgttgtattcggccgcctcaatttgtgccaccttgctaggtagcgcctccttgcttcttgttccttgagagcgagaggatgccgcctgttgtattggccatttaaggcgtcgtccacatatctctcctacatgatcataat

SEQ ID NO: 24108 - DNA, 308 bp, Zea mays
cccttatctaccatacctttgcaagaatgtattaaatatttgctgacacactaaaacaggttacaccagtttaaaaatatcagggttggtcatctgtaatgtcaaacagacttcccaaatttaaaaccatttatgtttctttatccgagcactaatgccaaataacacttctgggcaaataaatgattgcctattgtatgaactgcaccacaacctccctaaacgtgcatgcatttccaccccttgaggaactacagcttttttgatgccaccaaagtcactctggtatggacgtacaggttatttgc

SEQ ID NO: 24109 - DNA, 479 bp, Zea mays
  unsure (1)..(479): unsure at all n locations
agcttgcatattcaaagtcaacacaagatagtcgtgatcattctataaaccaatctcaatttctgctagcctctccttgaatctcgagggcgagattctgttataggggttagaattgtaacacccctaatttgcgggtataaaaattcgtctctagtatccaccaaattcaggtgttaccctcttcattacttgcttatctctggtttttttatataatggacattaaacttaatatatacttatatatgagttattggcatagtaaaataaatcttggagaagctttgattgttgcattcatgtcgtagcatagtgtttatgagtgcatagtgttttcaaactanatctaattatcttgatcttgtttccggaagctttctggaacctccgaaacatttcttctagttataagatgaatttagttattctaatattaagtaaatttctaatattagtatttgcaaaactacaaaatc

SEQ ID NO: 24110 - DNA, 477 bp, Zea mays
agcttggagaaatcccgcgataatctgcggtaataacacattctatccaaggaaacttctaacttgatgtacagtggttggcggcttccactctataatatccttgatcttgctgggatcaaccgcaacccctttgtggatagtacatgttccaaaaattggattttctccagcccaaacacgcacttgctataattagcatataattgatgttcccttaagcgcattaatacgatctgcggatgctgagcatgctcctcttcattcttggaatatatcaagatatcatcaatgaagaccaccacaaatttgtccaactcgggcataaataccgagttcattagatatgtgaagtgggcaggagccattgttaatccgaaagacataacgaaatattcaaataatttgtaccgcatagtaaatacggtcttgggtatatcttcgagtcgaatatggatctgatgatagcctgacctg

SEQ ID NO: 24111 - DNA, 347 bp, Zea mays
  unsure (1)..(347): unsure at all n locations
gcgcactgttcaccgatcttcagaaaaatctcgttttcgataataacgccaccgcagcgtggatggtcggtggccgccacggtaaaaggcttttgcaacgtggcgttaaaatggggaagtggcaggccatggttaatcggcggccaccgtgccatcaccgtggttttgtcgtagctaggctcgccgtaccttccttgcgcgtagactgatcggattagacctcgtcaccggccgattactggcgcgcaccacgtgcttaagcactagtactaatgtggtgacttcatcggtgcatgcccggcgatcactggagccactgcacggtgaaagccacnttttcccatact

SEQ ID NO: 24112 - DNA, 475 bp, Zea mays
  unsure (1)..(475): unsure at all n locations
agcttatgaagattcttcatcccaacatgggctagtcggctgtgccagagccaacccatgttagtcttagcaattaagcatgtgtccagctcagctctatcaaaatctactaagtatagctgaccctctaacacacccttaaatgctattgaatcatcacttcttctatagacagtgacacctatatcagtgaatagacagttgtagcccatttgacataattgagaaacagaaagcaagttgtaatctaaagaatcaacacgataaacattggaaatagaatggtcaggagatatagtcaatttaccaagtcctttgaccaaaccttgatttccatccncgaatgtgatagctcgttggggatcatggttnttctcatatgaggagaacatccttttctccccggtcatgtggttggtgcacccgctgtcgagtatccaacttgagcccncggatgcataaacctacagaacaa

SEQ ID NO: 24113 - DNA, 492 bp, Zea mays
  unsure (1)..(492): unsure at all n locations
ttgcggaccgggtggttcgggcgaagggctccgatcctcctcccgctgtttatcgttctccacgcctggggtggtagccttggcgcaccttctcgttgaggcaggctctacggtctcggtggtggtgctcgatgccgaagcgacccggggccgcatgcgctgtgtcccgcgtgcgtccggtgtggaccgaggcttccctcatgaatcaagaagtcgcggcgcgatgctccatggggtatcccaaccttctggaggcatagctatctgtccgtctgaacgcgccatactcangagattcttgagctctctcttgatacgccgcccctcggtggtggatggttccggcatctctcggagtatattgctgttgaatcaggtctggccacccactggaaccggggcagcttgcctgcgatgctgcatgcgatgctacgtctgggcaatgaccctattcgccggctcgctgccatctgccatgtctgcgactgacaa

SEQ ID NO: 24114 - DNA, 495 bp, Zea mays
  unsure (1)..(495): unsure at all n locations
agcttcgtcttgaccatgctattgtatacccgcaacctgattccgaagatacctcctcgcatacttggaaaacattgtcaaattatgtttttgaggaccttcggaagccgaaggcccccaacacatcggttagacatccagagtcaaatggacttgtcgaaagagctaacgacattataatgacaggaataatgaagttaatcttcaaccagcctaggggaaagtggccagatgaattaatcaaagtggtgtggagccacaacacaacaatgtcaaggtcaacaggttttacaccattcaaattggctattggtgacgaagcaataaccccagaagaagctaaagcgggatcaataagaacagtggcttcggcagaggacgaagctgattattctgtggcaaaagatgctatagaagggatcaggcttcatgctgtggagaatatcaataaatatcaagccgaaacaatanaatggcgtgacagaaaagttcggg

SEQ ID NO: 24115 - DNA, 208 bp, Zea mays
  unsure (1)..(208): unsure at all n locations
cacgtgatacgcgtgactaacgtacaactcgatatatatataccttgtgcagctcgtcaagcaggtaaacaagtgggaggagcacatcacaggaccgaatgtgatgaccacttcaagacccctggagctgctgcatatggacctcttcggacctgtcgcctatctgagcatatggggaagaaangatggtctaaatattgttgatgac

SEQ ID NO: 24116 - DNA, 442 bp, Zea mays
  unsure (1)..(442): unsure at all n locations
aacacatgataggtctaaccaatgtttatttctaaaaagatagaccttgtgcagcttgtcaagcaaggaaacaggtgggaggctctcatcacaccaaaaatgtgatgacaacatcaagacccctggagctgctacatatggacctcttcggacccgtcgcctatctaagcatatgaggaagtaagtatggtttagttattgttgatgacttttcccgcttcacttgggtgttctttttgcaggataagtctgagacccaaggaaccctcaagcgctttctcaggagagctcaaaatgagtttgagctcaaggtgaaaaagataaggagcgacaacgggtccgagttcaagaaccttcaagtggaggagttccttgaggaggaanggatcaagcacgagttctccgctacctacacaccacagcaaaatggtgtggtagagag

SEQ ID NO: 24117 - DNA, 268 bp, Zea mays
ttcgcttcagtctatcatccgcagtccaacggggtcgtggagcgctccaatgggaaaatcttcacaactgtcaagaagatgctcctcgatgaaaaaaaaggcagatggaccgatttattaccggaggcagtctgggcgctaaacacaactgagtgcacggcgactgtgttcactcctttccgccttctatacggatcggaggccatgaccctcaagaaataaagcatgggtccccgcgtatagttccgtcaacccgtcccgatgtgga

SEQ ID NO: 24118 - DNA, 517 bp, Zea mays
  unsure (1)..(517): unsure at all n locations
accggatccttaagtcacctgcggcatgaagcttacaaacactttagagttagagagagataataagcactattaaaaaccaacaacatgagcaacaaatgaaacacgaatcactctctctcaagtcactaatcactaatgatcacttgtctcaattgtggaacttggagagatttgatgctatcattgtgtcttagaatagattgctagctcttgtattgaatgtgtatgagtggagtgcttgggtgtagaaaatggaggtgtgtggggttgtatttatagcctccaaccacttcctagccattgctcctttcctgctgaccgtggacggtccgtgcccctggtccggacgggtcgcccctgcacatcaatgactgaaatcacaacagtcagcagtaacggctatagaagcattaatgcgtcgtcagatgtcagataaagcagtcgcggatggttcggtcgtgcaccccagatgatccacgatgacactatgnaatacatttaccanactcatcac

SEQ ID NO: 24119 - DNA, 350 bp, Zea mays
gagacacctaattatgcggtgatccttgcggggtcttatttatctcttagattaagaagaagcactcaaccggtctaagtgaccgattgatagagggaaagggttgaaatatacctggcctttgtggcctcttcaacggtgactaggttctttggaatctaacctcggttaaacaaatcaccgtgttcactcgtcaatcacttgatttgattttccctctctaaaagctcccttgctcatattgattcgagtttgctcccaaggtcatccgtatcgattgagcaactctaagcaaggagaactatctttcgcactccaatttaattctaacgctaaccccatccttagtg

SEQ ID NO: 24120 - DNA, 489 bp, Zea mays
  unsure (1)..(489): unsure at all n locations
agcttgacaacaccatatgacattntacataatatttcttatatcaagaatatttagttcatttctcaacatgctaaagcgggtcttatcaagaggcttagtgaaaatatccgctaattgatcctccgacctcactccttctaaaatgatatcttctttagcaacatgatctctaacgaagtgatgacggatatcaatgtgcttggtgcgagagtgttgtacaggaatattagctaatttaacagcactctcattatcacacaacagaggtaccttttctagaactacgccatagtctagaagagttngtttcatatataaaaattgtgtgcaacaagcacctgcggcaatgtattccgcttcggcagttgacaaggcaacactgtattgctttttggatgtccatgaaactagtgatctaccaagcagatggcatcctccagaagtacttttcttatcaatnttgcaaccggcataatccgaatcgga

SEQ ID NO: 24121 - DNA, 456 bp, Zea mays
  unsure (1)..(456): unsure at all n locations
tcagtgcctcacctatcattggtttatcatgaggactgtanctgacgtgggtaagctctggtgcatggcaagagccaaagggctccgtangatatggtcatagggcttcctccttggcttgtggtcgcaactagtctgtgtggcgagtattctcgaggtgttttgccccgcaaggggttgtaagagacgtctagactccctattctttcttcctaatataatgatgtgccgttcttctgcgtgtacgaaaaaaactggagatacttgggttgagtatggttgctgtatagcttttcccttttaattgaaggagggtttctccccagcaatgccagttaacatctgtggctctttttactttccgcatgtaccaccggagcatcatgtcatatgtgattcttccaagaactagtttttgcgtaccacttctctttctctattcgtacctatatcttt

SEQ ID NO: 24122 - DNA, 451 bp, Zea mays
taagatttctcaacttgcggtaagatttatctctttaattcctatctagggtaaagcttcctatctagagtcctatttgcaaaacaataaaacaatataactcgtttgaaatttttgtctaatgaatgcactctatgtgtatcaaacatatgcaatgccaatgctatgatgtcatgctcaaagtttagttatagtaacaccatgggtgttacattcttctccccataaaagaatctcgtcccgagattaagaatactacggcaggtaatggtaaaggagacacatcacatatttattatcttaatcttggtacaagacacgtgtaatgtgtgggtacttctctattaacagtacacacgctttcaatttacagaggtgaatacctgtaaattctattcaaaagcttgagtttccaatagtccatctcaaatactgatccactgtatctgtt

SEQ ID NO: 24123 - DNA, 437 bp, Zea mays
ctgcagcttgagatgcaacagattaaagaaaatttctttgttatattgaaaacctagaagacaaaattaaagatctaactactgcttttgagaataaaagagttcgaactccaaacaactgtaggtttactagcggaagccgaagctaaaataacagaactgaatacgaagcttctctatcagtcagaatgtatctaacaagaatagctgaagcttaatgacaaacttgaggctgaaatctataatggtttagttttgtaaaagatcattgatagacgcttagaacaaatgtttgaaattcagcaatcaatgtgttcaatgactgaagaatgtgttttattcacactgtgccagtagtgataaatgtattccttctgctgaagatctaccacgagccatcgaacacatcgaatgtgagattgatgacctcgatgatg

SEQ ID NO: 24124 - DNA, 256 bp, Zea mays
  unsure (1)..(256): unsure at all n locations
agcttctaaagggagagcacatttngggactatcctatattcattntgagaaagacaggatgtgtagcgcatgccaagccgggaagcaagttggcactcatcatctccncnngnaagtactgactactgagaggccacgggagctcctacacataaatctattgggcccgatcgcttacataagcatcggcgggagtaagtactgtctanttattgtggatgattattctcgcgtcactttgggattgcttttaca

SEQ ID NO: 24125 - DNA, 451 bp, Zea mays
ctggtcagtggacgttctccgcgaatacatctacaatattagttgtctctaccaactatagatgcgcgagaatactttaccgacaaacacacctatgagatctaccgtgatgcctgtctccatgggatgggaggagcgaaatggagctcgtgtctgagcgaaatacaagtgagctatgagacgggctcccggtcccttttggcgacaaataggttcagagttagttggactctatgcaactttgatcacctagtgagcatctctattcggaggcgagccttctaacacttttattgtggagtgcaaccgcggaagatgcatcggaagatgttgcaaatggcgaggttctttgctgagcgacaatgcgatatgttgttgtcaataaatggattgaatgagatatgattggtcaacgtttgatttgaaaatcatggattcttgtaatgatatg

SEQ ID NO: 24126 - DNA, 440 bp, Zea mays
  unsure (1)..(440): unsure at all n locations
agctngtggaggaccacatcatcggagcttataagtttctggatgagaagtggccacccaagttttgttgatgaagcgccacaataccaatcaacgaaggaattcatgtggaagattgcaagagaaaggattgctgtgtggcatcgatgcttcttcaataagctatctgccaagcgaaagcaagaagcctaaagatgatcttgagtagccagaatcagcgtttgcaatcggcaaccagatgctcctcaaggccagatcttgttgaagtttcatctcctctaagcgtctgcaaagtgaagatatgtagctgaagtgaagctatacccataacccttctaagacgaatctcgaggacgagattcattntaagtggggtagatatgtagcatcccaaaaattcaaatcctgaaatttctcaaacttgctctaagtcaaaataa

SEQ ID NO: 24127 - DNA, 217 bp, Zea mays
tctaagggagaacacgtgataggtctaactaatgtacacttctaataagatagaccctgtgcagcttatcaagcagggaaacaggtgggaggctctcatcacaccaaaaatgtgatgagcacatcaagacccttggagatgcttcatatggacctcttcggacccgtcgcctatctaagtataggaggaagtaagtatggtcttgttatagttgatg

SEQ ID NO: 24128 - DNA, 398 bp, Zea mays
agcttgttcattgttacaaaagcggtatgcttcctatctttcctagacatctggatttgatggaaaccagagtaagcgtctaagaatgacaataggtcacacccggaggtagaatccatgatttgatctatacgtggcagtggatacgggtccttgggacatgccttattcagactggtgtagtcgatgcacatacgaagcttcccattcgccttggggacgataactgggttggccagccatattgtgtgatgaacctcttcgatgaagccagcgtctagcagctttcggacctcctttcagatgaagtcctgccgctcaacagactgtctgcgaggcttctgactcaccggcctggcatcggtgttgatcttcagatggtgctcgatcacctccct

SEQ ID NO: 24129 - DNA, 335 bp, Zea mays
ctttatcctctcaacaaatcaggatgtactgcgcttcatgatccgatacactatctgtattgttcaggtcaagcccgcatgagaaaaaaaaatgtcattctaatacaatcttaccccttacatgatgcgataagcatgaatgaagaagcatatgtttatgctagacacatttctaagaatgaatttgaatcagaaagaacgacttagttctgaaacagactaatctatgtctcaatttgaaattcagggtattaatgggtctgtactgactcacgttcactattgatattctctgtataatgaaggaccatatctgaggttacatgtcaagcaat

SEQ ID NO: 24130 - DNA, 449 bp, Zea mays
  unsure (1)..(449): unsure at all n locations
cgagtcggttcttctccanagattatngatgcacaaagaagtgattatggtatgaaacacattcatgagaaaataacagccgtgtaagcaaactgtttcagaaaggatgatcaacgcatagtatggtttaacaacggcatagttgtgcctaaaggtgatgaagtccgccaacaaattttggatgaagcacatcttagtcgatattccattcatcccagaagcactaaggtgtatcatgatttaaagcagcattattggtggacaaaaatgaagaatgaaattgcacgctatgtggcaaaatgtgacacctgtagacgtgtcaaagccatacacatgaagactgctggtccactgcaatcttttgccatctcgacttggaaatgggaggacattagcatggatttcattgtgggatacccagacaacataggattgattctatctggtat

SEQ ID NO: 24131 - DNA, 483 bp, Zea mays
  unsure (1)..(483): unsure at all n locations
tacaaatggctcatttgtcctatattgtcatttaaagttgacactaacgagtccatatacatccttctttatacctcttttattattgaatatggcaacccacttgcaacgaaataatggcacacgtcttcccccaggagatgaagctctattatctctggtaatatgccataatattctgcattctcactaattgtacttccatctgccaaaacaacaactccgctgttctgtgtgcaccgatttttgtcacgactctctatgcgaaatctgaatccattcatatcgtaacctgcaaaacatgtactggtttgcaaagggcccctagataatgacagaaggtcttccatttgctcacttttatcatggtcatacaaattatgtatctgcaaagacgacacataaattacttaatcagctatatgaagaaaacaatatgatatgaanatatcactatatgagttaattgacaatacttatacc

SEQ ID NO: 24132 - DNA, 260 bp, Zea mays
ttcctcccgcactgtcaatggcgcgcgcggcagattatatttgtacaggagcacggcggcggcggtacatatatttatatcttctctctgcgcaggctctaagatcctggtgcttactcgtgatgaagacaataaaggagctctggattatatagtcccatggatgggcgagatgaacaagcgccaacaggtatcgcgtggctcacggtgagatcatcgcgcggcgatggttgagattggattctccgccgtgtgtttgc

SEQ ID NO: 24133 - DNA, 351 bp, Zea mays
ttgagatataaatctatgtgcaatacttcgggcttcgctggtgatatgaaacacgtctgctggagacaaatagaaggatggtattgttacacgttatctgtgtgtgcaaccagccttcatgaatgctacagccgcgccgcgggaagccagcacgtcaacaaattcaccgtgcccggctatcacttcattaagcgccttaactttgtcttcaatgtgttctaaggtgtttggaatatcttcagctgaaggggtaaacacttctgagctggctccaaccgtgttgaagacgctattcaatctatgtacgtagcggttgccatagttcagacatatgttccgaagctcattcaa

SEQ ID NO: 24134 - DNA, 338 bp, Zea mays
  unsure (1)..(338): unsure at all n locations
atccttgagtcacctgcggcatgcaagcttctcctgaacaagtgctgcacttaccgctgagttctaatctgccacatataataacaaaggagcccctggcgtaggtggagttagtgttgttagatctatcaaatactgtgtcagctcttcaaaggccttctgctggattggtcccattgaaagacttctgctgacttcagcacttcgaagaatggtaagtttctctctgctgatctggatataaatctattgagagatgccagccttcctgtcaatctttgatcccccttttttgtacttggtggctccattcgaagtatagcttcgattntacttgg

SEQ ID NO: 24135 - DNA, 162 bp, Zea mays
gagcacatgcgtccataatgcccaatgaaattgtcactgacgccatgatcaaagggcttctgcttggacctatgactcaatacatctgctggataccccctctaactcttagaagctgttctgataatggtgatacatcgggctaaatgattttgcttaagg

SEQ ID NO: 24136 - DNA, 483 bp, Zea mays
  unsure (1)..(483): unsure at all n locations
ccggatcttaagtcacctgcggcatgcaagctattctttatgtacatgacgaaacataaaagatcgtcttttcctcttgccgaagctatttctttgttgtacatgacgaaacataaaagaccacttctttcttttgccgaagcaaccacttatgaacacaaatgctatgaatgaatgcttatgaatgcaaatgctatgatgtaatgtgcgaatgaatgtccatagcatataaccgaagccacactcaaccattattgtcttggaatcaaccacacatcagctctgcattcgcttacgaacgactantggagcttctcgtcttttacttagacggtataaactctgcattcncttaggaacgtctttggagtttcttcgccttttacttaggcggtataagctctgcattcccttaggaacgtctttggagcttcttcgtctattacttatacggtataaactctgcatatccttaggaacgtc

SEQ ID NO: 24137 - DNA, 311 bp, Zea mays
cttgcggttgagggcacaagcgccaacagtgaccgatgagattgtgattgatgccatgatcaaggggcttacgccaggaccttctgcctatacttcgtcaggaaacccctcataccttggaaaaattgcttcataagatggatgaatacatccgcgctgattatgactttcgtcaaagataggaggaagcttataggttctcccaaataaccaggggcttcggacggagatcccaccctaggcatgtctgatcaaatcattccactcaaaatgacaactggggaggtcagcaacagatgccgcaatattcc

SEQ ID NO: 24138 - DNA, 487 bp, Zea mays
  unsure (1)..(487): unsure at all n locations
atccttttagtcacctgcggcatgcaagcttgtgggtttgaaatatggaaaatacttaatttcatttttgtgttttctagaaatcattaacattgaggcacatagtttcatcatttggtctatctattctcttagtagaaaaagtcaacctttgttaatattcatgaactagtgtttattaatttgggaacgttaatgctgcttagccctcttccacggtttcgttaatttcgagtaggcttccattgttcgatatatctcangcgcacataatgactctagatgtgtgcncgggaaatgttataccgtgtcactaactntaacactcactatgaattagagattagattgctattcttgttattacctatcggtgagtgaacccactacccatctcatatagcccatgtcccacaataaggatatgtgataaaagataataattacattgtaacgcacgagattagaacaaaagccaatatctgat

SEQ ID NO: 24139 - DNA, 202 bp, Zea mays
ctaagcctcataatcttaataaagtcatataagcgttagcgtatatatcatctatggaatatggagaattatctggtgtcgttgaactattcatcttctgtatcatatagacatgaattaataccgacgatatttatgtgacattgcaccttcagctcgacagaacgcgatgaaacatgagtgacgtgagagtgattacaat

SEQ ID NO: 24140 - DNA, 241 bp, Zea mays
  unsure (1)..(241): unsure at all n locations
catctactatttgttgaaataaacacgttatatctccatattacagaagttgacttatagacaacatagttatatcccaagcgactcaactaagaacacattagaaatagagtgctcggatgaaatagcaatttttcctaaccctttcaccttgccttggtcccatcaccgaatattattgaatcttggggatccttgttcttgacatatgaagagaacatcactctttcccncgtcatgt

SEQ ID NO: 24141 - DNA, 399 bp, Zea mays
  unsure (1)..(399): unsure at all n locations
catgtcaacatcaaggtcactggaactacttcatatggatttatttggacctacaaattatgtaagtgccggtggcaacctctactgtctagtgagtgttgatgacttctcaagatacacttgggtgttctttctccatgacaaatctgaagttgcatctatatttaagaagtctgtcaagaaagcacaaaatgaatttgattgcaagatccagaagattagatgtgacaatggcaaagaaattgacaacaccaacattcatgagtactgttgatgaaatgggatcaagcatgatgtattctgcacatacacacctcancnatatggagatgttgaaagatagaacacgaccttgatcactcttgcatgaaccatgatngatgagtataacacaccgga

SEQ ID NO: 24142 - DNA, 361 bp, Zea mays
  unsure (1)..(361): unsure at all n locations
agctttatcttgttgatttcacaacaagtaatgtgacgcccgagacttgtttagtggcaaagtccgacaagggttggctatggcatcgccggctagcccatgtccgtatgaggaatatggccaaacttctaaaggataatcacatcattggactaacaaatgttgtatttgagaaagatagggtttgtggcgcatgccaagcanganagcaacatggagtcccacatcaatcaaagaatgtggtcacaacanagaggccattggagcttcttcacatggacctcttcggacctatgacttacattagcattggtggtagtaagtatggattagtcattgttggtgatttttctcgaatcac

SEQ ID NO: 24143 - DNA, 268 bp, Zea mays
tcttgatagctattattatatgataactccgctaagggcagacatacatactatttttgtgggaataccagaacacatgcccgcagcatatcttcaagtatttgatatactctctcagtcctgccactgtgttgaagatgataggccgaactgtggagcaacttattacctaaggagttatgaagttcttccacaatatggattcgaattgcgatccatgatccgacactattgtcttcgaaacaccatgcagactaataatgcgagc

SEQ ID NO: 24144 - DNA, 394 bp, Zea mays
  unsure (1)..(394): unsure at all n locations
agcttataggtacatctattgtgggctancttcgttatatgttatancttctgaacaaacaaatacgtgctatggtgcagatgaactatcttcccttccggagccatacgatccagaagccgacccgtccattaaagaggcgttggatattatcaaaattgccaatgacgctattgatgaagctatcgacaggcttctaaacaaagctgtcgataaagtcctttaggattactaaaatctttgtattattagtaggtaaatgccctacgaaatgagtcttagttttgtaagaaacagttgttaacaatttgtatgtatattgatgcaatatatttctttatgaagcgtggacccttgtgtatattggttttttgagcctgcggtgaaaaaacac

SEQ ID NO: 24145 - DNA, 321 bp, Zea mays
atctatcatagtgatcaagctacatatgccatcattgttggatcaaaagaatgaatactttgataggtgcttaaatgaattatctgcaacattataagcctctatctaagtcaacacctatctaggatgactattcatcacacactcattctgcccaatctattcaatagagttatactaatgcctaaacaaacaagtcactgtgaagccacctttgttgataccttcatagagtatacctgagtctttataatttcttgaactggatcctgctaccacgagtaaccatatgtggtcgctgcacactctcctatgtgcatg

SEQ ID NO: 24146 - DNA, 412 bp, Zea mays
  unsure (1)..(412): unsure at all n locations
agcttgcaccgcggtatattggacctttttctgttcttgaacaatatggagcagcggcataccgactccagttaccctaaaccttgtttgcagtacataatgttgttcacgtgtctcaattgaagaagtgtcttcnggttcccgatcgaaccattgaagtaacggatattgccttagaaccagacttgacatattcagaacaccctattcgagtcttggatcataaagacagaattacctgaagaaaaactcttcagttttacaagatacagtggaaccaacattcagaagatgaggctacatgggaaactcatgactctttagaatagaagttcccaggcttcttagcctcatgtaatttgtaaagtatgcacatttgttataatagaggaatgaaccccataccacccct

SEQ ID NO: 24147 - DNA, 287 bp, Zea mays
agacctatcgttagacaacaaaggaaggtgatgacactttgttttacggatagttttgaaccactgaacaacacggtacttaatctctgatgattcctttaaagtcttgtaatgactagtgtccaagtatcgctgactacactctacagagacatttcgactcattattgaatctaccccgctattgcagtatgtataattcagttaactataccacccccttagcaattagccgctcatctgttgcggattgtctccctgctaaactgtcgagcgttagaaatata

SEQ ID NO: 24148 - DNA, 167 bp, Zea mays
  unsure (1)..(167): unsure at all n locations
tgactcttttatattgacctatgaatgaanataagttattgtactcttccatntaccctatgatgaatgctggtatggataacctctggagatgaagaatcangatcagcttgcactatgatgcctttatgctatgcttnacacacttgaggacctattctggagtc

SEQ ID NO: 24149 - DNA, 67 bp, Zea mays
tacatctcactaactctgaaataactgtcgatgcaaattatgtgatgatatatatttggctactaac

SEQ ID NO: 24150 - DNA, 250 bp, Zea mays
atctcaatgcaatgactcccgttattatactcatgaattatttttttctttatgacctttcttcaaagggagaagtttaatggcatatatgtattccttttagttatatacaaatcccaaaatgaatgtaaagcttacgcccatcatgcttaactaaaaaaaaactcaaactcctaggtgaactccacaaagccctatcgcgaagaagaaaactcaacgtccatgatgaacttccgtataagcaaaactc

SEQ ID NO: 24151 - DNA, 345 bp, Zea mays
  unsure (1)..(345): unsure at all n locations
agcttcctggaagccatcaaaacagcatatagtaccttctccaattctgtataaattttctttgataaactaagaacctcagatacgaaatatattggggcttgcttcttaacttgaccttcaagcttcttctggacaagtgctgcacttaccgctgagtgcgaagcttgcacatataataacaaatgagcccctggcgtaggtggagttagtgtngttagatctatcaaatactggttcagctcttcaaaggcctttgctggattggccccattgaaagacttcngctgacttcagcacttcgaagaataggaaagttctctctgctgatctggatatgaatct

SEQ ID NO: 24152 - DNA, 193 bp, Zea mays
  unsure (1)..(193): unsure at all n locations
ctggaaaccttctctacttccctactatcttatgtcctttactttactttactgcttttctttcttgtattcacttagatcttcgtagttacctctcaagagaaccaacttaccattcacatctcaccaaaatacagcttnatttatggcagatgaaaggatgctcattgggaggatatcgattctcaacatg

SEQ ID NO: 24153 - DNA, 165 bp, Zea mays
tactagagagaagtgctgaatgagattccgtctggattttgagaattaaccagacctcactctagaataacagtactaggaaaaagacactggcagcaaactcagggattggagagaaccattcgtctcaccaaatgggaaagaacgacttctgagcagagataa

SEQ ID NO: 24154 - DNA, 258 bp, Zea mays
  unsure (1)..(258): unsure at all n locations
agcnntgtaagattcttcattcctacatgtgctaatcggcgatgccagagccaacccatgttagtcttaaccattaagcaaagatcgaggtcagctctattaaaatcaactaagtatagctgaccctcttatactcccttaaatgctactgaatcatcacttgttctaaagacaggaacacctatattcgttaatagacagntgaacccattttgcataattgagatacagaaagcaattataatctaaagaatctac

SEQ ID NO: 24155 - DNA, 293 bp, Zea mays
  unsure (1)..(293): unsure at all n locations
ccgaccggacntaagtacgcgctcacttaaatattattttttacaatcccttaaatctcatccgtttccacaaggcgacgcaaaacggagtatacagaaattttgtgcacgaatttaaagaaaacacgtctgctggacatacaaaaactggttgctgccaaaaacgcacgagccgcagctgacatttttatcatcaaacctgcacgacaaataatgatcatgaaaacactgacagaccatatgtataacaacaattcgatggattaccaacagcaataccctaaatttataca

SEQ ID NO: 24156 - DNA, 250 bp, Zea mays
  unsure (1)..(250): unsure at all n locations
tggcagagggacatcttttccgatgttgaacccatcatggccatgatggatccaccatcaagttttggttttgaaatacatcccacccactctgagcatcatattntggaaacaaacatttttctagagccagctatcataagaaaaccttnttgaaatcagggattaatgagaagtaatcaaattccaaggaaggannatacacaacttggtttaacacacactcctatcacctaatgcatcaagtaag

SEQ ID NO: 24157 - DNA, 280 bp, Zea mays
atcattcctcggctttcaaagctgttcctcaacaaagaaatagctctgcatatgacgtggccaaagaatggtgtacgtctcgtcactgatccacacataatggtccatccgtcggacggtgatgcgtggaaggcatttgacgatgttgatcccgaatttgcaaatgaccctatgagtgtacggctttggctatcgacggacggattcacacctttcaataccagtgcaagcccttactcatgttggcctgtcttcattgtgccatataatcttcctcctg

SEQ ID NO: 24158 - DNA, 161 bp, Zea mays
  unsure (1)..(161): unsure at all n locations
tatggattttggtgggtaatccgaagatttgatatgatgttgatactattatggaatcacacgatgcaaatttctttgaacacatattntccaagatagacttacatagcaattctagatactcttctgagataattcttgtacataatacacctgctgag

SEQ ID NO: 24159 - DNA, 331 bp, Zea mays
acatgtgctaagcggcgatgccacagccagcccatgctagtcttaacaattaatcatgcatctataccggcctcttctcttgcgaaatcaactatagaaagctctgcgtctaatacacccttataagctagtgaaccatcacttcttctaaagacagacacatctacatttgtaaaaagacaattatatctcatattgcataatcgactaacagataacaaattatatccaagagactcaactaaaaacacattagagatagagtgctcattagatattgcaatgtacctaaccctttaccttgcttgattccataccgaaattatgaatc

SEQ ID NO: 24160 - DNA, 163 bp, Zea mays
  unsure (1)..(163): unsure at all n locations
agctntatgaagaggaaccttctttcatcttatacaaacagcttcagccgatagccagtttttcctacaagaccttcggcgacgaagcatatgcccaacaacaacggtggcatctccccatggcggaagatgaacacccgagtcaaccctgtcacccttctcg

SEQ ID NO: 24161 - DNA, 113 bp, Zea mays
cctttatgctgctactaagcaacatctatgctatgatttgcaaaagctcacttactcagttgactttcaggcatgtagtctattctactgcttaatagatgatcatgacatga

SEQ ID NO: 24162 - DNA, 213 bp, Zea mays
atattgagctcatgcctaagtctgggtaaagattgttcatcaagtggcttggtaaagatatcggctaattgatctttaatattaatgtaagaaatctcgatatcccccttttgctggtgatccctaagaaaatgataccgaatggctatgtgcttaatgcggctatgctcgacaggattgtcggccatcttaattgcactctcattatcacat

SEQ ID NO: 24163 - DNA, 281 bp, Zea mays
agctttgcgcctttgaagattcatgtctttgttgtaagtcatgaaaaccacactatgtagtttgctttgcacttagtttgaagtacctcttgatgatgaatgtggaatggattgctaaaggcttggtctaaaggaaagttccacattctctcgggtggtccacaactaagtagatgcttatccacgtctcgtattgtaagcctaacctttcaccgcctgagaatagttgacttagtatcttctagatcaaatacttgtgggtacagactacattcatattc

SEQ ID NO: 24164 - DNA, 309 bp, Zea mays
agctcgacccgggatcttaagtcgactgcagctgcagcttgaccgcattctcattcttgtaggatcgaggctattggacgcacaacgatacaaccgccgaacaacaatattatcacattagaaattacccatacagataaatatttaaagcgagcatttaaagagagcgctgttcgtacgcgagaagaacggacgtggagtacgggagaagttcggttacctaccagctagtaaacattgatggggatcaaataatatatctacatttagtcaatattgtcactacactgtattaatagtatattaaca

SEQ ID NO: 24165 - DNA, 272 bp, Zea mays
ggatcttacacgcgctcactggacatcaattttgggaacatttcaacaacaccttctttttagactcaacaaaggcttagttcatatcaaacagaaaactgatagttgtctacaaattttctgcaccagacttgcgattaaattatacctctatgcatctcttaaccaaacagttgaattaatacagcagctcccaacaaactctagcgattcaagaatcccatgtctcctttgaaagctggagcatgctatttactacagtgcagaatcct

SEQ ID NO: 24166 - DNA, 308 bp, Zea mays
ctcgaccggacttaagcacgcgcgcactatctcgtcaccacacataatctcaaagatacccatcattttctacacgggcgaccaaacccattatccctctcggcttatgcatgcgcggcggctctgggccggtctctccgcgagcgtgctgcttgttccttgcccgacctacccgcctcgtgcggtcgcgcgtgacgctcgctctgtcctgatccccctgcgaccactgtacatctttatacgaactcgcgatatgaacccaaacatgacgacatgcgtcagagctcccaatgacgtgatttgacagt

SEQ ID NO: 24167 - DNA, 254 bp, Zea mays
ataacactaaatgatgaatcccctacgctactacaccgtgacgacagggacctcttaagctgatgttgacacgtatcgatctagctaacagcgagattcatacttctgctggttctagcaaatctaactaacttcgtgaacttgtgatgatgtcagatctttaacaggatggtctactctgcaataaactgcgcagtagatccaaagctagatgcaatgtcaaatgtaacggaactactgtatactatcatgaa

SEQ ID NO: 24168 - DNA, 173 bp, Zea mays
tatcatctttgggtcagatgagatcatctcatcccttaggtatattggaacctcctgtttctaggccttttaggttaatagcctcaggttcaaggataacatgttaagatggtgtatctgatcatgaccttagatacatagaaatagagtaacctgtgataatgaaaaaaccg

SEQ ID NO: 24169 - DNA, 77 bp, Zea mays
cactcgacccgggtcctttagtgactgcagctgcagcttctaagggagaaccatttatgataacaatgtcatttgag

SEQ ID NO: 24170 - DNA, 371 bp, Zea mays
  unsure (1)..(371): unsure at all n locations
agctntcccgctcacatcttcttcgctgtatcaaccttcngatatatttgggcttctnctactgtgatatcaacctgagtccgaagatacctgttcacacattatactctagaaacactgttaaatcatgtttttgaggaccttcggaagccgaaggcccccaacaatggctttggcataagaggcttgcacatgttgggatgagcacnactcagaaggtattaaagaaggacatggntagaggattaaaggatgttgtatttgaaaaggacaagccttgtactgcatgtcaagctgggaagcaaagtgctaacacacattctacaaatgctntcatgtcaacatcaaggccactggaactacttcatatg

SEQ ID NO: 24171 - DNA, 269 bp, Zea mays
  unsure (1)..(269): unsure at all n locations
ctcgctaacccgctctagatccactacgtattgggaagcaagcacggcgaaagcccgcctaacgccgtggtgtatcgcctcgcggagtctgccgcgcacgtgatcgtccaatgcctgcaagcgactntgatgggagcttcctgatgagacgtcaccgaagccaaagacccggcagaagtccgagatggcctcggacatggtcgtgtggtcggtctccctctgctcggtcgtcccagcaagcgccctggtggactcatcaatggcggact

SEQ ID NO: 24172 - DNA, 398 bp, Zea mays
  unsure (1)..(398): unsure at all n locations
tgcagctttgagaagcaagttaaaatcgtgcatgcatnagattttntattggctcctattcattcttctcttgtggcccgactcagtccttcaactcattttataaaggcataatttaagtctgtacaaaagaacaaaaaggtgttccaaaagctcataaacacacctagaaagcattaaagcaagaagccagttctcaagaagagatntcattgagacttaacctaaccaaagtatgagagagatcttcacgaagttgtttccagcgctacacagacaaatccttttcattataaaatatactatttctcacagaccanatgcacacccggcagcaacaatagcaagctcatcattatcttatctcattttctattttaactncactatacaatcta

SEQ ID NO: 24173 - DNA, 187 bp, Zea mays
ccagccttgtcctgcgcggtgacaggtccgttatggaaccgccatctcggggaccctctcgagaagttgccgaacggatttcaaattgactctgtacctctatggatgtcgtgtgataatgtgtgtcagttgcacatgactggactgctgtgtatatgggtgctcggcaaaccttcgaggtgctcat

SEQ ID NO: 24174 - DNA, 121 bp, Zea mays
agcttctcttcttcatgtgacgtaaggtcttcgttgatagtgactgtctgcttgggcgtggcctgatcaaagggaacagtcttggttccgtcttggctctgcaactgtgccttctcgtgct

SEQ ID NO: 24175 - DNA, 335 bp, Zea mays
  unsure (1)..(335): unsure at all n locations
ctagaaattcttcttcttatcatctccatctttgcccctcttcttgtttgtatggcaattcatggcgatgtgaccggttccccacactcanaacactttctatcattgaagcatttcttcttgatgtctggcctcttctagggtgacccctctgcttcttcatggaattgntgaaatttcttaccaatagagccatatctncatcactatcactttcattgtcttcatcatcactatcttncttttcaattgacttataaagcttatctttgagtcaattgattcancctcactttctttgcaaactatacatcngctgagaattctgatatatc

SEQ ID NO: 24176 - DNA, 274 bp, Zea mays
  unsure (1)..(274): unsure at all n locations
catcattcacacaagaacatcatgacgaccgacaggccactcgagctcctacacatggacctattcagcccgatagcttacataagcatcggcgggagtaagtactgtctagttattgtggatgactattctcgcttcacttgggtgttctttttgcagganaaatctcatacccaagagaccttatagggattcttgagacgggctcaaaatgagttgggcttaagggtcaagaaaaatagaatgcgacacggaacggagttcaagaactctc

SEQ ID NO: 24177 - DNA, 269 bp, Zea mays
ctccgcgagaaagaagatccttaagcaataagtggagcaatcaacatgaacaaagaattacggtaagattcaattagtcatgttgtttgcactgatcatctctctatgttttccaagagcacaaagagaagaggataaaggagatgctctaagtgcaatgagttatgacacctcattgcgtcgtgtccatacaatgacaagaataaaggatgagaagatgcttcggatgctatgacacggatcatatgatcacttcattgtcactcatg

SEQ ID NO: 24178 - DNA, 93 bp, Zea mays
cacaacctggtaaaaccaaacagcaccccacaggcctcagcagtgtgttgggaaatgcaactcgactcatgcccaacacagatgcgagaatta

SEQ ID NO: 24179 - DNA, 233 bp, Zea mays
  unsure (1)..(233): unsure at all n locations
cttattagtcttagctattaagcatgcatttagatcagcattctcttttgaaaagtcaactaaatagagcttgccgtctaatacacccttaaaagctaatgaaccatcacttcttctaaagacagatacattaatatttggtaataaacaattggagcccatgtgacacaattgacttacagacaacaaattgtaaccgagcgactcaactaanaacacatttgaaatcgagt

SEQ ID NO: 24180 - DNA, 402 bp, Zea mays
  unsure (1)..(402): unsure at all n locations
gccgctgcagcttgaaaaaatttccacctgccttcttgatgtattgtgcacttgagtgtccatcttcccgatgaggcaatgcttataggacctgttcagtatggatggatgtacccaatagaaaggcgactatgcactttgaaaatatttgtaaggaacagggctaggccggaaggatcaattgctaaggcatatatggcaagtgataccttaacattntgttctacgtacatgaaggatgttgacactagatttaaccaggatgatgatagtggtacagagatgccattgcctaatgacattgtctgttttaagcatggtgcttctcttgttggaggtactaagactgagtacattgatgaatgctaccatgaataagtagtttggtatgtgctacataat

SEQ ID NO: 24181 - DNA, 338 bp, Zea mays
  unsure (1)..(338): unsure at all n locations
ccttagatactaagcttccatcgtatcggcgcagactattgaagaccagctgnnaatcttcaatgataattctctaaatttctgtcctgatcaccacgtcatgcacataagcttcgacatgcttgccccagtggtcggctaaacatgtctgaatgactctctggtaagtcgctccagcgtttttgaggcccaatggcatggaggtatatcagaaagccccgaacggngtgatgaatgctgctttnttcttgtcttcttttgccaagctgatctgatgatacccggaatagcaatctaagaaagacaacacagaacactccgcggtcaagtctaccacc

SEQ ID NO: 24182 - DNA, 277 bp, Zea mays
  unsure (1)..(277): unsure at all n locations
ctacaacacgaaccatcgagtcacaatctgtgacgctgtgctacccaaaagcatcacgagggtaaccccgggtgtgcggtcggacacaaaacactgacagtgggccctgccgtcatcacctcgctgccaagaactcacctacacgtgggcccgtgtggtccaaagcttccctaccagtcaatcgcgaagatacgtatcccaacagctgcacaaaatctgtgtttggtacaaccaccgtgatctgatcctcatggnggctataaagcaatgatacagc

SEQ ID NO: 24183 - DNA, 476 bp, Zea mays
  unsure (1)..(476): unsure at all n locations
gcaagcttctnctgaacaagtgctgcacttaccgctgagtgttattctgccacatattataacanaggagcccctggcgtaagtggagttagtgttgttagatctatcaaatactgtttcagctcttcaaaggccttctgctggattggtccccattgaaagacttcggctgacttcagcacttcgaagaatgataagnttctctctgctgatctggatatgaatctattgagagatgccagcctttctgtcaatctttgaagccccttttttgtactcggtggctccattcgaagtatagcttccattttacttgggttggcctcaattcctttgtgaaactaggaaccaagagattcccttctttactcgaaacacattttctgattcactttaaccacctgctagatagcaaggctctgtaatcacatgggtatctgttcggctttacatgaatatcacaaagtatacttctg

SEQ ID NO: 24184 - DNA, 168 bp, Zea mays
tgagctgtcaggtgctccactgagtggaatgggggattggttctgtttgttctgatgcttacgcatacgacccatcgttgctccctaaatgctctttattaagctggcaacactgaattcgtgtctgagcatgaagcatgtacaggtgtgctacaattgaatggttat

SEQ ID NO: 24185 - DNA, 221 bp, Zea mays
aaactcacccatataaaaggaacgacggccttgggcgttggcacaacatttgctggtggcactctttgctatctgacagattactctgcctttgaagcttgctctgagtgctttgctggcttcaaaccaaccttaagcaacacaaagcaagggtttatttgctagaaatggtcagagagcaatctgcccctggactgtctttggtgccttcttcggatgtc

SEQ ID NO: 24186 - DNA, 137 bp, Zea mays
tgagcaccaatgcccaatgaatttgtagaatcaatgagctttcttaaccaaccaaagccaacgcagatggcctgcacaaaaacttctggtgctaataagagattaaataattgatcgccattgattataaattccac

SEQ ID NO: 24187 - DNA, 401 bp, Zea mays
  unsure (1)..(401): unsure at all n locations
attttgcttcagcttccgccaacgaaccttctgttgtctggagctcaaagatctttgtctcaataacatccgattgctcctttattctgttttccagattttcaattataacttcatgttttntatcttcaaaatcttgctgcatttgcaaggctttactcaacagcatactctgcacgaaaataaccttcgtcagaaatggttttattcttacaaacaatagagttaagggacaagtatcaccttgaagttggaataatataaactaccaacgacatgttgtcgtcggtagcgactgatgtctgtttccagcttcgggaagccgatactctntgacagagtaccgataattntggccccagttngatctcgaatgccaatctaattttcgtcgtcaacac

SEQ ID NO: 24188 - DNA, 292 bp, Zea mays
gaccttgtgcagcatgttacacaagctaacaggtgggaggagcacatctcaacaagaatgtgatgaccacatcaaggtccctggagctgatacatatggacctcataggacctgtcgcctatctaaatataggaggaaagaagtacggcttactcagtgttgatgacatttcccgccttacttgggtgttcttcttgcaggataagtcttaaactcaacggaccctcaagcgctatctcatgagagctcaaaatgagtttgagctcaatgagaagaagataagaagcgacaa

SEQ ID NO: 24189 - DNA, 361 bp, Zea mays
  unsure (1)..(361): unsure at all n locations
taacacacatgcacgctagagcaggctactgtcacctatatgtgtgtcctccagatatacatactatgctagtatgaagggctcaagcaacacatgctaagctcatgctagtctatagagatggattgagggagagactatagaccaaaccatcgagctatgataagcaaacaattctcaagctatgcaatgattcttaaccgaagaggcnaaaaaattactagccacagtgcttagaaactactacctccattgtcttttatttgacgcatgatagttcaattttacactagccaacatcaaataagaaagatcggagagagtacgaaacaagatattccatacaaccatctaataccat

SEQ ID NO: 24190 - DNA, 276 bp, Zea mays
caccctcaccatgtgtattaactctcttaggcgctttatgggctcaagccagccccaagagcatggtatgaatgcctaagaggatttcctatctctaatggcttcaaagactgatgagacgaacctactctctttactcataacattgcagatgaattgtttggatgccaaatttatgccgatgatatcatattagggtctactaacaaatctacttgtgaagagtttatgaggatcatgaatcacagactctagatgtctatgatgtgggagttg

SEQ ID NO: 24191 - DNA, 311 bp, Zea mays
tactagttgaacggaggagcgcaacaggttaactcataaatgatgttctttgcactcaagacaccacaacatgagcgacgatataggtaacaaatcaattactcatgttgtgtgcactgatcatctctctatgtcatccaagagcaaaattggaataggaacaaggaggtgctttcagtgctaggaattattgcacttcattgcatcttgttcatacaaagacaaggatgaagagatgatgagatgttctggatgcaacgataaggaccatatgatcactttatgttcgctcatgaataatcaaagacatg

SEQ ID NO: 24192 - DNA, 278 bp, Zea mays
  unsure (1)..(278): unsure at all n locations
gaggatgaagtcgttgttnttaagagcttcttcatggcagggctttgattccctcttcatgagatgattggagaggttttaaagaattttgagatatactctcatcagttgacacccaatgccatcgttaggcttagtgtctacatatgggctctccgaagctagggtatgagtcctaatgccaaagctttctgccgggtgcacgagctgcactatcaaacaaaggccagagcagatggtcttcataagaacttcggctgctacaacttcacatattg

SEQ ID NO: 24193 - DNA, 318 bp, Zea mays
gatgacttcgagaatcgtcacccgccattttctgtctgccatttacccaaatctgggtcataaatctattcccgatactttgggctatgcttggaatatctattagatctgatgatgataagctgaagttgggcctattaacaattattccatgcgtgcagccagccttcagaaaagcggtagctgtgccccgagaagctaccagggcgcagaagtcagcatggccaccaataacttcatcaagagcatcaacctcgccttcaatatattctaatgtgctgggcaagttttcagctgaaggtgtaaatttacagagct

SEQ ID NO: 24194 - DNA, 311 bp, Zea mays
  unsure (1)..(311): unsure at all n locations
gagcactttctcatcgctcgcaatgatgtctgaagataanaaagcgcgtagtgattcgaagctaagtctttctgaggagatgcatctaagttttcttcaatcaatatcgaagactaatacagagaagattactcaagaaantttggagggtttatctgaagatactggtgacagtgacagctatgatgtggatagtggtggtgaagactctcaagatcgaccttggcgaccaagccatgcgcgttttggcaaatcaagtattaaagaaaatcatcttgtcaacatgaggggcaaatatctccgggatttgt

SEQ ID NO: 24195 - DNA, 360 bp, Zea mays
  unsure (1)..(360): unsure at all n locations
aaaactgagatcgagaaanattcacatttgcctatatcattgaagaatctcccagagaaatgccgggagttccgcagccgatgcgtgcaccggctgaaggacgtatttcactctatcggagccagttctgaaaaattntcaccttcagccgaaaacctgcccagcaccttggaacatattgaaggcgaggttgatgctcttgacgaagttattggtggacatgccgatttctgcgccctggtagcttctcgaggcacagctgccgcttttctgaaggctggctgtacgcacggaaaagttgtgaatagaccatacttcagcttgtcagcagcagacttgattgatatcccgagcttagcc

SEQ ID NO: 24196 - DNA, 321 bp, Zea mays
  unsure (1)..(321): unsure at all n locations
gcttcagctttgaaaatagctttttagtgtcttcgaagatgtccgaagataagaagactgctgctgagaccaaactgagccttgacgaagagaaatatttggggtttcttatagcgatgtcaaagaccaacacagaaaaaatcaccaaggagattctggaaggtttgtctgaggatactggtgacagtgacagctatgatgtggacagtggtggggaagactccgaagatcgttcctggcgaccaagccattcagtttatggtaaatcaactatcagagaanatctatcttgtaatatgagaggaacggtatttcgggatt

SEQ ID NO: 24197 - DNA, 355 bp, Zea mays
  unsure (1)..(355): unsure at all n locations
cagcttggctaacaaccttcggtccaccatcctgcacacaaatgaaagtataatggtatttgtatataaggaaaacaaagggtaaagacaggtnaaagtctcataccgaatcaagcaattntcgagcttcatacccagccagctcgtgcccgcccttagcccaaatttgagtaataaatatgttccctatgcttcaagcttcggacgggatatcaattatatctgacgccgaaagattataaagtggcttgttcaccaccttggcgtgagtacatcccgccttcataaacgcagcaaccgtnctgcgagaagctaccaaggcacagaaatcttcgtgcccgcttataacctcgtc

SEQ ID NO: 24198 - DNA, 444 bp, Zea mays
  unsure (1)..(444): unsure at all n locations
cttatatgactcacacgacagcgccacatgttgtttttcttaaacattgggccaaggccctgtagcacttatattacacacagatgcatcctcaagaattgagaagagaaacccactcataatggatgcaaaaaccacaagcatgccattcttagagatcacgcgaacattgtattctactccaaatgaataaccatccttcatccaacatggagaccataattattgactcataccaggaactaaattaattatgtaacctccaaataaatgctaattggaggtggaggtgcatcgncctgcagtcaacgcacaactcttgcattactgccacccagaaataacttctttttacacttctattctatcgtccatgcatcaatgcnatatggctaccgatcctatcaatactagaatatatagatcacataaaaatttgtctgg

SEQ ID NO: 24199 - DNA, 387 bp, Zea mays
  unsure (1)..(387): unsure at all n locations
atgcaagctgcaagattggtgctaatatactaagatattttattcttgggtttctgagaacaaatggagtgtcagatgtgcggattatgtaccttcactcggtagccagaatctagcttctatgccttgtatacactactgtagtatgctatgactcatttagtgttatattggtgtacaattcccaggtcttgacatgccgttctggatcagctctaatgcttgcgttaatatattcagagatactgaagactgtacgaacatatggcttactggattttgatgcagagattntctttccaaatgatctcaatagccttcctaggggctatgacaaacaaaaaagcacattggtcgatgagccacatattatgacttcaaagtcac

SEQ ID NO: 24200 - DNA, 351 bp, Zea mays
  unsure (1)..(351): unsure at all n locations
ntaagtgggacatggactcccataggtaagacattcgtagcgaagaagcgaccacttgaacccttgaccctttacgaacaacaggcaagacctatctgaaatccccaccgaagacaatggttttaccaccgaatggcagtccgggtcgacccattatatcgtgcatgctattgtccagtgccttcacgacttgtctcttagtcatagaagcctcgtcctagataatgagagatgctttccgtagcaactctgtggttccactctgcttcttgaagctacatacaacgccatcatcaatagtgagaggtatcttgaagcgtgaatgggcggntcttccttcaggcattatgg

SEQ ID NO: 24201 - DNA, 454 bp, Zea mays
  unsure (1)..(454): unsure at all n locations
tattcttcatcaaagcactatggacattgttgtatataatatattctttcttcacgaagcatgaaaagaagggaaggtgttcttttcgccgaaggctcaaaatcggtacgtatgtaaagtttcatgcatcgtacagaattgaataatgaaaagagacttgaatattacattcaaatgtacaaaatattacataaatcacaattcaaatgtttttcctagaaacacctagtcttctcttaatactacttctgcagcttcattcaggagtcgattgacgacttcgtccatgattgcttcggccatctgtttaatctcatcgtctcctttcggctgagggcctggagacgcttcagcagtatctgaagaacacgacacggctatgctgctattacaaacgganaatgacgcttacgactaanagatacaacacaatacaaactattagttaatacct

SEQ ID NO: 24202 - DNA, 251 bp, Zea mays
gcacttgtcgcacctggacccactgaaaatgcaatcaaacaaaagatttgtattttatatagacatatggataaattgacatgtgaaaaggaaacttacccattcagcctcagcatctgtttctgcataattaaatttcttctgatatttagctcttaaactgctaagatggtggcatttgctacatatagaagatttctcagttccattttcaacttcaacataatagcaccctgcagaattttattatt

SEQ ID NO: 24203 - DNA, 281 bp, Zea mays
tgatatcatatctcttttttatgccacatgcagtatgatgtatgatgcttatgctatgccaaatgatgtgatgatggtatgctatgtgaggtgatattccgaaggtacacgcatatctgcgcgatataacacaatctctttgcgaaccaccgttaactttttgctataagcctcccttaggagctctttcgctttttacttcagcggaatcagcgttgacttttcgctgtaagctctgcattcccttaggaacgtctttggagcttcttcgccttttactt

SEQ ID NO: 24204 - DNA, 488 bp, Zea mays
  unsure (1)..(488): unsure at all n locations
cgacacatagatactaagctgatctcctactagaccagtnaaatgttaacccttctgtcctctccattcaagttaattgtaccctctattctaaaatatgcttaaggataaggaaaatagaacatgcaacttaattaatgaaccagagagtacttctatttttgttaggttacttattcaataaagttcactggaaaaatatatcataccctggtttagtataaaataagtaagatcctttttgtttaaataaaacaagtgaaacctagaaaaactctacaaaaataaccccaaggtgaaaacacccncacccttgagataactattgtntattagaaagaacctaagaaaaatatgaaatctgctgtttgacattnttcanataataaggtagtagaaagtggccttttgacattaaacttaagaaaatcataactaaataaccaccccttagttntctgtgattttagcacagaggcctattatta

SEQ ID NO: 24205 - DNA, 364 bp, Zea mays
  unsure (1)..(364): unsure at all n locations
tgcacgcttgcagagacacctaattggggagtgatccctgtggggtcctaatgacccgcgagattgagaagaagcactcgattgggctaagtgatcgaatgagagaaggagagggttgaaaaagactctgcctttgtggccttctcnacgggaagtaggttctttggaaccgaaccttgggaaacaaatcattgtgtgctcttgtactgatcaccactatttgatatgtttctttccttttccctcgcattataagatctcttgctcatattgttttgagtgtgcttccaaggtggccacattgattgagcaactcatagcgagaagaactatcttccatactctgaattcactattaattatt

SEQ ID NO: 24206 - DNA, 218 bp, Zea mays
gagacatgcaattacaacgtgtggagcctgacaagttcactgttgtcactctcctcacatgctgtgccaacattggtgctcttgatcaaggtgaatggatccatcagtatgctgaaagcaggaatatgaagattgatgcagttcttggcacagcattgattgagatgtactcaaagtgtgggcatgttgacaagtcactgcaaatctttgggcgaatg

SEQ ID NO: 24207 - DNA, 192 bp, Zea mays
atctacgatgtgtcacatgcgccatcagactcgggcttcgtggccaatagaagcctgccgtcgtcatccgtctgcagatttggcttcttcctcgtaggactcatgaaaggcctcggttgtgatatcgcatcacccccagcctctaagtgggcaacatggcaacttctggcatgattgcatgggcacatcctc

SEQ ID NO: 24208 - DNA, 442 bp, Zea mays
  unsure (1)..(442): unsure at all n locations
agcttgtgctggactagtcatactctttcatgtanatcttgtggtaaccggagaagcaatcgaggagggacatgacttcgcatcctgctgtgctatcgactattttgtcgatccgcggcaaggagaatttgtccttgggacaagcctcattgaggctggtgaagtctatgcacatgtgccacttgtcgcttttcttttggaccatgaccacgttggcgagccatgaaggataagcaattggctcgatgaagttggcttccaacaggcggtgcacctcggacttggtggcttcagtcttctcattggacattatgcgcagtcgctgcttttttggcgcaccgaacggtcgatgcccaagccgtgctatatgatggtgcggtgtacacccctggtgttactgtctaaacttaacatgacatatcacattagctttatatgttga

SEQ ID NO: 24209 - DNA, 290 bp, Zea mays
  unsure (1)..(290): unsure at all n locations
cgatacaaagaggaccttcgaattatcaaatattcttcttagcaacaaanagtcgttctaaggaacgcagagtatagttgccgaagtcacaaaaagccgctccaaagggagcgcagtgtaagttttctgctccaaagtcgttccaaagggaatgcagagcttacagtgaaaagtcaacgctgataccgcctaagtaaaaggcgaagcgcgaaaagtcaacgcgaataccgctgaaagtaaaaggcgaagaagctcctaagggaggcttacagcgaaaaataaacgctgat

SEQ ID NO: 24210 - DNA, 327 bp, Zea mays
tatgttatggatcgtgttggaatctgttcaactccctttagccctcctggcagcttattgactcccatgaacagcaatgggcccttgttccgaatgtatctttatgcataagtatgctggatgaagtattgcttctaaggcattaagcgtccctcgaccgatgattgcgttgcatgggtactccatgtcaacaatgtcaaagacagcttgctcagctcttgtgttgtgaatgtaaccgaacgtaactgacattgttattttgccaagtgccacaatctgtctttcttctaagccacaaagagggtgcgctgcatcatgaatcttttc

SEQ ID NO: 24211 - DNA, 430 bp, Zea mays
  unsure (1)..(430): unsure at all n locations
ttgagtgaccgcggggacgtttgtgccttctctggcgcgaggggagttacaactatcttggagaaagcanggtgcgaacatgttaaaactntggcccaagccgaagctgccttttctattgatgatacgaaggacccctcggccgaagcaagcttaataggcggaaaaattttcactgacatctatgaaaatggcggccgagggatggctcacgaaataataaagaagagcgaaanagatactcatgacactagagaagcaacaaaagcagctgataagggtgcggagcttgagagatgaataggtattacttaatgattnntaacttgtggttattttgtgacttanactgattactcttctatcgcactgactttctctccccgagccttcagtactaccaagcagagaaggatcatagaatataact

SEQ ID NO: 24212 - DNA, 357 bp, Zea mays
  unsure (1)..(357): unsure at all n locations
tgcaagcttgcataatatgagaattatgttgtttatttataatttactcggcgctaatgcctcatatctcgattattttatacaatctctgagagttcaattacgaagattcaaccttcgtaattgtaccgtctttaaccttcgtccgaagttcattaaatccttaacgaaataatgcttcagcggacgaagggcattaacatttaacatattatgctgccttgttcttaattcatagcattngagaacgagtccccaacactgggtatacaaaaccaatgacatcaaaaaccctattcagcctcttcttgcctcgacctctgaaggctgcagtcatagcatcatcttctgcccttg

SEQ ID NO: 24213 - DNA, 282 bp, Zea mays
cttcatccccacatgtgctaagcggcgatgccacagccagcccatgctagtcttagctattaagcatgcatctagaccggcctcttcttttacaaaatcaactaaataaaagttgccgtctaatacacccttaaaagctaatgaaccatcgcttcttctaaagacagacacatctacatttggtaatagacagttatatcccatatgacataatggactaacagatagcaaattatatcctagagactctactaaaaacacattagagatagagtgctcatt

SEQ ID NO: 24214 - DNA, 410 bp, Zea mays
  unsure (1)..(410): unsure at all n locations
actatagagcatgcttctagcaaatttaaattnttcattttctaagtcatgctcattaattntagcactaagttgagttatgtgaatcattttgtggttaattaaagctaggtggtcatggatagcatcaacaataatgtatttacatctagtataaatagtaacatgatcaacactagatgtagagggtttgcatgtatttaattcatcaatcttagcatgtaaatagcattctcattcttaagaatggaaatagaaatattgcaaacatttaaatctttagccttangcaattaattatcattctcaatcctaagactagaaagagattcattcaacttgtcaatttagaaatccactagcatatcattttgaggttgcaanagatcatacaacattaactctctact

SEQ ID NO: 24215 - DNA, 176 bp, Zea mays
tatacttgaaagatactggccagtggcataccgactccaactacccgaaacattgtctgctgtgcataatggtgtccacgtgtcacaattgaagaagtgtcttcgggttcccgatcgaaccattgaaggaacagatggtgtgctttgaccggacttgacatactctgagcacccta

SEQ ID NO: 24216 - DNA, 101 bp, Zea mays
acgccttctattgccgaaatagaagaaatttaaaggtaatgactgaatctttacccatcaagctgctaagtcctctggggccaaaactgatgaaactttta

SEQ ID NO: 24217 - DNA, 305 bp, Zea mays
  unsure (1)..(305): unsure at all n locations
cttcatcccaacatgagctagtttgttgttccttagccaacccatgttagtcttagcaattaagcaagtgtcgagttcagctctatcaaaatctactaggtatagctgaccctctaacactcccttaaaggctattgaatcatcacttcttctaaagacagtgacaccaatatcagtaaaaagacagtngtagcccatttgacataattgagatacagaaagccagttgtgatctaaagaatcaacaagaataacattggaaatggaatggtcaggagatatagcaattttacccaaacctttga

SEQ ID NO: 24218 - DNA, 217 bp, Zea mays
  unsure (1)..(217): unsure at all n locations
atgagtttattacctcaagcttcgcatcgaatttctgcttttcctattccgattnttctatctttgtgaggacttcgctattcaatctggcaatattagcttgggcttccaccagtaagccttccattgattgaagatcaaaatccttcttctctagagcagcttcgtgatcttttattttgctctctaagccttcaattataacctcatgtttttt

SEQ ID NO: 24219 - DNA, 281 bp, Zea mays
  unsure (1)..(281): unsure at all n locations
atactcagctgaagctgaagtgcaaggggtcgaacttgcaaaagtcattgaaggaacttcatgataaatgtctgaacttcggcaaccgatgcgtgcaacgactgaagcacgtcttcaactcagttggagtcagttctaaaaaatttaaaccttcagctgaagacctgccaggcatcttcgatcatattgaaggagaagntgatgctcttgatgaagtcatagctaggcatggtgacttctgcgctctgctagttcttcgtggcacagctggtgcttttatg

SEQ ID NO: 24220 - DNA, 398 bp, Zea mays
  unsure (1)..(398): unsure at all n locations
ctgaggcatgcgagcttatcatatgattntcaggcgttacaaacaggactcttattatatggccttgactatgctagagagttaagacctccgagtgtttntggactgaagccgttcacactagtttgcacgccatccacagggtctaccttcatcgcctcctcaagaagacgtcgtatgagctactaaccggttaccaacccaatgcatcgcactttcgtgtattcgggagtaaatgctacattctagtgaagaaaggtagaaattctaagtttgctcccaaagctgtagaagggtttttattatgttatgactcacatatcaaggcgtatagagtcttcaacaaatcgcccggtttggttgaagtctctagcgactttgtatctgatgagactaat

SEQ ID NO: 24221 - DNA, 305 bp, Zea mays
  unsure (1)..(305): unsure at all n locations
ctaagcttggttgagctcatcctncctcttcatctagattagatgatagcctgagtattttttgtggnggacagatatcccctaggtccactagaaggcanaaaaccctacttggtgccacaagctagtcacccatatggtcgccgcatcgtgggtcgggcaaagactacagttgaagtgggtcgacccaagaaggcgatgggctcacatccggattgttcgcacattgggcgtcatcccgtggaagctatgtgtttttctcgcgcccgacgtcctcaaacgctatggatagcttggaacggagt

SEQ ID NO: 24222 - DNA, 407 bp, Zea mays
  unsure (1)..(407): unsure at all n locations
atactgctctgttgggtttaagatgacgatgtccaaggtcaataatccgaagcacatttcgaagattgttgaagctgttttttaagcctttctgcataaagcttagaaacatttgtattatctttgtaaaagacattgtaattgggaattgaacattactttgtatatttgtccatacctttgaatatatttttaccttttcatccatgtatngaatgctntgctgtggatgaaacttgaactttcgagccgaaggctgaaaacaccttcccttcttttcgtacacaacgaagtgtatccttgcttcttcatgctcatcgaagcattngtatcaaagctgaagtatttcttgttgtgcttcatgttatgatgatgacgatcctatgaatgtctacatgaatgtatat

SEQ ID NO: 24223 - DNA, 311 bp, Zea mays
  unsure (1)..(311): unsure at all n locations
tccactttntaacgatggactacacaagctagaaaccttcttttgtttttttggnttagctttgattctttactatatggtttggtactcatgtagtcatgtggctattattattataattagggctttttcgtttagctttcaattatgtggattgcgtggaattggatgtgtttaaatcccaaacaagtcaaacttcttcttaatattttccaatctcatccaatttatgggtaacgggattaaccgaacaaggacttattatgtgcgaaagatggcagccctctgtggtttgccgtgggacgacacta

SEQ ID NO: 24224 - DNA, 295 bp, Zea mays
  unsure (1)..(295): unsure at all n locations
tgaaccgagggcncgcgtcaccggagaagccaaatcgcgctcaccggtagttaagaactcgccggcgcacgtggaccgggtaaaccccttcaccatttcccgattcgttgcgcgcatggcctctgtgtcatcccgtgaagctcctcgtgcccattaattgaactctcccgccgtggtttggccggagcaggcgccgccgtcgatccccgccgcctgtgttcgtggccaggggagctccgaccacctctgacgccgacccgcacatcgacgtgaccgtcgcgacctcctgaacatc

SEQ ID NO: 24225 - DNA, 240 bp, Zea mays
accctcataattggactaaatttcccttgagccctaatgccaatatatttctgaatgacatggataatatgcatggttgatcaatgaagtctatatggctgactctatccctaatatggtgagtgtctatatagaagaatcaattccattatctgatagtaatacgtacataattttgattgtcaccatatgaaatattcttctcttcaatgaccttattatatcacactgtgatatctc

SEQ ID NO: 24226 - DNA, 471 bp, Zea mays
  unsure (1)..(471): unsure at all n locations
taagctcgcttctntgctgagtggcaggtcacagcactcgacaaagaggctttacaggtgcccaggtgttccttctatgccgagtgatatgacactgacactcggcaaagaacctctttgccgagtgttacactcggcaaagtgaccagtacacacctttntaatttattttttctattccatccaaacaaacaaaagatatcatatatacatcacacatatcacataatcatcacagatatcacatatgcatcacatatctcacaaacaccataaatcaaacaagttctcacatcattaccaacatgttcggacacaaacataagtatccaacattgaagaacataagtctcaagtatctcacaaagcattaccaacatctaacaagttcagactcggttatctcacanagtatgaacaacactaagaaagagattgcacagagaagatattgccnctaacaagttcatc

SEQ ID NO: 24227 - DNA, 361 bp, Zea mays
  unsure (1)..(361): unsure at all n locations
agctntatcanatggacgtgaaaagtgccttcctcatctgatcaatcaaggaagaggtctatgttgagcaacctcccggctttgaagacagtgagtatcctaaccatgtctataagctctctaaggcgctttatgggctcaagcaagccccaagagcatggtatgaatgccttagagattntcttattgctaatggcttcanagtcggaaaggccgatcctacactctttactaaaactcttgaaaatgacttgtttgtatgccaaatttatggtgatgatattatatttgggtctactaacgagtctacatgtgaagagtttagtaggattatgacacagaaattcgagatgtctatgat

SEQ ID NO: 24228 - DNA, 385 bp, Zea mays
  unsure (1)..(385): unsure at all n locations
tcagagncacctgcggcatgcaagcttgcaagccctcggacccggccggtacttatcttatgcccgagatcaacctcaccggacttcggtcttccgccgccgcgcgtggaccgagctatccagtgagtctccgcccgattcctttcgctcatgtcttctctggcatcccgtggacctccctgacctatttgattgaactatctcgccgtgaccaggccggtctcctcgccgccgacgagcatccccgcctgcgcgcgtggaccgaccgactccggccatctccgacagcgttccgcacaccgttgtgatccccgcgacctccccttcatcctcgaccacttcaccggaacagtctcgccgccggtaagcccctccgcccttttct

SEQ ID NO: 24229 - DNA, 393 bp, Zea mays
  unsure (1)..(393): unsure at all n locations
ntactcaacagcatactctgcacataaacaaccttcgntagaaatgtcttctntatcaaaaacaataaaagtcaaggaaagtagttcaccttgaanatggaataaaataaactaccaacgatatgttgtcgtcggtagcggctaatatccgtttctaacttcggaaaaccgatactctntgatagagtaccgataatcttagctccagtttgatcccagatacagtctnaattttcatcgtcaatacccccgaagaggagtgctcctgtgttatatccgccagattnggcatattctttaagctcttctatttcgggttttgacagttcttgtccaactaaattttgaaacatgaaggcttcgtcctctgaagtttcgtcagagatttccttt

SEQ ID NO: 24230 - DNA, 305 bp, Zea mays
  unsure (1)..(305): unsure at all n locations
gcatgttagaccagagctgtgtggttgtattatcatacattatgaatgcactgagcactatttgatcgctattgctctgtatattccacacgagcctccattgggattgctgggagctatttcttgtcacttggaagaacatcaaacgtcggtgcttgaaaacccaacacttgaaatgaatgctcggaatatgagacatagaccaaggataatcagagagaatatgctatccacagtcagaaggatcacctgaacgctggcgcgtggaggtccttgctgaantgtggcgcatggagtcactggct

SEQ ID NO: 24231 - DNA, 157 bp, Zea mays
tggcgaattcaatatcccgatccggtggcattcccggcaattcatcaagaaagacatctgtctactcacagaccactgggatcttcttaggggtaacttcgtcatagagaaagtacatgactgagaagaaccctgactaggcagaaatcaagtgaaa

SEQ ID NO: 24232 - DNA, 381 bp, Zea mays
  unsure (1)..(381): unsure at all n locations
ctaagctctgtgaccatgtatagcatgcttaatgaaacttcgtanaatgatgcattttaatacaaaaacttggtcatcaaacagagctgggaccttcggaccagtcagcactaaagtaggtcggctacctttctggtagatttgattaagtcagccttagaagcattggaaactagacttcaagagctttcaaaagaagtacttatgggccttcatagcttttgggagtcaaaagatatgactgtttcttctggacgggtctgtagcgctggactgactcggacataactcttcttgctgaattccccttgatatggtttatcattcctctctggtgaacctaagtaatatcaacatacacgacttaggtagcataaagtc

SEQ ID NO: 24233 - DNA, 329 bp, Zea mays
  unsure (1)..(329): unsure at all n locations
tatgttgagcaacctcccggctntgaagatagtgagtaccctaactatgtttacaaactctctaaggcgctttatgggctcaagcaagctccaagagcatggtatgaattcctaagagattntctcatcactaatggcttcaaagtcagaaaggtcgatcctactttatttactaaaactcttgacaatgatttgtttgtatgccaaatctatgttgatgatattatatttgggtctactaacgaatctacatgtgaggaatttagtagtatcatgacaccgaaattcgagatgtcgatgatgggggagttgaagtactcttgggattt

SEQ ID NO: 24234 - DNA, 382 bp, Zea mays
  unsure (1)..(382): unsure at all n locations
ccgcttgtgatcggaagcacgagcttcgtcgccgaaggtgacacagcttgatgactntgtgaagccattgtcattgtcgtggaagtgagttcactgaaggtgggcgccaatgttggttacttgnntttgattgctgcgaaccaaaaacaaggcaacacaattgttaaatgttaaggaccttcgtccttcgaagcattatcccccttcggatataatgagcctcggatgaaggtcatgaagaacaagtattcatcattcacaaataanaaacattattacagatgtaacattgtgttatttacccatttcatatcatgtcaaaacaatattacaattcatttcatatattaataaagtgatacaagatgtacattatattcgt

SEQ ID NO: 24235 - DNA, 332 bp, Zea mays
tatgtctgatgatgaatggtgctctttctgatgataataatccaatcttagagtggctcagcaactctagatctaagtctagaccaatccttactgaatatgatgacgacgagaaatgtgatgcacctggcagttttctcattgaagaactgcaaatgagtaaatgagatgtggctacattcaacaggaatcttggccttggtaacaatagcatagggaagaagactgtgagtctgttagatgatgaacgaaagtttgaagatgactatgagtcaagatctccacatggtggtccattgtctgatgagccatgggatatatgctctgatgat

SEQ ID NO: 24236 - DNA, 299 bp, Zea mays
gatcagatgagaggagctacagtattctcacagatagatctaagattatgccatcatcagttgaagattcagactggagatatacctaaaaccgccttcactacaagatatggactatatgagtttttagtcatgtcttttggactgactaatgcactagcttactttataaacatgatgaataaagtattcatggaataccttgaccaagttgtgggtggattcatcgacgacatactattatactctcagagtgaaaaagcacatgaagatcatctgagaataagtctatagaaact

SEQ ID NO: 24237 - DNA, 122 bp, Zea mays
agcaccggggcaagacgacaacccatatttgcgagtctcatgccgagacaaacgaaacggtggcggagctaagaacggcacgcaaccccgggcgacggccagtacaatctatgccgacacat

SEQ ID NO: 24238 - DNA, 343 bp, Zea mays
  unsure (1)..(343): unsure at all n locations
tcattttattggtatggacgtaactagcatgaatgggatgtgagaacaaatgtccgtttcacagcaattcaaacattcaaacatgaacgtttatattttctgtacgcaaaagcgagaccgtgagagctcatcggtttgcaagtgtaaataggaccaacattgacacggatgctatgagcttgaaggctgagctctcccagagaatgcgcttctcgcctgagccactacaagtgggctgctgcacggccatctgatttcttagctgcacaaagaanaatgcagttggaagacccttctataatacagtgtgacagtgctaaccttgcattgcagcagtgaacat

SEQ ID NO: 24239 - DNA, 113 bp, Zea mays
tcggcgtatatgatgttgatgcagctgcccccgtccatcatgatctttgtgagcctgacatcaccgacaacggggtcgacgacgagcgggtattttcccgggctctgcacatg

SEQ ID NO: 24240 - DNA, 294 bp, Zea mays
  unsure (1)..(294): unsure at all n locations
atcctctgagtcacctgcggcattgcaagcttacttcgtgccttagcacatttcattntgacgtatctattgccgaagattagctccgtattcgattctcgtgtcattgatgcaatatgatgtatgatgtgatgttatgcgaaatgatgtgatgatatgatgcaaaatgatgaggatgtcgaagacaaacgcccacactggaacacacaagctctgcatccccttaggaacgacttttgagcttcttcaccttctatttcggtgatataagttttgcatccccttangaacgtc

SEQ ID NO: 24241 - DNA, 408 bp, Zea mays
  unsure (1)..(408): unsure at all n locations
cgggcacatgaccatcgtcatcagtttctctctcttcttctcatcggtcttgatataaaaccattcactcttccagccggttggccatttggtgcggtagctatgaactggagccttcatatccttgcaatacgcgaaattatagcagccaaaattttcatgcagaccgtctgctctagccttcgtttggtagtgcaactcatgcactcggcagaatgcttcggtatttgggtctatcccttggcttcggagggcccagatgaagatgctgagcctaacgatagcgttaggggtcagctgatgaagatanatntcanaanatttcanaacttctcctatcatctcgtttagaggaaaccgtaatcctgctctgaaaaagctttnganaaccactacttcatcatcttt

SEQ ID NO: 24242 - DNA, 354 bp, Zea mays
  unsure (1)..(354): unsure at all n locations
aacaccttccctgagctcgttgtctatatacgattcaatatcccagcgcgtagcggtcccaccttgcagagntactggttggtctctgcggtccaccgcacagcgagtgcaagcgcgtgtccgcctggtgtaaaaatactggcgcttcgccttcttacctgcagtactatataaacagacgagtaggtgtgaaggtaccacagcattcattgctatntgcactgttctgcagccaaaacttttaaccatcgccgaagcttgtccgtcggaatctaacgaagctccagtttgaagcctgcttcgtcagaanaaacttcggaagaagaaagtattaaatttccacacattcataat

SEQ ID NO: 24243 - DNA, 324 bp, Zea mays
  unsure (1)..(324): unsure at all n locations
nngagcaagacatngcatcaccggagaagcgggatcaccctcgccggacatctgccacctgccaccgcacgtagaccgagctatcaggtgagccattcttcaattcttcgcgcacatgccttncctgacccctactgaagctcactgactagtttaattgaactctaccgccctggattggctggagccctcaccgacgacgagctcccccgccagcgcacacgtggaccgacctactccgaccatccccggtgacgatccgcacatcgacgtgaccgtcacgaccttccctacaccctcgaccacctcaccggagcaatctcg

SEQ ID NO: 24244 - DNA, 447 bp, Zea mays
  unsure (1)..(447): unsure at all n locations
agcttctaaaggagaacatgtgataggtctaaccaatgttcatttcgaaaaagatagaccttgtgcagcttgtcaagcagggaaacaggtgggaggagcacatcacagcaagaatgtgatgaccacttcaagacccctggagctgctgcatatggatctcttcggacccgtcgcctatctaagcatagggggaagtaagtatggtctagttattggtgatgactnttcccgcttcacttgggtggttcttttgcaggataagtctganacccaagggaccctcaagcgcttcctcaggagggctcanaatgagtttgagctcanagtgaanaagataatgagcgacaacgggtccgagttcaagaaaccttaagtggaggagttccttgaagaggaagggatcaagcacgagttctccgcttcctacacaccacagcanaatggtgt

SEQ ID NO: 24245 - DNA, 285 bp, Zea mays
accttagatactcagcttctcacttattattcttcctaagtgatgcttggttttattttatttagtgtcggcgtttcgaccccgcggggtccctggaccgacgagtaaattgtctccacgtgttccaccccagatgggtcggcgtgagacggagcacgaatgggggaaaggagacaggcaagaggggaaacccgcggccttcgtgttgtcatgcgcccaggtcgggtgtgcttgcagcacggggttacaagcgtccgcgtgggagagagcgagggacctacgcgt

SEQ ID NO: 24246 - DNA, 401 bp, Zea mays
  unsure (1)..(401): unsure at all n locations
atcctctcagacacctgcggcatgcaagcttgttagaaaacagggttgtgccagtgacccaggttacaaaaggcaagcaaatgtcatgtagaatcttgattntctcaactcatgatcttgcagaaccaatcaaacagtacaaatttatctattccccagcttcactggccattntgccgagattgaaaatgctaaatagtacatacaaagcaaggcatctgttntaagtgaaccgaagaggtcatgggtttacatcagaatgaccggatattaatatgtgtcacatactcagatgtcagttgtgggggagggtggtggtcatagttttggcgttatatgagagcgcatgaaaggtcactgtgccggtgctatatgccttattaagatttattaggagtacc

SEQ ID NO: 24247 - DNA, 367 bp, Zea mays
aatacaaagaaacacagatctcatgcgttttcaagacaaaaaagacggccaaatggagacaatagcatatttgatgagaagtctcattacatcacatagagcttcaatggtaacattaaaataaatctagcataagggaagcatgaaacttccctgattggtagtaccctcatacaccaatagtaaaccaaccccaatatcccatgctcccagaccctaaaattacaggaaatggaaactctattttgttggtagcctatatattcacttgacattattatttatagaactctagtgggatatttgtagtgggatctttcaaaatcatcagtatctgcaacatcctggatataattaagactggaac

SEQ ID NO: 24248 - DNA, 321 bp, Zea mays
ctatgttgagcaacctctcggctctgaagatagtgagtaccctaaccatgtctattaactcttaaaggcgctttattggctcaagccagccccaagagcatggtatgaatgcctaagagattttcttattgctaatggcttcaaagtcggaaaagccgatcctactctctttactaaaactattcaaatgagttctttgtatgccaaatttatgttgatgatatcatatttgggtctactaacaaatctacttgtgaagagtttagtatgatcatggtacaaacattcgagatgtctatgatgggggagttgaagtatttc

SEQ ID NO: 24249 - DNA, 101 bp, Zea mays
gtagtctacttcatcatcacttgaagaagcatacgtgatagtactcttagtatttaccctcttctcctttgccatgaggcatgtgtgatgctcgttgggga

SEQ ID NO: 24250 - DNA, 363 bp, Zea mays
  unsure (1)..(363): unsure at all n locations
ctcagcttgtgaatagtcaaattcagaagggagaaagcagcttcagcagatcattcgaagcttatgctcttatgtgaggacatagcagagcagaaggtgctgntaagctctcaattatccgaagagcaggagaaaaccttgataaggttntggtcaataacaaagatgtttttgcatggtcagccaatgatctctgcggagttaatagagatgttattgagcactcgctcaatgtcgatccatccttcagacccagaaagcaaaggcttcggaaaatgtcagatgataaggccgaaggtgctcgcaacgaagtcaaaagactcctcagtgcaggagttatcagagaagtgaagtacccagaat

SEQ ID NO: 24251 - DNA, 267 bp, Zea mays
  unsure (1)..(267): unsure at all n locations
agagccaacccatgttagtcttagcaattaagcatgtgtcgagttcagctctatcaaaatctactaagtatagctgaccctctaacacnacccttaatgctattgaatcatcacttcttctaaagacagtgacacctacatcagtgaatagacagttgtagcccatttggcataatggtgaaacagaaagcatactgtaatctaatgaattaacaagagaaacattggaaatagtatggtcaggtgatatagcaattttacccaatc

SEQ ID NO: 24252 - DNA, 244 bp, Zea mays
  unsure (1)..(244): unsure at all n locations
actcgcttgcaggattatgacttacctaagtattatgtttttaacttgcgaaagcttacccctatgatccccatttatggttaagatccttaaccagcgctctagttgcaaaatacttaanacaatacaacttggttgagatttttgcctagtgaatgcactctatgtgtgtcaaacatatgcaatgccaatgctatgatgccatgctcaagttttagatacagtaacaccaggggtgttacag

SEQ ID NO: 24253 - DNA, 432 bp, Zea mays
  unsure (1)..(432): unsure at all n locations
agccgagaccgacgaattacggccaagaccattcacaactacagcctatcccagtgtaagctggtcgaggcatgactaagacgcgggttctctttacccatattctccactaaaacttacaaaaagttgttaagctgctgatgttaattntgaggagccggccaccatgtaccacaacagatgccatcacatgcgcagcgccagatacttcactgtacaggatgtccagcaactntggtcagatgacggtgtcagtgtcaatgaattgggactcanaatcaagtctgcaagttcctgtcgtcggttgacttgggcttcttgtgaactcagtgcttggtaggaaatgcngactctgaatacacgctgatcactgtcagactgatggagatgcggtacaattgagtactgaatccctgtttaatcaagtataca

SEQ ID NO: 24254 - DNA, 358 bp, Zea mays
  unsure (1)..(358): unsure at all n locations
agcttgccagaattgatagcctagcgtgcagtgagagtttcatagtctatatgcatatntggatgaacacgagaatgaaggtttgtcttcggcagatcanggaaatcttgatcatgctcttcgtcttcaaagtgacgggttttgaacacagctcactcttatgaggcaatggcctttccacatactgaatttccacatcattttcaccttcggaatctgaacacaagccctcagaatcatcanactntatctctgagtgcaccttccgatcagcacgacagttccttctccgtgtcttctgtgagtccaatctgcanggtagccgtctttgtcatatttctacatggtctttccactt

SEQ ID NO: 24255 - DNA, 111 bp, Zea mays
  unsure (1)..(111): unsure at all n locations
gagagagtgantggtgtttcatttgagctcttgcgcctggattgcttcttctttctcattcttcttgggaacaaattcacttgtgaccgaagcaagagacaccaattgtgt

SEQ ID NO: 24256 - DNA, 215 bp, Zea mays
aaagaaaacagaaagaaaaaaaaaaagagaaagggaagaaaaaggggaaaagaaaaagaaaaaagaaaatagaaaagagaaaaataaagagaaagaagggaaagaacaaaagaaagaaaggagaaaaaaaccaacagccgaagcgaaagagaaaaggacaccaaaaaaaaaacaagaacaaaaggaaaaaaccaaacaaaccaaaaggagaggac

SEQ ID NO: 24257 - DNA, 183 bp, Zea mays
tgatcccctcttgggctgtgggggtaaccttaccgatgtatgcaagaagagacttttacaacatgcatgcagccaaccaaacggtcatgtgcttgcatctgcaatttgaatccgcatctcatacaagctaccaaacatagactctatgccgtcagaatcgacttgaccaagtaaccaaacact

SEQ ID NO: 24258 - DNA, 367 bp, Zea mays
  unsure (1)..(367): unsure at all n locations
tgaagatcagtagaaatgtactataggaaattactcatgatacttttgtaacaagttttgtaaatacaattgaactgttctcgaggaactttgtacataccttgtaatatattcttacccttcgattgagtcgctttgatgtggacgaaatcagtattttgagccgaaggcgaaaaaacaccttcccttcttttcgtacacaacgaagcctaaacggccgcttcctctttttgccaagcttttcttcatatagcanaacataaaaaactacttcttctttctgccgaagtntttacatagcanaacatanaagactacttcttccttctgncgaagcttttacatagcanaacataagagactactt

SEQ ID NO: 24259 - DNA, 428 bp, Zea mays
  unsure (1)..(428): unsure at all n locations
tactaagcttgactggatnggtacggngatgggcaaaagaatctcttcttgattatagctcaacctgacgggtctcagttcagtgttgagaattgccttgtgttgggttaaccaattcatacccaaaattacatctatatcctggcctttcagaacaatcatgttagcaagaaagttccgtccggccattgttactggcacttgataggccacttctctagtaaaaatgtgtcccccacgtgaatgaatgttaaatccttcttttgattcatggcatgaaatgtgatgttgctccacaaatgtcttgctaataaatgtatgcgaagcaccagaatcaaaaagaataattgcatggtgactagccacgagaaacgtacccatcatcaccggttcaccttcaggtgtagtggccacttgagtatagtata

SEQ ID NO: 24260 - DNA, 275 bp, Zea mays
ctctaatgctctgagttaagaacacagcaacacaaatgttgatggctaaagaccttcgtccttcgaagcattatctcccttatgatataatgatctctacacaaaggctatgaacgataaaccttcgtcatctcaatatgttataataaaaagcgagaacatatgggacatataaagaacatgaataatcatattaaatcattagattatctatattctcattggtggggacttgttctcaaatgctatgagttaagaacaacgcaacataaaat

SEQ ID NO: 24261 - DNA, 456 bp, Zea mays
  unsure (1)..(456): unsure at all n locations
tttgaacgtattaagcacatagtcggaaatatggtaaccgataaacctagtacctgagtgaagccgggcgcgaactttatccctcacgcgacctgagactggatctcccatgctagctatggtgggtacaagtgcggtcactgcacggcgacaggtggagtcagtggagcattgtatgccaaggcggtgaggcctggacgcgaacggngaatcaatcgggacggttgacatgtgtggggtcggagtaccctgacatgtcgtgtgtttgggttaccttgcagggtaaaaccccaattgaatcgtctgcttctcgcaactaatgagactgcttgacccttgactacattgntaagaagtgaatgaggtacatgagataatnntgtgatgactaaatgctngtaccatgtatgcttagaagagcnacttagctaagatatgatgctagaattcaaaagc

SEQ ID NO: 24262 - DNA, 225 bp, Zea mays
  unsure (1)..(225): unsure at all n locations
actggcttcgtctgaaacccttgagagctagttatctttatatccttcaacttctgccaagaagtgattgtccctggccgaagagaagagtaccaggtctgagcaacgctcttgacggccatgacaaaggattntgccatgactgcagtattgccaccatacgaagatatggttgcctcgtagctcatcaagaattgcttcnggtctgtatgaccgtcatacatg

SEQ ID NO: 24263 - DNA, 125 bp, Zea mays
aaaacaccagacagataggatgagacagcgcggaaaacaaacccaaaacgagacacgcacaaaaaactcagaagacaaggaaaaaaaaaaaaagcacaagaaacgacaagcaaaccacaaaaaaa

SEQ ID NO: 24264 - DNA, 293 bp, Zea mays
  unsure (1)..(293): unsure at all n locations
ntcacgctggacatcanggctgtaaacagcatcagaaacgaactcccatattttcatgtattccgaaatagcagcaatcaagagggcaccctgaatgttctgaatctcgtgataatatgtgaatgctctgaattaatcatcagttctctaagntcatttttcattcatatttctactagngagttttgcacatgtttcctttggcaacatangtagtacagatctgtggtctaatttctgagaacaactatgtagtaatatatgaatntgatcccattttgaattttctcctt

SEQ ID NO: 24265 - DNA, 180 bp, Zea mays
cttctgattcccattgctcttaacttccgaagacctataaccaatgctttgtactcagcaatgttatttgtgcaattaaaatcaagctttgccgcataacaaattttgactctggaaggtgaaaccaacacagcagccgctcctgctccgaaggttccccaagatccatcacaaaacact

SEQ ID NO: 24266 - DNA, 347 bp, Zea mays
  unsure (1)..(347): unsure at all n locations
accataaaactcagcttatcgggcncagattgctttctgcgaggctctgtcctattccgataagaggccctgccgatgtacactcgacaagtaccagtatacaccttttatttgtttttctatattccatccaacaacaaagattccatatcatacaggtatacataatcatcacagatatcacattcatcaatatctacaagaccataatcaacataagtatcacactcagaacataagctataagctaagtctcacatantttcacacaacataatatcaaccagattaccaacagttggagtctcagtatctatagtctcacactagaacatagtctattgagg

SEQ ID NO: 24267 - DNA, 334 bp, Zea mays
  unsure (1)..(334): unsure at all n locations
aggatcacactattcacccccccctctctaggtgctctcaattggnatcggagccgttctcttcaagaaagggactaaccgcccgaagagatggatcctaaggggaagggaatcatgatcaacgacaaggaaaaggagtcctttctcaatgagccaaaagatgacaaatccaacgactctggctcgggccacaaacgtaaagatgggaagaagaagaagacaagacgtatcaaggagatcgtctactacgacagcgacgagtctacttcttcccacaaggacgacgactacgacaaacaaaagacggttaactcaaacttttcttttgattatt

SEQ ID NO: 24268 - DNA, 525 bp, Zea mays
  unsure (1)..(525): unsure at all n locations
tcagagagtcatcatgcaatgtattngcagcacgagcagtgatagtgacatctgttttgattgaagtactgtgttcaaacatctaatctggagtgtatacagaacatctgcttttaattgacaagggttggctcgctgcagcttcagagtaccagattatcataatgtctatgttcgctgcagttcttcatagtgtataccgaacatatcgtttcataatgtctatgttcaatctttagacctttgtaatccatactcggtctataataggaattatatttttcttacacatctggttcgatcattctctcaagtagtggggtcgntcatatgttcagaaagcagatgctacgttcaagtttggnggttaaatatgctttaatccaacagtataattccctgttaaaacatcaaatacatgatctaaatgacatcatttgatgttgcatatgattcacacatgtgaaaatggattcagaggtgacttcacatgtactatcttgcactcgagttgttctttgctgc

SEQ ID NO: 24269 - DNA, 317 bp, Zea mays
  unsure (1)..(317): unsure at all n locations
tgaagcctatgctcctatgtgaagatatagcagatcagagggtactgtgtgggtctcaactatctgatgagcaagaaaagactcttataanggttttcgtcaacaacaaagatgtcttttcttggacaactaatgggtcttgtggtgtcacagaaatgtcatcgaacattcacttaatgtggattgcacaccccgttttgggacggtaaaccaatggaaaccatgtacgtgccangatcagaaattcacgtacacggcgattacataaatgactcatcatagcacaatgcttcgaattacaataaagaagtagtaat

SEQ ID NO: 24270 - DNA, 243 bp, Zea mays
  unsure (1)..(243): unsure at all n locations
actcaagcttcacctctgctccgatccatgctaccctccgtgtccatggtgggccggttcttgctttctaccggtcagccagagcaagccaagcgtggcggggttcttgggcttggatggcttgatagagcaacaacgcatgagcagaacaggaccgtggttcccgccctcaccgtcaaagaggtcccctcgttggtgcctgagtccaccgacgagggaagcatgtcanggcgtgggaaccac

SEQ ID NO: 24271 - DNA, 264 bp, Zea mays
tgcagcttatggagaagtcaaaaatgaccccagaattatttataattacttttatacccctgggataccagaaacccttattggaaccctggaaaaccctgaaaccaaaccctatggacttatatgcaaaattagcccacttttgggttaaagtgcaaaaaccaaaccaaataagtatcttaagtcacatggttcacatttgggaagatttacaagccaaacccggagttttgggcctatttgcaaaagatcacatttgaactc

SEQ ID NO: 24272 - DNA, 170 bp, Zea mays
  unsure (1)..(170): unsure at all n locations
ggagaccagccaagaaaaatatactgcctattctgtggtgaagacaanggccataccaccaggatgtgccacgttaccatccaaaaacagaaggaaatagcagaagcagcagcgcaacaaagtcagccgaagcaggtcatgcatactgcttcgtatcactcgccttatat

SEQ ID NO: 24273 - DNA, 261 bp, Zea mays
  unsure (1)..(261): unsure at all n locations
tcttgatgggcttcattggtggggattcatttcctgcaatatctctagaaacttgctcttgcgagccattagattcatcaaatgtcacgtctatcgctatttcaacaagaccggtggtattgttgaaaacacgatacccatgctcatntgatgcataaccaagcaagaaaccctcgtncactctaagagcaaactttgagctcttgactttcttgttaagaataaagcatttacaaccaaatactctaaagtaatcaactt

SEQ ID NO: 24274 - DNA, 324 bp, Zea mays
atgatgacggtgaattggtagttacaaacgtcgcagctaagcaacttcgcccgttgcctatcattcctcagctatcaaagctgctcctcaacaaagaaatagctctgcatatgacgtggccaaagaatggtgtacgtctccgcactgaaccagacataatggaccatccgccggacggtgatgcgtggaaagcattagacgagtttgaacccgaatttgcaacgaccctatgagtgtatggcttggtctatcgacggacggatacacacctttcaataccagtgcaagcccctactcgtgttggcctgccttcatgtgccatat

SEQ ID NO: 24275 - DNA, 454 bp, Zea mays
  unsure (1)..(454): unsure at all n locations
tactcagcttgacatagtctcgatgtgtatgcctctagatagaccaagtcttctttatctttactctntgtgaaaccgcattgaagaagtaacacaagcgtgtgatgacaactttgacatgctctggttcgagggctcttaccgcaattgggaggaacaccgtcatcatcacatggcagtcatgagagttgtagccaaatagagacaaggccttcatcctgactagtccgctgatattggatgagaaacctgtgggcacttttaccccacgcaaacatttgcaaatctttgttctctcctacactgacagttgaacttgctggggggaggaaggcttcctttgcactatcactggatgaagttggtctgattgaaattactanacattgctgattaagcccgctttgtctactcgcatgccagcaggttccatgagctgcaaaaccattttgta

SEQ ID NO: 24276 - DNA, 269 bp, Zea mays
  unsure (1)..(269): unsure at all n locations
ctcagcttctaagggagaacacgtgataggtttgactaacgtacaattcgaattatatagaccttgtgcagcttgtcaggcacgttaacaggtgggaggagcgcatcacagccagaatgtgatgaccacattaagacccctggagctactacatatggacctcttcggacctgtcgcctatctaagcataggaggaagtaagtatgggttaattattggtgatgacttnttccgcttcactagggtgttctttttgcaggataagtctg

SEQ ID NO: 24277 - DNA, 374 bp, Zea mays
  unsure (1)..(374): unsure at all n locations
tgcagcttacattgtctcctgttggaagttaatgccatccttaatgctccggcgtctcccattatagagcatgctacgagcaaatattaaattttcattttctagttcatgctcggcaattgtagcatctagtttagctatatgatcattntgttgtttaatcatagcaatgtgatcatggacatcatcaacattaatggctctacatctagtacaaatagtaacatgctcaacactagatgtagagggtttgcacacatttaattcatcaatctttgcatggtaaatagcattctcatttctaagattggaaacaacatcattgcaaacatttaaatccttagccttagcaattaaattatcattctcaatct

SEQ ID NO: 24278 - DNA, 342 bp, Zea mays
  unsure (1)..(342): unsure at all n locations
gagataaccgccaacaaagcgagtgagagagcttaactctggtcaaacttgacaagtcttatttttaagctcttagcacttaaattcttactttntatgcaattgttggttcttgaaatatgcatgaggtactgcacttatggggagtattcaaaactcanatcactcatgaaaacccctagtgcaagccaaaatgcaaatntcacccatttgcctatttctctaaaaaatatctagcctatggcaaacatattttgaaaatatgagaaaatatatgagggtgtcaatacctatcccaacaagtgttattttgtgtgattataangctggaattgggttggt

SEQ ID NO: 24279 - DNA, 320 bp, Zea mays
  unsure (1)..(320): unsure at all n locations
tgcttctaccatggttcaacgggcgattagagtgccatatcgtgcgcatcttggcaaggtcactgcgtacgggcgcttctctgctccaaatcctatcttttcgctgtgagttccaagtcgagatatggtccgggttgggagatagagaggggagaagtttgctgtgtcatccaagcccgatccgagacacaaggagtgtcaagtcatgtctagcgccctatgataggtgtcatctctttccagggtgttctagggttaatttggcgccattttgtcaattgngtcgaagggatttgaaaaggggattatggtgaacatgt

SEQ ID NO: 24280 - DNA, 333 bp, Zea mays
  unsure (1)..(333): unsure at all n locations
aatctaagccttcaacttgagagaatccctttgcaacaaatcttgccttggtcctcacaatcacaccttgatcatcttgtttatttctgaacacccactttgntccaatgatccttgcatcttgtgggagcttctccagggtccaaacttggttacgggtgaagttgnntaagtcttcatgcatggcgttcacccagtccggatcctgtagcgcctcatctatacatgtaggctcaacacaagaaacaaaggagtgatgttcaataaaggaagcatgtttatgtgatcgagtaataaccccttgtgaaggactcccaatgatttggtcttttg

SEQ ID NO: 24281 - DNA, 417 bp, Zea mays
  unsure (1)..(417): unsure at all n locations
gagtacgacgtgaatntcagtacaacttatcaccctcagactgatggacagactgaaaggactaatcaagtattggaggatatgttgagagcatgtgcccttcagcatggaggaagttgggataaaagtctgccttatgctgaattctcatataacaatagctatcaggccagtctgaagatgtcnacctttgaagctttatatgggaggaaatgcaggattcctctacattggatcagactggaggaagatagttctttggacctgaatttattcaagaggcagaagaacaagtctgtataatcaagggagaattgagggtagctcagaccaggcaaaagagctacgctgataatagaagaagacactggaatntaaggaaagaaatcatgtgtacctcaagggttcaccacttca

SEQ ID NO: 24282 - DNA, 462 bp, Zea mays
  unsure (1)..(462): unsure at all n locations
ctctactcggagtagattccttctttttctnctncgtcgccttgaatgcgatgggttgtgcttccgacgtggagggatcgtcaagctcattgatcttctttgagccttcaatcatgcactcaaaacttacaaaattcccgaatactttctcgggagtcattagtgtatatctagggttgccacgaattanatgaacttgagtatggttaagaaaaataagtgatcttaaaataacctttaccatttcgtggtcatcccatttcttgctcccgaagatgcgcacttgattcaccaaggtcttgagccagctgtacatggtttgtggctcctccctttggaagccgaagcgacctgagctccctcgatcgtctccgcttggtatctttggagctatctcttcgtgtgcggttgacacatctaacttcctggcctctcacccttgacttgcttactctctctact

SEQ ID NO: 24283 - DNA, 311 bp, Zea mays
aattgagtccaatctagaaaagattgaggctatcatgagaatggaagcaccgcgatcacagaagaaagtaccaagacttaccggatgcatggcagctctaagcagattcatatcaatgctaggagaaaaaggcttacccgtctataagttgctcaagaaggtagaccaattctagtggacttcagaagcacaggaagctctagatgcgctgaagaattctttgacacaccactagtgctaaaccacctcgctgagccacgccgattcaccggctaaagatctgtattatacatctcttgacgactcacgtg

SEQ ID NO: 24284 - DNA, 443 bp, Zea mays
  unsure (1)..(443): unsure at all n locations
agcttctaaagggagaacatgtgataggtctaacatatgtatctttctaataagatagactctgtgcagcttgtcaagcaggtaaacaagtgggaagtgctcatcacaacaagaacgtgatgactacatcaagacctctggagctattgcatatggacctcttcggacccgtcgtctacctcagcatcgtgggaagtaagtatggtcttgttattgttgatcattttcccacttcacttgggtattctttttgcaggataaatcagaaacccaagggaccctcaagcgctttctaaggcgagctcaaaatgagtntgtgctcaaggtgaaaaagattagaagcgacaatgggtccgaattcaagaacctgcangtgaaagagtttcttgaggaggaaggaatcaagcacgagttctnctgctcctacacaccacagcanaatg

SEQ ID NO: 24285 - DNA, 232 bp, Zea mays
  unsure (1)..(232): unsure at all n locations
tcatagagcatctagtgggtgcatttgcatgaagactaacagcgcttctaatttcatgagtaangaattctttcacaagcgtgtttgaanaactcgaattcttggatgcgcggaccgtccgggtgttgagggcggaccattcacgatccaccagcgggtccgaagtcttgccacttcggacttttactggtcctttgcactgcggaccggccgggccttggggccggacagt

SEQ ID NO: 24286 - DNA, 330 bp, Zea mays
  unsure (1)..(330): unsure at all n locations
atgacatcagcctctcccaaatctttcatctcttatatgctcgatagaagattgttaacttcctcaatcacattgagatttgatccanagatcaaaatgtcatcaacataaaggcacagcataacagactcacccccaccataccgatagtatacacacgtgtcagagtcatttacaacaaagccagctgctgtaagagtattatcaaatatttcatgccattgcttacgtgctcggtttaggccatacaatgattttatcaacctgcacaccttgttctcttgaccatccgcaatgaacccttctggctgatccatatagatctcctca

SEQ ID NO: 24287 - DNA, 153 bp, Zea mays
ctgttttcttgctgcttggaagatcttctttgtgaaaacagagctcactttgccaactctgtatcccgaaggggcttggtgttttggctctggaaaagatttttgtctgctctggtacaagaatatcgcaccggagatagaaaacttcgattt

SEQ ID NO: 24288 - DNA, 397 bp, Zea mays
  unsure (1)..(397): unsure at all n locations
ctttagcgacctatgatactcagctaatgccctaaganatgtctaacttgtaagggcaaggctcccatggctcataataatgagggttatattctataccctgtcggttatcccgagcacaaaattaggaaaattcactctatgaagtctcactctggactcatcatgctttcatgtataagagtgaggaatctagttctaggcaatccactcatgctaaattgcctaagaagaaaactcctattgcatcaaatgaacctaatatttcatttaagactttngatgcatcttaagntttaactaactaatcaggcaaaatagtggccaaatattgttggggcaaacacaanggctccaagactntgtgttgggtacccaaggtgcttgtttctatatg

SEQ ID NO: 24289 - DNA, 272 bp, Zea mays
  unsure (1)..(272): unsure at all n locations
atgacaccagagggcccaacccaacaagcgatggatgaattcagaattattgcagagcatatcagtacaagagacctgggtcaggagatcttggctttcaaaggttttcctagtttaaaagaatgggaaatgccgaagctagagggggagaaaaaagaaggagaacttgtgcggttaccttactatttcaagtttaagaagtacttaaaacaccttgccaagagtggctggatacgattgaagtaatgtgcaatgaaatactcngcaattac

SEQ ID NO: 24290 - DNA, 380 bp, Zea mays
  unsure (1)..(380): unsure at all n locations
agcttnggcacacacttgagattcagatcatcttatcacctgtagatagatggtcagaccgagagaaccaaccagatcctataacatatgttcagggcttgtgctctgcaagacaagttatgttgggacaaaaggctaccttatgcagaattctcttacaacaacagatacgaggctagtttaaagatgtcactgttccaagcactctatgggaggagttgtcaaactccgttgcactgggaccaacccagcaaaaggcaggtgttcggtccagacattntgcttgaatctgaagagaatatcagaatgattcgagagaatctaaagacagtgtagtccatgtagcacagttatgccgatactcgaagaagagagctgag

SEQ ID NO: 24291 - DNA, 315 bp, Zea mays
  unsure (1)..(315): unsure at all n locations
acatagaanctctgagatcaagaatatttatttcattcctcaacatgcacaagcgggttgtatcaagtggcttagtgaacatatccgctaattgatcttccgacctcactccttctaaaatgatatctcctttagcaacatgatctctaaggaaatgatgacggatatcaatgtgcttggtgcgagagtgttgtacagggttattagcaatnttaacagcactctcattatcacacaacacaagtaccttttctagaactacgccatagtctataagagattgtttatataaaaatttgtgtcaacaagcacctg

SEQ ID NO: 24292 - DNA, 415 bp, Zea mays
  unsure (1)..(415): unsure at all n locations
tccgcttcatctatgttatggatggcctttgaatcagtccaattctcttctgcctttctggcggcttgctggctcccataaatagcaataggtccctgatccgaaggtatcttcatgcaaagatatgctggatgaagtattgcgtcgaaagcattgagtgttccgcgaccaatgatagcattgtaaggatactccatgtcaacaatgtcaaacacaatttgctcagtccttgtattgttgacaaatccgaaggttactggcatggtaatcttcccaagtgctacaatctgccaccctccgaagccacaaagagggtgcgtagcatcatggatcttgtcttcnggctcttgcatttgtctgaaagccttagcaaatatgatatctgctgcacttgctgtataaccaaaacattatg

SEQ ID NO: 24293 - DNA, 228 bp, Zea mays
cactcttcgacagagtgctgattaccttctcttcagtccgatctcgaatacattctaagctttcttcggtaattcccgcgaagagcatcgctcctggctggtagccacatgatataacatactcctgcagcttctctttctcaagcttagataactcttgaccaattatattttgaaaattgaagcccttttccttcgaaatatctttggcgatctcctttccttttt

SEQ ID NO: 24294 - DNA, 148 bp, Zea mays
  unsure (1)..(148): unsure at all n locations
tctaggggagaacacgtgatagggtngactaacgtgcaattcgaataagatagaccttgtgcagcatgtcaagcaggtgaacatgtgggaggagcacatcacagccagaatgtgatgaccacatcaaggcccctggagctgctacata

SEQ ID NO: 24295 - DNA, 203 bp, Zea mays
  unsure (1)..(203): unsure at all n locations
gacatgaattcttcgaagcaacaaaaagtcgttccaaggaacgcagggtaagtttgctgaagttacaaaaagccgttccaaagggagcgcagtgtaagttntctgctcaaaagtcgttccaaagggaatgcagagcttacagcgaanaataaacgctgataccgnctaagtaaaaggcgaagcgcgaaaagtcaacgcgaata

SEQ ID NO: 24296 - DNA, 219 bp, Zea mays
acccgttctctagaactggcccccaggctggcggacccccctaccgagggatcccaaactgcaagcctggctactcaattcggatgtcattataccagctatggtgggaactgtatgggtgggttagataaaaaatgatgtctcgtaattgaagcgaaaataagaccatcacaaaaacaaatctggggtgaatcttttctttataacttgatattcatg

SEQ ID NO: 24297 - DNA, 328 bp, Zea mays
  unsure (1)..(328): unsure at all n locations
cagatacagcaactgcatcaaaccagcggtcacatttcagtgcctgtaaaagtggccgaagacgagtgtcaaaattggacacgacagctgtcttgacaccagcctatctcaatgcctcaaaaacacgtncagcatctggatcgcagagatgccaagcctatcagcatacatatcccattttgtgagcttagcaaatatatatataccgaacggaggagggccaaacccattttggttgacaactgatctcaccttttcaggtgagtaatattgatacagctccttcaagtactctagatgtgagcagccagtagatgaactcactatg

SEQ ID NO: 24298 - DNA, 378 bp, Zea mays
  unsure (1)..(378): unsure at all n locations
agaacgccctggatgtacccctttatatagcatactctctcagntcttctgtgtgagcctttgacaatttctggccaagcatatcatggaaattgaagtcctcttctgtcgaagtatcctcgactttctccttcccttttctagccactataccagggatctcttcagcggctgcagcagcttctttcgcgggcgcattcagaagcatggtatcaatttcagagagtgtagcctctagaattacatcttcagcgggttcacctttggcactttccgcttcggggggtgcagcttcggcagcagcagtgctctcaatagctagaagtcttgacgtcgatgccagcggngctgtctgctcgataacctcaactacatgaa

SEQ ID NO: 24299 - DNA, 295 bp, Zea mays
  unsure (1)..(295): unsure at all n locations
ccatgctgctgtgtgaggatatagcacagcagaaggtgctattgggctctcaattatctgaagatcaagagaaaaccttgataaggtttttattcaacaataaagatagttttgcatggtcagccaatgatctttgtggagtgaatcgggatgttattgaacattcgctcaatgttgacccatccttcagaccccgcaagcagaggcttcggaanatgtctgatgacaaggccgaaggggctcgcaacgaagtaaaaagactcctaagtgcangagttatcagagaagtgaagta

SEQ ID NO: 24300 - DNA, 229 bp, Zea mays
  unsure (1)..(229): unsure at all n locations
catatgtggctagtcgtgtgactacttcatggaaaaacttttggtgtattggctaatcctccaaacgaggagaagctggaccaatatccattatctaaaaaaaaattcattataatttttgaataattgtcgtcgatatcactgacatactactatagtancaatcaacttgagggctggtggaccagaccatatatcatatacactactaatggaatcaattctcttt

SEQ ID NO: 24301 - DNA, 254 bp, Zea mays
gggtgggtggtggccaagcaactctgcgatgcggcgatactccgactagaaaggcttccgaggtatgcggaaagaggccccggagtttagcccgcgcacgcaggccgcccgggattacacccgacagcccccggttggacttgctcaccagcaaacttgcctcgttgccgtcgcggggccttcactgttgctggagcaaactttctcttagttctttggggggatgattctcgggcaaatgacaaaacgtttct

SEQ ID NO: 24302 - DNA, 221 bp, Zea mays
cgagctaatacctctggagaaagcccttctggagtcagccccttctgtgagctccaaatccaaatcgctggagtcgggtgtgaagtcctcatcgtcttacgcagcgaacgagcgtctgccgcccctcttgaacttcttcttcggctgctagatgtcccactccatgagccggcgcggcgctggctcgcgaaagtcggaaggatcgcgtcgccgcacaacac

SEQ ID NO: 24303 - DNA, 172 bp, Zea mays
  unsure (1)..(172): unsure at all n locations
gcgcatcacagcaagaatgtgatgaccactttaagacctctggagctgctgcatatggacctcttccgacccgtcgcctatctaagcatangagggagttagtatgggctagatattggtgatgacttttcccgcttcacttgggtgttctttttgcacgataagtctgaaa

SEQ ID NO: 24304 - DNA, 165 bp, Zea mays
aatatattgcttattctgtggtgaagacaacggccatactaccaggatgtgccatgttaccatccataagcagaaagaaatagcggaagcatcagcgcaaccgagtcagccgaagcaggtcatgcataccgcttcgtatcactcaccttatattccagaatatgt

SEQ ID NO: 24305 - DNA, 225 bp, Zea mays
ggaggaaagaaagagaaaaaagggaaggaagaggaaggaatgcaagaggataaaaaaagagacgggacgcaaaaaaaaaaaaggggggggggagtggacagaaaaaaaggacagagagaaggggggaagaaagaagagggaggagggacaaataggaagagagggaagggaaagaaaacaaaagaagagaggagaggggaaggaaagaaaagaggggggaaggaa

SEQ ID NO: 24306 - DNA, 449 bp, Zea mays
  unsure (1)..(449): unsure at all n locations
caatgaagagatcgaaataatgctttatagaacaaggtggtatataatatgagagagaaattttgccctgctggcgacaccataaatatttgactattgttataagttctcttccaaaattataatacctaaaaaaatgttgcataacttgaaacccgatttcagaccggtatgagtaattgggtaaacaatgggcaatgataaaacgagttggactatacatctctgcataacaaaaatatctgcttggcagcatttgcctgacgccgtgcactttactatcaatataaacacacacattttttctatgtgcctcanagcacaatacaaccagtgaatgtccttggagcgctagacctgatggcatttacttgttatctgagtcactatggctcaacacgatggattatgaccctgangacctatggtaaaaggtggctgtagctaat

SEQ ID NO: 24307 - DNA, 264 bp, Zea mays
tcatgcaagcttcttgtacctgtcgccaattatgagatgttaactgccttcctcgatctgacactatcttctctggtacaccatgaaggcaactatccgtgacctgtataacctcagctatacgcagctccggtgtatgttgtcttcatcgggatgaaatgggccacctttgttaagcggtccacaaccacccatatggaacctgaacctgtcttgagtacgatgtaagtctactataaaacccactcccatctcatcgcactt

SEQ ID NO: 24308 - DNA, 310 bp, Zea mays
  unsure (1)..(310): unsure at all n locations
acagactaagcgcggaccgttcgggtccttgcngcggaccgtccactacaccataatgaccctcggacagaactaatgcataaactgatgtctacactacggaccattcggagggaaagcaaggaccgtccgagtacacgcgtggactgtccggtctcatgcgcggaccgtccggtaagtgaggaaccgaataacccaaaggtgacgggtttggtaaaatgaattatagcgtnctcgcggaccgttcggtgtgaacgactggaccgtctgcgattgcctntatctgacatctgacgacgcattaaatgca

SEQ ID NO: 24309 - DNA, 249 bp, Zea mays
  unsure (1)..(249): unsure at all n locations
agcttaacacanaatgccaaaagcttcgtttatctccctgtgcctcagcatagtacgggggtatttataggtactcgaggagccacttgtgcctgtcaaagatatttagaccctcgagtacctcggttatccccagaatattcccacgaggggaggttacagacagtcattacagtaaaccttattacagacacggcccttatcacacctgtgcatgcaagggccatctctatgggccgaatcacacat

SEQ ID NO: 24310 - DNA, 324 bp, Zea mays
  unsure (1)..(324): unsure at all n locations
atgctaatttagtaaggaaagctccatggctangtattacgatgtatacatttttatcctgctaattatcccgagcataaatgaggaaaacatgctagatacctcataatgtccacatcatgcttttatgataaaaatgaggcttctactctatgcaatcaacccatgttaattgcctacacgaaatctcctattgatcatatgaacctaatgattcacttaaaactttagatgcttcttatgtgctcactaacaaatcatgcaaagtatttgccacatatgttgcgtgccaacacaacggctccaacacttgtgttaggtacc

SEQ ID NO: 24311 - DNA, 449 bp, Zea mays
  unsure (1)..(449): unsure at all n locations
tgatctcgttgtgccaatgtagcgaggagctaacttgctcttgatcccnatctctggacactcttggtgggtgacaccttaagatatacatgagctcccacctcaaactgtagaggcttacgcctcttatcatgagagctctttngcctgagctaagcagcttctacgttcttcttgatgattctgaccttatgctctgcttcaagtaccaaatccggccaaaaaatttccctctctcctgcttgagaccaattcagttgggtcctacacctgtctccgtattaggcttcataaggtgccatcttcagactagactgactactgttattgttagaagactctgccaaggaaagacacttgtnccaatcctttncgtagtgtattgcacatgcgccgcacatgtctttcagaatctgatcaccctttctgtctggcatcggtttgggatg

SEQ ID NO: 24312 - DNA, 76 bp, Zea mays
ccccccggagtgacctgcacccccgcaacggggggataatcctccgcccttcgattttatcagcgtacgggagagg

SEQ ID NO: 24313 - DNA, 235 bp, Zea mays
agcttagtcatggcaaatctacattaatttagtgctaaccaaccatttttagtcaaaaaggtgaactaacaactaaataagcactatcagaatttttggacagcaatacaccagtcacttgttttaatcataactcttcaattattaatccaaaaaaatcaaactaagactttctggaaagcttaaaaagttctctacaactctggtattgtcatcacaacctgattaaacactt

SEQ ID NO: 24314 - DNA, 483 bp, Zea mays
  unsure (1)..(483): unsure at all n locations
cttatgcggntagcanatctaaatctaattcctanatntaactnggtcaataagtctaagtgccatgtgtgtgttgaatcaaaacaaccccgcaagcctcacaaggctgctgaggcgaaggaattggcacctctagaacttgttcattctgatctatgcgagatgaatggaattntgacaaaaggtggtaaaagatactttctcactcttatagataactccaccagattntgctatgtgtatctcttanaaacaaaagatgaagcgtttaattattctaagacctataaagctgaagttgagaacacacttgagagggaaatannacgttaanggtctatcgaggtggagaatattctctaatggttcgatgagttttgcgggacatggattatcatgaaggacccgcattctacccaatcaatggattgtgaagganaactgcctctacagattggtgatgcctgtgagtcagcggatatc

SEQ ID NO: 24315 - DNA, 481 bp, Zea mays
agcttatgaagattcttcattctaacatgggctagtcggcggagccagagccaacccaagttagtcttagcaattaaacatgtgtcgagttcagctctatcaaaatctaccaagtatagctgaccctctaacacacccttaaatgctattgaatcatcacttcttctaaagacagtgatacctacatcagtgaatagacacgtgtagcccatttgacataattgggatacagaaagcaaattgtaatctaaagaatctacaagaaaaacattggaaatagaatggtcaggagatatagcaattgtacccaatcctttgaccaaaccttgatttccatcctcgaatgtgatagctcgttggggatcttgagttttctcatatgaagagaacatccttctctccgcggtcatgtggtgtgtgcatccactgtcgagtatccaacttgagcctccggatgcataaacctacaaaacaagtttag

SEQ ID NO: 24316 - DNA, 460 bp, Zea mays
  unsure (1)..(460): unsure at all n locations
agagcatcttcacattcacccggctagcaagtatatctggcatggtgatgtagttgcccttcgattgcatctaggtcctcgtcactccacctgacggcgaacgcttccgcgatcacacccgcgtaaatctcatcaaagtgggataccatttgacccacggccagactatcctcgtggaatgccccttcgaagaccgcacactccacgtggctaggtagcgcccgtagctagtcacggatgagcgtttgagttggtagaggagggacgaggcggtcgcacacttcactcttgcagcgaggcttgcacttggagtttggcgctacgctcttgcagcgaggcttgactnggacccgcgcaacaatggcgctgttgtggcgaaggcagagacgccacccttcgctcgtcagcttacgctgcagtcgctggtttgacgaagacataacgggcagggacacccttc

SEQ ID NO: 24317 - DNA, 425 bp, Zea mays
agcttctaaagggagaacacattttgtgactaacagaagttcattatgagaaagacagaggttgcatcgcatgtcacgcagctcatcaagttggtgttcatcattcacaccagaacattatgaccactgacaagccactctagctcctacacatggacctattccggccgatagcttacataaacctcatctggaagtaagactgtctacatattgcggatgaatattcccgcttcacttgagtgctctctttacaggaaaaatctcatatcgaatagaccttaaatggattcttgagaccggctcacaatgaggtccgcttaaagatcacaaagattataagcgaccactggaccgagttcaagaactcacaaatcgaaggcttccttgaagaagaaggcataaacatgagatctcttctccta

SEQ ID NO: 24318 - DNA, 520 bp, Zea mays
  unsure (1)..(520): unsure at all n locations
agacgataatggagaatgataccgacttataagggaaaagactgtttattcctcgacagcttacctcttagctaatagtagatgtcagggacatgaatgttattntacccacgttgcgtcatgtgcctataaatagatgaacagtaacaccgcactgttcatgctatcttgtaatcgctcgcacgtcactctaagactnttatcttctgtcgagccgaaggtacaaatgtaatttgatattattcatgtctgtccatgatcaaataatgataatatgaataatatgatggctcgatataatcattcatgtcttcttctatgtctctggtcatattcgtacatattgagatgatgaagatatatccttcatgaccttcgtctgaagatattataccctataggaaaaatgcttcgaaagacgaagaatctctaccattaacattctgtgtcgccttgttcttaactcatagcatttgagaacaagtgactaactatgggaatcttacatactagtgatata

SEQ ID NO: 24319 - DNA, 162 bp, Zea mays
  unsure (1)..(162): unsure at all n locations
agctttgctcttacacatcggatccactanaacatgtgcatgctttggattggtgccttgatatgcaagcagaagtggcttgcataacactcctgaaggtctcttcgcaaaggggtcttattattagcgaatggtaccggagttctacgcaccaacggaagc

SEQ ID NO: 24320 - DNA, 125 bp, Zea mays
gaccttgtgcagcttgtcaagcaggtaaacaagctggaggaacgcatcacagcaagaatgtgatgaccacttcaagacctgtggaggtgctgcatatggacctcttccgacccgtcgcctatctg

SEQ ID NO: 24321 - DNA, 460 bp, Zea mays
  unsure (1)..(460): unsure at all n locations
actaagctttcggacgcaaagggctggcctgtgggttcgcgggttccttggttgagttatggcaccgccgtgtggacttgaagcctgtgaagctcggaatntctcgccgtcggcgtgcgtcgcgccgcaccgtgaaacacttcttcgccggtcaccaagctaggtacgttacccacccgcgtactcgtttcgtgcctcgcagcgtatagaagcaactcaatcgggatttgtggcgtcggggttgggaaaccaggtagctccggcgagttccgccgtaatggtggggcggcgccgcttcacgcgactggactggtgaagatgcccctcagtccgcgacctacggatggccgactgagattgagataagataacgatttcgcccaatcgcttatgaccgtcagattcatggtgggcgcacacgattagatctggcagtgtgcttgccctcgaccatcgatct

SEQ ID NO: 24322 - DNA, 427 bp, Zea mays
  unsure (1)..(427): unsure at all n locations
agcttatagcctctcggcanagctgtccagaggctaacgcgaggctggtggtcgttataatatattggtcacgactgccgtgctcgggcagtgatggcgggcggtggcgctcgctttaacggcgaactccggtgatctctggctcgggcggggcttttggtgcgcaagtgcatacggctaaagcctctgggcgcacttataggcgaaggcaatgtgcagacgagcggngtggggcgaccatgcgcggtgcgcgcgcttgcgcggccagtctgcgctcggtcggtcaggcaagcgatcgaacaggtggcctcgctccggcttggcatttntcaaacgctaatnggctcgcgatcttctcataactctcccaaatccctgacacgaatttctcttttgcgttactctntgttctcttacacacttgagt

SEQ ID NO: 24323 - DNA, 279 bp, Zea mays
cagcttatcaaaagagaatactagaatcaataatattgtgctcatgcctcagtctggtgaaagattgttcatcatgtggcttggtaaagatatcagctaattgatctttcacattaaagtgagaaatctcgatatctccctcttgttggcgatgcctaagaaaatgataccgaatggctatgtgcttagtgcgggtatgctccaccggattgtccgccactttgattgcactctctttatcacataatcacaggactttgcgtaatttgaaaccgagtc

SEQ ID NO: 24324 - DNA, 408 bp, Zea mays
  unsure (1)..(408): unsure at all n locations
actaaccaatgttcattntgagaaagacagggtttgtttctcatgtcaagcaaggaaacaagttggtgttcatcatccacacaagaacatcatgatgactgacaggccacttgagctactccacatggacctattcagcctgatagcttacataagcatcggctggagtaaatactcgctaattatcgaggatgataattctcgcttcacttgggcgttctttttgcaggaaaaatctcaaacccaagagaccttagagagattcttgagaacggctcataatgagttttgctcgaggatcaagataataagaagcgacgacgggactgaggtcaagaactctctaatagaaagctttcttgaagatgaaggcatctagcatgagttctcttctcctacctccacaac

SEQ ID NO: 24325 - DNA, 476 bp, Zea mays
  unsure (1)..(476): unsure at all n locations
ataccttngatgtcttctcgtactgataagtcattcttcacatataaccattctgtcatccaatccccgggccatctcttccgaaaggttggtacgggacagcttgccccggaccgagagacgaagctgtagcagccaaagttgttatggtactgttctttgccccaaggttntgtttcatataataattcatgaacattacagaagcttcttgcgtcaggcttcagaccttggcttctcgtggcccacacgaagatatttagccttataatagcctctggagtaagttgatgaagatagacttcgaagaaatttcaacacctcacgacgaagctgctcaaggggaatcgcaatccggctttcanaaagctntggtacaccacaacttcattntcttcagggtgtggacaagtctttttcccttcgtncgccctcacaatggacagatcccgganataccccttctctcatataac

SEQ ID NO: 24326 - DNA, 494 bp, Zea mays
  unsure (1)..(494): unsure at all n locations
tctaaccttggctttgcgcccaacaacatcccattcttatgattcttctggagtaatttgatgaaggtagatctgaaatgttttcagaacttcaacaacacagttgctcatggggaatcgaagcccacccttgagaaagcttctgaagattacgacttcatcttcttccgcggtgggagaaagtttttctccagcatcagctctcacaatagatatatcttgaaaatatcggcccttcatattatcaatatgactctgcttaatggtggttntccgaaaaccgcgtgacttggccgccatggccgatcttctgactcttccccaccactttctacatcgtaactgtcgctgtcaccagatcttaaacaagccttccagtatctcttggaatttttccgcatggctctgcatcgctataagaacacacgtcttctttcaagagagacactcatctcggaccggcttttgtttcgacatcttcgaatgctaaattg

SEQ ID NO: 24327 - DNA, 453 bp, Zea mays
  unsure (1)..(453): unsure at all n locations
gcttacccatgacgaggcatgtgactagttaanaggtcctcaatcagcaagcctacatttatatggtccttaatcgactcagatgaagacactacaccgagactctcttctcgtgcaagtcacccgaccgatctcatctttatcatttcataccccacatttggtacctggcagaggtacatcttttctgatgttgaacccatcatggccatgatggattcaccatcaagttntatttngaaaacatcccatccactgtgaaacatcaccttgttaaaacaaaaacatntgttttcctatagtaggactaagcatcagataacctttttaataaacaggtaatcaacgaatgggtaacagctccaaggaaggatatgcatcaattggtttaacacccaactcctgtcatctaatgcatcattcaagtgataaagaagttaatacagcaaggag

SEQ ID NO: 24328 - DNA, 450 bp, Zea mays
agcttataagttctctgagatgaccagtggcttcggaagaagaatccacccaagacatgtcatgtcaatccattccacccagagtgacgacaggggaagtcaacagcagaggccacaatatttctcgcaagcttcggggcagcaacaaagctatcttcggccgccagctccaaagggcagaggcgccacgggctttggaggaagggttggcgatcaacctatgaaaatttattgcttattctgtggtgaggaaaagggccatactacaaagatgtgccatgtcacaattcagaaacagaaagaaatagcagaagctacaactcagcagaaccagccgaagcaggtcatgcatactgcttcatatcactcaccctacataccagagtatgtgtggtaaccatctgcagcgtctggtgcttcggccagtcagccacaggcattcttgccaca

SEQ ID NO: 24329 - DNA, 347 bp, Zea mays
  unsure (1)..(347): unsure at all n locations
nnttgaaagctggactgcgatttcccttgagcagcttcgntgtagaggtgctgaatatattcgaagtctatctccatcaacttacccccgaggcaattataaggctgaatatcttcgtgtgggccgagagaacccaaggtctgaagcctgatgcanaaagcttctgcaatatacacgaattatcatacganacanaaccttgnggtaaggaacagtatcacnaataatttggctgctacagtttcgtttctcggtccgggtcaagctgccccgtgccaacctttcggaagagatggcctggcgactggatgacagaataggtttatgtgaagaatgatctgacagta

SEQ ID NO: 24330 - DNA, 406 bp, Zea mays
  unsure (1)..(406): unsure at all n locations
agctctcaaagagttntgtggacttattggcatgaagaatctttttgcatcggttatgcattcggagtcaaatggacttgtcgaaagagcttatggcgttataatgacaggaataatgaagnttatcttctaccaccccacgggaaagtggccacacgaattaatccaagtggtgtggagccacaacacaacaatgtctaggtcaacaggctttacaccattcaaattgctgtgtggtgacgaagcaataacctcagaagaagctaatgcgggatcaataagaatagtggcttcggcagaggacgaagctgattattctgtggcaaaagatgctatataagggatcnggcttcatgctgtggagaatatcaataaatatcaagcctaaacaataaaatggcgtgac

SEQ ID NO: 24331 - DNA, 272 bp, Zea mays
  unsure (1)..(272): unsure at all n locations
aaaagtcataaaatgaccccaagaataaacttgaatcacatttatacccctaaggtaccaaaaaccctaattggaaccctggataaaccctgaaaccaaaccctatgggtctatgtgcaaaaatagtgcacatttggactaaggcgtgaaaacaactatgttaaagcatgttaagtcatatgggtcacanaattagggatttgcaagtggaaccctaaagttttgggttaattgcaaaaagtaccacttgacctctatatagcctaagtctg

SEQ ID NO: 24332 - DNA, 112 bp, Zea mays
agcttgaagtcatggtaagtatcatatgccaataatatgcgaattgactcaagcctagccaccggtgcatagtgttcaccaaaaaccaaaccttcgacttgtgaataccctt

SEQ ID NO: 24333 - DNA, 359 bp, Zea mays
tcgtggaggtgaaaacccatgaagtgttctcctccttgtttgaagcactggactcctccttttatagtctctaggagggacccaagaagtgccacagtttatcgtattaaggaggggagatgagtctgagctccggtagtcggcatgtgcaacgtagtggcctttgtacttgtagttgacttggatcatgaggaggatgtctggcccctatatttgcatcttgactgagaatagagccgacaccaagatctatggctcggacgtgtacccgagcctatctgatggacgtgctgtctaatgtatagttggtgaaacagtgataagtatagtgaacagcatatgggaactctctccgtatg

SEQ ID NO: 24334 - DNA, 377 bp, Zea mays
  unsure (1)..(377): unsure at all n locations
agcttgtgaagccaatcacatgtttattgaagaacgatacacaatttaactggtcctcaagatgcaatgaagccttcgagcagctgaaggtgttattgactactgctccggtattagctcaaccagacattgaaaagccttttgatgtgtattgtggcgcatcaagcagtggtttaagttgtgtcttgatgcaagaaggccgagttatatcgtatgcctcgagacagttgcgccggcatgaagaacattatccaactcatgacctggaattagctgctgtggttcatgcnctgaanatatggcgtcattatctgctagggaatatctgtcatatctatatagatcataanagcttgaagtacatctttacccagtca

SEQ ID NO: 24335 - DNA, 483 bp, Zea mays
  unsure (1)..(483): unsure at all n locations
gctatggtgcaccatgtaatgcatatatcatttgttgaataacaaacttttctattacttcttttctanaataattcttggctgtcagaattcagttctcagatttcaacactcaagtataatttgagatatctgagtntactattttattacctcatattttattgtattattattattttttcttataaacattgtaggccttacaaatcctaccccccttaacagaaatctcgtcctcgagatttgtaaggaaagggtgtaaactcatattgtctcaacacatatgcacaaacaaaatctcagcatgatggcacgatgattagcaacacatgggtcaattagaccttattattnctttctaaatagtatcataccattttctaactaaagtaacagttagattgtacaaatagtagtaacgtatatatatgcttatgtagctcgggtggagctggtggtaggaaagcatgggtgatatat

SEQ ID NO: 24336 - DNA, 438 bp, Zea mays
  unsure (1)..(438): unsure at all n locations
agactttatttacttcctacatgctcttattgtcttccttttcggagggtgatgccaaaagaggagaagtttatggaccaaagcaatgaatactatatcaaacaccaaacaccaccaattntaaaatttatatctacaaatggtttttcaagtggttgtggttatttggtccaaaaataggaagtaagtgaattatggagttagggggaggcttaagtccataatatcacattgtggggacaatcatgcatcttagccagtaggatgcacattttcatacaaaaacttgtattatttgcttgctctggttgtggggcatccatcaccacaaagggggagattgtaggaaaatggaccccggctattggctaatgagtttggtgttgatgaaaacacaatcgtgaacaataagttctagagttgtattgtaggtacaag

SEQ ID NO: 24337 - DNA, 443 bp, Zea mays
  unsure (1)..(443): unsure at all n locations
gtggacctatcacgttgttcatatatatgtcttcatcatgaaatcaatgaacaaatcattttgaatttcaatatatcatattgaccacatccccaagaaatagctaatgtttataaaaggcatatattgatcggcttcacaactaaactgaaggtggcatcaaaatcaatcccatattgttgcttgaaaccattagcgacccaatgagccttgtagagattaatggatccatctaacttctatttgattctgaatatccacttggagtcaacaatatctacgctagcacgatgagggagaagatgccaagccttatttntatgacggcataaaaatcttcattcattgcataatgccataaangatgctctatagaggtgacatgtgatgatggctcttcaacacaaaatcgagtaatacaatatgtcatcataccatcacta

SEQ ID NO: 24338 - DNA, 66 bp, Zea mays
cacccaacaccacccatttaaaattttatatctaccaatggcttttcaagagggtttgggtatttg

SEQ ID NO: 24339 - DNA, 349 bp, Zea mays
  unsure (1)..(349): unsure at all n locations
cttaatatcatcattgtctgtgttctcctttntctttngngtgtttggtttcagaagtcatccgatcttagatggaatggctcatcagtcgtcatgagataataccactgaaattggtaggatgacctcatttcctcatgtttacactangtgtgtgtttatgagggatgagttgatgggtcaggtgaacccattccattcctcgaagcaaacaagaaaattaggtttgaagctaggataaaatgatccatcagcctctcactcctcanatccatcagcctctcactcctcanactaaacacttcatatatatcagtgtcatgacgatggcgtngtcagaaactgaaca

SEQ ID NO: 24340 - DNA, 398 bp, Zea mays
  unsure (1)..(398): unsure at all n locations
ttttacagaattgaccctgcacttctcagatatagtgcgatcacgccacaacttgcaggaattgaataaatgaatatagaaaatactcttctaggataaaattaaatctaaaacttggttaattcctggaaaattcattntagctcctttttagtccattccagttcctataattttgtattaatatnttctatcaaccacgaacactgtttagccatgaaacttgaataacaatggtcatttggattatctattctaagcactatacaacttcggaaattcataacttaattaacgcagctccgaattagtggtcttgagccacgatctcgtagcttccgagatcatattatcagttagtctatgttgggggatgtaatttgctatacatgttgctg

SEQ ID NO: 24341 - DNA, 266 bp, Zea mays
  unsure (1)..(266): unsure at all n locations
agcttctgtntggaagacacatctttcgtcatttatcgtagataagatgtctcaagacaagaaagatgctagctgatgacgaactcactagaataagagaatctctctgagcacaataagggtgctaaggcctatatacctggggctatccaggtagtggcccaggcaaatactcagaagattaccctggtcatcctgcgatgcttgtctgacaacactggggacactgtctgttttacgcccagagtggaggcgcaaactctgag

SEQ ID NO: 24342 - DNA, 115 bp, Zea mays
tatgacaattatggagcctgactacactacacccaaaaatataaacttgctacccggtactaacttcctacgactcactattagaagccttggaactttataacttcctacagtc

SEQ ID NO: 24343 - DNA, 174 bp, Zea mays
agcttacccatgacgaggcatgtgaccactttaatggtcctcggtcaacaaacctacatcgtcaccgtccataattgactcacaccgaggcatgtgaccacttaaaggctactctcgccatctcttctcgtgcaagttacccgccccgtcttcaacttatattttcaaacccca

SEQ ID NO: 24344 - DNA, 429 bp, Zea mays
  unsure (1)..(429): unsure at all n locations
ttgtcttcacattgctagcagattattaatgtcgactattgtttcttataatgatatctatttatactctggtgctttccccgctatgcaattttcaaaggagatgctcgtcgaaatttatatatgaatgttagaggtgtagtntagtagcattctggggtgtttgtggatcccggagtgttacagttggtatcaaagcatacgctctatattcttggcacattgaatataaatttgacacacttgcacatatatgaagggtatgtggtcacatatctttgatatatgctaatgtctctgaagtgcagatgaaatactctcaccctncctattcctttatggtgatgtggacagttgtttatgactttaatgcctatataattcatttctaaaatttgatattgctgtattaatgcgagtgatatcgct

SEQ ID NO: 24345 - DNA, 181 bp, Zea mays
agcttctaaagggagaacacgtgatgagtctaacttatgtaactctcgaaaaagatagaccttgtgcagcttgatcagcatgtctacacgtgggaagctctcatcatgccaaaaatgtgatgacaacatcaagacccctggagttactttatatggacctcttctgacccgtcgcctatct

SEQ ID NO: 24346 - DNA, 296 bp, Zea mays
acacaaacatccacacattacatctttatatttgggacattgtggcccttttgctcttggcgctcactatgccaagactaaaattcatatgccttgctctaaccagagggcaatattattattccagcatatattgctttctcattcgacacggagtaggtcttcacttagggacaaaagctaccccaactcagcatgagacgcatatacgtgccggggaaacttatactttctttgcgccgtccagacgctaacacttcttccaaatgattttttttaccccgtgataatgagcg

SEQ ID NO: 24347 - DNA, 321 bp, Zea mays
  unsure (1)..(321): unsure at all n locations
cagcttagcacgatgacttccaggtcctctgcactcaaatagataggaacattttgtttatgtngatgatatcatagtaaaaagtacaaagaacaaaaatcacattgcagatttgcaagacacatctgccaatttcaaaaaagctggcctcaagttatacctcggaaaatgtgtcttcagggtaaagataggaatattacttggatgtctagtatcaacaaatgggattgaagctaacccaaacaaaatagaaactatacttcggatggaaccaccaaaatcaagaaaagatgctcacagattgacaggcatgccggcatc

SEQ ID NO: 24348 - DNA, 133 bp, Zea mays
agcttgcattctacgtatgggataagagttcgcggccatggcaccaaaggaagactgcgcaccgcatggggactccctgcccggcgcggtggcggcactaccctgtccggtgcggcacggtgcccggcgcgtg

SEQ ID NO: 24349 - DNA, 326 bp, Zea mays
  unsure (1)..(326): unsure at all n locations
aagcttctcaagtcccanattcattccanacacctagtgactagagagagtgttntgttcgtgttctttgcgcctcttgtacttggatcgctntcttcttcctcattcttgttctcaaagtgacttgtaatcaaagcaagagacatcaagtgtgcggtggtccttgcggagtctaagtgacccgtttgattaaggagaaagcccactcggtctaagtgaccgcttgagatagggaaagtgttgaaatcaccgtgttcatccgctntattnnttggtgaattgctttccatctctttcggactcgaattcatntctaacgctaaccc

SEQ ID NO: 24350 - DNA, 303 bp, Zea mays
  unsure (1)..(303): unsure at all n locations
gcaagtgtgcgtaccaaatcagttcgcgatgtgatcttatttatacgcctacggcgttgaaaattgaaaggccccgcttgtcagtagatgttgctattctagcaaagggaaggtgttttttcggaccttcggcttaaggccttcgtccatatcgcaatctgaatttattatttacaaattaatattgcgaggggctactgttgggggccttcgtcctccgaaggtcctcataaacatgatttgacaatgttttccgagtggattatgtgaacaggtattntcggatccagaattatgaatatg

SEQ ID NO: 24351 - DNA, 204 bp, Zea mays
gtgcaagcgtttgaggaagttttgagtggtcgcggagatatatgcgctctctcaagagcccgaggaaacagggctattttggagaaatcaagctgcgaccatgtgaaaactttggctcaagctgaggcgtctttaagtattggagatacacaagaccctttcgtcgaagccagcttattgggcggaaaattctttactgacatc

SEQ ID NO: 24352 - DNA, 232 bp, Zea mays
agcttgtagtcatggtgaattgtttgttgtggtctaaatgggtatggttatgggcacgggtaaaagtagtagtgctcatgtggggtctaattgaaaacgcccatcgttgggtgattatcgtgaagaatgcgttgttaattgtgtgtagtaattctattgcactaaatgatttggataaaatttgtgagtctacttgttagtcctcatttaattaatttaactctaacgaatg

SEQ ID NO: 24353 - DNA, 359 bp, Zea mays
  unsure (1)..(359): unsure at all n locations
ccgacatgatcttttcctcacgcggntaagcgttagaacgaggattangctctgataccaattgaaagttgcctagaggggggtgaataggcaagttaaaactttttcaacaaaaactagaagcaaactgggtaaaactgaattgatctcgaaattcacccagttaactctggaaatgagatgttctaaatgatccacagggttcaaagtagtagatctgagaagggcacttctcaaaatccacacaccatatagatataaacaaatcttccacgcaatggtgagagaacgaagaacacaaacaaacacaatgagcaagaacacgagacacaagaattatcccgaggttcggtcacacc

SEQ ID NO: 24354 - DNA, 489 bp, Zea mays
  unsure (1)..(489): unsure at all n locations
attgctaactgtnccgactatgatagtgatcaggaccaatggatctatatggagaagaagaagaattataagaagggcaagggcgaggctcatcttgcaaggagtgtgattcggactgctcttcgttcgactccgacaatgaaggactcgccgtcaccgacttcaacaagtcatccctcttccccaacgagcgtcacacatgccttatggcaagggagaagaaggtatgtactcgagactctacttatgcttcttcaagtgaggacgaatctagtgatgaggatganatagattattcatgtctatttaaaggcctacatagaaataaaattgataaaatcaatgaatcgattgatgccttgaatgactaagataggctcttagaaaagctagatgattcgttgtatgatgaacatgatanatntgtagaggacataaatcctatgctctagaagtaaaatatatgaaatgcttcttattgactatcta

SEQ ID NO: 24355 - DNA, 342 bp, Zea mays
agcttcataactcccagtggtactctatggtaccttcggatgcctgaggggctcaagaatgctgaaagaagcttcagcagaatgatagccaacgtccttcactctcaaataggcaggaacgtgctgacttatgttgatgacatcatagtaaaaagcacgaagcaagagaatcatatggctgacttgcaagagacgtttgccaatttcaagcaagctggtcttaagctaaatccagaaaagtgtgtttttggagtaaagaaaggcaagttccttagctgtctggtatcaacgaagggaatcgaagctaacccaagtaagatcgaagctatccttcggatggag

SEQ ID NO: 24356 - DNA, 442 bp, Zea mays
  unsure (1)..(442): unsure at all n locations
ccccccgcgagaccttntcccgtttctttctaaccatatgaatgcgacatcgaatgtcatacttgatgcatattcactntatttgttcccttgtatgatgtactgtttgtttcccaatttgaatggatgtatgtatgtatgcttgcaatcgcatagagaacgatccggtcgaagagcccgaggaactcgcatgagaagcccctgagcagcagtcggttggtggaggcaagtgtcccttgacctatctccgtcctattcattatttaattcacctcccgctttacacatttatgcctaaggattgactagctttgtaaccatgtccttgttacctatttgggtgnattattattggttagctctatgctattgcttanactctaatcaatgaacatgatgagattatctatgatacgctcgtctcccttctcttattatgatg

SEQ ID NO: 24357 - DNA, 481 bp, Zea mays
agcttatggagatctcacaagttaaacaactacattcattgccatcacgagagatgtaagtgcatggcctatatagatacatggacgacataaacgtcttatctgtataaagtgctataaaacatataggccaaaaaaacaaatactttttaggcaaaatttaaaaatgaaataattgtatatgcactcaaactaaatcaaaacatttgtattctatctataattcattgttcatgctagagataggtatccatggtcctgctatagctagatagatatcatgatgtgatcaagtgctagatagaagaagatgtacaaaatggaggtttataaattagtaggactactctaatatttgtacacgatcagaatatatacgtatattgggtcattgtcatcatatacaagagatatatgtagaaacacatataattagtagtgaacatatgtatagtagttacaagatgaaactgtggttatt

SEQ ID NO: 24358 - DNA, 211 bp, Zea mays
  unsure (1)..(211): unsure at all n locations
gctcgcatcnctccctgaagtgggctcggnggccactgtctgtaccctattactagggtaccccttactactgtataaagacgcagtagctacacggctatctntagtcgcgtggtanaagaagtgtatgtgggaccaggccatgactcgccccnacctcgggcgactactctgtgccagcaacagcgccttgacccaccacatgggcggg

SEQ ID NO: 24359 - DNA, 168 bp, Zea mays
atgttagtcttaacaattaagcatgtgtcgaggtcagctctatcaaaatctaataagtacagctgaccctttaacacacccttaaatgctattgaatcatcacttcttctaaagacaatgacacctatatcagtgaaaagacagttgtaacccattttgcataattga

SEQ ID NO: 24360 - DNA, 281 bp, Zea mays
  unsure (1)..(281): unsure at all n locations
tcggcggcatattcttcgctgttagccaatagaaaccagatctaataacttccncaaccagagttctcgatgcagcatgtactcagcattgtccggcatggatttcctncaatagttgcttcccaatagccgagtgaatgcacttcatgaggactcctatcgcacctcttctgtacagtgtgtccnctatgatggtgtagtgggctgatngtcttgcaattcattctgctgctactntgtcagccggttcctcttcattctttatgtacctgatgatgggc

SEQ ID NO: 24361 - DNA, 280 bp, Zea mays
catgagctaatcggcgatgccagagccaacccatgttagtcttatcaattaagcaagtgtcgagttcagctccatcaaaatctaccaagtatagctgaccctctaacactcccttaaatgctattgaatcatcacttcttctatagacagtgacatctacatccgtgaatagacagttgtagcccatttgacataattgagaaacggaaagccagtgtaatctaatgaatctacaagaaaaacattggaaatggaatggtcaggagatatagcaatttta

SEQ ID NO: 24362 - DNA, 210 bp, Zea mays
agcttgacattgtctccctgttggaagcctatgtcatccttaaagctaaggcgtctcccactatatagcatgtgtctagcacacttaaatttttcattttctaagtcatgctcaatgagtttggcgctaaggtgagccatgtgatcatttcggtggttaaataaagctaagtgacatgaatagccgctacatttatatctctacatctag

SEQ ID NO: 24363 - DNA, 261 bp, Zea mays
  unsure (1)..(261): unsure at all n locations
cacattcaaataggatatgtcaatctctacttatctcgatgaagaaggcagtctataagatcacgagggaaaggtattaacaccaaacaaactttactcgcaaattctattggaacatgtttaaataactcttatttaaataaggaatatgtatgtccataacaacgtatatgtacctaacttactactatgaagaaggtaangggtaagctgaccctctctggntctggcttttctatctccgataaatgcactcgacac

SEQ ID NO: 24364 - DNA, 135 bp, Zea mays
  unsure (1)..(135): unsure at all n locations
agcttgtgaaaggtcttcatnctcacatgtgctaaacggcgaagccacagccaggccatgctagtcttagcaattaaacatgcatctagaccggcctcctcttttgcaaaatcaactaaataaaggttggcggct

SEQ ID NO: 24365 - DNA, 274 bp, Zea mays
  unsure (1)..(274): unsure at all n locations
agcgaccacttgagccctttgagagcacctagagggaggggggtgaataggtgatcctgttaaaacttanacttatatccacaaaaacttgttaagtgttagcacaatgattgccaagtggctagaaaggagtctcaactaaacacaataccacaaaagatcaatcacagaaatgacacagtggnttatctcgtggttcagacaagaccaacgcttggctacttcacgttgtggcgtccaacggacgaaggttgcaatcaacccctctcaagcg

SEQ ID NO: 24366 - DNA, 415 bp, Zea mays
  unsure (1)..(415): unsure at all n locations
ctgtcctgataatgaaagtgatcaagaaaatggaaacatgatgganaagaagaagcattataagaaggcaaagggtgaggcgcatctacgcaaggagtgggactcggattgctcctcgttcgactccgacaatgaaggactcgccgccaccgccttcaacagatcaaccctcttccncaacgagcgtcacacatgccttatggcaagggagaagaatgtatgtactcgcaactctacctatgcttcttcaagtgaggacgaatctagtgatgaggatgaagtagaatattcatcgttgttcaagggcttagatagatctaagatagacaaaacttatgaattaatcgatgccttgaatgaaaagaatatactcttagatcagcaagaggactctgtgtatgaagaacatgataag

SEQ ID NO: 24367 - DNA, 557 bp, Zea mays
  unsure (1)..(557): unsure at all n locations
tactcaagcttctcctcaattggcgccactcctactctctctcgtatatcatcattctggactcgatctctccttgtgtggccacatatccagcgcaacatatgcatctctgccacacttagttgttggacatgtcatcttttagtgggccaacattctgctccatacaacatagccgaccggattgctgtcctgtagaattttccttttagtttttgtggcacctgtgggtcgcataagacacccgtagcttgccgccacttcaaccatccagctntaattctatgactgacatcctcatcgatgtctccctccttttgaagcattgatcctaagtaacgaaaagtgtctttcttgggtaccacttgcccatcaagactaacatcgccatcctcatancccatggcactgaaatcacacttcatatanctctgtttagacctactaagcctaanaccttntgcttccagcgtctgccttcacaattccaactntngcgaaacaccactcctactcttctcaataagtaccacatcatcggcananagcatacacca

SEQ ID NO: 24368 - DNA, 448 bp, Zea mays
agcttcaccacacatatcttttaatcccttcttaacttagacatcttcatttggttccactctgccacaaactcccaagcccatctccaatacattcctactaacacttattcatatgacaacttaatcacatatgtagaggtcaacacgggccgaagattctttttcagattgccaatttcaacactggatcactgaatcagccaccactgcttcattgcaaccctccagttcaagccctgttaactcaccattccccatggccagaagccaaacttacttagccacaagtacactctaaacatagctctaccagactgttgcatcagcccaagaccacaagtgcatagatcaagaattagagtgctccacaatatgatgaaacacttgaattcagcagcactaactgaataatggttagtgcacaattagctgacagctcatcttg

SEQ ID NO: 24369 - DNA, 403 bp, Zea mays
taccttcgaaaaatatagactcttgtgtagctcttcaagcaggtaaacaagtgggaggagcgcatcacagcaagaatgtgatgaccacatcaagacctctggagctgctacatatggacctcttctgacccgtcgcctatctaagcataggaggaagtaagtatggactagttattggtgatgacttttcccgcttcacttgggtattctttttgcaggataaatctgaaacacaagggaccctcaagcgcttcctaaggagagctcacaatgagtttgagctcaacgtgaaaaagataaggagcgacaatgggtccgaattcaagaaccttcaagtggaggagtaccttgaggaggaagggatcaagcacgagttctccgctcctacacaccacaacataat

SEQ ID NO: 24370 - DNA, 137 bp, Zea mays
aggaatgcacaaagagcaagctcttcttctttctttttaaaaaaacatctataccgccgctgacgtcattaccagaatcaacgtaggcattttacgcagaaaatttgtcgaaaaagacttaatcaaaatgttttatc

SEQ ID NO: 24371 - DNA, 540 bp, Zea mays
  unsure (1)..(540): unsure at all n locations
tgtcacaatataagcacataagagagaatggtgcttcggcagatcagccgaagcctatgctcctatgtgaagatatagcagatcaaagggtactgctgggatctcagntatctgatgagcaagaaaagactctgctaagatttttgttcaacaacaaagatgtnttcgcttggatagccaatgatctttgtggtgttaatagagatgtcattgaacattcacttaatgtggatccatctttcaggccaaggaagcanagacttcgaaagatgtctgaggataaagctgaaggtgctcggaacgaagtaaagagacttctcagtgctggtgttattagagaagtaacatatccagaatggctagccaacactgttatggtgaagaaggctaatggcaaatggagaatgtgtatngatntcacagatctcaacanagcatgtccaaaggacgagttcccattaccaagaaatagactccttgtagatgcagcagcttcttcggagctcatgagtntattggactgctattcacgctatcatc

SEQ ID NO: 24372 - DNA, 415 bp, Zea mays
  unsure (1)..(415): unsure at all n locations
agctagtgaagaatattcatccccacatgtgctaagcggcgatgccacaaccagcccatgctagtcttagcaattaagcatgcatctagaccggcctcctctnttgcaaaatcaactaaataaagattgtcgtctagtacaccctctaaagccaatgaaccatcacttcttctaaagacagacacatctacatgtgtgaataaacagttatattccatattacagagttgactcacagataacaagttatatccaagcgactcaactaagaacacattagaaatagagtgctcggatgagaataacaattttcctaaccctttcaccttgccttgtgtcccatcaccgaatattattgaagtcttgggatccttgttcttgacgtacgaagagaacaacctctnttcccccgcat

SEQ ID NO: 24373 - DNA, 505 bp, Zea mays
  unsure (1)..(505): unsure at all n locations
tcgcacaaaggatgatgagcacagtgcgccgcgcatcatgggcgtactgtttgacaacngacaggacatgtgcgccgtctgcaagatggctctggcgccgcctgccagcggagtggacatgacacattaaatgctgtgagggcacatcgcctgtcagcaaggtggacaggcgacgcgtcctttccacaattaatgcagagacaacgctgtctagaggccttacatcatgctccggccgctggcttacgtcacgggcagtaggccacgtggcatcaccgggtcctcgcctgatcggagagcggatgcgcgcttggctagaccctgacaagcgtctgtgccggacccctgtacgtccttgacttagaccaagggattctctgtccgggatcttgtcatggtggcccaaccttacttgaggggccatgcccattcggagacacggaggtccggatcgacctagatgtcaggcatgatgctgggtccacacttctactgcgtccgatca

SEQ ID NO: 24374 - DNA, 258 bp, Zea mays
  unsure (1)..(258): unsure at all n locations
agcttnccccagagcttacaggctcacaactcctaacggcgaagacctagagcactcctggaacgtcgacaaccttcgcaaatattttgtttgacccatttaaagccgatttcgcccttgtaattcgccgcaaacaatcttgtaccggcccgcactctctttctcctgtggggtgagaggtttaacgaggcggagccatgtaatatatgtgagagaaatcccccgcacaagcatgtgtcgaaaaaagaccgcaacaac

SEQ ID NO: 24375 - DNA, 423 bp, Zea mays
  unsure (1)..(423): unsure at all n locations
tgctcatcattggagaataattggtctataaaactatctgatatttctctaattgccaactnntttatctaacaccaaaccttgaaattccattctttcttgacatgataaactagtctaatcatctttgcactcgttttctccatagattgttctagaagagtggtagttgtttatatgtgaccagcgaccacatattaactgcagtttctctataggcattgtaatgtaaacgaaaacaacactttttgcaaaatctccccaatattttttatttaacttgtagtgtgcttctcccggctttcgctncttggtcatccncgcacgtgtaggtccacttctggtgcctccaatccctccacgacgcacttcttcgtcgccacatcattctttctgatgacctcgcgctccctctctctctcg

SEQ ID NO: 24376 - DNA, 222 bp, Zea mays
gatgcacgagcccttccttatattgtgacaagccttcgtcatcttcctaacaaataactcacaccattcagagccattattacttgtgtagtaattatccgcagttggaggatgctctgtatctgtatgcatattcacaccaccatttgaaattccctacacggaacgcgagattgatgctactgtccgccatacactctagaaaactacttctacgctttc

SEQ ID NO: 24377 - DNA, 175 bp, Zea mays
  unsure (1)..(175): unsure at all n locations
gagaacacgtgataagtctaaccaatgttcatttcgaaaaagatagaccttgtgcactttgtctagcacgtaaacaagtgggaggagcacatcacagcatgaatgtgatgaccacgttcagaccggtggagctgctgcatatggactcgtgnggatagatatcccccgggtccac

SEQ ID NO: 24378 - DNA, 220 bp, Zea mays
agcttgtgaagattcttcattccaacatgagctattcggcggtgccagagccaacccatgttagtcttatcaattaagcatgtgtcgagctcagctctatcaaaatctactaagtatagctgaccctctaacacacccttaaatgcgtttgaatcatcacttcttttaaagacagtgacacctacatcagtaaaaagacaggtgtagcccatttgacata

SEQ ID NO: 24379 - DNA, 213 bp, Zea mays
atttgttgtgcatgtcacgcacgaaagcaagttggtgttcatcatccacacaaaaacatcatgacggctgacatgccactcgagctcctacacatggacctattcggcccgatagcttacataagcatcggcgggagtaagtactgtctagttattgtggatgattattctcgcttcacttgggtgttctttttgcaagaataatctcatacc

SEQ ID NO: 24380 - DNA, 168 bp, Zea mays
agggcttgtgaaatatcaactaattggtgtggttctaatattattctattcgatatctccttttggtggtgatctcttcaaaagtgacaccggatgtctttgtgcttattgtggctgtgttaaccggattatctgcatgccgattgcacctctattatacataatgag

SEQ ID NO: 24381 - DNA, 303 bp, Zea mays
cttagcaataagcaagtgttgagttcagctctatcaaaattcactaagtatagctgaccctctaacactcccttaaatgctattgaatcatcacttcttctatagaaacagagacacctacatcagtatatagacagttgtagcccatgttgcataattgagatacagaaagcaaatggtcatctaatgaatctacaacataaacattggatatcgaatggtcatgagatatagcaattttaaccaatcctttgaccaaactcttgactctcatccacgaatgtgatagctcgatgcggatct

SEQ ID NO: 24382 - DNA, 487 bp, Zea mays
  unsure (1)..(487): unsure at all n locations
ggatctctaagtcacctgcagcatgcagcttggaagttcttattcttcatgtgctaagcggcgatgccacagccagcccatgctattcttatcaattaagcatgcatctagaccggcctcctcttttgcaaaatcaactaaataaagtttgtcgtctaatacacccttaaaagctaatgaaccatcacttcttctaaagacagacacatctatatttgtaaatagacaattatatcccatattacataattgactaacagatagtaaattatatccaagagactcaactaataacacattagagatagagtgttcatttgatatggcaatcttgcctaagcctttcaccttgccgtaggntcccatcaccgaatatgatngaatcttgagaatccttgggtttgacgtaagaagagaacatcctctnttccnacgcatgtaggtcggcatccgctgcgataatccacttgacccctgatgataacct

SEQ ID NO: 24383 - DNA, 481 bp, Zea mays
  unsure (1)..(481): unsure at all n locations
agcttgcatctgtcggtcgcagcaatgggagttcttcatgacttggtcgatgacacgctgctagtcgccacgagcgtcgaggcgccgaacccctagctcgatggcgatacacaacccgctaaccacggcctcgtactcggccacgttgttggacgccgggaaatggaggcgcaacacgtagcgaaggtgcttcccgaggggtgagatgaatagcangcccgtgcccgctcctgttttcatcagcgacccattcgaaaacatggtccagatttccggttggatcgaagctgctggaagctgggtgtcgacccattcagcgacatagtccgtcaagacttgggacttgatgaccttctatagggcgaacgagattgtctcacccatgatctccactacccactttgcaatcctacccgaggcttctcggcactggatgatctccnnccaggggaaggatgacaccacagtcaccggatgagac

SEQ ID NO: 24384 - DNA, 377 bp, Zea mays
  unsure (1)..(377): unsure at all n locations
agcttggacgatgtcnttatctacatcaacacctgatgcgagcaccaactactctgagtcgaggacgactcataaccaagaaagggagaatgatgagtacatggacgtcaactatatggtccacgcccaatcaaagataaagtcccaagctcaaagggagtctaagtcacagttattcgccgatctgggttggactactggagtgtgtatcacaaaaacagacacagaggccacatacatactcttgtttcatgtttagacatcattggaagctatgaagatangaatccaaccttactagtccacgtcaaaaactattggaactgacagaatttcataacaagatgatgtccggacctaccagaaatcaccaacgt

SEQ ID NO: 24385 - DNA, 371 bp, Zea mays
  unsure (1)..(371): unsure at all n locations
tcatgagcagtagcttctgtatcacgtataaacaggtgttgccgaatgtgtgtctttctgcangaccttcagcgacgaagcatggtcccaacagcgttcatggactatctctacaagttcatagcggcgttcattgatgatattctcgtatattcccagaatgagcaagagcataaggaacatttgaggaacgtacttcagaggntaccagattgccagttgtatgccaaacttatcaagtgcgagttctggatcagcatagctctattcttgcgtcatattataaaccaagatggactagctgtatattcatagaatgtagcagcgattctggactggatagcaccataagatgtccaaggaatcaagag

SEQ ID NO: 24386 - DNA, 430 bp, Zea mays
  unsure (1)..(430): unsure at all n locations
agcttacccatgatgaggcatgtgactattttaaaagtcctcaatcatcaagcctacatcaagacggtccttaaatgactcagatagagacactacaccgagactctcttctcatgcaagtcacccgcccggtctcagctttatcatttaaaatccaaaggttgggacctagcatatgtacatcttttctgatgttgaacccatcattgccctgatggatccaccatcaaggtttatttttgaanacattccatccactgtgaagcatcatccttgaatttaaaacaaaacatttgattttctaaggcaggactaagcattcaaaaaccctttaataaaacaagtaatcagggatggtaaacaggtcaaagaaggaatgcagcaatggttaacatcaactctatcactaatgcatagcaagtgataagag

SEQ ID NO: 24387 - DNA, 455 bp, Zea mays
  unsure (1)..(455): unsure at all n locations
acataccgagcatgttggaccaacactctctggtgtgtctttagtgtttggataacgtcaataatgataacaaccttgttgtcgacgattacgtgccctttgacatgtcttcaccaacctcaactgaagaactattctgtgaagaccgggacttcgccgagcactttaaanacatgtggggtgttgaatacaactcagatccgatgctattctttattgacaatgagctctaatttagcgggtccggaactatgtgttaagtagcatgcctactttctgtgtagcctaatgttaggctattgctactatgttcacgacgatctaggtacttcatggagacaatgtaaactgctatgatgctgacttgattaaggcaccgtacttgatatacatatggactgcattgcatgcggcactggtctcatatggcacggtctgttgtaccttcttgacta

SEQ ID NO: 24388 - DNA, 358 bp, Zea mays
agcttcttcacgggttgcttctacactgattcgtccttctctcgaaccgcgctcttcatattatgtatagcttcatcccatgtccaaaagttcctgtgcatttattatacttgggaaacatgttagtcgtgtttttgaggaccttcgaagacgaaggcccccaacaaggagctctatcttgccaagtggaaatgtgccctttccactaaagctatagagtgggttgtggggtggctgaagtatgctatggttgtttgccatctggccgaaagcatgtacgaagatgatgtccgcttggcttccgttgtcaacgaagaccttgtgtagctccagcctaccacatatcaactgatgatga

SEQ ID NO: 24389 - DNA, 471 bp, Zea mays
  unsure (1)..(471): unsure at all n locations
ttcctataatttcagatgtataagcttaagatcttctaaatactgattaattccttgtttggactaaaaaatcctacaactatttttattaactactagagaaatctatgagtccaacaaaattagtctcatatttgtatcattnttctatttttttctatggattntctaagtctggcagaaaaagaaaaaggacanaggtgaatagtaacgggctgaaaccagcccgatactgcccatacccaggcgaaacgcgcccacgcgcgcccgcactggcgtctttgcacagggacccttgctgttcgaaaacctgtaagagccctttcactatcacatgtgttttgacattgagatgaccttgcagtctattcttacagtgttggtcacatggtggacgtgatggcagctccggaagcctgtccggcatatcacaatggcgatgcttggcctactgaccacaattctaccctg

SEQ ID NO: 24390 - DNA, 508 bp, Zea mays
  unsure (1)..(508): unsure at all n locations
actcaagcttctcctgacaagcgccgcacttactgctgagtgcgaagctgccacatataacaacagaggagcccctggcgttggcggagttaatggtgtgagatctatcaagtattgcttcaactcttcgaaggctttttgttgacttgtgccccattgaaagacttcggctgacttcagcacctcgaaaaatggtaagtttctttctgctgatctggatataaatctgctgagagatgccagccttcctgtcaatctttgggccccttttcttgtagttggtggctccattcgaagtatagcttcgattttatntggattagcttcgattcccttttgtgaaaccaagcatccaagaaatttacccttctntactccgaagacacatgtctctggattcagnttctaccagcttgctgaagctggcgaaggtctctgcagacaacaatatgatttctgcttctgctttgacgatatatcatcacataggcacacattctgctattga

SEQ ID NO: 24391 - DNA, 155 bp, Zea mays
ctttatgaaactgatgaaagtgttcagaatggtcatggatctttctattttgctataagaactatttccaacagttacagaatcaggtggaacattgccatcttcagctgagacagaattgtaggttggtaatacagtaacaaaagaaacatgct

SEQ ID NO: 24392 - DNA, 466 bp, Zea mays
  unsure (1)..(466): unsure at all n locations
tctggaaatgcttctctgggtagaatgattggactgttctgtggntggattgaatggaatttagcagttcagatgttagtaccttgttaaagcgaggatggcacttcttctaaaacaagtgaatggagtatgagttggatgattgattcaagtttctgtttgatgtgatgactcttgactcatggtcactgtattatgaactttactatataaactcaaacatttgaaattgctataacctgtaatctagtgatagccaattttggttgggtcatcttggcagcagactaatttatgttccngtcatcggaccgcgcgaggatgcacnnattatagtgtttaatggaataactggggtttgactcgaaacctatggngaacanntacatgngtntgggctggtggcnacaatcatcaaatggcccagacacccaatgatattattctactgcccacatgcaatcat

SEQ ID NO: 24393 - DNA, 226 bp, Zea mays
attgaataaccttaactcgctctaattcactaagatttctcaacttgcatggaagcataattgttaaaatgggaggtttacgtttaggattatctcttattgagaaaagagatgatgttagtgactcaattatcttggaccttccaaagcgtgatgcctcggccgtacgctgctgattgcataatgagagagtaacgtacaacttcacgtgactctagacgtaaca

SEQ ID NO: 24394 - DNA, 215 bp, Zea mays
  unsure (1)..(215): unsure at all n locations
cgagcttatagtttctggtgagaagtggcacccatgttttgttgatgaagcaccagaagaccaatcaaggaaggaatccatgtgggagttcgcaagagaaaggtttgcgtgttggcatcgatgctttctcaataagctagctgccaagcgaaagctgaagcctgaagatgatccttgagtagccagaatcagtgtngcaatcggcaaccggatgc

SEQ ID NO: 24395 - DNA, 246 bp, Zea mays
  unsure (1)..(246): unsure at all n locations
agctagctctcngcgttcccaaatatcccatatttttcatcataaccatgtcgtccgccatcacagtagaattaccaaattccatgtggctaggtttcattgggctcaaaatagtgttgtcctcctcaccttcgttctcacttccttccttatcaaagatctgttcagcttcagcagtggaagtaccttctacaatatccctctctggcacaacaagacccgatcgcctcattacttctgatattg

SEQ ID NO: 24396 - DNA, 222 bp, Zea mays
tatcaggttaagtagttacctgcatctagagctctttctatcctagatcaggcacttggcctatgctagccgtcttttatcaatccttcaatatacttgattgctacgtgtacggcagtgaccaagtcttcatgtgccataagtaaccgcgatccgaaccaattagtacccagctggtgatctccaaccacacgacatatgtagcacttaacccttgcatat

SEQ ID NO: 24397 - DNA, 353 bp, Zea mays
  unsure (1)..(353): unsure at all n locations
cgtgatacacctttcgtcggtgaaactntctggtagacattatctccttctagaaagtacaagggttggcgtcgcttgtctgcataactcttctggcgagcttgagcttctttcaaattatgaattattcgttgaactttttcttcagtctcctttaccatatcaggtctgaagaagcttctttcacctggttcagaccaatttaacagagtacgacatcgtcgtccatataatgcttcgaagggtgccatcttaatactttcttgatagctattattatatgagaactccgcttatggtagacaatcatcccatttctgtgggaacctcanagcacaagctcgtaacatatc

SEQ ID NO: 24398 - DNA, 481 bp, Zea mays
  unsure (1)..(481): unsure at all n locations
agcttatctcaaattcatacggtggaggtcttgatatgtatttatgcacgagtagaatgtgtttctattctgtaacttacatgacactctctgttccacttctctggagtaaaaatatagcacataaatatatacgacatcttcctaataatagtatacaaatatattttatataaaagcgaattatcttaattgatatatgtctaaattactattattagaatagagatcaatttcacttatctcaacaggggattccgatctagttaatggactacgctattatgttagaaattcaatattcataactttggaaggtcagatataaacatatcttaaactcatatccatggtataagagatagaaantgattctacaactcatcctactatatgtgtactctacaacatactcttcagctcactctcatacaacagaaatacaagccttatatgaccaacgatactatacaaatatcac

SEQ ID NO: 24399 - DNA, 472 bp, Zea mays
  unsure (1)..(472): unsure at all n locations
agcttcttcaccatgtgattattgttatcttgagaagggtgggcaatgcatttcccttttagatgtgtcaagctcttccttagcctctcattttcttctttgagcatttgatatgaatcatcatttgttcctgcaaattctagctcaaaagaagatttgcttggtgacaaacaacaagcattagcacatggtaatatagtatcaatttgaatacatgtgcatgagtgaagttgttgggatttaaattgtctatccaacctcatgagcaatgttaatatgatatgatcatctctaagatttcatgagagcatacgagcatatccatattttcttgaacagctagaatntcaattcttaagcttttcacttggtccttaagcaaagtattcctaattactaattgagcgatacaatgtgaagcgttatcttgctcaattganatagtctcataccttctgaccaaatcaacatg

SEQ ID NO: 24400 - DNA, 359 bp, Zea mays
  unsure (1)..(359): unsure at all n locations
gcttcgctagaccatactcatatactcngaatccaattccgaagatacctgttcacacatnttacttggaaaacattgtcaaatcatgtttttgaggaccttctgaagccgaaggcccccaacaccatccacagactgatgggcagactgagaagaccaaccaagtgctagaagatatgttaagagcttgtgcccttaagcatggtggtagttgggataagagtctaccgtatacagagttctcatataataatagctatcaggccaagttgaagatgtcaccgttgagctttgtatggaaaaagtgcngactcactgtatgggatcaactgtgaaagacaatattggcctgagatatc

SEQ ID NO: 24401 - DNA, 327 bp, Zea mays
  unsure (1)..(327): unsure at all n locations
tactcaagctgtgtgaacacacttgaagttcagctcatcttaccacccgcagacagatggtcatacagagagaaccaatcacattctggaggatatgttgagggcttgtgctctgcaagataagatgggttgggacaagagattaccatatgcagaattctcttacaacaacagatatcacgccagtctgaagatgtcaccattcgaagcgctctatgggaggaattgcagaactccattgcattgngaccaacctggtgaataataggtgttcagaccagatattntgctttgagccgaagagaacatcagaatggtccgagagaa

SEQ ID NO: 24402 - DNA, 476 bp, Zea mays
  unsure (1)..(476): unsure at all n locations
agcttgctgactttggtctggcccggatgtttgggagtccaagaaagaacttcactcaccacgtgattttatagcttatgtgtatgtgcgtctagttaattgttccctgaacttagaagctggttgcagaagcaaggttcacttagagcacctctctttaacattatatttctgatgcagtgtattctagtcactggatatttagataaatggatttaattttccctttaccaaagaaaaccgtgacacatgcatgcccaaatttgtcgtctctatgcnagttcctttgcagagcagtgataattggaactgtgtcagttagtaaatttggttagttaattttgtactttgtttagtagaatctattntggactttatcatagcccttttgctagaaattatctggtaatacaaacgatgcaatatcttaagtcaccaaactatttttggcaactgctgactntcttaataagtag

SEQ ID NO: 24403 - DNA, 428 bp, Zea mays
  unsure (1)..(428): unsure at all n locations
gcttctccagggagaacacattntatgactaaccaatgttcattntgagaattacttgatctgtatcgcatgccaagcaggaaagcaagttggtgcccatcatccacacaagaacatcatgacgaccgacaggccgcttgagctactccacatggatctattcggcccaattgcttacataagcatcggcgggagtaagtactgtctagttattgtggatgattattctcgcttcactcgggtattctttctacaggaaaaatctcatacccaagagaccttatagggattcttgagacgggctcaaaatgagtttggcttaacgatcaaganattaagacgcgacaacgggatggagttcaagaactctcatatcgaaagctttcttgaggaggagggcatcaagcatgagttctcttctgcctaca

SEQ ID NO: 24404 - DNA, 305 bp, Zea mays
  unsure (1)..(305): unsure at all n locations
actggagtggactggtgtccattggcgaccggcgatgtggatgattgtgtcctccggtgcggatgggctgacagaatgccacctcgcctcgaatacattctatggctgcgccgcgccgcccgagggctatgaaagagccaatgcgtgcggctcctgcggtctccggccgcacgtacggctggagacccattatgcgtcattaggcgtggaacaacaaactgatggcacggcgcttgtccgtgagatacacgcgccaagcataaagtgtttccgtctgttctgtgcttccagctntgagccatttg

SEQ ID NO: 24405 - DNA, 355 bp, Zea mays
  unsure (1)..(355): unsure at all n locations
agctagagacattattgctttattgtcatgtgttgtcccaaagacacacttgaggtcatcatatatatgctccacagaaccatataaagccttcgatgtccatacaatctctgtaatggaccacactcgttcctttgaaacaattcacagaacttaaccaattcagatcagactttaagataagagggacttaaaatctcattttcgatgatactcatcaagtatctatcttatgggaaaaacatgaccaatagaaatgtccatacttttcatttcatcccaataatggaataccaattcagcttancagcatggaagtatcatacatgaaaagttaacaaatgcacacattgac

SEQ ID NO: 24406 - DNA, 489 bp, Zea mays
  unsure (1)..(489): unsure at all n locations
agcacatttatgactaacanatgttcattntgagaaagacaggatttgtagcgcatgtcaagccgggaagcaagttgggactcatcatccacacaagaacatcatgacgagtgacaggccactggagctcctacacatggacttatttggcccgattgcttacataagcatcggcgggagtaagtactgtctagttattgtggatgattattctcgcttcacttgngtattctttttgcaggagagatctcatacccaagagaccttatagggattcttgagacgggctcacaatgagttcggcttaaggatcaagagaattagaagcgacaatgggacggagttcaagaactcgcacatcgaatgctctcttgaggaagnaggcataagcatgagttctcttcttcctacacaccacaacaaaatggtgtagtagagaggaagaatcgaactctatttgacatggcangaaccatgcttgatgagtac

SEQ ID NO: 24407 - DNA, 395 bp, Zea mays
  unsure (1)..(395): unsure at all n locations
agctctgttcttactcatattatccactaanacatgtgcatgctttggtttggtaccttgatatgcaaacagaagtgccttgcataccactcaagaagttctctctccaaaggggtattattataagctaaaggtacccgagttctacgcaccaacagaagctataaacagatcataatcttcgctaccatttgaactaatgttcccacacaatgtaacgtcaatggtaatattaatgtaataattcacactcgaataccagcagaattaagtttgaatagactagactcagtatatagcttgatatcttattaccgttggatttaaaccaacattgctaaactgttatcgatacccattaccttacaaatatgtgaacgaacaacacctaaagt

SEQ ID NO: 24408 - DNA, 446 bp, Zea mays
  unsure (1)..(446): unsure at all n locations
agaatactcagcttcttagggagaacacgtgatatgttngactaacgtgaaattcgaaaaagatagaccttgtgcagcttgtcaagcaggtaaacaagcgggaggaacgcatcacagcaagaatgtgatgaccacttcaagacctctggagctgctgcatatggacctcttcggacccgtcgcctatctgagcataggaggaagtaagtatggtctagttattgttgatgactnttcccgcttcacttgngtgttcttttngcaggataagtctgaaacccaagggaccctcaagcgcttcctcatgagagctcacaatgagtntgagctcaatgtgaagaagataaggagcgacaacgggtccgagctcaagaaccttcaagtggaggagttccttgaggaggaagggatcaagcatgagttctccgctccctacacaccacagc

SEQ ID NO: 24409 - DNA, 506 bp, Zea mays
  unsure (1)..(506): unsure at all n locations
ctcaagcttcgtcttatccacgctcttgtatattcgcaacctgactccgaagtgcctattacatattacacttggaaaatattatcacattatgtttcttgaggaccttcgggagccgaagtcccccaacactangcatgatctggagtgtagccatctgctagcgcgcataaaacttagtacacatatttcacaaacatctgccaacaatcaacagatcgctcctacaattgaaaccaagacctggtggtaagcatcccaccctgaaccacatgccatacagcagcagcgctgnntggtaatattgtatctttataattataacagcggcgatatcaacaaaataatctacgagtatctacacaaaataccctataactcttggattcaatggataattaaatatctgcatctataagttctacaacatctaacaagataactgaccgaatctcgttcagacagcagcgtatgttacttcaatattctatatatcacaaaccact

SEQ ID NO: 24410 - DNA, 186 bp, Zea mays
  unsure (1)..(186): unsure at all n locations
agtccgaaagtacctgtacatacattacacttggaaaacttgttaaaatcatattnttgaggaccttctgtagacgaaggccctcaacagaaaagaaacccacgatgctcgagaagaagctaaatgagctgaagaagctgccgagcgcgcaagacagataggtattatctctgagatttatctttg

SEQ ID NO: 24411 - DNA, 356 bp, Zea mays
acttaaactctcgtgccttctatagaagcgcgttcttatgcttaacaatcttacaacatccttcggtaaatctacggttatatcctgcgagctcaaagatactacgaatctcagtaactgttgtgagtatgctccacgccattatcttcttgactataacatgatccactgatattcctgcattagaaatgatatcgtgcaatgatatggcacccttgtcaatccaaaactcgcatgtgtaacatggcgagagatgatatcctatttctgtacacaattcaatgttctatgacactttactctacataataggatattgcgatatcacccgacaatctgtcaatactcataacact

SEQ ID NO: 24412 - DNA, 394 bp, Zea mays
acgacgtggtcaggccaacgtctcacatgctgaagcggaagaagatgctctgctcctagcacatgcaagcatcgagctatctccagcgacaccagccgcagcggcactcctccaccttgatgagtcgaaagcacgcacttttcttggcgacggctccaacaaagacatgatcgaaggatggtgcctcgataccagcgccactcatcacatgatcggtcgacgggagttcttcaccgagcttgactctagcgtccgaggctccgtcaagtttggggacacctccggcgtagagatcaagggcgccagctcagtcgtcttcaccaccgcgtctggtgagcacaggctgctcaccagagtctactacatcctcacgctaaagaactctatcatcagc

SEQ ID NO: 24413 - DNA, 142 bp, Zea mays
ttcgaaaagatagaccttgtgcatcttgtcaagcacgttaacaagtatgaggagcgcatcacaacaagaatgtgatgaccacttcaagacccctggagctgctgcatatggacctcttctgacctgtcgcctatctgagcat

SEQ ID NO: 24414 - DNA, 94 bp, Zea mays
ccctgcccctaaaataaaaaggctaaccgccttttttgaaaaaataacaagatgcggcctaaactcaaaagaggaaaacctcttttaaaaaaaa

SEQ ID NO: 24415 - DNA, 260 bp, Zea mays
  unsure (1)..(260): unsure at all n locations
gtcgttcgtcttgctgggtgatgaanaagagctctattctcgtagcccctcgggcatcctccaacgatgcatatncatcgcccaaggacgagagctcgtgcaagaaatacactcgggggcttgcggccaccatgtagcgccttgagccctcgtatggaatgcctttcgacaaggtttctactggccaactgcggtggccgacgccactangattgtacgctcctgccggnggtgtcaattctacgcgaggcaaacatgcc

SEQ ID NO: 24416 - DNA, 134 bp, Zea mays
agcttgtggtagtggagagctatgtgctgtaatggcttgatgtgatgaatagacaaactagaagaaaaaatggcatgtgcataatagcaactctcttcccatggcagatggcttctgatagaaccacgcctacc

SEQ ID NO: 24417 - DNA, 238 bp, Zea mays
  unsure (1)..(238): unsure at all n locations
atgtgaatcctacgacatagctggctcccactatatatgtgcatttctgaaataccaatttgtgaacatatgccaaacacacatatgtgtggcgnagtatggagacaacatgtgtcaggactattcaaaggaggctgcgcgtcatagaatgaacgcgaggctcatgacctaggatgcactcatcaactatctagatcatactgttatcttatgacctcccccttgtttaaatatttct

SEQ ID NO: 24418 - DNA, 511 bp, Zea mays
  unsure (1)..(511): unsure at all n locations
aaacaagcaccatctcttacatagaattttatggataaactcaacacaagagatgacattagtagcacaagcactagtttcttatttagcaaccctttatatgtggaaggcaagcgagttgctaaaatagagaaacatcataatatggactatatgtcccttgagccctcatgcacaatatantttgaatgacatggataatatgcatggttgttcaatgaagtctaaagggctgacataatccatattatggtgagtgtctaataaagaagaatcaaatcaaaattaactagatagagaatacgtcacatacattttggatcgctcaccatatgataatattcattcatcttccattagacctttattcataataacaactgatgtatatcctcaagtgcttctttntcttagtggtacataagtcacacaaagataagattcgaaatatatgcacttgagatcagttgtaccacncttgtactatctccaatatgattatacattatta

SEQ ID NO: 24419 - DNA, 382 bp, Zea mays
  unsure (1)..(382): unsure at all n locations
caagctgctcggcactgcactgttgtaatcatcttccgaatcagtttcttcaacggtagcctgttctgcttcggcagcacggatgtccttcggtgttaccaacccagagcgcttcattgcttccgaaataagaacagtcccttacgatcaacccgagcagtagagtgaactctggccatttgattatgactcacttgaaattgttggtgttgacttttctggttntttcgaagctcttactcttgntccgaagcagaatcacaagcgaaagttcgtctgagcatgatgaataagcttcggctatgactaannaattggcagcaaaacagtgcaatagcaatgaatggtgtggtaacttcacacctacccgtctgttatatag

SEQ ID NO: 24420 - DNA, 541 bp, Zea mays
  unsure (1)..(541): unsure at all n locations
tactcaagctgtgagagcactacttcatacaccactgctgctagtcgttcatcgactattatactattggcaatgcatggaactgcaccatgggtgattatgctggcagctngtcagatgcgagaagtaagccgtcattgtctgcatcagattctacagattcacgaggttttatgcgcaagacgatgagtggtgaaggaaaccaggtatntactattatagtattccttttatcatgcttctctcttctagtacttataattntatctactctataatagtaatcataagtgaatctatcctataaaatggtactctaatccattntaaattctgttcattttattttcttatttttcactacagaattaccatactgctctatcagttctagcaggaattaaataaactcacgaataactgcanactactaatatcngtgtgttgcttgtttggatgttattgggccagtgagacctgcgaatcacgattctcacgagcaactgttaaacnttcttgcaagatgatagtgtcttgatgt

SEQ ID NO: 24421 - DNA, 409 bp, Zea mays
  unsure (1)..(409): unsure at all n locations
agcttaatgcccctaatanattgtgctaacttgntaagggcaaagctcccatggttcaagataatgagggctatattntatatcctgctgattatcccgaacacaaaattaggagaattcatgctaagaaatcttattttgtttctcaccatgattntatgtataagaatgaggcttctagctctatgaattctactcatgttaaaatgcctaaaaagaaaactcctactacatcaaatgatcacaaacattccatttaagacttttgatgcatcatatgttttaactaacaaatcangcaaagtagttgccaaatatgttgggggcanacacaagggctctaagacttagtgttgggacccaaagtgctagttctaacgtgaaaggacccaagactggttgggtacct

SEQ ID NO: 24422 - DNA, 488 bp, Zea mays
  unsure (1)..(488): unsure at all n locations
agagactntcttcacggatcaagctcgcttacgaaaacgatctatctctgtatttgtgctactggtggaactatgcttcgtcgccgaaagtcttgtaagaagaagcagcttctgctgaagctgtccgcatgagatgaccgaaggatcctcttcatgaagcttcagaattacaaaccgacttacaagtagaatgaccttttagtccataaatggttgggtcgctgctgtaatcccttataaggggcataattgtaattccccacaggctgtgtcctgtgcctataaatagtgaacagtattcctttactggtcacgcattctttgtatgtgcaatcgcatgcattcggaaccaatactttgcaaggcagaagtattactggattcaatggataaatatactgagtaaatataatatgggtcatatatgaattcattaccttcgatactctatattttatgttattttatacaatctattannaatcaat

SEQ ID NO: 24423 - DNA, 452 bp, Zea mays
  unsure (1)..(452): unsure at all n locations
gagctctcctctctggttgagcacaaattatgaatactcagtgtatagaattgctcccactacatatgtgcttacttcagaatcataattntggccttatatgccacattgcacatacttacgtgattctaagcatttctatgccaatttgcacatacttatgcaattcgaagcatttctacaccttagcaccttttggaatgcattgngtctaagatcaaaccatgatgccataacgcacaaatgcacagattcagagtttaacgaccatcattgagtggctatatacaggaatataacctacacttttaccattagatccaattagatctaatttnagcaatcttacaccattaccacatgatcattgtcacatgactattattcagaatgacactatgatgccattaattctgcgaggaagcctagtcattgatcaaccatatatactg

SEQ ID NO: 24424 - DNA, 502 bp, Zea mays
  unsure (1)..(502): unsure at all n locations
tactcttngatagagtaccgataaccttctctccagtttgatctctgacgcagcctaacttttcatcgtcaacaccaccgaagagtcttcggctatatccttttccttctcaggctctgtggccatgggttcttcagtggctgcaacagattcttctgcggccatgtctagaagtattttatcaatattacaaagtgtgctttctaaatgtacatcttcggccgtggcagcttcggtagctggtgcgctctcaacagctggtgtcttcgaagccgaagcttgtggtggtgtcccttcaataacttctatcactgtaataattcttcgttttttggcccgctgccttcttcgtatcgagggctcttatcttctgaaaagcttcgcagatacggcccattggactactngatggcaaagatcatcataccttaaaattctcccgcngtggcaaaggtgcacagttctctctatatagtgctttgttcaagcgacttttttctca

SEQ ID NO: 24425 - DNA, 383 bp, Zea mays
  unsure (1)..(383): unsure at all n locations
tcaagctcgactctcggantcgaacanagctccagcttgaagcctgcttcgtcagaaggaataaacttcggnaagtaaagtatntaattgccacaaattcagaattaaatggccagagtgcgttctgccgctagggttgagcgtgagggggtgaagctaaaggttcagagaatgttcccatctccgaagcgatgcaacgatctgggctggtaaattcggaaaaaatccccagtgctgatgtagaacaagcagaacaaacaactgccgaagcagaagaagataacattgaggaaactgatcctgaagatgattatcgtattgctatgccaagtaagcccagccacttggacttcggaaagtctactgtttcgaatgctgatctc

SEQ ID NO: 24426 - DNA, 391 bp, Zea mays
agcttcacctcgcgcagcccactttctctttctcgcgcgcgcgtctcctgcgagaaaccctagccgccagcctcactgctaacgcgcgccgctgctttcacgctggcagaccgggcccgcgctacatcttaccaatttcatcgcctggctactgttgttccggtcgccagtcactgccatgtgggccaatgtgtcagttgtcttcctcgctgcgttggtcgcggtctgttccgtgaagctaagatcgaccggtgttcgtgggatcgtatgttgagggctcttcccctccctatccgagctccacagatcaactaccagcgcgggtccgccgctgcgccacctgcgcaactgacctccgtgaactacgcagcagcagctaattcactggact

SEQ ID NO: 24427 - DNA, 391 bp, Zea mays
  unsure (1)..(391): unsure at all n locations
tctatagggtgaacacgtaatatgtctaacaaatgttactttcgaaaaagatagatcttgtgcagcttgtaaagaaggtaaataggtgggaagctctcatcataccaaanatgtgatgaccacatctagacctctggagttgcttcatatgtatctcttcggacccgtcacctatctaagcatatgaggaagtaagtatgatctcgttatagttgatgattcttcccgcttcacttgggtattctttttgcaggataagtctgaaacccaagggaccctcaggcgcttcctaaagagagctcanaattgagttgagcttaatgtgaagaagataaggagcgacaacgggtccgagttcaagaaccttcaagtggaggagtaccttgaggag

SEQ ID NO: 24428 - DNA, 421 bp, Zea mays
  unsure (1)..(421): unsure at all n locations
cacatgtgctaagcggcgatgccacagccagcccatgctagtcttagctattaagcatgcatctagactggcctcttcttttgcacaatcaactaaatanaggttgccgcctaatacacccttataagctagtgaaccatcacttcttctatagacagacacatctacatttgtaaatagacagttatatcccatatgacataattgactaacagatagcaaattatatccaagactctccactaaaaacacattagagatagaatgctcattggagaatggcaatttacctagcccttntaccttgccttgattcccatcaccgaatataattgaatcttgggaatccttattcttgacgtaggaggtgaacatcttcttcntccccgtcatnatggttgtgcatncgctatcaataatc

SEQ ID NO: 24429 - DNA, 291 bp, Zea mays
  unsure (1)..(291): unsure at all n locations
agcttctaaagggagagcacattttaggactaaccaatgttcattttgagaaagacaagatttgtatcgcatgccaagcaagaaagcaagttggctctcatcatccacataagaacataatgacgactgacaggcctctagagctcctgcacatggatctattcngcccgatcgcttacataagcatcggcgggagtaagtactgtctcgntattgtggatgattattctcgcttcacttgagtattctttttacaaggaaaatctcaaaccccagagaccttataaagat

SEQ ID NO: 24430 - DNA, 454 bp, Zea mays
  unsure (1)..(454): unsure at all n locations
agagtcatatgaagcagtgggtagcatggtgaatatatattgttctgtctgatattgataccttaatataagttgtaactaatctgcattatatatgccacagggtcaaaaggaaacgaacacgctattcatgtttgagataaaggttgcaagatcatacacaaaggctgtgatgaataaatttcaagaatctttgtaatatgcaaccgcattcaatataatgcacgacgaataaaggggtgccaatgattgggtagtgcaacatacaactagatcgaataaaattgtgttgggacgacacacaattaaagtgacagcttatgaagatgcacgatagtatccttgtgaatgcaaacattgggaacatacaggtatggagtactacatagtanatatatacattgaatacatatatacaaaatcttatgatcgtctgtgtttatatgtgcacacc

SEQ ID NO: 24431 - DNA, 153 bp, Zea mays
agcttctaaagggagaacacgtgataagtctaactaacgtaactttcgaaaaagatagaccttgtgcagcttgtcaagcacgtgaacaagtgggaagctctcatcatacccaaaatgtgatgacaacatcaagacccctggagttacttcata

SEQ ID NO: 24432 - DNA, 264 bp, Zea mays
  unsure (1)..(264): unsure at all n locations
gtgtgcgtaccaaatcagttcgcgatgtgatcttatttatacgcctacggcgttgaaaattgaaaggccccgcttgtcagtagatgttgctattctagcaaagggaaggtgttttttccgaccttctgctcaaggccttcgtccatatcgcaatctgaatttattatttacaaantaatattgcgaggggctactgttggnggccttcgtcctccgaaaggtctcaaaaacatgatttgacaatgttntccgagtggattatgt

SEQ ID NO: 24433 - DNA, 389 bp, Zea mays
  unsure (1)..(389): unsure at all n locations
tcgccctatctcaggactcggnctcgggaggaatcgcatactcgcccgaccccagcctcggtctcaagagaagtctccgcctcgcccgaccttgggctcggaccgaccacgccacaggggatacatcattaccctacccctagctagctcaggctacgagggaacaagaccggcgtcccatctggctcaccccggtaacaggtaatgatggttccccgcgtgcgttcatgacgtcngtggttctcagccccctacggaagcaaggagacgtcaacaggatcctatccgcacccgcagctgtgcttctacatggctcaagcacttctctgacaacaacttatcgcgtacacagggctatgcacttcttcgacaccacttggcatgacaca

SEQ ID NO: 24434 - DNA, 178 bp, Zea mays
  unsure (1)..(178): unsure at all n locations
gaagcccatgctcttatgtgacgatattgcagagcagaaagtgctgttgggctctcttctatccgaagaacaagagacaacctttataatgattattgttctacaacaaagatgttnttgctaggcagacaaagatctctgcggagttaataaggaagttattgagcattctctcaat

SEQ ID NO: 24435 - DNA, 518 bp, Zea mays
  unsure (1)..(518): unsure at all n locations
actaacagatngttcatttgagaattgcatgatttatatcgcatgtcaagccgcgaagcaacgtggtgttcatcatccacataagaacatcatgacgactgacatgccactcgaggtcctacacatggacctatttcgcccgattgcttacataagcatcagcgggagtaagaactgtctatgtattgtggatgactattcttgcttcacttgggtgttctttctgcaggaaatatctcatacccaagagaccttaataggattcttgagatgggctcanaatgagttcgtcttatggatcaataagattataagcgacaacggaacggacgttatgaactctcaaattgaaggctctattgangacgagggcatcaagcatgagttctcttctccctacaccccacagcaaaactctcgacaatgatctgtctcgatgccaaactcatgtagatgaatatatatgttgggctactaacgacactacatgctacgaatatagtacgatcatgacacac

SEQ ID NO: 24436 - DNA, 472 bp, Zea mays
  unsure (1)..(472): unsure at all n locations
gagcttatgaagattcttcattcctacgtgggctagtcggcgatgccagagcccacccatgttagtcttatcaattaagcatgtgtcgagttcagctctatcaaaatctaccaagtatatctgaccctctaacactcccttaaatgctattgaatcatcacttcttctaaagacagngacacctacatcagttaatagacagttgtagcccaattgacattattgagatacagaaagccaattgtgatctaaagaatctaccagaaaaacattggaaatagtatggtcaagcgatattgcnantntacccaatcctttgaccaaccttgattccattcccgaatgtgatagctcgtagggatctagtttttctcatataaggagacatctcttctccctgcatgtggttgtgcacccgtgcgagtatccactngagccccggatgcatacctacaaacaatttagtcttgct

SEQ ID NO: 24437 - DNA, 528 bp, Zea mays
  unsure (1)..(528): unsure at all n locations
tactcaagcttctcctggacaagtgctgcacttaccgctgagtgtgaagctgccacatataataacatatgagcctctggcgtangtggagttaatgttgntagatctatcanatattgcttcagctcttcgaaggctntctgctggattggtccccattgaaagacttcggctgacttcagcacttcgaagaatggtaagtttctctctgctgatctggatatgaatctgttgagagatgccagccttcctgtcaatctttgagcccccctttttgtaccttggtggtccattcaaagtatagcttcgattntacttgggttggcctcaattcccttttgtgaaactangcaaccaagaaatttccccttctttactccgaagacacatttttctggattcagctttagaccagcctgtctanaaatagcgaaggtctccctgtaatcaacaatgtgngtatcttgcttcgtgctcttaccatgatatcatcaacataaagtagtacattcctgcctatctgagaat

SEQ ID NO: 24438 - DNA, 504 bp, Zea mays
  unsure (1)..(504): unsure at all n locations
ctcagcttctacgtgtgagctacttttgtatgcatgcatgcttatgaagttgcagtcctggtttgcagaatcgtacacgatgagaatgggtggtggtagcctgctacaaatttcccatgggctctgtttgcttggagaaatctttgtcctgccgttatgctgccgaaattccgatcgttcgttcgtccgatcattcgatcgttcgttcgtccgttcgttcgtccaaataatctttgtcctgccgttatgctgccgaaattctgatcgttcgtccgatcattcgttcttccgttcgttcataatntctattcatcgntcatcattcgttcatcatcactattcatcgntcgttcatacggactattcaacatcactattcaccattactattcatcatcattactattcatcgatgatatctataataactgtttggtcgcactattcatcgttactattcatcgatcatccgatcgctccagatttcaactctcatccatcata

SEQ ID NO: 24439 - DNA, 400 bp, Zea mays
  unsure (1)..(400): unsure at all n locations
agctntacttagttggatttgcaaaataagaagccggtctagatgcatgcttaatggctaagacttgcatgggctggttgtggcatcgccgcttatcacatgtggggatgaagaaccttcacaagcttctaaagggagaacacgtgatatgtctgactaacgtgcaattcgaaaaagatagaccttgtgcagcatgtcaagcaagtaaacaggtgggaggagcacatcacagccagaatgtgatgaccacttcaagacccctggagctgctacatatggacctcttcagacccgtcgcctatctgagcctaggaggaagtaagtatggtctagttatcgctgatgacttttccgcttcacttggtgttctttttgaagatagtctgaacccaaggatctc

SEQ ID NO: 24440 - DNA, 389 bp, Zea mays
  unsure (1)..(389): unsure at all n locations
agcttggaggcgtnnattgttgtctacttggagtagactcctccttcttttcttccgtcgccttgaatgcgacgggttgagcttcagatgtatatggatcatcaagctcgctgatcttcctcgagccttcgatcatgcactcaaaacttacaaaatgcccgattacttccttgggggtcattttagtatatctacgagtaccacgaattaatcgaacttgagtggggttaaagaaaatgagagatcttataataaccttaaccattttcgtgatcgtcccacttgacgctcccgaagttgtgcactcggttcaccaaagtcttgagccggttgacatgtgtggtggttctcccctttgcgaagctgaaccgaccgagcccccctcgatc

SEQ ID NO: 24441 - DNA, 496 bp, Zea mays
  unsure (1)..(496): unsure at all n locations
ctcaagcttctcgagggtttgtgggggctctctagcgaaatattggtttggtggtcctggacgaagtcccttgatcatggattcaatgacaatctcatttggcaccgntggagcttaagctctgagacgtagaaaccttcgtacgtatgcctgcagatactcttcgtggtcttgtgtgcattgaaataaggcttgatcggtcacttgcttcgtctgaaacccctgaaagctggtgactaacatatccttcaacttctgctatgatgtgattattcctagcttaagagaagaataccaggtttgagcaacacttttgactgccatgacgaaagattntgccatgacagcggtgttgctaccatatgaatgatatggtgcttcatagctcatgagaaattcatcggtccgagtgcccgcatacatggaaagtggtgtgtctgatgaaagggcatgggtacctgaattctgactaggggaagctatcaaacatgtatat

SEQ ID NO: 24442 - DNA, 480 bp, Zea mays
  unsure (1)..(480): unsure at all n locations
agcttgtcggatgaatatcactttttatgagatacatatatgatggcatctaatctaattatagaaaatgcacgggccagcctgaagtatatggacttactaaaatgtaaaccccggatcaccatatatgtcgacattatgaaatcagtgtatagggacttactaagataagaggggttaataattgactggcacaaaaatagatgagtgtgtagttgttngaatccaaatcagacacaacatcatatgcatcggtccaaaagcatgtcacccctctgttttgaatccatctgaaataccatggaaaatgctcctcagcctactcccaccaaacatcttcatcatacgtttggctctgggccgcaagcttctagagaatnctgccacaagaacataagcataaaaagctaagaactgcagcgagaatngatgaacacatgatgaatcgctactgatagagtatgtagatgatcatacctg

SEQ ID NO: 24443 - DNA, 261 bp, Zea mays
  unsure (1)..(261): unsure at all n locations
ttgagatagacagggtntgtagcgcatgttatgcanggaagcaagttggtgttcatcatccacataagaacatcatcacgactgacaggccactcgagctcctacacatggacctattcggcccgatagcttacataagcatcggcgggagtaagtattgtctagttattgtgacaggggcgatgacaagaatggaaagaggagagaaaagaagagatactacaagaagaatggcggcgatgcccatgtgtgtcgcgagtg

SEQ ID NO: 24444 - DNA, 431 bp, Zea mays
  unsure (1)..(431): unsure at all n locations
agcttctaaagggagaacacattntatgattaacaaatgttcattntgagaaagacaggatttgtagcgcatgccacgcagggaagcaagttggagtccatcatccacacaagaacatcatgacgaccgacaggccgcttgagctactccacatggatctattcggcccgattgcttacataagcatcggcgggagtaagtattgtcttgtaatagtggatgattatactcgcttcacttgggtattctttntacaagaaaaatctcanaccccagagaccttanagggattcttgagacgggctcaaaatgagttcggattaaagatcaagaaaataagaagcgacaacgggacggagttcaagaactctcaaatngaaagcttccttgaagaggagggcatcaagcatgagttctcttctccctacaca

SEQ ID NO: 24445 - DNA, 437 bp, Zea mays
  unsure (1)..(437): unsure at all n locations
tgtctaatctactgattctcttgatggtgaatgttggtttcctcaattcaatggatggatgtatgtatgcttgcaatcgcttatagaacgatccggttggagagcccgaagaactcgcaggagaagcccctgagcagcagtcagctggtggaggcaagtgtnctttgacctatctctgtcctattcattctttaattcacctcccgcattacacatttatacttaaagattgactagctttgttatccatgtccttgttcacctatttgggtcggattattattatttagctctatgctattgctcannactctatcaatgaacatgatgagattgatatgatcngctggtctccttctcttatatgatgttgacttgtggcttaaaggggtcgacggttctcagtgccttcgtacgacctgtctatggtgaccgcc

SEQ ID NO: 24446 - DNA, 481 bp, Zea mays
  unsure (1)..(481): unsure at all n locations
atgtaacttttgtgaacttttgagatctgtgggatgtttgtaaccatgttatcttcattcgaacctaatattatgattatgacaatttccttccatatgagataatagcctgttgttcgaaattgtgaattgggataacaatggcgacaatctctantttcagatggcagctaggcaacgtcgcgggcataacgagcaagttccctcgccaccttctccagctcccagagtgcatgagctgatggtccagcangacgagattctgcgatagctcttgcagcgccagccccaccctcagcagtatggtggaggccagccgcagcgacctccggcagcggcaacctaccangagttcttaagtacgcagccgcccttgtcaccaagcagaggatcgttgacgccacatgtgttcncgtcgtgagtcaagttccctctcgcggaactgcctgtgacccaggctacttcgcgcgtacactcacgg

SEQ ID NO: 24447 - DNA, 265 bp, Zea mays
  unsure (1)..(265): unsure at all n locations
tgtatcggatacgaactgcagaaagggttggttaacttaaacaaagtcagcttaatggttaaggactttgaggcataaggttgggagccgagacatagagatgtcacccaacaaccagagtcatatatatgatatgattagcaaggagttgcttaccgatctaccttgtcttctagcggtgatgctaaagctcactagtagacttgttagttgtgggttctgaatcactaagtatcaatcganggatattcgatntagtgggagt

SEQ ID NO: 24448 - DNA, 270 bp, Zea mays
caccagtatctcttgactacatatgtttggataaataccaactgcagaaatggttggttaacttacacaagactcttaaggtaatgctttaagactaagtgggaccgagcattagatgtttcccacacaagagtcatatattgaatgatacatgattgtaccctcactgtcttacggagctgactatatgactgtactgcgtttaatacttgttccatcacgatatgatttactgggagacactattaatgctaagatggaactctgcat

SEQ ID NO: 24449 - DNA, 396 bp, Zea mays
  unsure (1)..(396): unsure at all n locations
tgcagcttaataacttcttagccaaatgtaggcgccctgatgttgtctttgctctgtataacatttcttgcaacaaagattccttgctaacaattggatacattgcatcagatgaattcttacttagagcagtagaaagttgagagcacctagagggggggtgaataggtgatcctgtaaaacttcaaaaacttaagccacaaaaacttgttaagagttagcacaggtatggccaagtggctagagaggagtcaaaacacaataaccacaagaaagcaatcacagagttgacacnggggtattccgtggttcggccaatacaaaacttgctactccacgtgtggcgtccaacggacgagagttgactcaactctctangtgatccatgatcaactg

SEQ ID NO: 24450 - DNA, 117 bp, Zea mays
  unsure (1)..(117): unsure at all n locations
ctaagcttgcgattaagtttctnttctagctagatcctgcagcatctacgagtccaggccacggtcgactggttcttcttcgatctagacttcctttcctttctttctttctgaatg

SEQ ID NO: 24451 - DNA, 147 bp, Zea mays
  unsure (1)..(147): unsure at all n locations
aagcactgagctgcactggggcctcgcgtctgccancaaaccatttcctggaatctggcaacctcgcggaacgccaaacgtgtccgacaagaaaaggccgtccacctctcaactgacaggagcttcttgtggttggtgcttcgcgcg

SEQ ID NO: 24452 - DNA, 409 bp, Zea mays
  unsure (1)..(409): unsure at all n locations
atagcttcggcgctacttctgagagggtctgccgaaggtgttctctttcttttangatcttcggctatgaagcatacccncaacagcaaccaaaagaagtgcaacatcaatgcaattgaggaccaaattgtttttgcacaagatntgacatatttggatcattctttgccaccacctggtttggttttgcaaatcanattcattntcctatctctaagtcaaacacacttngttgggcaaatcgagagatattccaagagaagtgttgatcaagtaccanaaactccccctttttcccataatcaanattctccttcacaagagaccaaattttgcaataagagtantttggacanatcaaaaattctaaactctaatattntcaaaatcacnaagtggtggctgatcc

SEQ ID NO: 24453 - DNA, 254 bp, Zea mays
tcttggctgtcaaactgtcttaccgtgtcaactgttagctcggacggtactccgaagcggcaacaatgtttgccagaagaatttttgggcagtctttgatgttattgtagaaacaacccttgcttcaatccatttggtgaagtattcgacggctacgaaggcgaacttgagattcccctgagcggtgggcaggggcccgacaatgtccaggccccagcgctggagaggccatgtatgggcaatcagctttgtat

SEQ ID NO: 24454 - DNA, 96 bp, Zea mays
  unsure (1)..(96): unsure at all n locations
gagatgctaanggtaaaatcatcaccgatttaaatgatataaatgatgatgatgatatncgatgatgtgatgatgatggctattcatatgatgatc

SEQ ID NO: 24455 - DNA, 508 bp, Zea mays
  unsure (1)..(508): unsure at all n locations
agcttcaacagaccagctggacccactccgtcacaattcagtcagtatagtcagagctccttntaggcccnctcagtngcaagcaaccaaccaccagcaaatgcttgttggcactgcagagaccccagtcacttcaagaacaactgcccccagttgaagtcatcaggacctgcttactccaactcggtgaatggccccaagaatacctcagcacccgcccccaaggcgccctccttcatcagccaacagaacaagacccaatatcaaggaagggcacgagtaaaccacgtcgatgctcacgaagctcagcaagcttcggaagtagtgctcggtgagttccttggttgaattactcccactactgtactntttgattcanngagcatcccattctttatagccactagttntgtggaaaagcatggcattccctctacccacctagaaattcctttggcatccgaacnccagggcagaccttctatgccagctcanatgctcacaagtc

SEQ ID NO: 24456 - DNA, 296 bp, Zea mays
  unsure (1)..(296): unsure at all n locations
atgacagaattgtagctggattgtcattgctataatttggtacagatagctagcttaatcaccacacaaaattgagagaaattggcgctccaaagtgctctgtcaggtgttctgatggggtctcgccatggtacagtagaccgagtggatcagaatgccagcgtaacttgctcgccgccggtgaccccccccccctgcgtgaagattcacgccgccgccgttaggattcgcgttcgcggcttgtggataacctctcggngaaaagatcttcgccaccgtcatgctgtaagccactc

SEQ ID NO: 24457 - DNA, 232 bp, Zea mays
  unsure (1)..(232): unsure at all n locations
tctcgcgtacaacacgcctgaaggtacggtgaattaaatacttgagaaaaaacccnctatctttnnttttttttttgttttacgcaactcattccttntttcttatatgaattcttttttcatatagggcctgatcctaagcaacgcgttaagagcgcaaaagagcgccgaagatgagangtatgaaattgcgtttaataatttacgctccgaagttatcaaactgagaaac

SEQ ID NO: 24458 - DNA, 371 bp, Zea mays
  unsure (1)..(371): unsure at all n locations
gcttgctngcacaagccattacctcatttcactagttatattagntgcttgttaaatgaattatgtatgagtgcanacacgcactatgtcctaaaaatgtaaaagggaaaccctaattttattttcggtcgtctttctttactattagactcatgaatcatagacacaagtgaaactatcaatcgtagataataaaaatattatcttcgctttttgaatatttatcgttcattagtttatttttaaactaacatatgataaataaaaaaaataagggagtatcgttatagcaaggagacattctccttccggttcctgtcctattcctttgcttgcttctccccactcctcatcgagaaattcggattatg

SEQ ID NO: 24459 - DNA, 390 bp, Zea mays
  unsure (1)..(390): unsure at all n locations
atctctaagtcacctgcggcatgcaagcttgtgaaggttcttcatccncacatgtgctaagcggcgatgccacagccagcccatgctagtcttagctattaagcatgcatctagaccggcctcttcttttgcaaaatcaactaaataaagtttgccgtctaatacacccttaaaagctagtgaaccatcacttcttctaaagacagacacatctacattngtaaatagacagttataccccatgttgcataattgactaacagatagcaaattataaccaagagactctactaaaaacacattagagatagagtgctcattagaaaattggcaatttacctaacccttttaccttgccttgattcccatcaccgaatacaattgaatctt

SEQ ID NO: 24460 - DNA, 319 bp, Zea mays
  unsure (1)..(319): unsure at all n locations
tcattcccaggttcaacttctccatttcttggcataacataatgtcagaagtcttcatcatcagacaatggcaggaagccttgcgacttaacacatctgccactacattagccttgcctcagtgatagtgaatctctagttcataatctttagtcagctcaagccatctcctttgcctcatattcaactctgactaggtaaaaatgtatttcaagcttttatgatctatataaatgtgacagatattcccctgtagataatgacgccatattntcaaggcatgaaccacagcagctaattccaggtcatgagttggaca

SEQ ID NO: 24461 - DNA, 488 bp, Zea mays
  unsure (1)..(488): unsure at all n locations
gctttttcaccatattatcacgggtatcttgagaagggtgagcatgacactcctccttcaaaagagataagctccttcttaacattccaacttctttcttgagctctttatttatcttgggngatagaaatatcactaattcctgaaatttctagctcaatggaagattggctttcttgagaagcaacatttgtagcacatgataatatatgttctacttgagtacatgtgcatatgtgagggtggtatgatcccaattagttaacacaacctcatgagccattctaacatgatatgtgaatcctaaanttatattgaaagcaccaagcatatcatgttttcttgcaagctagatttcaacatttacccttctatcgtgtcttgaccatacatttatttctaatgagcataatgataatgataacaacttatttgtcaatgaatgtctctacttggaccaacatatagagcacttactatatgtcttg

SEQ ID NO: 24462 - DNA, 178 bp, Zea mays
tgaataactgcgttaggtaattcagacacatactctttggttatagattaaagcggtacaatatcaatcttaatggcttgaacatggaaaaccggctaagctcctgcttatctcaaactgaataagaagaccagtctgcagtttttgggttttttaaagggtatatgaatacctaagg

SEQ ID NO: 24463 - DNA, 251 bp, Zea mays
acatgtgctaagcggtgatgtctcagtcagcccatgctagtcttagctattaagcatgcatctagactggcctcttcttttgcaaaatcgactaagtaaaggttgccgtctaatacacccttaaaagctagtgaaccatcacttcttctaaagacagacacatctacatttgtaaatagacagttatatcccatatcgcataattgactaacagatagtaaattatatcctagtgactcaactagaaacac

SEQ ID NO: 24464 - DNA, 435 bp, Zea mays
  unsure (1)..(435): unsure at all n locations
atgcaagcttatgaagattcttattccacatgggctagtcggcggggctttattctacccatgttagtcttagcaattaagcaagtgtcgagttcagctctatcaaaatctaccaagtatagctgaccctctaacactcccttaaatgctattgaatcatcacttcttctaaagacagtgacacctacatcggtaaatagacagttgtagcccatttgacataattgagatacggaaagcanattgtaatctaatgaatcaacaagaaaaacattggaaatggaatggtcaggagatataactatattaccccaaccctttgaccacacctggatttccatccccgaatgtaatagctcgttggggaatctggttttctcgaggaggagacatcttctctccctatcatgtggtgtgccccgtgcgatatcaact

SEQ ID NO: 24465 - DNA, 284 bp, Zea mays
gctattaagcatgcatctagaccgggctcttcttttggcaaatcaactaagtaaagctggccgtctaatgcacccttaaaagctagtgaaccatcatttcttctaaagacagacacatctacattagtaaatagacagttataccccatgttgcataattgactaacagatagtaaattgtaaccaagagactctactaaaaacacattggaaatagaatgctcattggaaaatggcaattttcctaacccttttaccttgccttgattcccatcaccgaatat

SEQ ID NO: 24466 - DNA, 258 bp, Zea mays
cttggatgtcaacaagaggacgcctcatgggtttgtgcagactacttttttatcatactagtcactattgaacaagttctcaacagtcaggcctatattcttttctatgagaggatggaagaccaggacgtttctggcatgacacgtcagaactgaagaatgcagtgatagaacaagcagatgagtgagataagcagaccttctctctcgaccgcaaggatctaatctagtcagtggtcatagtaagacaggctcttg

SEQ ID NO: 24467 - DNA, 377 bp, Zea mays
  unsure (1)..(377): unsure at all n locations
actaactgagcctggtagtagataggctataatatgcgaatngactcaagcctagctactggtgcatatgtttcaccaaaatccaaaccttcgacttgagagtatcccttggccacaagtcgggctttgntccttgtcaccataccatgctcatcttgcttgttgcggaagacccatttggttcctacaacattntggttaggacgtggaactaaatgccatacctcgttcctcgtgacaatgttgagctcctcttgcatcgccatcacccaatccgaaacttgtagtgcttcctcacacctgtgtggctcaatagaggaaacataagagtaatgctcacaaaanatgcaacacgagatcgagtagttaccccctta

SEQ ID NO: 24468 - DNA, 283 bp, Zea mays
  unsure (1)..(283): unsure at all n locations
gcttcacaggtttaccagagatgatgcacatactannaattggactgggcacgaatagaaacgtggggcgacggagagggtgtcacgacggcgttctatagagcaattgtgtgttccggtgaaaggcttcngccgaacttaaattggttggtactgagagcaataggaggctacaaacgagttaaaacagggagaaattgggaaattactaacccgcanagcgctgaccacggtggagttcttcacggtggagctaagaacagggaggagagaatctgtggac

SEQ ID NO: 24469 - DNA, 232 bp, Zea mays
ttaagcaagtgtcgagtttagctctattgaaatcaactaagtatagctgaccctctaacactcccttaaatgctattgaatcatcacttcttttaaagacagtaacacctagatcagtaaatagacaggtgtagcccatattgcataattgagaaatagaaagcaaattgtaatctaaagaatctacaagaaaaacaatggaaatagaatggtcaggtgatataacaatttt

SEQ ID NO: 24470 - DNA, 442 bp, Zea mays
  unsure (1)..(442): unsure at all n locations
gcttgaattgtctgtgaatgtangtgaactacaagaccggtgggatccattgtgttattgacagtggatgcacacaacatatgacaggcaacccacggatgttcacctcactagatgagaatgttgatggtcaagataaaatcacatttggagacaactcaaaaaggaaaagtgcaaggacttggcaaggtggcaatctcaaatgatttatcaatatcaaatgttctcttagttgcacctttgagcttcaatttattatcagtgggacaactctgtgatcttggacctcaatgcttattcacttcattcgaggtaattgaacaaaatgatgatgaatcatggtatcagggattagatcaacaaccttactagtggattcactcagaaatcagactaaaacttgctttaccaactttctgatggttggctagaggtgccatgt

SEQ ID NO: 24471 - DNA, 295 bp, Zea mays
  unsure (1)..(295): unsure at all n locations
ctaagcttacacctctggactaactcggcagcattgttcttcgctggtggccaatagaaaccatatctaatatcctttccgaccagagtcctggatgatgcatgtactctgcactgnccggcatggatttcatcaacaggtgcttcccaatggctgagtgaatgcacttcatgaggattactgccacacatgttctgtacagtgtgccttctacgaaggtgtaatgggctgacttgcttgcgatgcgtttcgctgtagccttgtcatctgggtcttcttcatttttatgtacctg

SEQ ID NO: 24472 - DNA, 237 bp, Zea mays
  unsure (1)..(237): unsure at all n locations
gtcacctgcggctgcagcttaataaagaanatttaatgtgtctttcatgtcanaacatagacattatgtgataaacattaatattacacaaatttagaaactggaatggatcaattnggactaaaaatggattttctatgaattaaataagttataggaattgttnttatattaaaaattcatttctaaatttatntatttgatttccttgagctctggactaggcgcataatatat

SEQ ID NO: 24473 - DNA, 274 bp, Zea mays
  unsure (1)..(274): unsure at all n locations
gaatgaggattgtcagcatcctgaataggcaagctgctctgttagtaaaggaagatgacttttttttgaagaanacannaacagctctagagccaaggcaacaatttctaataagcgaaagcttgaccaagtgccctctgctgagccgaagataggtgagacagaaaaagaagcttcttcgtcgcccacccgccgccaaggagctgaaattctaaaggtaatgactgaattcccgccttcagctgtaagtccctatgaacaaactgacaaattt

SEQ ID NO: 24474 - DNA, 350 bp, Zea mays
  unsure (1)..(350): unsure at all n locations
agtgactgtgatcctgctccaacaccttatgaccccagtgtgctattaagaaagaatcagagaatagcaagggatcaactgacatactcctagatcattggctcgctcatgtaccttgcaagtgcaacaaggccagacatctcttatgctgtgagtaagctaagtcggtttgtgtcgaaaccangagatgatcactggcgtgctcttgagagagtgttgcnngcattggaaaggaccattgcactacggnattcattataccggaaaccaaaaagtgtnggaaggctatngtgatgccaactgngattctgatgctgatgagctctatgccacaagcggatatgtgttct

SEQ ID NO: 24475 - DNA, 375 bp, Zea mays
  unsure (1)..(375): unsure at all n locations
tccgactaatgttctggatgctgcgtgtactccgcactgccctgcatgaacttcctccagaagttgnttcccggtggatgggagaacgcacttcatgaggacgcctgacgcgcccctccggtataatacctccccaatgagtgtatagtgagctgattgtctggcaatgcgctctgccgagttcttgtcatctggctcttcttcattctntatatactntaataatcggtgcctccagtcatcagagtctgactcgngttggtctatgatngtgcactcttctatntgatccgtcgagatgctcggcttgatgatttcttgcatgaagaccccggcgggacttgagtccgaccggatccgagcttggacagtaca

SEQ ID NO: 24476 - DNA, 258 bp, Zea mays
  unsure (1)..(258): unsure at all n locations
cgagattgttttgtatattgaagagggttggcatctaccttcaccagttaactcctaacgctatcgttaggcttagcgtttatatttgggccctccgaagccaagcagtggagccttttgctgacagtttctgtcgagttcatgaattgcattatcaaacaaaggccagaanagatgggcttcatgaaaacttcggttgctacaattttgcctaccggaaaaccgcaaattntcctgtaatcagctaccgaagcaaat

SEQ ID NO: 24477 - DNA, 315 bp, Zea mays
  unsure (1)..(315): unsure at all n locations
agcatctctatcagaaacgatggtgttgggcacaccatgcaagcgaacaatttcacgaaagaacaaatcagcaatatgagtagcatcgtcagttttatgacatggtatgaaatgtgccatcttagaanatctatcaacaaccacaaacacactatcagcgtcctttctagtcctaggcaatcccagcacanaatccatagaaatatcttcccaaggagcactangaacgggtagaggcaaatacaaaccgtgtggatttaaccgtgacttcgccttttgacatgtcgtgcaacgagcaaccaatctcaccacatc

SEQ ID NO: 24478 - DNA, 264 bp, Zea mays
  unsure (1)..(264): unsure at all n locations
aatgagctaaacatcttagattctcataactttgtatgaaacattgcacacatagcttatttatataccttngatcatgtctctttcgtttggtacaaatgcataattcttattcttcttgtgccaaggctaagactaatgtgttttcaagtgtacttctatgcttagtcttatattgaaagggaaatggagaaattggcaaaggaaaggcttccactccaactctgccgggatcatttatcctttgccttacttataaacttc

SEQ ID NO: 24479 - DNA, 247 bp, Zea mays
  unsure (1)..(247): unsure at all n locations
gaaagctagtggaagactaccttacccaaaaggggcaagggcagtatgggagttgcatgaaaggaggttatcangttgattntgctgtgatggcggtcagacagggattcttgcaagtgctctttccatagactgtagcgggttttcgaaagctagtggaactttgtaaaggcctcgtagtggatccctagccattcacctcggtagtgtctaagggccttgcaaaccctggcgacatgggatacac

SEQ ID NO: 24480 - DNA, 513 bp, Zea mays
  unsure (1)..(513): unsure at all n locations
ttcgtacctagttagtatctttgtttatataagctntgacgacaacaatgagttttttgtgtntgcatcccgtttaagtcttcaacaagagcgccctccaatgattntgaatcatattccacaagtgatccgaagagtttatctccccacaaatcaattctcaatagcacccaaacaataaagaactcgaaggttcttcacatatccataagagaggagagggagagcacaagatcaaagagacttcataattcaacaagaatgaaaacttgaaatggaagcaaaccgaattcgtggtcgaaaccgaccacccttactcggnatacacgatgaagcttacaaatcacatacgggaaggttcanagcacttaggatctctggctacaaaactatagcagtccagggaatggaaaccacaagtgctaaacccnagccaaagaatgggtgaacncaacctacaacttattatagagggtatactacttctaagtatcctatgacatgagctatcac

SEQ ID NO: 24481 - DNA, 157 bp, Zea mays
  unsure (1)..(157): unsure at all n locations
cttgacatataaccactccgacttccagactgctgctcatttgcttctgtagctgattacaggaaactntgtggttntccgatatgcgaagttatagcaaccaaaattgtcgtgcaatccatcctttctagccttcgtctgataatgtagctcgtga

SEQ ID NO: 24482 - DNA, 503 bp, Zea mays
  unsure (1)..(503): unsure at all n locations
agcttatgnaattctatacatcccagagttgaagccatactcattttgagaaattngtaacaccggacagtccggtgtgcaccggacatctcatatgctgctgcagttntttcagcaatttcgacttcgtattgtgggcctaacttttagctccgaactctaattttgatgatcttgaactttntggaaagcttataaaattatctgcatctcagagttgaagccatgtcaatttgagtagatntgaatttgtgaaacatttccaattcaatcagcccttcctctcaacattgtcaacttcacttttgtttatatctttgatctcactctacttcttgatgtgtggactctancatgataaaggtcttcaatatactntgaatgcttatggggcttatatgcttcttgaggtgtgcatctcaagcctagtcaatcattcgatcctgcaatacaccacaaccttatcattgtcaagtatgtacatcaacacaactatgttaatg

SEQ ID NO: 24483 - DNA, 293 bp, Zea mays
  unsure (1)..(293): unsure at all n locations
acataaagtttctgagatcaagaatatttatttcattcctcaacatgcanaagcgggtcttatcaagtggcttagtgaaaatatcccgctaatgatcttccgacctcactccttttaaaatgatatctcctttagcaacatgatctctaaggaagtgatgacagatatcaatgtgcttggtgcgagagtgttgtacagggttattagcatatttaacaacaatctcattatcacacaacaaaggtaccttttctagaactacgccatagtctagaagaagttggttcatatat

SEQ ID NO: 24484 - DNA, 325 bp, Zea mays
  unsure (1)..(325): unsure at all n locations
ttacatagaatatacgaagcatctgctttcttgcttcatctcccttgttacagatgacttcaaaaacaacatggttggctccatggcgacttcacttttatttcacttttaggtaaaatgttcactanactagaatttcagatacccagccgcatctcattgggatttctctgatttacttctcgtacttataaacccggcagtgcgggcagtgatctttttctcagcatttagacatggtgcacaatgccgagctcaaagcaatcgactgataagcaagaaggtaaatgcatgatatacaagactaatacacgaaatactacac

SEQ ID NO: 24485 - DNA, 267 bp, Zea mays
  unsure (1)..(267): unsure at all n locations
gcttgacatgaggaaatgacgctcgtcatcaagagctttcgttcaatcctcaaacaaaggagggggaaggactacaagtcccgctccaagaaaggttgctacaagtgtggtaagcccggtcattntattgctaaatgtcctatatctagtgacagtgaccgaggtgacgacaagaaggggaggagaaaggagaagaagaggtactacaagaagaagggcggtgatgcacatgtntgtcgggagtgggactccgacgaaagctcaagc

SEQ ID NO: 24486 - DNA, 71 bp, Zea mays
aacggataacataattcatacgactggaggtgggaaggtacacaaggagggggcggcgatctgacgtggat

SEQ ID NO: 24487 - DNA, 296 bp, Zea mays
ctaagctgtgagatcttattccacatgggctagtcggcggtgccaaagccaacccaagttagtcttatctactaagcaagtgtcgagttcagctctttcaaaatctaccaagtatagctgaccctctaacactcgcttaaaggctattgaatcgtcacttcttctaaagacaggaacaccaatatcagtaaaaagacagctgtagcccatttgacataattgggaaacagaaagcaagttgttatctaatgaatcaacaagaaaaacattggaaatggaatggtcaggtgaaatag

SEQ ID NO: 24488 - DNA, 263 bp, Zea mays
  unsure (1)..(263): unsure at all n locations
acatgtgctaagcggtgatgccacagccagcccatgctagtcttagcaattaagcatgcatctagaccggcctcctcttttgcaaaatcaactaaataaagtttgccgtctagtacacccttaatagctaatgaaccatcacatctcctaaagacaaacacatctacatttgtaaatagacaattatatcccatattacataattgactgacagatagtaaattatatccaagagactcaactaanaacacattagagataga

SEQ ID NO: 24489 - DNA, 206 bp, Zea mays
ctctcaatgactacgccaactaatacatgcgggagccgctgtatggataatctgtactgggctttcagaaaatatccgaaataaggactgaacgtaatagtcgctagtaaaattgacaccggaattaaatcatgagttttaggaggtactatttttctccccacaaggagaagaatacttgctgagctctaatcaatcacgttgca

SEQ ID NO: 24490 - DNA, 53 bp, Zea mays
  unsure (1)..(53): unsure at all n locations
tctactttgtgggcccgcctgngtgttcggtgcacaccggacagctactgtac

SEQ ID NO: 24491 - DNA, 221 bp, Zea mays
acaaaaagaaggggcgacagagggtccccttgtctgactccacgcttacagtgaaagcgttgtcctgggactccatttagaagcacttcagatgttcctgagctcataaccattgatacccagcgaatccatttatcaccaaaccctttgtgttttagtatatcaataacatcctcatgttacagtttatcgaaagctttttcgaaatccattttaatatg

SEQ ID NO: 24492 - DNA, 349 bp, Zea mays
  unsure (1)..(349): unsure at all n locations
tcgacgaaggcaagtccatctttttccttgtgcataaattacctattctttctatttctatctatgccgngattacagggtggaatatttgcatggtgagtagagagatagctcgcattaacagtgattgcgaccctgaccttttctgctatgcttgattgagagggctgtgtctgcacccagttctgcctgtggtttgggctagtgtaccttcttctgtgctttatattctggctctctcagagcttgtacctcggtattgaataacctttatttgaactatgtactatttgaagtaaggaatggtggtactagcctcctgcgactagtaattgtatcacatttgagt

SEQ ID NO: 24493 - DNA, 277 bp, Zea mays
  unsure (1)..(277): unsure at all n locations
agctngccataacatcatcttataaacaatgagcatgctacaattatcatagtcacattctagcagatatacaaatgaagctcaatatgctataagatgaaatgcaatgtgtaaatgtaacaaanaattaaaataacaaagaagatgctaataaaaaatgaggtcccttagctaaaaaggcaaacacacatccaactcccctcgcaaatgtgcaacagtggactgatcaaggggttttggtagaatatttgaagctatctatgggtattgacattat

SEQ ID NO: 24494 - DNA, 354 bp, Zea mays
ccccccccaacgacggggacccctatgcgccctacgacacgttcaccactagacccctggtatcgcagcttcgcagggtggcgtggggtctggttcacccggggggcttcgagatgggggggccgacgggtcgtcgcctaaatgggacatttcaagggttggtcgcctaatgctctcttgtcgcctctgcgagcacctacggtcctcacactaagttcgtcacttttctgctcgagacctatcgaaccctgtccgtgctgaggggacagctctcgtgctgttgacatggctaccacctcgcactgggcgattggctcacaacactcatgagactattgttatcctcctcgctct

SEQ ID NO: 24495 - DNA, 267 bp, Zea mays
  unsure (1)..(267): unsure at all n locations
agagagaattgttgngttctttcgagctcttgcgctnggattgctttcttctttcttgattctttattgcgatcaaactcacttgtaattgaggcaagaggcaccaatcttgtggtggtccttgtaggaaccttgttgtcggngaccataattaggggtacccttcagacgcctaattctcagctggtaacccccattagcataaagctgcaaaggcctgatgggtacgattaagtcagggatcggtccacacgagtgactcgatca

SEQ ID NO: 24496 - DNA, 412 bp, Zea mays
  unsure (1)..(412): unsure at all n locations
agcttgtgaaggttcttcatccccacatgtgctaagcggtgatgctccatccagcccatgctagtcttagcaattaagcatgcatctagaccggcctcttctttagcaaaatcaactaagtagagcttgccgtctaatacacccttaaaagctagtgaaccatcacttcttctaaagacagacacatctacatttgtaaatacagttatatcccatatgacataattgactaacagatagcaaattatatccaagactctccactanaaacacattatagatagaatgctcattggagaaatgcattntacctagcccttaaccttgccttgattccatcaccgatataatngaatcttgggaatcttattcttgacgaggaggtgaacatcttcttctcccccgcatatgg

SEQ ID NO: 24497 - DNA, 366 bp, Zea mays
  unsure (1)..(366): unsure at all n locations
tctccttgtcgtcatcaaccttgacatataaccactccgacttccagcctgttgtccatttgcttcggtagctgattacaggaaatcttgtggttntccgataagcaaaattatagcaaccaaaattgtcatgtaatccatctcttctagccttcgtctgatagagcagctcgtgaactcgacaaaagctgtccgcaaacggctctaccgcttggcttcggagtgcccagatataaacactaagcctaacgatagcgttaggagtcaactgatgaaagtagataccaaatctcttcagtacctctgcaataatcccatgtagggggaatcttaatccagcctttagaaagctctcgaaaatgacta

SEQ ID NO: 24498 - DNA, 70 bp, Zea mays
cacttatttcaattcttaccatagtggtgaaaggatcacgatgcccacaaggggggggggtgaataagat

SEQ ID NO: 24499 - DNA, 452 bp, Zea mays
  unsure (1)..(452): unsure at all n locations
tattattcatcaaaacactacggatattgtcgcaatagataatatgtcttcttcacgaagcatganaagaagggaagggtgtttttcgtcgaagactcanaaacggtacgtatgtaaaaattcatgcatcgtaaagaattgaacaacaaaaacaggtatattatatacagggctacaaagatgttacacatgttacatttcagaagttnttacaatagtacttaatcttctctcagaacaacttctgcagcttcgttcaggagccgattaacaacttcatccataatggcttcagccatctttttaatttcgtcatctcctttcgggtgagggccaggacgctttagtaggatctgaaggaggacaggatacagctacatttgtatttacaaatgcgaatganatcanaaccaaaaatacaacacaatanannaccattagtaatacctatt

SEQ ID NO: 24500 - DNA, 270 bp, Zea mays
  unsure (1)..(270): unsure at all n locations
atgcaagcttgacaacacacattgacatttcacataanatttctgagatctagaatatttagttcattcctcaacatgcaaaagcgggtcttatcaagtggcttagtgaaaatatccgctaattgatcttccgaccttactccttctaaaaagatatctcctttagcaacatgatctctaaggaagtgatgacggatatcaatgtgcttggtgcgagagtgttgtacaggattattagcaattttaacagcactctcattatcacacaac

SEQ ID NO: 24501 - DNA, 226 bp, Zea mays
  unsure (1)..(226): unsure at all n locations
gtgaaagaatgtaagtgctccaccaatctgcaaccatagaactgaggtaaccaactctatcaaaacacagcanaaactgtaataaaacaaatttgagtaccatatcaccaaagtaataggttgagtcagaattctttggtgaaaaccgaagcanaacttggtcatcaattcttatattataagatcttcctgtcgtaaagccttcagctgcaagtaaacaagaaac

SEQ ID NO: 24502 - DNA, 446 bp, Zea mays
  unsure (1)..(446): unsure at all n locations
agtacaaagacatcctcccgtgcgaaatttaattttccaatcctaatctcttctatatagcctcacagatcgcagcgatggagccggatccagtcgccgctggggcatcctcctcgccgacgccttcaccagcgccggccatgtccccgccgtggaaaacgcgaggtactggttcttagtacttcgcacgggagcatatttctttaatgcatttcttctatatagcctcacagatcagcatgggtattggaatgcaattctttgatgcggggtgcatatgctaagcttggaattaaacattccctaaccatctttatcaaggatcttgcactaatgcacctataacgctttgatattcatcaggtgctataatggcttgttgtctttcttgangacatattttttgcgatatctgatgcaaagcaaatcatgaatatgaggcatat

SEQ ID NO: 24503 - DNA, 477 bp, Zea mays
  unsure (1)..(477): unsure at all n locations
ctaagcttgaaggctgacttaactaattntggattggtgggctagctcgccaatgtgtttgtttatctactacgattaatagctgcattgacaagttgttntgtggaagcttaggctaagaggaaggacgaatggttgattgagaagctgaagaagtatgatgtcccgaggacaccggagccagttcatgaccctgagattcttactgatgaggaaacagtttatctcaagcgaaccgtggagaagaagaagaatatgttcctgtngggaggagaggggatttggtgggtggtctcaacatgcacctcttggaaaacatggaccgtaaagggttgcagcctgtcagctgccaagttacgatatgctgtgaatgacaggctcacaaggacagtcttgatttaaactatatacatatgtttatgcggagacattgcaccatgtatgccctctgactttcaacaacgactagcagtttgg

SEQ ID NO: 24504 - DNA, 174 bp, Zea mays
ctatagtatttaataaaaatagttttcgaaattttattccaaataaggaattatggagtatttaaaatagccaaaactcatacccaaaaattaattaataattccaaaaatcaccaaacttttgagaaaagctttaaatgttatttagaagccttatgtaaaagtttggtatgt

SEQ ID NO: 24505 - DNA, 277 bp, Zea mays
  unsure (1)..(277): unsure at all n locations
gagaaaacaaatcccggctaagctgcagccttaatatgttcacaactggctttcttgtggcggaaccgcccgaattattccagcttaagtgcctaagtcacgcctcacgggccgtaacacacttaaatcggaataacccgtcagtccctcagatctagtctgatagagccacttaaccaggatcaaattccacaatctcactcgaaggtgagtcacagaagaaataccaataaacaggaaacctcanattaagtactggagtattacataaatcgga

SEQ ID NO: 24506 - DNA, 236 bp, Zea mays
  unsure (1)..(236): unsure at all n locations
gagtggatcattntcagtaatccactcatagctcggtggctacacccattgtgagcaccttcggtgcacccaatgaatcatatgatcttgaagaacaaatgctgacctctaaagcacgagctggtgacaaaaaggttgatttctgcggcatctgtttaagccggagactacgattctttaagaagcatgagatggggaccttcaaatggattattttcagtaatccattcgaagct

SEQ ID NO: 24507 - DNA, 161 bp, Zea mays
tatgcgaattgactcaagcctagctactggtgcatatgtttcaccgaaatccaaaccttcgacttgggaatatcccttggccacaagtcgtgctttgttccttgtcaccacaccatgctcatcttgcttggtgcggaagacccatttggttcctacaacat

SEQ ID NO: 24508 - DNA, 504 bp, Zea mays
  unsure (1)..(504): unsure at all n locations
gaagctcggctattactcggcgtcgcctctaaacgccgaccacgtgttcaatcgctcggcattacttctaaaatgccgacgctgaccttcaatcactcggcgctgctctaaaacgccgaccacgtgttcaatcgctcggcattacttctaaaatgccgacgccgaccttcaatcactcggcgctgcctctaaaacgccgaccacgtgttcaatcgctcggcattacttctaanatgccgacgctgaccttcaatcactcggcgcttgctctaaaacgctgacacgtgttcaacgctcagcatacttctaaatgctgatgccgatatctatcactcggtgttattctaaatgctgccncgtattntgcgctgggcatactctaaatgcnatgccgactttatcatcggattgctctaaacgctgtctgtgtcgatgctagtgtactctaaacgctgatgcatctacatcgtcgcctatttactatataagacagtcacatcacaa

SEQ ID NO: 24509 - DNA, 448 bp, Zea mays
  unsure (1)..(448): unsure at all n locations
tcgtcttgaccagacactngtatacccgtaacctaattccgaagatacctgttcatatatttcacttggaanacattgtcaaatcatgnttttgaggaccttcggaagccgaaggcctccaacagtagcccctcacaatattaattcgctgtaatgataaattcatattacgacatggacaaagcctttaagccgaaggtcctgaaaaacaccttccctttgctagaatagcaacagtcattgacaagcgggaccctcctgatctcgacgcactgngtgtataaataagagctcaacacgattntaattggcacgctctcttgccatctgctcttgctcacccaactnttagcctgtgcgcaacaacactngcttggctnnttacattttaagcttcggttcaagagcatttctcagcgtttgaaagatgtctgaagataaaaaacta

SEQ ID NO: 24510 - DNA, 480 bp, Zea mays
  unsure (1)..(480): unsure at all n locations
gcttgtcttaaccgcatagtgtctcanacatgtttggaacacatctatgtggttgtaataaagaactaaaatagttggcatagctaggggcagtggctacatgttagtcgctatggttatggaagaatgacacgatgtttaaaaagaaactaaattctttctcctttaggttatntactatattatacattggatttgtatatggtccatcatacagaaaccaatattataggtttggttgtagtggcatcttaatgatagtgtggcttgggtgtagtggcatcttaatgaatgatagtctactctatagaatanatataattagggtgtctggactttatttaaaaaaactaagatngtgtgtatcatgggtattcatagactaagaaacatttaatgtcttggtatcatattgatatagtggtatttgaattgataaagcttccttttatctaaatatagtctcttctctaatcaagt

SEQ ID NO: 24511 - DNA, 295 bp, Zea mays
  unsure (1)..(295): unsure at all n locations
tctanagggagaacacattntgtgactaaccaatggttcatttgagaaagacatgtatttgtagtgcatgtcaagcaggaaagcanngtggcgcccatcatccacacaagaacatcaagacgaccgtcaggccgcttgagctacttcacatggatntattcggcccgatcgcttacataagcatcggcaggagtaagtattgtctnttaattgtggatgattattctcgcttcacttgggtattctttntgcagganaaatctcanacctaagagaccttanagggattcttaag

SEQ ID NO: 24512 - DNA, 276 bp, Zea mays
  unsure (1)..(276): unsure at all n locations
gcttgtggtccgtcgcatgtgctgtcgcgccgtaagcgactggttccctgatctcttccncagcatcatctccnctgccctgtctgtctctaccgttcttgtatagttctatatatgcctacgtacctctaccctctctctgaactatngactgaacctatcacctatgtacggctgcttactacgtactcctacttgcagcagctggggcctgggagggagcgctagaagaggtggtgtagatgtgcgtagagatggtcgtcgccatggctatgt

SEQ ID NO: 24513 - DNA, 364 bp, Zea mays
  unsure (1)..(364): unsure at all n locations
tgtgcagcagcttcattagtctccgtcaagggtcggatcattgaccttctacattgtcattctgtacacaacanagcagtaataaggtaaaaagtgatctcaggagaaggtaaacaacaggtacaagtttaataccggtttaagatgacttcgagcttcgtcaccacctaagtcccgcccacccttcgtccaaatttgtgttataaatctattcccaatacttcgggccaggatggggacatcagctaagtctgctggtgatagactgaagtttggcctgtttacaatcttcccgtgtgtgcaaccagccttcataaaagctatagctgtgccgtgagaagcgagcanggcacagaagtcgtcg

SEQ ID NO: 24514 - DNA, 527 bp, Zea mays
  unsure (1)..(527): unsure at all n locations
atcttgagtcacctgcggcatgcaagctntgattaagagcggtatacanaaacattcatctatgtgcattatctatgtgcaagcggtaaagacaagacagtagccaaagatagcagctccgtccacaagctgaaatgtaacaccttaaaatcttactttgagaatttagtaatactctccaaaggttttgaattaagacatattgactaagggaattttttacctttgaagtcactcttcccaagatgccgatactatctatantaaaataaaacaaaagagacttattatccctatgtgaagtatatagatatatttcataagaggactcttggtaaaataatttccaatacctaatctatagtagagattattattccttaaagataaagaatatgtgtgcatgcatgtttggggagtatatttgaggaatntaatatagaaataaagaataataatataaaatcttgtatatatactaagtttgcagtcatanactgactaattaacaatagatcaattgatga

SEQ ID NO: 24515 - DNA, 280 bp, Zea mays
  unsure (1)..(280): unsure at all n locations
ccttgatactcagcttcggttctgaaatggctcttgctatattcaccggactgtccggtgtatcatctgtactgtcatgtgcaagcggagtaacggctacaacgccacggtcgtctgcaaaagtgatagtgagctacagtgcgcggactgcgcgcgtaaatcagagcngcgttatggcgcccnacattgacatgactatcgtgcacccctgactgtcggggcccacttgttaacttcaccgtcgaccctacggtggggatgtggtgggcctacacctttt

SEQ ID NO: 24516 - DNA, 208 bp, Zea mays
ctggtcaactatatcaacattctttatgccagaaaccaatatgaaattaagccagttaatgatatgagctactctaaatcaaaagagttgatactcctaaatatcgataaataaaagatatatggcctattaaaaggaactattgacatatatagctgaaagtcgcctagagggggggtgaatagggcgaaactgaaattctcaaaaa

SEQ ID NO: 24517 - DNA, 237 bp, Zea mays
  unsure (1)..(237): unsure at all n locations
atcacgcttcagtcagcagagtcagagctcctattatgcacctttcgttgcaagcaaccaaacgccagcaaacgcctgttgtgactgcggggaccccagtcatttcaaaaacaactgctcncagttgaaggcaccacggccaacctactccaactcggtgaatggcctcaaggttccatcagcacccacccccaaggcgctcctctccaacagccatcagagcaggactcagtacca

SEQ ID NO: 24518 - DNA, 320 bp, Zea mays
cgaccgcgatctctgagtcacctgcggcatggcagctcgtggaggttcttcatccccacatgtgctaagcggcgatgccacaaccagcccatgcaagtcttagccattaagcatgcatctagaccggcctcttctttggcagaatcaactaagtacaggttgccgtctagtacacccttataagctagtgaaccatcacatcttctgaagacagacacatctatgtgtgtgaataaacagttatatcccatattgcacaattgactaacagatagtaaattatatccaagagactctactaaaaacacattagagataga

SEQ ID NO: 24519 - DNA, 293 bp, Zea mays
cgtggcataaagtatctccactgcttttcttatccgcggactaacgcttatttcgagacccctgtggccgttgcataaagtaatcccaccgctctacgaagcgtagcatagaaggacgccgaacttctttgttactggaggctccattgatcaccgtccatgtggatgctgccgaatatatgttgcaattgatatataccaagtcgtcaattgatacacgatcgatgcacgtatggacaacttatcgcaagacataaccacttgtcataaacaccatatactgcgtcacttgc

SEQ ID NO: 24520 - DNA, 156 bp, Zea mays
catcattcacacaagaacatcatgacgactgacaggccactcaagcttctacacatggacctattcagcccgattgcttacataaggatcggcgggaagtaagactcgctaagtattgtggatgactattctcgcttcacttgggtgttctttttg

SEQ ID NO: 24521 - DNA, 463 bp, Zea mays
  unsure (1)..(463): unsure at all n locations
actaagcttggccttcgtnctgagtattacttcttcaaagcgttagcttatggatgaatgtctctaaaaaggtgcgattaagcaaatgacaggagaccatggagtatgggactcatctcttgagtcttaacattatttattccatctcccttcgtattacataaatttaccaacataccttcgacttctttgcatgagataacccgaaggtatttcgaaggctatgtgagacanagctagaggccctataaaggttcctttatgcagggcattgttcctctatttatagtcgagggagtaaagctctggtgaaatacatttcacaccctcgagcctatacatttgagctattanttacagagagggtgaaatngtctttntctttcatcactttagtgagaactntggcttcgccacacatcgtattctgtccctttgctcttctcagttattcccaagcatg

SEQ ID NO: 24522 - DNA, 489 bp, Zea mays
  unsure (1)..(489): unsure at all n locations
agcttacacaggacctaactctgtatcttacaatgcactaagcttgatatatgcacaacgtttacttctacaaacaacaaaactgactcttattaccaagcaagttggttaggccaagccatctacttctacaaatgaaacacaggaagcagacccattagctggtttccaagacttatttgacattgttttttttcccattgctctgcccaagtatttgaaacccaaaaatatttatttaagtaggtgtacctttacctagacagagntcaaatggcatagacagacgatatgaccanggagaggaatgatcttatgcacaccgacaggagtgactttagctctcgacactgaaatagtactacctcgtctcaatatttgtcgctctagtcattntnaactaaacgtgataataaaaagacgggggagactattatatgacaacatgagaacgtggtatatcacagacaccaagcaataaaaatcatt

SEQ ID NO: 24523 - DNA, 246 bp, Zea mays
  unsure (1)..(246): unsure at all n locations
catttcgaaaaagatagaccttgtgcagcttgtcaagcaggagaacacgtgggaggctctcatcacaccaaanatgtgatgacaacatcaagacctctggagctgctacatatggacctcttctgacccgtcgcctatctgagcatatgagggagtaagtacgggctagttattgttgatgacttttcccgcttcacttgggtgttctttttgcaggataagtctgaaacccaagggagcctcaag

SEQ ID NO: 24524 - DNA, 215 bp, Zea mays
accacattcatgagagaatagaagccgacaaaactaattgcttcataaaagatgatcaagggataatatggttcaatgatcgcatagttgtgcctaaagatgctgaggtccgccaataacttttggatgaagatcatcttagtcgatattctattcatcctgtaagtactaagatgtatcaagacttatagcaacactattggtggacaaagatg

SEQ ID NO: 24525 - DNA, 508 bp, Zea mays
  unsure (1)..(508): unsure at all n locations
tcctaatctatttcatccttttcattctcagnacatatcatttcttcncaaatcttccgntctgttgcacgcctagcttcttctcttctatgggcatatgtgtacacacccgggttcaaggaacaaagtctggtgcatctcatacatgcgccaagaagacaacatatattataacagagtgtatagagataaatgtcatacaacatcagagtacttaatacatagcggaagacttactataataaaagataaatataacaggatctaaaatctatccttggcgccagaaagtcgactgggagacgccacctagatcgaattgaactccgcaatatggctacacttgaaccacctgatattcttctgtggcggggtgagacagcatggtgactacacatgttatcgtcaacaagtggggaatatgggatcactagcaaagggagtcataatgatggtgtaataactaagtgaagtggcttgtttatagtggcaatttatacattctaat

SEQ ID NO: 24526 - DNA, 271 bp, Zea mays
  unsure (1)..(271): unsure at all n locations
gcttatgaagattcttcattccaacatgggctagtcggcggggccagagtttacccaagttagtcttagcaaccaagcaagtgtcgagtttagctctatcaaaatctaccaagtatagctgaccctctaacactcccttaaatgctattgaatcatcatttcttctaaagacagtaacacctacatcagtaaatagacagttgtagcccatttgacataattgagaaacgganagcaaattgtaatctaatgaatcaacaagaaaaacatt

SEQ ID NO: 24527 - DNA, 75 bp, Zea mays
tatgccatagaagatatgatctagccacgatgatggcttgtcaattatctcatacgataaacatatgaaactaca

SEQ ID NO: 24528 - DNA, 271 bp, Zea mays
ctgcagcttgaaagggaaaagaagctgatgcaagacgcatagtcgacttataatatgctttatctgctcaagtagaaccgcacaaatctgaagtggcaaggctggagaagaagcttgacgaagttactaagaactttaatgttgaacaggctaagcgtgaaatatctaacactgaatgatccagagtgcaaaagaatgttgaagagcttcgtcaagcaaaggaagaatgcttttctattgctatgcaatattctgacaaatggaaaaatgc

SEQ ID NO: 24529 - DNA, 247 bp, Zea mays
  unsure (1)..(247): unsure at all n locations
cacatttgggactaaccaatattcattttgagaaagacagganttgtagcgcatgccaagccgggaagcaagttggcattcatcatccacacaaaaatgtcatgactaccgacaggccggtggagctactacacatggatttattccgcccgatcgcttacataaacattggcggtagtaagtattggcttggaattgtggatgaatattctcgcttcacttgggtattctttttacaggaaaaatc

SEQ ID NO: 24530 - DNA, 268 bp, Zea mays
  unsure (1)..(268): unsure at all n locations
tacccatgatgaggcatgtgaccagttaaagggtcctcagtcagcaggcccacatcgacactgtccttaatcgnatgagacggagacactacaccgagactcccttctcgtgcaagtcaaccgcccggtctcagctttatcatttcaaacccaaagtttggtacctggcagaggtacatattttccgatgttgaacccatcacgatcatgatggatccaccatcaagttttatttttgaaaacttcccacccactgaagcatcacttt

SEQ ID NO: 24531 - DNA, 328 bp, Zea mays
  unsure (1)..(328): unsure at all n locations
ctaagcttgcatacagctgacaatctcgtagcctctgaagtactttcctcanatgctcctcatgctcttgctcattctgggaatatacaataatatcatcaatgaacaccactacgaacttgtcgaggtagtccatgaacacactggtcatcatgtacatgaagtaagctggcgcagtcgtcaatccaaatgacataaccatgaactcatatagtccatacttagtgatgaatgttgtcttcggtatatctgcaggtcggatcctgagctgatggtaacctgacctcagatctatctttgagaacatagtggctcctctcaactgatc

SEQ ID NO: 24532 - DNA, 264 bp, Zea mays
  unsure (1)..(264): unsure at all n locations
agcttncggcgatgtggtgtcgttggtaacgacacaagtctcgttttatcttctgcaagccaatggctttggaaagggttctcgacaatttggcctcggtgcggntccgaaggcatcttantttcccttcgttgaccccaccaaatagcatagcctctganttgtatctgcaagatatagcatattttttcaactcctctnttttggcgtctggtaattcttgtccgagcaaatcttgaaagttgaaatcttcttcctctgaaa

SEQ ID NO: 24533 - DNA, 388 bp, Zea mays
  unsure (1)..(388): unsure at all n locations
catgtgctagacgacgatgcaagagtcactccatgttaatcttagcaagtaaacatgcatctagatcgacattctctttagtaaaatcaaccaagtaaagcttgtcatcagatacacctttaaatgtaaatgaaccatcacttcttctaaagacagttatatcaacatttgtaaataagcaattataccccatatgacataactagctgatagaaagcaaattataaccaagcaattctactaanaagacattagaaattgagtgctctgtagtaatcactattntacctatcccctttaccttgccttggntccatctctaaagatgatcgtgtcatgggaatcctttgtcttgacgtanngaagtgaacatcttctcctcatcacg

SEQ ID NO: 24534 - DNA, 266 bp, Zea mays
  unsure (1)..(266): unsure at all n locations
gcttgacaacaccgttgacatttcacttaaaatgtctgagatttagaatatntaggtcatttctcaacatgcaaaagcgggtcttatcaagtggcttagtgaacatatccgctaattgatcttccgacctcactccttctaaaatgatatcttctttagcaacatgatctctaaggaagtgatgacggatatcaatgtgcttggtgcgagagtgttgtacaggattattagcaattttaacagcactctcattatcacccaacaaa

SEQ ID NO: 24535 - DNA, 206 bp, Zea mays
  unsure (1)..(206): unsure at all n locations
acattntataccctaccggttatcccgagcacaagattaggagaattcactctatgaagtctcactctggacctaatcatgcttttatgtataagagtgagacatctagttctaggcaatccactcatgctaaattggctaagaagaaagctnctaatgcatcaaatgaacctaggatttcatttaagacttttgatgcatcttat

SEQ ID NO: 24536 - DNA, 274 bp, Zea mays
  unsure (1)..(274): unsure at all n locations
ctgcagcttcgggcagcagcaaagctctttccggccgccagcgccaatgtgcataggcgccaggggctctcggggaagaatatgggatcagccaagaaaaatttactgcctattctatggtgaagacaagggccataccaccaggatgtgccatgttaccatctgtcggngatcataattaggggtaccctcaagactcctaattctcagctggtaacccncatcagcacaaagctgcaaaggcctgatgggtgcgactaagtcagggatctgt

SEQ ID NO: 24537 - DNA, 420 bp, Zea mays
  unsure (1)..(420): unsure at all n locations
tgcatgacgaaaacgtgatgccatatatccgactcatcagaaaaatgaacagaattcactagtttattacacacatcatgcagtgataagcggaacaagcctctgcagtcatatactttaccaacaaaaataccatgtttagacacaacacatttattagactcaagaacaactttatatccatctcgacatggcatagaagcgctaacgagattcttcttgatagagggcacatgctgcacgctcttcaatggcaccgtctttcccgaagtaaacttcagaatgaccgtaccaacaccaagaacatgagcacgcgacccatttnccattaacaaggcgccagacactccgacctggtangaattgaacatagaggcattagcacacacatngaatgttgaccactatccaccaccactc

SEQ ID NO: 24538 - DNA, 236 bp, Zea mays
  unsure (1)..(236): unsure at all n locations
ttcttcatccacacatgtgctaagcggttattcctcattcagcccatgctagtcttagcaattaagcatgcatctagatcggcctcttcttttgcaaagtcactaagtacagcttgccgtctaatacacccttacaagctagtgaaccatcacttcttctaataaccgacacatctacatttgtaaatagacagatatatcccatattacataattgactaacatatagcanatta

SEQ ID NO: 24539 - DNA, 202 bp, Zea mays
  unsure (1)..(202): unsure at all n locations
tcgacgctgcctcgtnctcgtcagctgctggtcacaccaccgctatcttcttactcctctcaccaccaccatcttcatcataaacaccaccaccaccaccaccaccacgcggaccggcgatggaaccggcacgggactcttccaccgtcagcagctggcggcgagggtgacaaagcgatgatctatccgcggtaccgcgtgc

SEQ ID NO: 24540 - DNA, 422 bp, Zea mays
  unsure (1)..(422): unsure at all n locations
atccttaagtcacctgcggcatgcaagcttgaagccatgggtagtggcatatgtaagtaatatactaattgtctcaagcctagctacggggcataagtttcattgaaatccaaaccttcgacttgtgaatgtacctctggcacatgtcaggctttgatgcttgataccacaccatgctcatctttcttgttgcggaatacccacttggtacctacaacattttgacacggacatggaactaagtgacgtacctcattccttgtaaaggtgttgagctcctctttcatagccaccacccaatctggatctcttaatgcatcctctatnctgtatggctcaatagaagacacanaagagtaantgtcacagaaatgcgcaactcgagatctagtggttacccccttatgaatgtcacaagtatg

SEQ ID NO: 24541 - DNA, 396 bp, Zea mays
  unsure (1)..(396): unsure at all n locations
cttattccacatgtgctagtcggtgatgccagagccagcccatgttattattagcaattaagcaagtgtcgagttcagctctgtcacaagctactaagtatagctgagcctctaacactcccttaaatgcaactgaatcatcacttcttctaaagacagtaacacctatatctgttaaaagacagttgtaacccattgtacataattgcgaaactgaaagcaagttgtaatctaaagaatctacaagaaaaacttttgaaatagagtggtcaggtgatatagcaattntacccaatcctttgaccaaaccttggatttcatccccgaatgtgatcgctctttggagatctttggttttcttataggaggagaacatcttcttctcccctgtcatat

SEQ ID NO: 24542 - DNA, 260 bp, Zea mays
atctatattattggatgccttggaatcagtcctatcttcttcggcccttctggcagcttcctgactcccatgaatagcaataagcccttggtccgaaggtatcttcatgcagaggtaagctgggtgaagaaatgcttcaaaagcatttatggtaccacgaccaatgatggcgttgtaggggtattccatgtcaacaatatcaaacacaatttgctcagtccttgtgttattaacaaatccgaaggttactggcatggtaa

SEQ ID NO: 24543 - DNA, 359 bp, Zea mays
  unsure (1)..(359): unsure at all n locations
gcttccatctctgaactactcggctgcatattcttcgccgccggccaatataattctgacctganaaccttcccgactaatgttctggatgctgcgtgtatcccacattggcctgcatggacttcctccagaagatgcttcccagtggacaggagaacgcacttcatgaggacgcctgacgcgcccctccggtataatacctccccaatgagtgtatagtgagccgactgtctggaatgcgctctgctgagtcttgtcgtccggctcttcttcgttttatgacttaatgatcggcctctccagtcatcagagtctgacccgggttgatctacgatggtgcactcttctgtttggtctat

SEQ ID NO: 24544 - DNA, 279 bp, Zea mays
  unsure (1)..(279): unsure at all n locations
agcttactatggtttggagactcanacttcattntactatggnttgtacactanaaccttntagtgtcggtgtttaaggttatggtttaaggattgtgattggngtctaggttaccataaaaacatgtgctatagctcacttgtggcaaanaatgtcgtaacggcctctctgatctataacgtaggtggcaggtcggatacatgatattggctctttggccacagaaacgtgtgctacagctcgtgggaggccaaggaccactttaaggtgctctgggg

SEQ ID NO: 24545 - DNA, 272 bp, Zea mays
  unsure (1)..(272): unsure at all n locations
tntctctttttctttnttactttctaattcctatttcccattntgcccccttttcttttgaacaaattatattgtggaaactctaagtgtttagaaaatagaatctaagtgagttgctttgtgatccaacaaaatgtatgcatatgatgaaagaaaatttagtggaggtcttggaattagaggatgaacggaggggaaaagggtagattacggtttcaaacctggattagaatttttgggatgctacaaacctaccccacttaaaggaatct

SEQ ID NO: 24546 - DNA, 426 bp, Zea mays
  unsure (1)..(426): unsure at all n locations
gcttggcttcgtggtcccaggcaatcgatcgtgtagtgagggctatatttaccgtcaaatcccgttcagcaagctggtcttgcaagcgtctggcgtcaactgccagctcagctatacactgaccgtcctatgcccacaccctatttcggtgacgtaactccgtctgaagntgtttcactttggcctccaagtctccgattggatcgntgctgccgctactgctccgttcatgtctggaagccaacttatgacgaggcatgccaatagctncagtggactngcgcgcgggttttcttcgtacgccaaatatatctcataagggggggaaaattattagtataattttaaacatgatgcatgcatgacccaataattacataatcaaccctttcgtgatctcactttctatatatngcactctattac

SEQ ID NO: 24547 - DNA, 455 bp, Zea mays
  unsure (1)..(455): unsure at all n locations
ctcagcttatanatggacgtgaaagtgccttctcatggaccatcaggaagaggtctatgttttcaaccttccggatttgaagatagtgagtatcctaacccatgttacaaactctctaatgcgctttatangctcaagcaagccccaagagcatggtatgaatgcctaagagattntcttatcaataatggcttcaaagtcggaaaggccgatcctactttatttactaaaactcttgacaatgatttgtttgtatgccaaatttatgtngatgatattatatttgggtctactaacgaatctacatgtgaggaatttagtaggatcatgacacnntgaattgagatgtcgatgatgggggaagtgaagtacttcttgggatttcaagtgaagcaactcccaagagggcacctttcttagccaaacgaaatatattcaagacattctaaacaagt

SEQ ID NO: 24548 - DNA, 246 bp, Zea mays
  unsure (1)..(246): unsure at all n locations
tcatgtgttttgcaagataaaagttcattntctacaagaagaatgtcatgaatcaaatttaattgagtatagtcttccttgatcttaactagtctattttgcaactccctattagcttcatttaatttggcatatttttccttagcatcttttagggaagttgtgaactcatttataagtgatgacataagtttattttcttcttttatttcatcactagcccttataactatgtcatacttggca

SEQ ID NO: 24549 - DNA, 298 bp, Zea mays
  unsure (1)..(298): unsure at all n locations
tcagctgccactagctcttttgataccttngatcatatctcctttatatgctatgacttatgtgntttcaagtcgatttcanaccaagtcataggtatattgaaaggaaattggagtcttccgcgaagaccaaggcttccactccgtaactcatgccttcgcatcactccgagcaactctctcgtctttgggggagaaatgagcatcaaggaaaaggacttcattctttggggagagagtaaaagctcanacgcaaaaggacttcctctntggtataatcttaactcacttatttatg

SEQ ID NO: 24550 - DNA, 181 bp, Zea mays
  unsure (1)..(181): unsure at all n locations
cacttttatttcattgtgatctttgcattcggcttgggttcatctcatacattaaactntttctttgtttggaagattcagcgacaacatgtcttctaatggcttgtgtgaggtggtcatcatctcgaacacttctttggcttaattcaaagtcacttttatatcctttggactatattta

SEQ ID NO: 24551 - DNA, 160 bp, Zea mays
  unsure (1)..(160): unsure at all n locations
cttgacatgaggagatggcactcgtcatcaagagctntcgccttattctcatgcaaaggagagggaaagactacaagtcccgctccaagaaggtttgctacaagtgtggtaaagcccggcattntattgctaaatgtcctatatctagtgacagtgaccg

SEQ ID NO: 24552 - DNA, 269 bp, Zea mays
tgcagaaaaacttactatgagtggatccttataaatacatttttcttatcatgttaagtgagtacctgcatctagaattctttctatcctagaacaagcacttggcctacactaagctgtctttatcatcccttcagttcactggattgctacgttgtagtcaatgaccaagtgttcatgtccgagaagtaacgacgatctgaatcgattaatacccagctggtgatcttcaaccacacgacatatgtatcacttaacccttgcatatg

SEQ ID NO: 24553 - DNA, 282 bp, Zea mays
  unsure (1)..(282): unsure at all n locations
gcaagcttatgaagattcttcatcccaacatgggctagtcggcgatgctagagccaacccatgttagtcttagccattaagcaagtgtcgagttcagctctatcaaaatctactaagtatagctgaccctctaacactcccttaaatgctattgaatcaccacttcttctaaagacagtaacacctatatccgtgaaaagacagttgtagcccattttgcataatngagaaacataaagcacattgtaatctaaagaatctacaagaaaaaacatggaaata

SEQ ID NO: 24554 - DNA, 315 bp, Zea mays
  unsure (1)..(315): unsure at all n locations
cacatgccagcacagcagctacagaccataccattaacttggcctttcgcatgctggggattggatatgaatggacctttcaagaaagctcaaggaggatacacccatgtattggtggcaattgacaaattcactaaatggatagagttccagcccattgcctctttaacctctgctaaagccgtggaattcatacaaagcataatattcaggttcgggataccaaacagtatcatcactgacttgngatccaacttcaccagttcagaattctttgacttctgcgagccaaagagcattcagatcaagtacgca

SEQ ID NO: 24555 - DNA, 299 bp, Zea mays
  unsure (1)..(299): unsure at all n locations
atcttnagtcacctgacgcatgcaagcttagcaaaagaaatntctagaatcaagaatattgagctcatgcctatgtctggtaaaagattgttcatcaagtggcttggtaaagatatcggctaattgatctttagtattaatgtaagaaatctcgatatcccccttttgttggtgatccctaagaaaatgataccgaatggctatgtgcttagtgcggctatgctcgacgggattgtcggccatattaattgcactctcattatcacatagcacagggactttggttaatttgtaaccat

SEQ ID NO: 24556 - DNA, 298 bp, Zea mays
  unsure (1)..(298): unsure at all n locations
tgacanacatgtaagactgagtatgataccctctagtttcttataactcaagttcatttatatgttcttattacgtgttgacaaaatatttttgattacattgcccttgcatataataacttgtcctatcagatacctggttcactgtttaaagtagcacgttacaacactaccgaaatccggctctttgccgagtactttctatcgggcacttggcaaagacgtctttgccgagtgccgaacactctgcgaatggcgacgcttggcaaagggccgtcagcagccgtccatatctgac

SEQ ID NO: 24557 - DNA, 289 bp, Zea mays
  unsure (1)..(289): unsure at all n locations
agctttgtntgagattntagcctagtggatgcactctatgtgtattatatataatgaaatgtcaatgcatatgatgacattcccaagttttagttcttgtaacaccatgggtgttacatatattgtgcaattcctattggctagacgttggccgacatggattatttgggtaactcccgcaagccacggaaggccaatgtgatttagctgggtaactctcgtcgtccagtgggcgatgtggattagctgggtaactcccatcggaaaggtggcgatgtggattattcta

SEQ ID NO: 24558 - DNA, 330 bp, Zea mays
  unsure (1)..(330): unsure at all n locations
tccataatctntattgtagcttatatagtatatctcaatgttgataaatggcctatgacatgtatttatanttttcatgggcttgtacccctcttcttcatttctacttagatagcttaattacggttggtacgatagatctggctctatcttggaagggtactcctggtacgatctggctctatctccaattctggttctgctatgaactcggtcggcaatcgaacacacttcttcagctgagacacatggaacacattgtggatggcagacatttttggaggtaacttcaatntatatgccacgggtccacatgcttctatgatttca

SEQ ID NO: 24559 - DNA, 297 bp, Zea mays
  unsure (1)..(297): unsure at all n locations
atctctaagtcacctgccgcatgcaagcttggtattcatgctcacatagacacctcagcaggcgattctttttgattctatgacactcagncagttcaacagaacattcttggaggaacagatttctttctcatagtgacaactgcccaagttcaagattcccttgatgcttccaaggttgacaggcccatggaaccaaacaatggtaactttcttgctcctgcaaaccacgtttggttcagtgcagcttctcgagagccttcacacagtggatcgtctactgctatgaccactcat

SEQ ID NO: 24560 - DNA, 384 bp, Zea mays
  unsure (1)..(384): unsure at all n locations
acttgaagccgcagtccaagccaactcaaatttgaagaaatcattaacaagccttcaggataaatgtttgaattttagcaacaattgtattcaacaactaaagaagatcttttactcagttggagccagcagtgggaaatttatcccttcggatgaagatttaccacaagccttcgatcatatcgaagctgaaattgaagaacttgacgaagntatagctgggcacggtgacttcttgtgctctgggaactttctcggggtactgctgcagcattcctgaaggctggctgaagcatggaaagatcgtaacaggccaacttaccctgtctcatcaatctggacatatcctgactcgccgaagttctanatagattataaaatgat

SEQ ID NO: 24561 - DNA, 346 bp, Zea mays
tgcttcaagaaatttcttttcttgctcacatatttctgactggtggagcaattcattctttaagctattattctcaatttggacttcagccaaagaaccttccatagtctgaataacaaaatctttcttttctaatgcaccttcgtgctctttgaccagcatttcaagatcttggatggtgaaatctatctttttcacatcatcttcgtaatattcaacttttttagccacaatttggatgactgctttgttcttttcttcttcgagatctttgtgcatctttagaaccttacttaataatatactctgtcgaaacgatcttcggtagaaacgacctatagataat

SEQ ID NO: 24562 - DNA, 272 bp, Zea mays
  unsure (1)..(272): unsure at all n locations
tgcagcttctaagggagagcacattttgggactaacatatgttcattttgagaaagacaggggttgtagcgcatgtcaagcatganagcaagttggtacccaccatccacacaagaacattatgacggtcgacaggccgcttgaactactccacatggatttattcggcccgatcgcttacataagcatcggcgggagtaagtattgccttgtaattatggatgaatattctcgcttcacttgggtattcttnttgcaggaaaaatcacaaa

SEQ ID NO: 24563 - DNA, 368 bp, Zea mays
  unsure (1)..(368): unsure at all n locations
agaagctcggcgagctcgacccctctgtgaagcccaagcttgacctaagtgagcgctctgctctgccccctcctttccctatctcaatctgaagatttctttgcctatatgcttgaggatacacaggcgggtcaatgtgtagtggttggtgaatttcgagtagaatgatgattatttgggagctggacagatctcaagagaaataaaatattaccttgtccagcctacatgtgtattggagattaaacaaaagagaccattatgttctgccttgatagaatgatagttgatacgagaaattatcacgagcactgngtgcaatcttaagccatcagaatacaataatagcttttgataattgtgatgct

SEQ ID NO: 24564 - DNA, 468 bp, Zea mays
  unsure (1)..(468): unsure at all n locations
tgaacctggctctcttattatcgttcgtatctgtatgatacccagcatactggcatatgtcattaaaagcctgngcatactgcaacactgtactgttgccctgagtgagtgccacaaactcattgagctttcgggccataatcccggctagtatgtggcgtcccctggaagctggcttgaactccctccattccacctctcgatcttctggctgcataacaagaaaatggtcccaccaaagtcttgcnggtccgcgaagctgctgagtggccaacctgactttaatgaacctctgacaagctcatggaatagcgtgagtgtggattcactactcgcaacacacattacataagtggtcctctgccgtggaataaggggctgggactgngaactctgtatgtactgcgcggggacctatggctcacacatatgctgagggggtgacctactactgctcagactatttgt

SEQ ID NO: 24565 - DNA, 385 bp, Zea mays
  unsure (1)..(385): unsure at all n locations
agagtttatgatctttggagctaccaatttaatcctaaaattctaaaagtacttgcttatgcatcttctaatgctaaataattcatgattgagactaaatatcttggaactattgttattaaatactagaggaatttaggagtctaataaaattggtcccatgattctatcattgttctaaattatcctataaatttcctaagcctagtagaaaagaacaatgaaaataatgaatagtactgggttgaattcagcccaaatcagcccacggacagagaaacgcgcgcgcgcctgcgcccgcgctggcgactntgcaccaaggaccctggttgttcgaataactggtaaagaaatcctagccactattcactctctctctctgaca

SEQ ID NO: 24566 - DNA, 271 bp, Zea mays
  unsure (1)..(271): unsure at all n locations
cttcatccccacatgtgctaagcggcgatgcctcagtcagcccatgctagccttagcaattaagcatgcatctagactggcctnctcttttgcaaaatcaactaagtaaagtgtgtcatctaatacacccttaaaagctagtgaaccatcacttcttctaaagacagacacatctacatttgtgaatagacaattatatcccatattgcataattgactaacagataacaaattatatccaagagactcaactaaaaacacattagatata

SEQ ID NO: 24567 - DNA, 277 bp, Zea mays
  unsure (1)..(277): unsure at all n locations
ctgcagcttatgccctaaagattgcctaatttgtaagggtnaggctcccatggctcaagataacgagggctatattntatatcatgttggttatcccgagcacaaaattatgagaattcatgctacaaaacctcataatgtttcacaacatgcttttatgtataaaaatgaggcttctagctctatgcaatcaacctatgttaaattgcctaanaagaaatctcttattgcatcaaatgaacctaatgtttcatttaagacttttgatgcatcatat

SEQ ID NO: 24568 - DNA, 345 bp, Zea mays
  unsure (1)..(345): unsure at all n locations
aactaagcttgacgcgtcgattggttgtcgacttggtgtagcctcctccttcttctcctccgttgccttgaatgcaacgggttgagcttcggatgtggtggcatcatcaagctcgttgatcttcctcgatccttcgatcatgcattcaaaactcacaanattcccgataacttcctcggnggtcattttggtatatctaggattaccacggattaattgaacttgtgtatggttaacgaaaataagtgatcttagaataaccttaaccacctcgtggtcattccactttacgcttncgagagtgcgcgcttggttcaccaatgtcttgagccgattgtacatgtg

SEQ ID NO: 24569 - DNA, 269 bp, Zea mays
  unsure (1)..(269): unsure at all n locations
gatctcagagtcacctgcggcatgcaagcttgtgaaggttcttcatcctcacatgtgctatacggcgatgcctcagtcagnccatgctagtcctagcaattaagcatgcatctataccgggctnctctttttgcaaatcaactaaataaaggttgtcgtctaggacacccttataagctcatgaaccaacacttcttctaaagacatacacagctacatttgtgaataaacagatatattccatattacagaggtgactcacagaccac

SEQ ID NO: 24570 - DNA, 288 bp, Zea mays
tactaagcttcgcatgaccttgtgacccgattgcggcgcagatcatggcgggctaatagaagccttgacagatcacctttgcagctagggccctaggccctgcgtgagagccgcaagtcccgctgtggacttcgcacatgaattggacgccttcggtctcggtgacacatttaagcatgggttggctgacccccttcttgtaaagctggccttcaacgagtgcgaagtcccggctttggtggttgaggcgcttggcctcgttgatgtcggttggatgatagtacccct

SEQ ID NO: 24571 - DNA, 412 bp, Zea mays
  unsure (1)..(412): unsure at all n locations
gctcatcttcagcctctcattttcttccttgagcttttgatatgaaatcatcgttgttcctgcaaattctagctcanaggaagatatgcttgtcgacggacaacaagcattagcacatggtaatatagtatcaatttgaatacatgtgcatgagtgaggttgttgggactttaaattctctatcacaacctcatgagcaatggttaatatgatataatcatctctaagaatttcatgagagcctaggagcttatcatattttcttgaaagctagatttcaattttagctttccacttgtccttagcaaggattctattactattgacgaacatgaagcgtatctgctcatgaaagttatacttggacaacacatgaaccttactctatgtttatcactgcnaggacatttat

SEQ ID NO: 24572 - DNA, 292 bp, Zea mays
  unsure (1)..(292): unsure at all n locations
agcttgtactttgtctcaacatggcctgattgatgaatggcgcgcttgttcatcgcgtatgctgacgcacccaccgtcaattcaccttcggtcacgccaactgccatatatgtacccacggctgactgacccacggcccccacgcctggtggttntgtcgggccacgtgtgggctgcctcgttgctgctacattggttttaaaatattaccttctgtcttctgcagcggtcccaaggaggcgcgcgcgacggttcgctcttttcgcacctgaagtcccgcacacaaaccata

SEQ ID NO: 24573 - DNA, 272 bp, Zea mays
  unsure (1)..(272): unsure at all n locations
agcttctaaagggagagcacattntatgattaacacatgttcattttgagaaagacaggattngtagcgcatgccaagcacgaaagcaagttggtgctcaccatccacacaagaacatcatgacgactgacaggccactggagctcctacacatggatctattcggcccgattgcctacataagcatcggcgggagtaagtactggctagntattgtggatgattattctcgcttcacttgggtattctttttgcaggaaaaatctcatacc

SEQ ID NO: 24574 - DNA, 317 bp, Zea mays
agctcgcgatggactgctggtatagtatgggatagtatatttctatatcttgattatcgcgggtgtcacgcgcgctctctctcccgcactgatgcaagcgccgctactgctatcgctatacaggtggttcagagacgccgtctcggtaaagcagcgggaagactcgcacgcgtacaactcccaacggctaacgtgcaccccaatccaattagccagcccacctctgctctgcgggcgcttcagatggaagcactagccattggatccgcgcctcgccgttcgggcgcaaaggactcccaacttcgacggcccggaac

SEQ ID NO: 24575 - DNA, 260 bp, Zea mays
  unsure (1)..(260): unsure at all n locations
cttgatanatcacaacttcgttctcttcaggggcagggacattggtgtctccgccatccctcacaatagacatatcccgggagtaccttcctctcatgttctcaagatgactctcgttgagtggtcgatttttgaagattgaatgacttggccgccagggccgatcctcagaatcttcatccncactttccgcatcatagctatcgctgtcaccagtatcttcagacaaaccttccagtatctctttagtaattntctct

SEQ ID NO: 24576 - DNA, 238 bp, Zea mays
  unsure (1)..(238): unsure at all n locations
gcagcttaacatttctctgaagtctttgaggatttctgcaaatttgagtatttatccacttcagctttcaggcttgcttcanaatatttcttttcttgctcgaatttttctgattgtcggagcaattcattctttaatttggcattttcaggttggacttcagccaaagagcccttcatgtgttgaataacaaaatccttcttttctaatgcaccttcgtgctctttgaccatgaatt

SEQ ID NO: 24577 - DNA, 252 bp, Zea mays
tatctcactacccatatccttatgtcagtccaagttccaattttgttcacctgcaggccatgtgcaccctgcatcattacgagagtcctccacagtgatgatgtcgttgtctaccattgatggaaatggtggtaatctaatagctgcgttacctatctgggtggagaatgatcgttaatctcaacaaatattatcttcattctcatcctgaattatataacagggcaaactttattttttaacttcatccat

SEQ ID NO: 24578 - DNA, 493 bp, Zea mays
  unsure (1)..(493): unsure at all n locations
gcttgccatcagatctcaggccatcagaganttgacagcctgactgtaattaaacccgagttgatcctactcgttcgattcagatctggccgctcagatacgctccctcgctcgcgtnctgcagctagggccggccagtcaagctgtctcgccccccgggcgctgactcccctggcccacttatcagcccgcgctcgtgcttagatctgatcgtgtccgttcgttggcgatcggatggatgagattacccggtaccccttcgcgtggcagntntgtaaagagaccctcggctttttgaaatcacaccggcatcgctggttttctcgcgttgccatgagaatttcagaaagcccctgacttatagctatcacaaaataacctagtttgattttgatccaaactttgtttttatatctttgctatgaactcaatggggcttcaatgcaaagtctanatatatgatcattaatatatattactatgcagatattta

SEQ ID NO: 24579 - DNA, 370 bp, Zea mays
  unsure (1)..(370): unsure at all n locations
ttagaagatcacgacttcgttctcttcgggaacagaagaagttctgtctccattgtcagccctcacaatagatatgtcccgaanataccttcctctcatgttatcaagatggctctgtttaatagttgattttccgaaaactgtatgactgggtcgccatggacgatcttcagagtctttgcccccactctccgcatcataactatcgctgtcaccggtatcttcagataagccttctagaatctccttcgtaatcttttcggtatttgtctttgctattgattcaatgaaaccaacagtcttctcctcagagagtttctccttctcgctcagcctcatctcaacaacagcttttttatcttgagacatc

SEQ ID NO: 24580 - DNA, 513 bp, Zea mays
  unsure (1)..(513): unsure at all n locations
tcttaagcacctgngctgcagctgagtcattatcttgcanannaataatgatgctcaaaaggataatctgggtatgaagcatattcgagagaagataaggctggagtagccaagtgtttcaaggaagacgatcaaggtgtgatatggntcaaaaaccgcatagtagtaccaaagaacgaagagcttcgccagcaagttctggatgaagcacatcttagtagttattctattcatcccggaagcactaagatgtatcaagacttaaaacaacgttactggtggacgaagatgaaaatcgaaatgcacgctatgttgctaaatgcgacacttgcagacgtgtcagggcatacacatgaaaacttgttgtccattataatccttgccatccaacatggaatgggaaacatantatggacttattgtggactaccangacacaaaggtatgactctattggtataatgatcgctacaagatgctcactttgcagtcagacaattccagtactgctat

SEQ ID NO: 24581 - DNA, 163 bp, Zea mays
  unsure (1)..(163): unsure at all n locations
acaactttggctgctacagcttcggttctcggtccggggcangctgtcccgtaccaacctttcggaagagatggcccggggattggatgaccgaatgggtttatgtgaagaatgacttatcagcacgagaagacatccaaggtataattatgcgtcctatttg

SEQ ID NO: 24582 - DNA, 342 bp, Zea mays
  unsure (1)..(342): unsure at all n locations
gcagcttaccaatggacgtgaagagtgcctttctcaatggaccaatctatgttgttgtctatgttgagcaacctnctggctttgaagatagtgagtactctaaccatgttacaaactctctaaggtgctttatgggctcaagcaagccccaagagcatggtatgaatgcctaagagattntcttatcactaatggcttaaagtcggaaaggccgatcctactttatttactaaaactcttgacaatgaaattgttgtatgccaaatatatgttgatgatattatatttgggtctacttaccaaactacatgtgaggaattagtaggacatgcacataaattc

SEQ ID NO: 24583 - DNA, 475 bp, Zea mays
  unsure (1)..(475): unsure at all n locations
ctgcagctgctgtgaagaagtcttacaactacccctatctgaactttttcattgaatgtggatggtacaacgtgagctatcgtcggtttgctcacattcttggcttttctgacgaggatatatctggagactagatcaagattcatgaattccggcagcccataagagatgaagccgaagacctttatctgtctgagtcttggaagtattgggagtcaaccaacattcataagtattatcgntatatcaactccctctgcaggatgaccctcattccaaagggtgaaatagatgaccatctttgggagagcaaagctgctcttttatgaaccaatagctagaaggattaagcttgactgattgcaggaatatcatcagctgcttctttgaggggtctatctcatcattataaatgatgagcggaccaattgattaaaangcccgcatagtatcctcttctgatgtccacatcagt

SEQ ID NO: 24584 - DNA, 259 bp, Zea mays
atgcaaaaaagtgaataaatgctgcaggtgcacatgtctttaccatgagagatatttagatgcatgaatgcttcctatggtggtagttatggacaggctaacaaggacgcttaattatttgagaacagcaggcctgacgatgattgtggccgaatactctccaagtctaatataatgcatcaccgcacctttttgactttcgtttacttgagcactacacgaagtttcatgtgaacttgtaatttctcctcaccataca

SEQ ID NO: 24585 - DNA, 317 bp, Zea mays
agcttgacaagaatatagacattttcctcacaagtttgcctattgttgtacctacggcggacgggccatggtggtggaacagatggtccgcgcgtgcgcacaattatataaggttccgagtttcttgcgagatttattatctataattgcgggattaactcgggaaccgacttgtaacgggtctagaccttccctttatatagatgaagggctacgaccgattgaacccccacaatcgatcaaatcaaatctacttatccgtttttcttatacattaagagtagctctaagttaactttcctatacctaaatctcca

SEQ ID NO: 24586 - DNA, 275 bp, Zea mays
actcgaactaatcttcggagaaacccgacctcgctgctacatgactcccgaaggtgcaacacaacacgcaatgagtgaattcagaattattgctgagcatatctttacaagggacctgggtcatgaggttttggctttcaaagattttcccagcttgaaagaatgggaaatgccgaaactaaagggggagaagaaagaaggtgaacttgtgccgttaccttactatttctagtttaagaaatactttaaaacaccttgccaagagtggctagata

SEQ ID NO: 24587 - DNA, 124 bp, Zea mays
cttcattccgagattggtagagatgtgctaacatatgtccatgatgtcatagtgaagagcacgtaacatgagaaccatgttgttgatgaccacagacatttgctgatttcatacatgctggtct

SEQ ID NO: 24588 - DNA, 371 bp, Zea mays
  unsure (1)..(371): unsure at all n locations
agcttcgtaagggagagcacatnttaggactaaccaatgttcattgtgagaaagacattatttgttcacatgtcaagttgggaagctagttggagttcatcatccacacaaaaacgttatgacgaccgacaggtcactcgagctactccacatgaacctattcggcccgatcacttacataagcatcaacgggagtaaagactgtctaagtattgtcgatgactattctcacttcacttgggtgttctatttgcaggaagaatctcaaacccaagagaacctanagatattcttgagatgggctcaatatgagtntggattgagaatcgaaaagaatagaagcgacaatgggacggagttcaagaactcac

SEQ ID NO: 24589 - DNA, 384 bp, Zea mays
  unsure (1)..(384): unsure at all n locations
tagcaccatgatctaactgactggtattcatacgagacctgcaaacctgctcactctgagtgatctggctgcgttgtaattgcttggacattttgggtattttatcgcgtatttgtcactctcgntgcaggcttattctacaaggcttgaagccaaagatcanagatgaactgcaataccttgaaccttgtcgagtctacatgaaataactctgaaagaanacctactctttgggaaataaattacaagcagctttgtcagctaccctgaccactgcgactaaaaaagtgcgacactgaattatgtgatataacacaatttaatgaaacaggccaaaaatgtactatcttagaaacttaaacttgatgctaaataatactttag

SEQ ID NO: 24590 - DNA, 462 bp, Zea mays
  unsure (1)..(462): unsure at all n locations
atctcagagtcacctgcngcatgcaagcttctgccatgacgaaagatattgccatgactgcggtattgcctccgtacaaagatatagttgcttcatagctcatcaggaactgcttcggatctgagtgcccatcatacatggngagctgaggtggcttgtatgatgggggccatggcgtagcctgcagttatgctgatagaggagaagcatcatcaaaagcaaaattttcatgatggaaatcgtcataccaatcatcatcaatgtagaaattgtcttgacgaagctctctttgtggaggtcttcgatcctggtcatcttgagtaagatgacgaatttctttagcagcttcatcgatcttcttctgtgatcggaaagacaagcatttctctctcttctttnacctgatatggatacttcatgtccagaacctccagtatcggcccaatgcacctgtcttgctaa

SEQ ID NO: 24591 - DNA, 376 bp, Zea mays
  unsure (1)..(376): unsure at all n locations
gaaaatgtgtcttcggggtactagcanganagntactcgggtttattgtcagtcatccgggaattgaagctaatccagaaaagattgaagctatcatgaggatggaggcaccgcgatcacagaagaaagttcanagacttaccggatgtatggcagccctgagcagattcattttcaggctgggagaanaaggcttaccattntataagttactcaagaaggtggacaaagttcagtggacttcagaggcacaggaagccctagacgcattgaataagttattgacaacaccactagtgctgaaaccaccacgtcgagccacgccaactcaaccagctgaagagatgctgctatatatctcttgcacgactcacgt

SEQ ID NO: 24592 - DNA, 242 bp, Zea mays
  unsure (1)..(242): unsure at all n locations
agctntgttatatgcctctgtgtagttgggtgcattatgtcgttagctgcatctagtgatagatagctctatgctggtcatgttgaaaagtctcactcatatctatactacttattaaggcagttagggatatgctgcatctgccgttctgccattctactatctcaagcgtgcattctcctgcagatgtcgtcattcgtgcccaccgacacagatctcccccatgccaccgcacatctttc

SEQ ID NO: 24593 - DNA, 328 bp, Zea mays
  unsure (1)..(328): unsure at all n locations
tcttcttgagcccctcgttcccgatcttcttctcctccccaaccttcatcgtctgtggctaatagtcctcatacgccatcccggtctcgaggtccttcatggcctcgtcctcattcaggccttccatcacattcttcttgctagcgctggggaggtcgaacgagtcattcgccatatgttcgcccaccgtcaacgatttaaaaatcagcctaataatgctgcagatcagctcgcttgtgcgtgccctggcctggtgatatgattgtgtatgttcttttttaactcgaatcgctncaatcccaactcgagtgaagccgatctggatcac

SEQ ID NO: 24594 - DNA, 435 bp, Zea mays
  unsure (1)..(435): unsure at all n locations
cttcatccccacatgtgctaagcggcgatgccatatccagcccatgctagtcttagcaattaagcatgcatctagaccgacctcctcttttgcaaaatcaactaaataaaatttgccgtctaatacacccttaagagctaatgaaccatcacttcttctaaagacagacacatctacatttgtaaatagacaggtatatcccatattgcataattgactaaccgatagcaaattatatccaagagactctactataaacacattagagatagagtgctcattanaaaatggcaatttacctaaccctttaccttgccttgattccatcaccgatataatgaatcttggaatcctattctgacgaggaggtgaacatttttctccccgcatatgggtgtgcatcgtgcgatatcagctgaccnccgatgcataact

SEQ ID NO: 24595 - DNA, 341 bp, Zea mays
  unsure (1)..(341): unsure at all n locations
tgactcaagcctatctactggtgcataggtttcaccacaatccaaaccttcgacttgtgagtagcccttggtacaatcgggctcttttccttgtcaccacaccatgctcatcttgcttggtgcagaagacccacttggtttctacaacattntgggtatgacgtggaactaaatgtcatacctcattccttgtgaagttgttgagttcctcttgcattgccaacacccaatctgaatcccttaatgtgtcttccaccctgtatggctcaatagaagacacanaggagtaatgctcacaanaatgagcgacacaagatcgagtggttacccccttatgaata

SEQ ID NO: 24596 - DNA, 222 bp, Zea mays
  unsure (1)..(222): unsure at all n locations
agctngtgagcaatacaagtacagaagggagatagctgcttctgtcgatcagccgaagcacatgctcttatgcgatgacatatcagagcagaaggtgctattgggatctcaactgtccgaagaacaagagaaaaccttgataaggtttctgttcaacaacaaagatgtttttgcatggtcaactaatgatctttgcggagtcaacagggatgttattaaaca

SEQ ID NO: 24597 - DNA, 301 bp, Zea mays
tctattaaacttagttagctcatgattcaatcatacgatgctacaataaacatttggtaatcatgcattaactaagcttaatagatttgtctcgtcctttagattccacctatgcaattaggttttttaataattagactatatttaataatcgtaatagtcataaaaacagcattgtacgtgacacgtgctatactttagccattcaaatcaaacacacatgttcccattaaaaagacacgacggctgaaatctattaagaacagagaaacacaggacagctcagttatcatttgggcca

SEQ ID NO: 24598 - DNA, 395 bp, Zea mays
  unsure (1)..(395): unsure at all n locations
cgtgtgcatcagatntgttgtgacgtgaagaccagtgccagtttcattgtctatgtgaggaagttattgcatagtggaatggataagtgtgcagatcttgttctttctgtacagtattcaatcagtttagtgggatcagttggtagtaatgataactataataatactgtgcctattattgatggatggcggtgatcagatccatgcatacgatgaacgttccccctctttcgaataaaataattgtgctgttcagcactctaataatttctttaagtgtgctttgttatgtatggtttctattcgcttgccaattagttatatatattccatgagcttgacaacatccagtaatatggagactacaagttcctctctgtctgatatatggttgg

SEQ ID NO: 24599 - DNA, 516 bp, Zea mays
  unsure (1)..(516): unsure at all n locations
tcggatctcngtgccttgctactttgtccacgtggccagcaataacttgagaatcagtctttaggatgacccttcttattcccattgcccttaattntcgaagccccgatagaagtgcttcgtactcagcaatattttttgtgcaactgaaatccagtttgactgcataacatgttttgacttttgaaggtgccactaggaccacagctgctcctgcaccaaaggctccccaagaaccatcacaaaacactgtccaagcttcggcgtatttgcttgtcccctctttgtgagcccctgacgtccaatcagcgatgaaatctgctaacgcttgggattgaattgaagatctgtgcacgtagtcaatagtgaattcattaagctctgtggcccactttccaatccttccagtagcttctctattcctcatgatatccttcaggggctgtgatgaanggaacaatatgtgatatgcttganataataccgaagctttctgacgccattacacacatacac

SEQ ID NO: 24600 - DNA, 477 bp, Zea mays
  unsure (1)..(477): unsure at all n locations
ctaagcttngctatggttaaaaaatttggcagcataacagtgcaatagcaatgaatgctgtggtnacttcacacctacccgtctgtttatatagtgctgcangtaacaaggtgaacttgcaggatttttacaccangcaaacagctgcttgtanggatgaaagtggtaatcctaactcgtaggaccaaattaatattttaaaatagatatgtataaaatttgatgttgatctttngttatgttatcaagcacattagttcaaatatgaataacatattacatacattcggttatgtattatttgctccctacaacacaaaaagttgaaaaaattaccggatntatntccgaatccataccgcaatttatatctattatctaagaaaatgtaggatgacattgaggttatatttatgaatttaacagctggatgtaaaacaagatacacnattgattgatatttatatctattattca

SEQ ID NO: 24601 - DNA, 406 bp, Zea mays
  unsure (1)..(406): unsure at all n locations
ttanacacaacaatntcatcatctttcggctctagaaccacttcctcgccagcaaaacaaacaagtttactctcagcttccctaaagtagcccaatttcttcattataaccatatcatctgccatcacagtagatctaccaaattcaaggtggctaggttttgctgggctcaagatggtgtaatcctcttcatcttcgntatcactcccctctccaacagtgattngctcagcttcagcagtcaaagtatcttcagcaacaggcccctctggcacaacaagacccgactgtctcattaactctgatattagtgtcgtctcagntacttcagcctcgtctccccacgagatactctagcagcgatcgactctaccatttcatgtntcgcttttcagacgaactatct

SEQ ID NO: 24602 - DNA, 293 bp, Zea mays
  unsure (1)..(293): unsure at all n locations
atctcggntctccaatcttcgctataaacaggagatatattgagcactgctctttcaagaagttccaccgaaggtgcttttattgttcaaagaatacatccgaaggtaaggcagcccctgtgccgctgactttgctagcaaatcagagtgctcattntctcctcgtgggatattcttgacagataatccttcgaaagaagcttcaagccttcgaactgtatccanatatttcgcaagcttcggatctcttgctttacaactcttgtcgacatgactagaaataactngggaat

SEQ ID NO: 24603 - DNA, 278 bp, Zea mays
tgtgcactaacactagagctgcaggcgacaccctggccaccgctatacatgacccccacattgacaatatatgatagcctaactgatccaaagcaattccttatgagttatgaagctaccatatcttcatatggtagtaactcaactgtcatggcaaagtcctttgtcatggttgtcaggaatgtgtcttagacttggtactcgtcgcttcgacgtagaactgttatcatggcaaaaattgaaggaaatgcttctcacaagggcttgttcaatgtacc

SEQ ID NO: 24604 - DNA, 487 bp, Zea mays
  unsure (1)..(487): unsure at all n locations
caccaagggctttttgtttataccagattatcctatgcttaacttcatgcttactacatcgatctatcttcttgtaagttgccaacttcaaacccatctcaatacttggaaagaaaatagttccatttaacagtcataaaaaggatactcatttcattatctaataaatgcaactatcataccgtgtgtttgagatcacaaacgtcttgaagtctacaggataatgatctctccatggagttgagcagacattcatcggtgatttggcaaagttgtattatcaccttacgctagaaggatatngaagctgattgaattgaattgatactcatattcttggtgatgtgtacctaggataacctattattcttggctcatgtcgcagtggtgttagtccaagattggtatcgacctcatagcacctatggggtacactaacgcanacaagttctctcctactattntctttacatctccctctttatgt

SEQ ID NO: 24605 - DNA, 504 bp, Zea mays
  unsure (1)..(504): unsure at all n locations
actcagcttccacctctgactaactcggntgatcacttttcgctgttggccaatataatcccgacctgaagaccttcccgactagtgtcttggatgctatgtgtattccacactgcccagcatggacctcatctagaagttgcttcccagtagataagagaatgcatttcatgaggacgcccgatgcaccccttctgtatagtgtctccccaatgagtgtgtagtgagctgactgtctagcgatgcgctcggctgcatttttgtcatctggttcctcttcattctttatatatctgatgatcggtcttctncagtcatcagaatctgactttgngtggttcacgatattacattcttctgcctggtcattgagatgcttggatgtggtatttcttgaacaaagactncaggtgggaacctgagtcaactggatcctagtttggacaatacatcagctgccgtgttcgatctctttcacatggtgaaatccagaccttcaattat

SEQ ID NO: 24606 - DNA, 263 bp, Zea mays
ttcatcccaacatgggctattttgcgatgccagagccaacccatattagtcttagcaattaagcaagtatcgagttcagctctggtaaaatcaactaagtatagctggccctctaatactcccttaaatgctactgaatcatcacttcttctaaagaacagaacacctacatcttgtaatagacagttgtagcccattttgcataattgaaatacagaaagcaagttataatctaaagaatcttcaagaaaaacattggaaat

SEQ ID NO: 24607 - DNA, 410 bp, Zea mays
  unsure (1)..(410): unsure at all n locations
ttaggacctatgatactcagcttatacaggagaatagaagcaagagctcgaccatatgtcataatataatgggagttatacaagcgcggngtctgttccccattactgaagtgcttatccagatccgaaggtatagaattaatgaaggacatacatgcaggtctgtgtggatctcacattggatctaggcccttgcttggaaaagtttttcgccaaggattntattggccgaaggcagcttcggatgcagcggatttagttcaaaagtgcgaaggttgtcagaaatgtgcaagagatcaaaaacaaccttcgtctttaactcaattaatacaacccacttggccgttgcaaaggtggngtctggatttgctangtccattaccaccagcacaggggaacttaagatatgt

SEQ ID NO: 24608 - DNA, 341 bp, Zea mays
  unsure (1)..(341): unsure at all n locations
tgcaagccttaacttcctcgacgtctgatacattctagatagaccgtcgncatcgggcgtacactccatccaaaccccaaatttttttggggtgtatatcgagagaatgagatgatgccataaaaaaaacccacccaagtcgtcaccttgattatttcagctgtagagcagtggagggtcttaaaattgttacgtgtgtactcaactcttggcctgtctttaaatattntaaacatatttgataacctgctttgttcaattagtgcttgaaccattttcgatgagtacttcttcagcaaaatctcacatgctattctaagtgactcatcacacaagtgaca

SEQ ID NO: 24609 - DNA, 493 bp, Zea mays
  unsure (1)..(493): unsure at all n locations
ctnttccatctgacttaactaggttctaacaaaagttctntacatcgctttccagaactcaacangggctgatgaataatgttggactggctgctctcttagtgatgttacttttctttgtcgactggtgttcttggaagattgttagactaccactggactctttttacttgacacgtcctttnttaacatcggcagttttatcagcacttgctggattcctctttgcaccagtcgctgatagtctgaagatccaccatttccggaggagaggaaagtctgtttctccatcaagtagaaagccaacccctggaatgggaggaatattctnttgtcctgttggtattctggttganaaagagaggttggttcaactcgaatggagtaatggacagctatgataccctcatattgcgatggttggttgctgatatattctagctacagagatcacatataatacgcatgataggtctggtcaagagtatctttc

SEQ ID NO: 24610 - DNA, 303 bp, Zea mays
  unsure (1)..(303): unsure at all n locations
ctaagctcgttataacactcagtctacttctgtntcgatcatgatgactaaattaacccatacttctcttattttattctttgttacaagattcactgcaaccaaggttattaaaacgttgaaacgctcatggtgaagttttgacttttaaacaacatatgaaaaataccaatatatcataatttcagacaataacatgaagttaaataccaaaacagagaggttactagcttaccaaaacagaggcagagaggatgagaggactcgactgctgggtgctggccattggttacttaacaaaca

SEQ ID NO: 24611 - DNA, 490 bp, Zea mays
  unsure (1)..(490): unsure at all n locations
tctgcccgacatgatagtccctggccgaagagaagaataccatgtttgggctacattccggactgccatgacgaaggacttcgccataactacagtattgcctccatgcgaagatataattgcttcgtagctcatcagaaactgctttggatctgaatgcccatcatacatgggaagctgaggtggcttgtatgacggngggccatggngtaggctacagttctgctgccaagggagaagcatcatcaaaagtaaaggcatcatgattaaaatcatcataccatccatcttcattgaacaagccttcttgacgaagctccctgtgttggggtcttcgatcctgttcatcttgagcaagatgacgcacttcctcagtggcttcgtcgatctttctttgaagatcagncagccgcgccatcttctcttcttnctttgtacttgtaatggattatttcatgtcctgatctctggtccaactctctgggagtgt

SEQ ID NO: 24612 - DNA, 414 bp, Zea mays
  unsure (1)..(414): unsure at all n locations
tagtggtgggctacatagtgggctngatagtgactcatcgacccttattttgntttcttaaatgatctttggaggaagatattagcacaacctttgntggtaatgattaacaacaacatttgagtagaggtgggcaggatgcttgcttctgaanaatactatttgtatactcttatatatttgtatatatgtctgaagaactactattactattataccattgatgtacatatgtatatatatatatatatgtatatattaaatatccataaatataaatttgtaaatgtatagaataagaagcccctatcctttntagtacctattcttggctagaaccgatactaanagccctctttagtatcagttcttggtatgaactagtaatanagtgggaccttttagtattaattc

SEQ ID NO: 24613 - DNA, 490 bp, Zea mays
  unsure (1)..(490): unsure at all n locations
tttaatactggaattgcactacgagtatggctntaaatacacgtcaaacggttgtcagcagacgacacaattggctgctattctagtggttttttgtttaacttgctaatctagtaattgatcctctttgcagcttgcgagtttctgaaattcttatattgcccttctgtaggttgagaagatggtgcttctggcatgtggatggcgctatacgattactgtttgtgactcaagtaatctatacacttatggttggcgcanatacgttcaactaggacatattgattntgaagatgatttagttccacataaactagaagcattgaaagatagcactatatctcangtaataccttntacaaacattccatgacatggtttaaaacttcaatttcgctttctaggatactacaaagactagttcatacttctatgacatgntgcatcacatacctatactgatggctatatctactttacatatggatat

SEQ ID NO: 24614 - DNA, 378 bp, Zea mays
  unsure (1)..(378): unsure at all n locations
gcttcagacanaatcttatgccaatgtntaggattatcagatatcttctcttttatcaaattaatcaatgtcctattactagactcggactgtccattggcctgagcataatatggagatgaattaagcagcttaattctatataattcagcaaattcacgtacctcctttgacatgaaagaagtaccttgatctgtagttaaggtctggggaatgccgaatctatgaataatatgctcagttataaactcaattacctccttatgtgtcatgttctttagagcaacggcttcagtccatttggtgaagtagtcagtggcaactaacacaaaccgatgcccctttgatgatgaaggatgaatttctccaataaagtct

SEQ ID NO: 24615 - DNA, 382 bp, Zea mays
  unsure (1)..(382): unsure at all n locations
agcctatgatgcttcgntgataacgaaaagaaatgaatgtgttttttgctttcagctaaaaaagaataacacaagtttcgtccacaacaaagccaacagaaacagtagaaggtgatattacaaggtatttgtacatatttaacaaggttctttacatatcatacctcatagattttttcaccaaatacaantgttttggtacaacaaagatctttaagagcatctttcatgatttcatcaaaaactttagcttccgatcttcactcttcaccgacattaccttggaaacaacacttgatcaatattgggcgataacaaacagaaagaaggttgatnaagatagccgacaagaaattttatacttcatcaagcacacccgagc

SEQ ID NO: 24616 - DNA, 473 bp, Zea mays
  unsure (1)..(473): unsure at all n locations
actaagctttgaggatcaccaagatgtagaagacagacaaaacanagctattcatttggagctacaaaccgaagctgagagacttgaaacggaggtgatcgacgccacagacgttaaaatacaatctttgggcaaatcattagccgaatcccaaaaactcaacgagatgtaatagcagagaaaaaatgagtatatgcaaaggagttgaagagtacaatgaagaattgaaacggctcatggacaagtcgaagagggaaaaagaagatgatgcaaagaaaacctcccaacttattcttgaagttgaaaacctttggaaggacgttgatcttaanaaagaagataactccaatttaatcaaatctttaaaagagcttcaagagaagctgtntggaatcacctccccaatgtggaacggctntgtgatatattttattctatcggcacaactttggggacatctaaatatgctaatc

SEQ ID NO: 24617 - DNA, 288 bp, Zea mays
  unsure (1)..(288): unsure at all n locations
ggtgccgatggagaaacanaaatccttganatcttggctgtcgaactgcttgccgttgtcaactgttagctcggacggtactccgaagcggcaaacgatgttctgccagaagaatatttgggcagtctttgatgtgattgtggaaacagccctcgcttcaatccatttggtgaagtattcgacagctacgaaggcgaacttaaggttcccctgagaggtgggcaggggcccgacaatgtccaggccccagcgctggagaggccatgtatgggcaatcagctttgtata

SEQ ID NO: 24618 - DNA, 434 bp, Zea mays
  unsure (1)..(434): unsure at all n locations
agttacctgcggcacgcaagcttagcanaagaaatttctggaatcaagaatattgagctcatgcctaagtctggtaaaagattgttcatcaagtggcttggtaaagatatcggctaattgatctttagtattaatgtaagaaatctcgatatcccccttttgttggtgatccctaagaaaatgataccgaatggctatgtgcttagtgcggctatgctcgacgggattgtcggccattttgatggcactctcattatcacatagcaaagggactttggttaattngtaaccgtaggccgcgagggtttgcctcatccaaagcaattgcgcgcaacaatgtcctgcggcaatgtactctgcttctgcagtggaagagcgaccgaattttgcttctttgaagcccaagacaccaaggatctttccaagaactggca

SEQ ID NO: 24619 - DNA, 184 bp, Zea mays
cgaccttgatactcagcttcgtgctttccgtcgccccgtggagcctgctcgccagctctgtgtcgccccatggccggtctccctgctcgattccgttgtcgcccctgcgctcgtcgcggtgtccagctcggattcagtcctgcgcgtagccgcttttcatctccctgctcagctcgtcgtgccg

SEQ ID NO: 24620 - DNA, 518 bp, Zea mays
  unsure (1)..(518): unsure at all n locations
aaaatcttttaaccactagtgtatgtggtccctctagctctaaatcaaactctgctcgcatatcatcaagcatctcatccatcatatcattctcgggtgtgtcaacttattccattgttgaggcattttcacgtggttgatcactntggtgcacccacacctcatagcttggcatgaaaccgaatcaacaaagctgcattagtagttctctcttatcgtgtggctaagaatttttacaccaactatatgggtacctcatagtagcagcttttcaaagagaaagaatactgataaaacttagagtcttgttcatccacactctcgagtgagctccactattacttcatctatcatacatccattaatggtcattaaccatanntttgtgtataaactaatgagaggaataatgnatngtcacaatattacattnntatattgagaattctatatctatangaaaatatangtcctatacccacctaagagtcactaaaagagtgtgacgctaataacat

SEQ ID NO: 24621 - DNA, 419 bp, Zea mays
  unsure (1)..(419): unsure at all n locations
tctatggtgagcaacctctcggatatgaagatagtgagtaccctaaccatgtttataaactctcaaaggtgctttattggctcaaggctcaagcaagccccaagagcatggtatgaatgcctaagagattttcttatcactaatggcttcaaagtcggtaaagctgatcctactctctttactaaaactattgcaaaagatttgtttgtatgccaaatttatgttgatgatatcatatttgggtctactaacaaatctacatgtgaagaagttagtaggatcatgattcagacattcgagatgtctatgatgggggagttgaagtatctcctatgatttcaagtcangcaacttcaagagggcaccttcatcagccaaacaaagtatattcaagacatacttcaacacagttggaatga

SEQ ID NO: 24622 - DNA, 307 bp, Zea mays
  unsure (1)..(307): unsure at all n locations
tgcaagcttgccttcgcctcagtctatcatccgcagtccttctgaggtgnggagcgcgccaatggaaaaatcttcacagctgtcaaaaagatgctcctcgatgaaaaaagggcagatggaccgatttgttacccgaggcggtctgggcactaaacacgactgagtgcagggcgaccgggtttacttctttccgccttctatacggatcggaggccatgaccccacaagaaataaaacatgggtccctgcggacagttcccttcaccgtncccgacgtggacgagccaacttcaaaggatctcattga

SEQ ID NO: 24623 - DNA, 404 bp, Zea mays
  unsure (1)..(404): unsure at all n locations
cttcatccncacatgtgctaagcggcgatgccacaatcagtccatgctagtcttagcaattaagcatgcatctagaccggcctcctcttttgcaaaatcaactaaataaagtctgccgtctaatacacccttaaaagctaatgaactgtcacttcttctaaagacagacacatctatatttgtgaatagacaattatatcccatattgcataattgactaacagataacaaattatatccaagagactcaactaaaaacacattagatatagagtgctcggatgaaaatagcaatttacctaacccttttaccttgccttgattcccatcaccgaatattattgaatcttgngaatccttngttttgacgtaggaggtgaacatcttctttctcctcgtcatat

SEQ ID NO: 24624 - DNA, 426 bp, Zea mays
  unsure (1)..(426): unsure at all n locations
tattagcatagtttttagcatgatgcatgtgtaattacagaatcattcttagctgattcacaccttctatacattgcactctattatctggtctttcaaataagtactcagaaggtggttagataaggaagaaagaaattttctggataagtcttccaaaattctttttgaaaatgcctcataacctctacagagatgggcttcgctccgataccagctgtgacagaacctccaagtcattaggcccacctatagttgtccttgtgcaacagacttcagacaaccctgcaggtgcccctgaatcacttgacaagttcggtatctactttctttacctttcccaagagcgtttcacctgtcacgcagacattacaagcatcaaagatacgacaatgcggaagcanatacaataacttaccttttatt

SEQ ID NO: 24625 - DNA, 371 bp, Zea mays
  unsure (1)..(371): unsure at all n locations
agcttctaaagggagaacacattttgggactaacatatgttcattntgagaaagacaggatntgtagcgtatgtcaagcatggaagcangttggtgttcattatccacacaagaacatcatgacgacggacaggccacttgagctactccacatggacctattcgggccgatcgcttacataagcatcaacgggaataagtattgtttaagtattgtggatgagtattctcgcttcacttgggtgttctttttgcaggaaaaatcacaaaccggagagaccttatagggattcttgagacgggctcaaaatgagttcggattgagaatcaaaaagataagaagcgaccacggaacggagttcaagaactct

SEQ ID NO: 24626 - DNA, 289 bp, Zea mays
  unsure (1)..(289): unsure at all n locations
gctccagtatactntggttccgaagtcctcagtttatcaaagaanaattatacagagttggagaaggtgatatatgctgtcttaatggcctccaggaagcttcgtcattactttcaagcattccatataattgttccttcatcacagcctttgaaggatattatgagaaacagagaagttactggaaggagtggaaagtgggctacggaactcaacgagttcaccattgactatgtacatagatcctcgattcagtcctaggcattagcagacttcatcgctgattgga

SEQ ID NO: 24627 - DNA, 526 bp, Zea mays
  unsure (1)..(526): unsure at all n locations
actcagcttgtaaacacattaaactcttacccttgaaaaagcgagaagaatacatcagaaaggttgctccaaacattgcaagtacaaataaaatgtgcgtgttgtacattaatatcatgattttccatgttcttttgcaaatctagggctaacagacgactcatcttaacagtataacacacatttgtacataaattatcatagtattatatgtttccgttgcaacacacgggcactcacctagtaaatagtatgaagccttgcttttattgttccaagtttcaacttttaaatttggtttccaagcttggatctaaatgttgagttaccaaactcttaatattattactgaattattcatagagggttntactttataaaggaaggaattcattattggaagacattntacttcanatctttntggnngaatttctaaatcaccaaaatatgattntgggtgtacaacataatagactcgaanacaatattagtctcanggacttatatatagagtaacattccc

SEQ ID NO: 24628 - DNA, 148 bp, Zea mays
ttccgcaatatctttttgcttctgaattgtgacttggcatgttcctggggtgtggcctttgtcttcgccgcagaacaaacaaaatagtcttcctggctgatctctatatcttccttcacagcttttgccccctctacctcttggagct

SEQ ID NO: 24629 - DNA, 346 bp, Zea mays
cttgagacccacacgagcaccgtggatggagcgactaattgctaccacagcctcatcttggccaatgacacgcttgtgcaaagtctcttccatcttaagaagcttatcagattcatcgctggaaaccttctccacagggatgccagtccatgaagatactatgtgctggatatcttcttcattgaccataggtcctgtctcttcagactcttcctctgctttgctcaattccttgctcttgtcaatgaaggcttgtatctgggccttcaattccatttcacggtctctcaattccccagcctaatggcataataatttaaaggaaattagctatgaaagaacatct

SEQ ID NO: 24630 - DNA, 191 bp, Zea mays
taagccttcagaagatattgatcaccaaatactttttttggtattttcagcccatagtgggtgtgaaactctctacattgattttggcatatatttggatatattgatggtctgaattgtggttgggaaataccctataccagatcaatgtagggtatctctagtaattactcctcatatctttatcctat

SEQ ID NO: 24631 - DNA, 506 bp, Zea mays
  unsure (1)..(506): unsure at all n locations
gggatattcttcatcagaacactacggatattggtgtgataaatgaaaattcttcttcacgaagcatgaaaagaagggaaggtgttttttcgtcaaagactaaaaaacggtacgtatgtaaaatttcatgcatcgtaaagaattgaaccataaaaaaagacaagtatattacattcaggattacaagatattatacatattatatttcagatgtttttacaatagcacctagtcttccctaagtactacttccgcagcttcattcaggagttgattaacaacttgatccatgatagcttcagccatctttntaatttcatcgtcatcttttggaggagggcccggagacgctntagtaggatctgagggaggacaggatacagctacattgctattacanatngcgaacgaagttanaatcaaaaataccaacacatnanaccatttagtatacctatttgccttcggctctgcgctttctagcagctctgtactttctagcatat

SEQ ID NO: 24632 - DNA, 203 bp, Zea mays
atatacgaattgactcaagcctatctacgggtgcataggtttcaccgaaatccaacccttcgacttgggagtatcccttggccacaagtcgggctttgttccttgtcaccacaccatgctcgtcttgcttgttgtggaagacccatatggttcctacaacattttgattaggacgtggaactaaatgccatacctcattccta

SEQ ID NO: 24633 - DNA, 315 bp, Zea mays
  unsure (1)..(315): unsure at all n locations
gcatgcctctggacatgttcgcatttggaaccatgagacacaggcaggccactccattccttcaatcccagcaagtgatnttagttagcttcaaagttttaactacaaatgagctcacatgtgttatgtccgtatttatcgaaagacactcttgtgactatctagttttgacaacaaagtcatgggcatcatctgtggaccacctttgtgggcacagaaccgtcagagtgatatgtactctatcactgacgtncaacttctagctagggttttaggtcatcccatacctatagtgtggacttgatatgntcctgg

SEQ ID NO: 24634 - DNA, 358 bp, Zea mays
  unsure (1)..(358): unsure at all n locations
aacttaatatgaggcagagaagattgttttatctgattaaggattatgaattggagattcactatcacccaggcaaagctaatgtagtggcagatgcattaagtcacaaggctttctgtcattgtcttacaatgaagatttctgacattacgctatgccaagaaatggagaagttgaacctgtgaatgattcaacatggaacttcaaatcacttgaagcttgagtcagttctcctgcaaaggataattgatgcacaaagaaatgatgtgagtatgaaacacattcatgagaaaatagaggccggtanagccaactgcttacaagagatgatcgangtgtgtatggtcaacaaccgcat

SEQ ID NO: 24635 - DNA, 386 bp, Zea mays
  unsure (1)..(386): unsure at all n locations
ctgtgtttacaagaaggaaagtgggagcgttgttgtatttctgatcttgtatgnggatgacatattattgattgggaatgacattcctatgctggagtccgtcaaggcttcactgaaaaagagtttttctatgaaggacttatgggaagcagcatatattttgggcataaggatctataaagataggtcgaagaggcttataagattaagtcaagatacgtacattgacaacgttttgaaacgggtcaacatggaatagtccaagaaaggtttcatacctatgtcacatggtanacaccttatccagatgcaatgtcctgcgacggctaatgagcgagagcgcatgagtaaggtaccatacgcctcagcgattggatcaatcatgt

SEQ ID NO: 24636 - DNA, 252 bp, Zea mays
  unsure (1)..(252): unsure at all n locations
acatgagctaagcggcgatgccacagttatcccatgctagtcttagcaattaagcatgcatctagaccggcctnctcttttgcaaaatcaactaaatagagtttgtcgtctaatacacccttaaaagctaatgaaccatcacttcttctaaagacagacacatctatatttgtgaatagacaattatatcccatattacataattgacttacggataacaaattatatccaagtgactctactaagaataca

SEQ ID NO: 24637 - DNA, 444 bp, Zea mays
  unsure (1)..(444): unsure at all n locations
tataaaactaagcttgaacagctgatgaaaagggaaggaaagctatgcctatgtttttcttcgccnaacaaaacaataactgacttgagctcctgtcctccatcagatacggtttgctgaagctaagtacaggccggatcgatggagccatatcagttgcgtgtgtgtcctattgcttggcatttctagncacactgcatggttatatatctctatctaatacgttgaaattcgccaacaacgacgatagactgccgctcattacaaaccgaggactactgcattattatgatcatgtgatgttaaagaagagatatgttgagacatacgcagtacacgcaacagtgatcagcttgacggcggacacgacacggataattatggctcacatcatcgattaatatcctaatattatatatggcggaagactatgttacttgacag

SEQ ID NO: 24638 - DNA, 393 bp, Zea mays
  unsure (1)..(393): unsure at all n locations
agcttattgccaagtgggttagtgaaaattttggtttctaatttcccacccatgactaaggtaactagctntattgtattcttcatctttagatatgcgtatctatttatcttttatctagnttacctttcttgcctagtattacatttgttatgtacttttgtttaaaatcatgcatactangtaaatcatatggtaggattgcttggttttaattcatatacttaagcaaacctacatggcttaaaatgtttatttaagcacgacacatagcttcttattcattccatagtaaatgatgcatcaattgaaaattntgatttctacaaattgtatcatttaacttatatgtgccaaagtttggattatggataatttgcccctcttgatatc

SEQ ID NO: 24639 - DNA, 334 bp, Zea mays
tctgggttgaatcggcggtaatagccagctagtccaatgaaacttcggacttgatgtacagagggtggggggtttcattccaaaatatccttgactttggtgggatccaccgcaatccccttggcagataatacatgtcccagaaactggatttcttccagccaaaatgcgcactaactgaacttagcatataattggagctctcttaagcacgtcaacatgattcgtaaattctgagcatgctcctcttcattcttagaatatagtaagatatcgtcaatgaataccaccacaaatttgtccaactcatgcataaataccgagttcatcagat

SEQ ID NO: 24640 - DNA, 228 bp, Zea mays
tatgactggtgaagaattctttgcttgccctagagctatctagatcatgtgagttccaacgggagatcgggtctggcttggaatatatagtggcgccaactctttgttggccgcactggtcatcttgcgacaaaacaaatgccggaccatgtccaacaaccctggattggtttcaaacttttcaagggtgtgccttggcgagctggcaactttttgtatttgaccatg

SEQ ID NO: 24641 - DNA, 315 bp, Zea mays
  unsure (1)..(315): unsure at all n locations
tttcaccgacatctaagagaatggtggtcttgttatggctcaagaaattataaggaaaagtgaaaaaggtgttcacgatgctctagaagtagccaaggccgctgagaaaagtgcagatctcgagaggcgaatatgtatttaattaatagcttttgactttatgttctaattttatgacttcgaacttatttaccggttgcatcacagccgcactatcttcttccccagagcccgccgagccattggcggaccccaaagccaaggaggatgatgaatggtccaagctattatggataannagtgtgatcaactatt

SEQ ID NO: 24642 - DNA, 347 bp, Zea mays
  unsure (1)..(347): unsure at all n locations
agaacacattntatgattaacaaatgttcatttttataaagacaggattnngagcgcatgccaagcatggaagcaagttggctctcatcatccgcataagaacataatgacgaccgacaggccactggagctcctacacatggacctattcggcccgatcgcttacataaacatcggcgggaagaagtactgtctagntattggggatgattatattattctcgcttcacttgggtattcttcttacaggaaaaatcgtaaacccaagagaccttaaaaggattcttgagacgggctcaaaatgagtttggcttaaggatcaagaaaattagaagcgacaacgggac

SEQ ID NO: 24643 - DNA, 454 bp, Zea mays
  unsure (1)..(454): unsure at all n locations
ttcttgagcccctcaggcatccaaaggtaacaatatgttctcactggggttatgaagctggtttttggctcatcttccttcttcatccagatttggtggtagcctgaataacaatctagcagactcatgagttctgacgaagctgctacgtctactagagaatctatccttggtaatggaaattcatccttcggacaagccttattgagatcagtaaaatcaatgcacatcctccatttaccattggccttcttcaccataacagtgttagctagccattctagatattntacttctctgatgactccagcactgagaagtcttttcacttcattccgagcaccttcngctntgtcatcagacatcttccgaagcctctgctttcttggtttgaaggatggatcaacatttgagcgagtgtcaatgacatcccctgtgacaccacatagaatcg

SEQ ID NO: 24644 - DNA, 245 bp, Zea mays
  unsure (1)..(245): unsure at all n locations
gctagaaacataccctggtatatgattagcacttcttgcctggtngacacatagccactcactcactatgtggtggacacctaatcacccaaacattatagaaatgggccaagggcacatttccctttcaatcatcccctttttggtgatttatgccaacacatcaaaaaggtacaaaagaaagtgcacatccatgcaattgaagaccaaattgttttcactaatgatttggcatatttggatca

SEQ ID NO: 24645 - DNA, 321 bp, Zea mays
  unsure (1)..(321): unsure at all n locations
atcagcttgtggacagtcttgcctacaatagtctgaaggtgtgtatgttttgacttngtgtaaaataaattatttttatagcttttcttatcattatgtgctcattcttcattntgtagggcttaattctaagtaaggctctaaaggcccagaaggaagcagaagatgagagctaccgaatagctcttgggaatctttgctcataagttatcatactaaggaacgaagctctcaaaaaggataagacattacgttccttagtggataggctgaaatctaatgaagccaaacttgctgaagcaactgaaaagccgaagtgga

SEQ ID NO: 24646 - DNA, 233 bp, Zea mays
  unsure (1)..(233): unsure at all n locations
tattggntccctcccccacttggttgggtttgtggtgcattaatgcttggcctatgcgtctcatatgactggtcattcctttctaaccttctaggaggggctggaaagtactcacccccacatttttgggaagttatattattgtgttggggcacttaagatgtgatgggagggttatctgggacatatgtgcatttggataataattgtcttcataggggtctatgcactct

SEQ ID NO: 24647 - DNA, 346 bp, Zea mays
  unsure (1)..(346): unsure at all n locations
agtcaccggaattcgctcaatgtggcttttactggagtagagtcctggggcggtaactaaccatctcgcacgacactatgcgacgtggtaacatggtcagtaatgtggcgtatcctatgtaacagcgactatcatggcgacggncgcgcggncacgtcttcgggcaagtaagtacggcgaagctggctctatccactctncttcggatctttttaccccccccccggcgacgatccatcgccacagagcatgaatcgtagcaccagcgcgaagatcatcgacgacgagattcactgaatctggcgaatcttgttagtccacttgtcaccactgaacaccaccccga

SEQ ID NO: 24648 - DNA, 431 bp, Zea mays
  unsure (1)..(431): unsure at all n locations
gcgacctatgatactaagcttacgggctactggcggagctagccaaagcattggctcgaccagatgtattctggagtgggctggccacggtggccggagctctggcggcaatagcgggcggaattgagctcgccggagctaagggaaagtggctggccggtgagggtgagtgcggcgcgaactgaggtgcgcccggngaggctttataggcgcgggcgggcacggctgaaggcgtgggcgcgcggcggacttgaccggacgccggggcgagcgcgcgcgcgggttgggcgagctctggcgtgccgaccagggtcgaacacgtgtgcccgtgcgttctgcccaagttctagcgcgtgtggtcgctcatccgagcctgctctcgccttggtcagtgcacaaaacctcttctcctctctacaagctaccattct

SEQ ID NO: 24649 - DNA, 447 bp, Zea mays
  unsure (1)..(447): unsure at all n locations
ctcaagcttaaggcatagaaagatgctgaagatgaaagcatccggatagccttcggaaatctgcgatccgaagttattgaccttcggcatcaaggtgttgaaaaagacaaaattcttctttctttaattgaaaagctgaagaagaatcaaactgatttggctagattctctgagacagactaaaaactctcaaagcttgaaagggaaaaaaagttgatgcaaagcgcatagccgacttggaatatgttttatctacacaagtggagcttcataagtccgaggtactaaggttagagaagaaggttatgaagtaacgagaatttgaagtaaaaagcaaacgtgaatagctgagctgagtggatanggtcaaagaacttgaagacttcgcagcaaaatagaaggtttttattgtatgcatgttgcatagctgagagcatgatactaaat

SEQ ID NO: 24650 - DNA, 436 bp, Zea mays
caggatcacctattcaccccctctatttgctctcaattggtatcagagctgtattcttcatctaagggactaaccgcccaaagagatggatcctaagggaaaggggatgtgggtcaacgacaaggaaaaggagtccttcctcaacgagcctagagacgacaagccaaccgactctagctcgagtcacaagaagaaggacgggaagaagaagaggcgcatcaaaaagatcgtctactacgacagcgatggatcttcttcttcaccaagagacaacgacgatgacgattcttcgtcaagaagaagacggttaatcaaaactattcctttgattattccctcacgccgtacaattcaaatgcacatttactttctattcctctacgaaaacctccacactttgatggagagaactactcattttggagtcataaaatgc

SEQ ID NO: 24651 - DNA, 152 bp, Zea mays
  unsure (1)..(152): unsure at all n locations
cttcggaactgacaaaaatatgtgcttaatccgaagctcagaaaacttaagaaacaaagcaactgttggaaagcaagagctaagaaatcaagcanagcaaagtaagcataccaaatatgctcggggtgaattcttatttatacgcccagcgc

SEQ ID NO: 24652 - DNA, 293 bp, Zea mays
  unsure (1)..(293): unsure at all n locations
cgcaaaatactgtccaaacttcagcatctttattcgttttttcttcctgagccccttgcgtccagtcagcaatgaagtctgccaatgcttgagattgaatcgaagatctatgcacataatccatacagaattcattgagctccgcggcccatgttccaacccttccagnggcttctctatttctcataatatccttcaacggttgtgaagaagaacaactatattgatgcctgaaatagtgcgaagctcctgangccattaaacacatcagaccttctcactctggaattttc

SEQ ID NO: 24653 - DNA, 276 bp, Zea mays
  unsure (1)..(276): unsure at all n locations
cgcgcgatggcggctttgcagaaaaagccctctaggttntatctaacacgaagcgggttcggttactatttcctgtggtcactgacattcacaaaaagggcctctggtttctgtctattctgtgtttcacgtcctcgacggcgttcaagcacggtcgcgctccggcgagcaacaacgccggccgattgnggctaagaccggtgctaatcttcggctgagaccaaacccgagtccccatgaacgttttcctcaacttaattgcacgaatggtggact

SEQ ID NO: 24654 - DNA, 296 bp, Zea mays
ggtgaagattcttcatcccaacatgggctagtcgacgatgccagagccaacccatattagtcttagcaattaagcaagtatcgagtttagctctgttaaaatcaactaagtatagctgaccctctaatactcccttaaatgctactgaatcatcacttcttctaaagacagtaacacctatatccgtaaaaatacagttgtaacccattttacataattgagaaacaaaaagcaagttgtaatctaaagaatctacaagaaaaacattggaaatagaatgggcaggagatatagca

SEQ ID NO: 24655 - DNA, 469 bp, Zea mays
  unsure (1)..(469): unsure at all n locations
tgtgaaatggtgtgaagatggtgcggtgatgcctgtctgtgagttatcctggtttattcgnttgtagagcgatgtaggtgatatgatctgattggttgcctttaatgccgtttgtttagccccaagctgtgaccattatcttatntggcttgtacattcagagggtgatgctgtaattggaagacacgaggccaattttagaatctaatgctgatttagcaactctaagattgagtctttgagagatcaatcattntatgtgaggaaacagtttgttagatgggtaaaaacggtattntggaaattctaagatctaccatggtttgtatccatggcccattggccagngcatangtatggagaactcgagacctaattctccactaaatccagaaaccaatggctaccttaggttatacggtacgaaattctgtactgcagaataatagactcatgtctatgaatcatg

SEQ ID NO: 24656 - DNA, 302 bp, Zea mays
  unsure (1)..(302): unsure at all n locations
tgcaagcctgaagttggcctttgcgccatgtctatgaatgacctcgcggacaaccttgcatacgatagtctgaaggtacagaagtcgtgaattaaaacacaggtctatgaacttaagaattaagggctttattctcatgccaacnctctatcctttcttcttttgtgcagggctaaattcttagcaacgctttgagggatcagaagaatgctgaagatgaaagctggatgatagctctcagcaaccttcgatcagaagtcattaaactcagaaatgggggcttggagaaggataatattctt

SEQ ID NO: 24657 - DNA, 317 bp, Zea mays
  unsure (1)..(317): unsure at all n locations
ccttcatgggattattgcagagatactgaagaatttcggaatttattttcaccagctaacccctaacgctatcgttaggctcagtgtttatatctgggcactccgaagccaggcggtggaaccgtttgctgacagcttttgccgagttcacgaactgcactatcagacaaaggctagaaaggatggattacatgagaattntggttgctataattntgcttaccggaaaactacgaagtatcctgtgatcagctaccgaagcaaatgggcagccgggtggaaatcagaatggttctatgttaagggtgatgaatgat

SEQ ID NO: 24658 - DNA, 320 bp, Zea mays
  unsure (1)..(320): unsure at all n locations
tgccgatggagaagcacaagttcttgtattcttggctgtcatactggttggcgntgtcgactgttagttgggaccgtactccgaagcggcaaacaatgtattgccaaaagaatttttgggcagtctnttatggtattgtggagacagcccttgcctcgatccatttggtgaagtattcgacagcgacgaatgcgaacttaaggttcccctgagccgagggttagggcccgacgatgtccatgccccagcgctggagaggccatgggtgggcgaacagctttgtatattgcgaagggctacctgatcgaggggagaacttc

SEQ ID NO: 24659 - DNA, 311 bp, Zea mays
  unsure (1)..(311): unsure at all n locations
acccccaaccgggcgctaaggcngcccgctttttgcttgnaggcacgagtggtcgtggtcggcagctgttggggcgctaccccgctaatgacttatattggggcctcgttttcacttagactgggtactactgatttacccagacgtgcatacctattgttcttatagctgaacgaggtacatagtcggggtcgtcaaaacttgcttgactgaacggactacatggtttatgagcacactggagtttgttttgctaataacgtacttccctgtgtgtctgtagatatgaatcatctgagaacttaacgtat

SEQ ID NO: 24660 - DNA, 287 bp, Zea mays
tccgtgtaaaggcttcttagaatttgcattccaagataagcatgaagggagcaagatttattgccctttgcagtcatggcgggacactactgtgcatccaagtgatgttatggttgaacatttggagtgccatgggatacttgagaattatgaccaatgggcatggaaataataatatggggcaaaatagttggagtaacgaaagacaagttaatatgacacaaatgatgcatgatacaatacaacacatgtatgatgacatacctatgggtgatggccttgcttct

SEQ ID NO: 24661 - DNA, 303 bp, Zea mays
  unsure (1)..(303): unsure at all n locations
tattccaacctcgcttctgaagattattggtcgctataatattnttatggaggagggtccatgcaaagaaccgacatttatgctccgtcttcgccttccaaactggagaaagtttgagcttggcaaaactcccgtggaactgagccaggtaagcactcttggtagagtattcgccatatgattntgtctacttcctcaatatttatatggacttcatggatggcttcccaaagtctcacaaattcaattatttcagtttccccagaaaccagagaaataagagaaatccatgtattgtcgagc

SEQ ID NO: 24662 - DNA, 356 bp, Zea mays
aatggacgtgaagagtggctttctttatggaccgattatggaagaggtctatggtgagcaaccttccggctttgaagatagtgagtatcctaatcatgtctatagggtctctaaggggctttatgggctcaagcaagccccaaaagcatgggatgaatgcctaagagatttccttattgataatggcttcaaaggcggaaaggccgaatctactctattcactaaaactcttgacaatgaattgtttggatgccaaaattacgctgatgatattatatttggggctactaacgaaattacatgtgaaagaattagtaggatcatgaaaaagaaatttgagatgtcaatgatggggg

SEQ ID NO: 24663 - DNA, 382 bp, Zea mays
  unsure (1)..(382): unsure at all n locations
gcgcagaactgctaccatccagtgcttggccttcgcggctgggactggatatgatcggcctttcagaagctcaggaggaacactcatgtactggtgccatcgcaaattcactaaatggataaattcaacccattgctctttgacctcactaaggcgtggattataccagactaatattagaatcggatacaaaccacatcataactgacctggatcacttacaagtcaaattttcgatttgcagcaaaaacatcaatcagatgctttgagccatcaaaccacggcangtgagcaccaacgatatctgagcactangaaaggctcatagataaagtccagaatgataagatgctattgctgactaaccaccactacttgctga

SEQ ID NO: 24664 - DNA, 339 bp, Zea mays
  unsure (1)..(339): unsure at all n locations
atggaagagaagatgggtgcagtgctccgctcgaaactagctctttgttcgccaacagactggtcaggcgcgccgtctgctggacgaccctgacgtcgtctgccaacggattggataaggtgcatttaatgtccagagggcttgtcgcctgtcagcgtggtggcaggcggcgcgtcctttccgcaataaatgctgaggtcgaacggctgcatgggccctacatcangctcggcccattggcttatgtcacgggcctcaagccaaacgacagtagtatggctccgcctgtgcaggaagtcccactcgagagatggacacgtgtcggcaccggacccctat

SEQ ID NO: 24665 - DNA, 129 bp, Zea mays
ggacttggaacgcgctgcagctatgaattttttcatgggtttcgcggccgagcaacatgtggttaaatagcagtcagtcactctataaataatagttagtgcccttatatcctaaactatgatatactt

SEQ ID NO: 24666 - DNA, 324 bp, Zea mays
  unsure (1)..(324): unsure at all n locations
agaaagacaggatttgtagcgcttgccaagcanggaaacaagttggtgttcatcatccacacaagaacatcatgacgactgacaggccacttgagctacttcacatggacatattcgacccgatagcttacataagcatcggcaggagtaagtattggctagttatcgtggatgattattctcgcttcacttgggtattctttttacaggaaaaatctcaaacctaagagaacttgaaaggattcttgagacgggctcanaatgagttcggcttgacgatcaagaaaataagaagcgacaatggaacgaagttcaagaactctc

SEQ ID NO: 24667 - DNA, 172 bp, Zea mays
ttgagatgaggcatctttcatattaagacgggcggctaaattgcgccaacttggtgggtagcgcctccttgcttctttgttgccttgagaacaatggggtgaagctcatggattgggccattcaacgcgttcgccacgtacctcgccttcttgatcatcatttcgccgctta

SEQ ID NO: 24668 - DNA, 409 bp, Zea mays
  unsure (1)..(409): unsure at all n locations
taagctcctctagcggctgacgaagtcatgcttaccgagtggcataatggttaccggagggggcgccatgtggtgattgtctaaagcttcgcttaagagcaagaacataagaatgtaaacgtaaagtcttcggncattatttccttagatatacactcacaatgaagtacaagagcataccttctagacgacatatataaaataggaggagtctacaacatgacatatgaacataaatgtatcatatgatttttcatttatactacaatagtaaatatattatacagtgaccttcgtgaaggaataaaatcagctaccaaacaatgcagtcactgacgacagaactgtattattatagccgtcgagcatgaaatactcagccttgattgtatacttatagatgcgtgct

SEQ ID NO: 24669 - DNA, 447 bp, Zea mays
  unsure (1)..(447): unsure at all n locations
tggagaagcagaaatccttgaagtcttgtttatcaaactgcttgccgntgtcaactgtgagttcggacgatactccgaagcagcaaacaatgttttgccagaagaatttctatgcagtctttgatgttactgtggaaacagccctcgcctcgatccatttggtaaaatactcgacagcgacgaaggtgaacttgaggttcccctgagccgtgcgtaggggcccgacgatgtccaggccccaacgctggagaggccatgtgtgggcgatcagttntgtgaattgcgaanggctgnctgatcgaggagaaaacttctggcaggcttcgcacgaccttgtgacccgatttgctgcgcagatcattgcnggccagtagataccttggcggatcacctttgcggctagggcccttggccctgcgtgagagccgcangtaccactgtggactt

SEQ ID NO: 24670 - DNA, 279 bp, Zea mays
  unsure (1)..(279): unsure at all n locations
gatagtgagttccctaaccatgtttataaactctctaaggcgctttattggctcaagcaagccccaagagcatgctatgaatgccctatggatttccttatcactaatggtttcaaaaacngaaatgccgatcctactttattcactaaaactcttgaaaatgacattgttgtatgccaaaattatgttgatgataatatattngggtctactaacgagtctacatgtgaagaattagtangatcatgacancaaaaatcgagatgtcgatgatggggg

SEQ ID NO: 24671 - DNA, 427 bp, Zea mays
  unsure (1)..(427): unsure at all n locations
ttaacacagcacaagtcattggaattgagtattataaatatggnactataagatgtgctgncattactcatatcaaaacacacaataatcttgtacaattgtactttcaaaaacaaatgccataaatggatgccaatctaaacataacagcagcactagatattttttcccatacagaacatcccattcaatttacaagcaaccatggtcgcatcagctggctccatttcatgtcaaatacatcattataccgcaactatatattaaaaaatatggaagtggatttttctttcactcattaacttcatgccacacatganataaaaaacagaccaacagaaaactgtacctagttgacacatgacattagcatcatatttctatgggctaccggctacgtaaagtagagaacttgaacatttgtttg

SEQ ID NO: 24672 - DNA, 290 bp, Zea mays
ccaattcactaatcatactacttagaaatacactatttacatgcatttggtagaggttgatattgtgggcacaagcataagcgagaagaattcggattgcttccaatcttgttgtgggagcaaaggcctcaccgaaattcaatccctctatttgagtgtgtccttatgccactagtcttgttccccactaccaatccatcttcattatgccttgtgtgaaacactcatttagcgttgtggtccttatgtctctcaacaagtccaaacttattacgagtaaagtgttatgt

SEQ ID NO: 24673 - DNA, 361 bp, Zea mays
  unsure (1)..(361): unsure at all n locations
taatnctgagaagtgtgtcttcagggtgcccctatgcatgctcctagggttcatcgtctccgagcgaggcatcgaagccaacccagagaagattgcggccgtcaccagcatgggacccatcaaggacttaaaaggggtacagagggtcatgggatgcctcgcggccctgagccgcttcatctcacgcctcggcgaaagaggtctgcctctgtaccgcctcttaaggaaggccgaatgtttcgcttggacccctgaggccaaggaagccctcgggacctgaaggcgctccttacaaaggcgcctgttttggtgccgccggcggacggagaagccctcttggtctacgtcgccgcgaccactc

SEQ ID NO: 24674 - DNA, 333 bp, Zea mays
  unsure (1)..(333): unsure at all n locations
ctcagcttatccacggacggaaagtgccttcttatggccactcaggaagtgtcttgttgacaacctcccgctttgaagacagtgagtacctaaccatgtttaagctctctaagcgcttatgggctcagcaagccccaaagcatggttgaatgcttatagatttctattgcaatggttcaagtcgaaggcgacctacctcttactaaactctgaaatgattgttgatgccaattatgtgatgaattatattggctactacagtctacatggaaagttagtngatctgaccgaattcagatgtttgaggggagtgaattttttagattcagtgac

SEQ ID NO: 24675 - DNA, 432 bp, Zea mays
  unsure (1)..(432): unsure at all n locations
ggtctcttgctntgtagctcttgtcaatatgaccagagattacttgagaatcagttctaagaatgacccttctgattcccattgcctttaatttccgaagacccaaaagtagagcttcatactcagtgatgttatttgtgcaactaaaatcaagtcttgccgcataacatgttntaactttggaaggtgaaatcaacacagcagccgctcctgctccgaaggttccccaagacccatcgcataacactgtccatgcttcggcatctttatttggttcttcctcctgagcccctgacgtccagtcagcaataaagtctgctaatgcctgtgactgaatcgaagatctatgaacataatcaatacaagattcattgagctctgcagcccatnttccaatgcttccagtagcttctccgtttctcataatatcct

SEQ ID NO: 24676 - DNA, 334 bp, Zea mays
  unsure (1)..(334): unsure at all n locations
atgtccactttgacatagacacgagttgcagcacatgtcaagcagggaagcacgttggtgttcttcatccacacaagaacatcatgacgactgacaagccgcgtgagctactgcacatggacctattcngcccgatagcttacataagcatcggcgggagtaagtactggctatctattgtggatgattattctcgcttcacttgggtattctttttgtaggattaattctaagtaccaagagaccttaaagggattcttgagacccgctcaaaatgagatcggcttcaggataaagaagaatacaagcgacaacgggacggagttcaagaact

SEQ ID NO: 24677 - DNA, 389 bp, Zea mays
agagaagatttaacaatgcgagtaggagtgaggaggggatgagagattctcgcgttgttggggatcttctcaagaaggggccggccctggacaggtgccggcggtgcggccgcaacgggccttcgagaaccacgggccccctatacgtgtatgtgtatatatatagaaaatgtttatgtagattacaacacaaagattgataaaagggccaagcccatcaacttacagtatgcatgcttggttaagctcgattacttggcttctcgtggacgcttgagctgcaatcctctttgccttctcatggaagcctccactcacgttgtccaggctacaacaattgtctagcaccagcagtagcagctagcagcgacagacgggagggatcacct

SEQ ID NO: 24678 - DNA, 296 bp, Zea mays
  unsure (1)..(296): unsure at all n locations
ccactatctatgangggaagaacatgacatatgttgacaatgaagaaattgtggaacaaagtttgggttatagcttgttctctngatcaacttgaaaactcatagcatggtgcacaataagagtattgtaattctccgtggcatgagtgccaaggacctcctcatcacatgtctcatgttcatcggtggtccctgtaatattagctacattcatatcttcatcttcaacatcaaaagcactaacatacccaccgtcggtagtagcaatgtatgctcatttgctatgacactcccac

SEQ ID NO: 24679 - DNA, 392 bp, Zea mays
  unsure (1)..(392): unsure at all n locations
ctcacgcttctanagggagagcacattntatgattaacaaatgttcattttgagatatacaggatttgtagcgcatgccaggcagggaagcaagttggagtccatcatccacacaagaacatcatgacgaccgacaggccgcttgagctactccacatggatctattcggcccgattgcttacataagcatcggcgggagtaagtattgtcttgtaatagtggatgattattctcgcttcacttgggtattctttntgcaggaaaaatctcaaacccaagaaaccttaaagggattcttgagacgggctcataatgagttcgccttaaggatcaagaaaataagaagcgacaacgggacggnagtcaagaactctcannatgaaaagcttct

SEQ ID NO: 24680 - DNA, 413 bp, Zea mays
  unsure (1)..(413): unsure at all n locations
cacattttggactaccatgtcattttgttaagacagggtctggagcgcatgtcaagcatgaaagcaagttggtacccatcatccacacaagaacatcatgacgaccgataggccgcttgagctactccacatggatttattcgacccgatcgcttacataagcatcggcggagtaagtattgtcttgtaattggggatgattattctcgcttcacttggatgttctatttgcaggaaaaatcacaaacccaagagactntaaagggattcttgagactggctcaaaacgagttccgattgagaatcaagagaataagaagcgacaacgggatagaagtcaagaactctcatattgaggctttcttgatgatgagggcataagcatgaggtctcttcttcctacacccctcaac

SEQ ID NO: 24681 - DNA, 440 bp, Zea mays
  unsure (1)..(440): unsure at all n locations
agcttatgaagggtcttcattccaacatgtgctatacggtggtgccaaagccagcccatattagtcttagcgattaagcatgcatctagatcgacattctcttttgagaaatcaactaagtagatcttgtcatctaatacacccttaaaagctaatgaaccatcacttcttctaaagacatatacatcaatatttgtaaataaacaattatagcccatatgacacaattgacttacagacaataaattatacccgagcgattctactaaaaacacatttgaaattgaatgcttggtcgtgatggctattttgcctaagcccttaaccttgccttggttcccatctccaaagatgatagtatcttgggaatccctgttcttgacgtaggaggtgaacattntcttctccctagtcatgtgggttgtgcatccgctatcaat

SEQ ID NO: 24682 - DNA, 466 bp, Zea mays
  unsure (1)..(466): unsure at all n locations
aactaagcttatcaatggacgtaaaagtgccttcctcaatggaccaatctttgtataggtctatggtgagcaacctcccgggcttgaagatagtgagtaccctaatcacgtatattaactctctaaggcgctttatgggctcaagcaagccccaagagcatggtatgaatgcctaagagattttcttatcactaatggattcaaagtcggaaaagccgatcctactctattcactaaaactcttgacaatgattngttngtatgccaaatttatgttgatgatattatatttgggtctactaacgaatctacatgtgaagaattagtangatcatgacacanaaattcgagatgtcgatgatgggagagtngaagtacttcttanggattcaagtgaagcaactccaagagggcaccttcattagccaaacgaagtatattcaagacattctaaacaagttgggga

SEQ ID NO: 24683 - DNA, 60 bp, Zea mays
gctcactatcggtctttaactccttatctattcgagaaggaaagcacccacggagattga

SEQ ID NO: 24684 - DNA, 385 bp, Zea mays
  unsure (1)..(385): unsure at all n locations
cagctttctgactgccatgaatagcaatgggtccctgttctgaaagtatcttcatgtatagatatgctggatgaagtattgctttcaaagcgttgagtgtttcacgaccaatgatcgcattgcaagggtattccatgtcaattatatcaaacacaacatgttcagtccttgtgttgtggaccaaatccaaggttactggcattgngatcttgccaagtgctacgatctgtctttcttcgaagccacaaagacggtgtgtagcatcatgaattttgtcttctgctcctgcatctgtctgaaagccttagcggatatgatgtcagctacactgcctgtttaactcaaacattgtgaccaganatcccttaatgacacacgatatgac

SEQ ID NO: 24685 - DNA, 440 bp, Zea mays
  unsure (1)..(440): unsure at all n locations
agcttctaaagggagaacacgtgataggtctaactaatgttctattcgaaaaagatagaccttgtgcagcttgtcaagcatggaaacaggtgggaggctctcatcacaccaaaaatgtgatgacgacatcaagacccttggagatgctgcatatggacctttntggacccgtcgcctatctgagcataggaggaagtaagtatggtttagttattgttgatgacttttcccgcttcacttgggtgttctttttgcaggaaaagtccgaaacccaagggaccctcaaacgcttcctcaggagagctcanaatgagtttgagctcaaagtgaagaagataaggagcgacaacggatctcgagtcaagaaccttcaagtggaggagttccttgaagaggaagggatcaagcacgagttctncgctccctactacaccacagca

SEQ ID NO: 24686 - DNA, 275 bp, Zea mays
  unsure (1)..(275): unsure at all n locations
gaagtagtcttttatgttgtgctatgtaaaagcttcggcagaaggaagaagtagtcttttatgttttgctatgtaaaagcttcggcagaaagaagaagtagttttttatgttttgctatatgaagaaaagctttggcaaaaagaggaagcggccgtttaggcttcgttgtgtacgaaaagaagggaagggtgttnttcgccttccgctcaaaatactgatttcgtccacatcaaagcgactcaatcgaagggtaagaatatatttacaggtatgt

SEQ ID NO: 24687 - DNA, 472 bp, Zea mays
  unsure (1)..(472): unsure at all n locations
gtcacctgcggcatgcaagctttctgataggttcattacgtgggattccatttcctgcaatatcattagaaacatgcccttgcgagccattagattcatcaaatggcccgtctatcgctatttgaacaagaccgcgggtattgcagaagacacgatatccgtgcgcatttgatgcataactcagcaagaaatcctcatccactctaggagcaaacttcgagctcttgactttcttgttaagaataaagcatttgcaaccaaagactctaaagtaatcaaccttatgtttgttaccgatgagaagctcgtagacaatcttcttataaatcttatgaagataaagacggntgattgcatgacaggcggtgttgaccacctctgcccagaagttgtcaggtgtcttgtattcatccaacatggttctagcgacttcgattagtggtcgattcttcctttccactacaccattttg

SEQ ID NO: 24688 - DNA, 232 bp, Zea mays
acttgctctcaaatgcttccgcttaagagcaaggcaacatcaagaatgtttaacgtttaagaccttcggagcactatttaccttatgatataacgactcacagatgaaggttaccaagagcataccttcgtaaatacgacatatatacaaatgaggagggagtgctacgagacatgaacaatatgaacaattacactatgtatcagtaattgcatttttctactttatcacc

SEQ ID NO: 24689 - DNA, 458 bp, Zea mays
  unsure (1)..(458): unsure at all n locations
agctntaacccctgcgaggcctttccccgtttctttctaaccatggtaaatgcaagatcgcatgtcatattctatgcatgtntaatctacttgttctcttgtatggtgtactgttggtttcctaatttcaatggatggatgtatgtgtgtttgcactcgcatagagaacgatccgattgaagagcccgaggaactcgcaagagaagcccctgagcaacagtcggttggtggaggcaagtgtcccttgacgtatctctgtcctattcattctttaattcaccttccgcattacacatgtatacctaaggattgactagcttttgttatccaatgtccttgttacctatttgggttggattattatttgttagctntatgctattgctcaactctaatcaatgaacatgatgagattatctatgattacgctgtgtcccctcttcctattatgaatgtat

SEQ ID NO: 24690 - DNA, 324 bp, Zea mays
  unsure (1)..(324): unsure at all n locations
acctgtctcaagacgaaggggtgaaccgacttaattattttttacttaaagacccatgatattctgtgtcattattgtagntcattgtaaagggcataaatgtaattatacatatgttgcgccctgtgcctataaataggtgaacagtacccctgtactgttcacccgctcctgtaatcacgcattgggcatttgcttttgcttcacgctggtatttttactttccttcaagtcgaaggtacatttgtaatttgtcattatttctataataaccaaataaaatatgaattaataataataatcatgtgttaaattaattttcat

SEQ ID NO: 24691 - DNA, 463 bp, Zea mays
agcttctaaagggatcaagcacgagttctccgctccctacacactcacagcaaaatggtgtggtagagaggaagaacaggacgctaatcgatatggcgaggacgatgcttggagaattcaagacccccgagtgtttctggtcggaagccgtgaacacggcttgccacgccataaacagggtctaccttcatcgcctcctcaagaagacttcgtatgagctactaaccggtaacaaacccaatgtatcttactttcgtgtatttgggagcaagtgctacattctagtgaagaagggtagaaattctaaatttgctcccaaagcagtagaagggtttttgttaggttatgactcaaatacaaaggcgtatagagtcttcaacaaatcatcgggtttggttgaagtctctagcgacgtggtatttgatgagacttatggctctccaagagagcaaagttgtgatct

SEQ ID NO: 24692 - DNA, 188 bp, Zea mays
gagagatatgcttgtgttctttcgagctcttgcgcttggattgctttcttctttcttgatgctttattgcgaacaacctcacttgtaattgaggcaagagacaccaatcttgtggtggtccttgtgggaactctgtgttccaagtgattgagaagagaaagctcactctgtccgagggaccgtttgag

SEQ ID NO: 24693 - DNA, 390 bp, Zea mays
  unsure (1)..(390): unsure at all n locations
cagcttagtatatccatcttatcttaaatatactttttatcttaagatcatatcctaatagatctgattgacctcaaaagattctaccttatccctatggattcaatctgccctaataaacatatttaccctcacactagtgttacaaccatgatttaatacaaagtaattagatattgtttaatctaatctggtgatatcgatctaatctagaatccatctaatctactatgatccaatctaaaatgagttacctaacaagatagtcaatcctggtggaatacattagaccctgctcctataaacaagtttgagatcttagatcaactcgaccgtacccaacaacttgacctacanaataggttacacaactaattccatctagcatat

SEQ ID NO: 24694 - DNA, 461 bp, Zea mays
ctggtggagctagtcgaagcactggcgcgacttgtgtgttgctggagtgggctggccacggtggccgatgctctggcggcagtggcgggcggaaaagagctcgccggagctaaggagtggtggttggccggtgatggtgagcgcggtgtgaagtgaggcgcacctgtggaggctttatatgcgcgggcgggcgcggccgatggcaatggcgcgcggcggacttgaccgaacgccggggcgagcgcgcgcgcgggttgggcgagcgccggtgttggggcgaaggcgaagacgccacccttcgctcgaggccttcgccgtactcgctgcacccttcggtgacaagacaacgggcagacctacccttcttgtcatacaccaccggacgaagacctgtgacgaggtcatctcatctcgtgacctcgtccagaatggagggccgcgtgtgatccggcccattgaac

SEQ ID NO: 24695 - DNA, 294 bp, Zea mays
  unsure (1)..(294): unsure at all n locations
gcatgcaagcttattcattgaagtattntcccaaagctaactaaaaggttaatataaattttgctatggatttgaactattttcttaactaaataatatgatgagatattttacataaatcatacttcattataaattttggggcatggacaaaggattaatataaataaacatataatttatacttgcatggtcatgctgagagttctgtttggtacatcaaatatatgtttgaaattcaaaatcaaacttaggattgaaatgggaaatgaaaatatgaaataaaaatataaa

SEQ ID NO: 24696 - DNA, 174 bp, Zea mays
aacacccgcactggaagctgtgctacattttttgatgggccctaaagggtcgaccctaaaacctccgatggactggtactgtgctgagactgggtaataatacatgtgaaaaatgctggctgatatcttccctcaatgttcgataaacccctacgctaggtggacagcttctag

SEQ ID NO: 24697 - DNA, 384 bp, Zea mays
  unsure (1)..(384): unsure at all n locations
gctgcaactcgggaaacgatcttttgatatttatcttataccatcgcaccagtctgatgccggacacagcccaacttttcgtcatcgatgccactgaagagaaagcgttcggccgatatccgcaagaataacataatctnttagctcttctttttcaacctttgtcagctcttgaccaactaagtattgaaggaaaaattccatcttccgaagtgtcttcggctatattcttctacttctcgggcactgggaccataagttccttcgtggctgtaacagctgcttctgcgtgcatgtctagcagaatcttatcaatattaacaattgtgctctctaagtgaatatcttcggctgtggcagcgtctgcagcttgagcttccaaag

SEQ ID NO: 24698 - DNA, 430 bp, Zea mays
  unsure (1)..(430): unsure at all n locations
gtatatggngagcaaccacctggattcgaagaccctagatatcctaaccatgcttacaggttgtccaaggcgctatatgggttaaagcaagctccaagagcttggtatgagcgtcttcgcgacttcctcatcgaagagggcttcaagatcgagaccgtcgacacaactctattcacaaagaaacataacgatgatattctcatttgtcaagtatatgttgatgacataatctttggctcaataaatgactatcattgcaaggaatctggtgagttcatgtcgaacgagttcgagatgtcaatgattggtgagctaacgtacttnctcggcttcaagtcaagcaatgaagatggaacttcctctacaagatagtatccacagactgttgacatgtcacatgggatgtgaaccaatcagaactatgcacaat

SEQ ID NO: 24699 - DNA, 404 bp, Zea mays
agctatcggtctttatccttgcacactttgtcaatatgacccgaaacaatctgagaatcagttgtaaggatcgccctcctgatccccatctgctctagatatcgaagacccacgagctaggcttcttactcagcaatattatttgtgcagctgaagtccagtcttgctgcatagcaagttttaaccttggacggtgaaaccaaaacagcagctgctcctgctccgaaggttccccaggagccatcacaaaacactgtccatgcttcggcatctttattcgcttcttcgccctgagcccctggcgtccagtcggcaataaaatctaccaatgcttgagactggatcgaggatctgtgcacataatcaatgtagaattcattaagctccgcaggccattttccaat

SEQ ID NO: 24700 - DNA, 295 bp, Zea mays
  unsure (1)..(295): unsure at all n locations
tcaacagcacccaatgccgagcctagctcgcttatagtctgganattacgtaactcctcaagaacattntctgtcaccacccatatcgtatgcagtcttgccttggcagtggctgaagatattcatggaaccactgagatcttcactcctgacatcttcatttttaactctggagattgaaccatttcatccagtctctcctgtgaaggaaattgcatgatgtacccaacctggcacttggttgctttccaaacacgttctcacgggaaatggaagtcaaagtcctttaccaact

SEQ ID NO: 24701 - DNA, 406 bp, Zea mays
  unsure (1)..(406): unsure at all n locations
taaaaactctaaaagctaagcaagtcttggtgcgcaagagcttaatattgagtaagcaagagcagatggcaagagagcgtaccaaatgagctcgcggtatgctcttatttatacgcccagtgcattgaaaattggaagaccccgcttgtcagtgaatgttgctattctagcaaagggaaggtgtttttttggaccttcgtcttaaggccttcgtccatgtcgcaatctaaatttattattataacaaattaatattgcgaggggctactgttgggggccttcggcttccgaaggtcctcaaaagcatgatttaacagtgtttctggagtataatgtgtgaacaggtatcttcngactcgaattgacatcacagtangagaagctcannacacacgaaggttgatac

SEQ ID NO: 24702 - DNA, 442 bp, Zea mays
  unsure (1)..(442): unsure at all n locations
agctntcaacacacaatgtactcctctcatgcaatggaactctacctctatgatggcaaccacctatctaggaccaaacaataatgaaccctatgtcttctcgtgatgagcaataccttgagtttgcctttgcgagatggacaacgatggtccacgatgggtcactagatcacctggcggttctctctacggcggtgcaaacaagctacgacatagggacggatagtctgctacctggtgacagaagcgacttcttccgtccatcgagtcggatggtccgctctctggacctgacggtcagcgatggcatatggtcgtcttcttcttcgtgggaacctagatcccaccacctgggggaaagatcttatggtgctccaagtcaacaggtcactcatggagtcccatacgatgtanggtcacctcagaattaagacaattcgag

SEQ ID NO: 24703 - DNA, 245 bp, Zea mays
atggtagtcttagcaattaagcaagtgtcgagttcagctctatcaaagtctaacaagtatagctgaccctctaacactcccttaaatgctattgaatcatcacttcttctaaagacagtgacacctatatcagtgaaaagacaggtggagcccatttgacataattgagatacagaaagccaattataatctaaagaatcaacaagaaaaacattggaaatggaatggtcaggagatatagcaat

SEQ ID NO: 24704 - DNA, 397 bp, Zea mays
agctttacttcgccagattgagcatggccgttttaaacatccgtgtatggagttcaagagtgattcggagatttgcctggctgccccaaaagagatgtgtattcgtaattgagcttaagccccataccgcgtccaatctccgaagatcggaccctattgccccttatgaattggccggacttaaaattccatttccagaatcttactgattagggattccttccgcccaacttcgtccccatgggtttgccacgccattttgttaattgaatgatcaaccttgcggatgtgcgggattatcgcccctgatgaggcacatcagaatagtaccctttcaatgttgactttatttgacaatgatgggcgaggatttttaaatgtccaggcggtttataaa

SEQ ID NO: 24705 - DNA, 320 bp, Zea mays
  unsure (1)..(320): unsure at all n locations
taagctgacccccaattcggcccattattccattccgccggcacagtccaaccgcatccgggcgccgacatcatggccccactgggcagtcgcgtcaacgcatacacgccttccctccttcactgccccgcgggacccgcacgctagctccacgatccgactgcaccgcattcctccgcgtcgctgacaaccaggaccacgtggtaggtgtgtcctgcgctcggtgccctttgcgatgtgggacccgcctgtcagtccttncgcacctcctcgtaacagacactgcgagatcgccatcgatcatgctgggccactaccct

SEQ ID NO: 24706 - DNA, 317 bp, Zea mays
  unsure (1)..(317): unsure at all n locations
caataacccacatcggcttgggagcaatctatttcttgtcctccatatcatgtgatccattaacctaccagtatgatatgccagatgcacatgaatgaggacaactttaaataacacaagctagaatatgctacctgaagtagattaacacttaaagcagacacttcacnatactatggagcactagatgctttaacttaaacaacataaccttcagccaatgtcctaccaaacattaaaataggttgctcggtctatttctctaaattagcttcatgaaactataccttagtttactacagacccttacaaatatg

SEQ ID NO: 24707 - DNA, 166 bp, Zea mays
  unsure (1)..(166): unsure at all n locations
gagtgggctggncaccgtggccggagctctggcggcaatagcgggcggaattgagctcgncggagcttatggaaagtggctggtccgtgagggtgattgccgtgccaaatgatgtgcgcccggagaggctttatacgctccggcgggcacagcttatggcgtgggc

SEQ ID NO: 24708 - DNA, 450 bp, Zea mays
  unsure (1)..(450): unsure at all n locations
agcttaaccttgtaacgaggataagctacctttgttccaaatgtggatggtccttaagtctctttgaaatccttaaaggaaaatgcttaaaatgtttgcaacatgctttcataagtgcataaactgtcttgagcatcactcatatactatgacacaatgcacttcactttctctatgatatagacttgttctcattaacctaattatgtgcacttggcatttaaggccaaaatatgtattcctctcaaggcacatatttagggggagaaatctatattatatagaactatgatcatgcttaattgacatatctcttgatcatatctctttcattntggtacaaatgcatatatcctattattcccgtaccatgactacgactaatatgtttccaagtatattactatgctaagtcgtagattgaaagggaaatggagtcttcggcaaaaa

SEQ ID NO: 24709 - DNA, 258 bp, Zea mays
ggagaagaagaacactataaaaaggccaaggcgaggcgcatatatgccaggagtgggattcggattgctccttcttcgacttcgacaatgagggactcgccgccaccgccttcaacaaatcggccctcttttccaacgagcgtcacacgtgtctcatggctaaggagaagaaagtaagtactcgaaactctacttatgcttcttctagtggtgatgattctagtgacgatgatgaaatagactattctaggttattta

SEQ ID NO: 24710 - DNA, 371 bp, Zea mays
  unsure (1)..(371): unsure at all n locations
atcagccgtgtttaagagtgttgggggtacccctaattacggtacccgacaactagaatgtaacatttgctcccaaatacacgaaagtaaaaaacggtgggtttgttaccggtaaggagttcatatgaggtattcttgagaaggtgatgttggtagagcccggttatggcatggcaagctgtgttcacagcttccgaccaaaaccgctcgggcgtcttgaattctccaagcatcgttctcgccatgtcgataagtgtcctgttcttcctctctaccacaccgttttgctatggtgtgtagggagcggagaactcgtgcttgacaccttcttcctcaagatactcnctcacttgcagattcttgaactcgga

SEQ ID NO: 24711 - DNA, 497 bp, Zea mays
  unsure (1)..(497): unsure at all n locations
ttagataccgcctctcatgcggaactatcattattttgttcctntgcctcgnattgatgttctctntgaccagntggtcggggccaacgtgttttccaagatagaccttcgctctggctaccatcagatcaagatacgagcaagtgatattccgaagacggcattctcaaccagatatgggctatatgaattcttggtgatgtcattcacgctgacaaatgcaccagcatatttcatgtatctgatgaattctggttttatgctagaaatggacaagttcgtggtgggtttcatcgatgatattttggtgtactcaaagaacgaagaagaacatgccggacattngcatgtagtgcttcaacgtctgcgagagcaccacctttatgccagnnntctcagtgtgattttggctaaaggaatcaantcttnggtacactatctctaggctggatagctgtgatctgataaggcagaggtatgactgaggccgcacactg

SEQ ID NO: 24712 - DNA, 378 bp, Zea mays
  unsure (1)..(378): unsure at all n locations
aacaatntaaataaaaccctaaactagcctcttaagtgggatttcattagggaattctgaaattcagaattctgaatttcagaccttgagccaaagatcaagcgtgttcaccttgatccctaactcaaatcctaatggccccattgacaaaaacgtgcataactaacctctctgtcttgtgccagaagatggcatcgggacgcgtgccttggacacgtcaaaccagagatcttctccctgtgtgcggcagtgagacaaaccagatttcttccctctctatctcttaatctagtcaggcaaacctgctagcctccacacacaaacgacaaaggaacctgagaggaagagatctctcaacgggatcatggccataatctc

SEQ ID NO: 24713 - DNA, 283 bp, Zea mays
  unsure (1)..(283): unsure at all n locations
gtgaaatttgcacctgcttccaatcatatagagtctctatatcatcaaagcatgcactacggcagctagatccacatcatgcgtaggataattcttctcatgcttcctcaactatcttgaggcataagctattacttttccttcttgcattattacacatccaagttcaaagtgtgatgcatcgcaatacacatcanataccttgtgaatgtctggcattaccaatattggtgtagaggttaatcttttcttgagatcctcacaacaattctgtcatgcttca

SEQ ID NO: 24714 - DNA, 271 bp, Zea mays
gagcttgtccgactaccctattattattagagctaagaaatattttaaaggaccctgccgcaattggctcgatacaatcgaattaatgaataatgaaattctttgaaattactccacaactgaggaccagctgatgacagccgccttcggcactctgccgagacgaaggctgaacacggtgcttgatgccatatgatttgaatattctgattatggtccactgggcggatatgctggatgcccaaagcgaataagaattgccagcgctgct

SEQ ID NO: 24715 - DNA, 266 bp, Zea mays
  unsure (1)..(266): unsure at all n locations
cattatcgcctgtgcaattctatgcactgttaatctacttgtactctcgcatggcagcttgaatgttatctaacttcaatggacggatggactgatgcttgcaatcgcatagagaacgatccggatgaagacctccgaggactcacaggagaagcccntgatcatcagactgttggcggaggcaattgtcccttgacctatctctgtcctatttattacctaagtcacctcccgctctacacattgatgcctaaagaatgactagc

SEQ ID NO: 24716 - DNA, 388 bp, Zea mays
  unsure (1)..(388): unsure at all n locations
agcttgtgtttacaagaaggacagngggagcgctgttgtatttctgatcttgnatgtggatgacatattattgattgggaatgacattcctatgctagagtccgtcaaggctttacttaaaaagagtttttctatgaaggacttatgggaagcagcatatattttgggcataaggatctatagagataggtcgaagaggcttataggattaagtcaagatacatacattgacaaggttttgaaacggttcaacatggaacagtccaagaaagggttcttacctatgtcacatggtatacaccttagccagatgcaatgtcctgcgacggctaatgagtgggagcgcatgagtaaggtaccatacgcctcagcaattggatcaatcatg

SEQ ID NO: 24717 - DNA, 414 bp, Zea mays
  unsure (1)..(414): unsure at all n locations
ctcagctttcccttcgacaagcgagaatccaagggtgaagaccaccccaatatattgatttattttctaaagcatgttntgaattaatttattgaatttgtgaattatcggtggaatattgagatgatgtgatttggcgattcatgtgtatgtgaatcattgagtatatatgtattagacatgttatttgtgcgcaatggttttgacgaaattccgtagacatgtggtaaaaatactaaataagtgattttataactaactcttgtganggatgaatttaatggtgattcagaagttataatcaaaaggttcatttaggctcactaaataaataatggaaattcttgagcatggannatagtagtggtgtaggaattatcttggtgccagaantatagggtaatcatctgtcta

SEQ ID NO: 24718 - DNA, 395 bp, Zea mays
  unsure (1)..(395): unsure at all n locations
tgctacaagtgtggtaagcccggtcactttattgctaaatgtccattatcaagtgacagtgacagggataacgacaagaagggcaagaagagagaaaagaagaggtaccacaagaagaggggcggcgatgcccacgtgtgccgcgagtgggactccgacgagagctccaccgactcctccgacgacgaggacgccgtcaacatcgtcgtcaccaagggactcctctttcccaacgtcggccacaagtgcctcatggcaaaggacggcaaaaggaagaacgttaaatctaaatccttcactagatatgagtcctctagtgatgacaatgctagtgatgaggaagataanttgcgtatcctttttgccaaccttaacatgggaacaaaagaanaact

SEQ ID NO: 24719 - DNA, 437 bp, Zea mays
  unsure (1)..(437): unsure at all n locations
agcttcttcaccatgttatcacggttatcttgaaaagttgagcaatgcacttcctttntagttgtgtcaagctcatctttagcctctcattttcttctttgagcttttgatatgtatcatcttttgttcctgcaaattctagctcaaaggaagatttgcttgtcgacggacaacaagcattatcacatggtaataaagtttcaatttgaatacatgtgcatgagtgaggttgttgggattntaagttttctaacacaacctcatgagtaatgtttaacatgatatgatcatccataagattttcatgagaacatagaagcatatcatgtttttcttgaaaagctagattttcaattnttagctnttctacttggtccttaagcaaggcatccttatttactaattgagcgatacaatataaagagttatcttgctca

SEQ ID NO: 24720 - DNA, 363 bp, Zea mays
  unsure (1)..(363): unsure at all n locations
gggagaacacattntaggactaaccaatgttcattttgttattataggatttgtagcgcatgccaagccgggaagcaagttggcgctcatcatccacacaagaacatcttaacgactgacaggccactcgagctcctccatatggacctattcggcccgatcgcttacataagcatcgacgggagtaagtactgtcttggtattgtggatgactattctcgcttcacatgggtattctttttgcaggaaaaatcacaaacccaagagactttaaagggattcttgagacgagctcaaaatgagttcggcttaaggatcaagaaaatagaagcgataatgggacggagttcaagaaattacaaa

SEQ ID NO: 24721 - DNA, 444 bp, Zea mays
agcttgtcgtctaatacacccttaaaggctagtgaaccatcacttcttctaaagacagacacatctacatttgtaaaaagacaattatatcccatattgcatagttgactaacagatagcaaattgtaaccaagagactcaactaaaaacacattggagatagagtgctcattagaaattgcaattttacctaacccttttaccttgccttgattcccatcaccgaatataattgaatcttgggaatccttattcttgacgtaggaggtgaacatcttcttctcccccgtcatatggtttgtgcatccgctgtcgataatccagcttgaacccccggatgcataaacctgcaaggcaaatttaggcttgggtcttaggtacccaactcatgttgggtcctacaaggttagtgcaaatatccttagggacccaaatgcaagtttt

SEQ ID NO: 24722 - DNA, 385 bp, Zea mays
  unsure (1)..(385): unsure at all n locations
cgcttcagtctatcatccgcagtccaacggngtcgtggatctcgccaatgggaaaatcttcacagctgtcaagaagatgctcctcgatgaacaaaaaggcagatggaccgatttattacctgaggcagtctgggcgctaaacacaactgagtgcatggcgactgggttcactcctttctgccttctatacggatcggaggccatgaccccgcaagaaataaagcatgggtccccgcgtacagttccgtcagccatccccgacgtggacgagccaacttcaaaagacctcatcgacggagaccgggtcttcgccctacangccctaaacaaataccaagcccagaccaaagcatggcgcgaccacgcagtcatcccgagggagttc

SEQ ID NO: 24723 - DNA, 373 bp, Zea mays
actggctttactcggcgccctctaaacccgacacgtgtaatcgctcgcatactttaaatgccgcgctaccttaatactcgcgtggcttaaaccccaccacctgtcatcgctcgcattacttctaaaatgccgacgccgaccttcaatcactcggcgctgcctctaaaacgccgaccacgtgttcaatcgctcggcattacttctaaaatgccgacgctgaccttcaatcactcggcgctgcctctaaaaacgctgaccacgtgttcacacgctcatcattacatcttaaatgcgcggaggccgatattatatcactcggtgttatttataaaatgctggccccgtattttgtcgcttggcattacttctaaaa

SEQ ID NO: 24724 - DNA, 451 bp, Zea mays
  unsure (1)..(451): unsure at all n locations
tgcgagaccttnncccgtttctttctaaccatggtaaatgtaatatcgtatgtcatattctatgcatgtntaatctacttggtctcttgtatggggtactggttgtttcctaatttgaatggatggatgtatgtatgtctgcactcgcatagagaacgatccggttgaagagcccgaagaactcgcaggagaagcccctgagcagtagtcggttggtggaggcaagtgtcccttgacctatctctgtcctattcattctttaattcaccttccgcattacacatttatgcctaagaatgactagctttgttatccatgtccttgggttacctattgggttggattattatggcttagtcttatgctattggctcactctantcaatgaacatgatgagaatgatcaatgatacgctgtttccccttcttatatgatgtatacttgtggctt

SEQ ID NO: 24725 - DNA, 216 bp, Zea mays
  unsure (1)..(216): unsure at all n locations
agcttgtagccaagcngaatagagtgcatgggccttacgtggaacgtgctggtcgcggatgaatagtaatagtggtcatgctgtgcctgtgatagaacgcagatatcttcgtgagaaggcctgcacacacgcttagcggacgtaacacggagatgctctgggagacgtaatttacagcaccggatgacttctgtatcaacctttggcgcacattga

SEQ ID NO: 24726 - DNA, 368 bp, Zea mays
tgagtcagttcttctgcaaaagataatatatgaacaaagaactgatgatggtatgaaacacatttatgagacaatataggccggtatagcacactatttcagaaaggatgatcaaggtatagtatgcgttaataaccgcatagatgtgcccaagaatgatgatgttcgccagcaaattttagatgaaacacatcttagctaatattccattcatcccggaagcactaagatgtatcatgaattaaagcaacattattggtggacaaaaatgaagattgaaattgcacgctatgtggtgagatgcaacacttgtagacctgtcaaagccatacatatgaaaactactgggccattgcaagtattaccta

SEQ ID NO: 24727 - DNA, 398 bp, Zea mays
  unsure (1)..(398): unsure at all n locations
ctgcagcctaacatttaacacttttttttggaattgtgcttgaagacctaattgtctcccagacctctagtacatttaccattcttttcctttttggggtcactgatggccccttttggtttttcgctgtttcaatatttactgcangactcaaaacttctaatgttttttccttagtcggctttttcgcttcttccattttttctgtggatggtgcttcngccatctccgcagtttctggcagcaaggttggctgttcagcttcngtggccgaagaagcttctccggtgaactcangcaccgaagctggttcaatatagcgcggccggtgtgtgaggacttttatcctctttctctttgattctggctcgctaggagccagtgcagcttcttctttt

SEQ ID NO: 24728 - DNA, 330 bp, Zea mays
  unsure (1)..(330): unsure at all n locations
taggacctatgatactcagcttctaaggggagaacacatttgggactaaccaatattcattttgagaaagacaggattngtagcgcatgccaagccgggaagcaagttggcatccatcatccacacaaaaatgtcatgactaccgacaggccgctggagctcctacacatggatttattcggcccgatcgcttacataagcatcggcggtagtaagtatttgcttggaattgtggatgattattctcgcttcacttgggtattctttttgcaggaaaaatcacaaacccaagagaccttaaagggattcttgagacgagctcaaaatgag

SEQ ID NO: 24729 - DNA, 346 bp, Zea mays
agcttgtggcgccctctggcgtgctgccgcagccgaagtaccaagtctcccacctggaagcctcggggccgaacccctcatgcgtggtagcatcgcagagattgctgatatcgcgccgagtgtagtaaggccgcgtcccgagcctcttcgagctggtccagtgagtcttctcgggtagtctggttgcttcggtcgtcgtacgcctttgtcctcaaggaaccgtattctaagtccgtgggtaagatagccttggccccatagactataaagaacggcgagaaacccgtggctcggctcggcatcgttcttagactacagaccaccgagggtagctccttcatccacc

SEQ ID NO: 24730 - DNA, 393 bp, Zea mays
gaaaactaagaagtggtaaccactgcacttattttttaatgccagacatccacaagggatttgatgtgtattgtgatgcatcacaccttggacttggatgtgtgctaatgcaagaaggaaaggtgattgcttatgctttaagacagttgagaaaacatgagaagaattatcctacgcatgatttggaactagctgtcgtagtgcatgctttgaagatttggaggcactatatgattggaaacaagtgcaaaatcttcacggatcataaaagcttgaaatatatattcactcagaaagaactcaacctcagacagagaagatggctttgagtgattaacgattatgatttggaaatacaatattcaccccggaaaagcaaatgtagtagctgat

SEQ ID NO: 24731 - DNA, 297 bp, Zea mays
agcttaatgcccctcctaatagattgtctaattttgttaagggcaaagctcccatgcctcatgataacgaggactatattttatatcctgttggtatcctgaggataagattaagagaattcatgctaaaaggactcattttgtttctcatcatgctgttatttacaaaaatgaggcttctagctctatgcgttctacacatgttaaaatgcctaagaagaaaactcctattgcatcaaatgatcataatgtttcattcaaaaactttgatgcttcttatgtgctaactaacaaatc

SEQ ID NO: 24732 - DNA, 275 bp, Zea mays
gcactcggcaaagatcgtgacaaaggggacttgctggtggatcctttgccgagtgcaggtcggtagacactcggcaaagaagtaacttctttgtcgagtgtattaggagacactcagtaatggtaacttctttgccgagtgtcacctagaatgataggaacgagggtgcccgatctttcgtcggtgaaggaactatcgatttggtggagatgtcacacagacgatccagcttccaatcaacaagactagaaccctgcaatcgcagcaccactttt

SEQ ID NO: 24733 - DNA, 417 bp, Zea mays
  unsure (1)..(417): unsure at all n locations
gcttgtgaagggtcttcatccccacatgttgctagcggcgatgtcacagccagcccatgctagtcttagcaattaagcatgcatctagaccggcctgctcttttgcaaaatcaactaagtaaaggttgccgtctaatacacccttaaaagctagtgaaccatcacttcttctaacgacagacacatctacattggtgaatagacaattatatcccatattgcataattgactaacagataacaaattatatccaagagactcaactaaaaacacattatatatagagttctcggatgaaatagcaattttacctaacccttttaccttgccttgattcccatccccgaatattattgaatcttgggaatccttggtttttacgtaggaggtgaacatcttcttcntccccgtcatat

SEQ ID NO: 24734 - DNA, 461 bp, Zea mays
  unsure (1)..(461): unsure at all n locations
tcgtcattcgagagacaattatcttggaggaaagatataatttcagtcctccaatcttcactatgtactggggaaattgcaagcactgctctctccataagttcaaccgaagatgcttttattgtctcacaaaatacttccgaaggtagtgggagcccctgtgccgctgacttggctaacaaatcagcatgctcattttcccctcttggaatattcttgacagaaaatccttcgaaagaagcttcgagccttcgaactgtgtctaaatatatttcaagctttgggtctctggccttgctacttttgtcaatatgaccagaaatgactngagagtcagttntgaggatgtcccttcttattcccattgcccttaacttctgaagccncaagagaagtgcttcgtattcagtaatattatttgtacaactgaagtcaagcttttgctgcataacatgtctgac

SEQ ID NO: 24735 - DNA, 422 bp, Zea mays
  unsure (1)..(422): unsure at all n locations
cttggggacagattgctttgaccttcagacgctcgagaccaatcgatacaattcttgaggatcccttggacctgtgggttaggacccacacacggnttcactgcgccactttgaccttgatggttgagggtgaacaccatcgcttcacttggtgaagatgttgncgattctgatcttgattgattaataagagctggaggtttgccaactgcatacgtgcaagaggaaagaatatatgtagaataggcagcatagatggattaaagagagaaaaaggagatcacccaactacctaatctatggcactcacctattaaactgatgccattgcggaccaagggccacaacacatcaacactcatttcagagaagcaatcattctaacacagagacaaaatcatgagccacacaccaacattcgt

SEQ ID NO: 24736 - DNA, 517 bp, Zea mays
  unsure (1)..(517): unsure at all n locations
tacaaaattcccgattacttcctcggnggtcattagtgtatatcttgggttgccacgaattaattgtacttgagtggggttaagaaaaataagagatcttataataaccttaaccatttcgtggtcatcccatttcttgctcccgaggttgcgcacttgattcaccaaggtcttgagccagttgtacatgttttgtggctcttcccctttgcgaagccagaaccgaccgagctccccgtcgattggttcccgcttggtgatctttgtgagctcatctccttcgtgtgcggttntgagcacatnccaaacctncttggcgctcttcaacccttgtactttgttatactcctctctacttagagaggcgaggagtattttgtgtgcttgagaagtgaagtgctcgatttgggccacttcgtccgtatcgtattcttcatcccctacggatggtacctgtgcttcannactcaacacattncatatacttttgtggagtgagggtagatgaaaattcatt

SEQ ID NO: 24737 - DNA, 435 bp, Zea mays
  unsure (1)..(435): unsure at all n locations
agcttgccttttgtgggagcatcngttcgaaaactagtctaattgatttctttntatttaggagatgctcttccgttacttgactttcactagtgtgatgccgatctcttactcgaatgcttctgccactttatgaagggatagaggaaacaaactgggaataggaattgatagcggtagctgtagatatgagataggagtgcggaccaacacaaatactcgaataaactgagccctggcgataagaaagtatttcacaagttccgaagtgccgntcaattcaattcaaggaagacgcatccctgaaagaaggtcgtagggagagagggttctcgataccgggcatggaaaaggcagagaaggttctcgataccgggcatggaaaataagttcctttgggcttttgagttggaggagactggccacctttcctac

SEQ ID NO: 24738 - DNA, 428 bp, Zea mays
  unsure (1)..(428): unsure at all n locations
gctctctntcctagntgcaaattgcaaatcaattggtgaaagacttatgtttcttgcacaaatcatctactctcattctttctttctcctcattgcagatgctccatttcccttgaagatggatttaatttttatatagtcaatatttgttaagggtgatcatacgtattttgaattcgacttgtcaatggaaggaactcaaccgtaaattacacaacagtgaacgagtagtatntgacatcagatgtgaaccagaagaggggagaatcaactcaccaggaggccaagccgttgcttccagctgacaggcatcatgaccttgaggccatgacctcatcttcgcggnccatcgctagaagatcatcgcacgacaggcaccatgaccttaggtcatgactcatctccatggcccttagtgactggttctg

SEQ ID NO: 24739 - DNA, 457 bp, Zea mays
  unsure (1)..(457): unsure at all n locations
agcttatcataagagaatagcggcaagagcccgttcatatgtaataatggaaggggagttatacaagcgtggagtctgttctccattactcaaatgtttatccagagctgaaggtatagagctgatgaaagaaatacatgcagggctgtgtggatctcacattggatctaggcccttgctgggtaaagtttttcgtcaaggattntattggccaaaggcagctntggatgcagcagaattagtccaaaatgcaaaggttgtcaaaaatgtgcaagatatcaaagacaaccttcgtctttaactcaattaatacaacccacttggccattgcaaaggtggngccttgattgactaggcccacttccaccagcacaagggaatntaagatatgttgtggtggcagtagaatatttttctaagtggattgaggcgaagcccttagccacaataacttcgg

SEQ ID NO: 24740 - DNA, 501 bp, Zea mays
  unsure (1)..(501): unsure at all n locations
gctgctacaaaanaatgaggggaactatgntcctcgatctgtctctatcttcttcggcacaccatgcaaacagacaatctgagacatgtatcgctcagctagcgttactatggtgtatgttgtcttcactggtatgaaatgcgtcacctttgtcaagcggtccacagtcacccaaatggaatagtagccggcccgggcatgaagtaggccaactatgaaatacatcccgattccttccatttccattgaggaatntgcaatggatgcagaagtccggcttggttctgatngcttgctttggttctttgataatcatcacagataanaacatgttctgcaatctctcttttcataccgtaccactaaaatctcctttntagatcctgatacatcttgtcgcttctggngtgatagaatagggtgctcatgagctttntgagggatagctccaatggactgatgcggacacacagcagcttgacctataaggtatacatgcta

SEQ ID NO: 24741 - DNA, 356 bp, Zea mays
  unsure (1)..(356): unsure at all n locations
agcttggtagccctttcatgctcttttcgctatagtttcccttgaggcctagcattcccctagttggatgaatgtagatggcatgataaactcaccacttccagagtcaatctgaatctgagtctggctagctccttttgtcacttattggtgcagaccaagtacttatgttgaggtcacttcagagcaaagtttaattggttgggacattccctgtccagggtcacatcctataatgacaaccagntgctggcatacctgatgaaagttggaggaaagcctttgatgtaggactatgagtccataaaaaaactttttgtaataataataataaaaataaaataaaaataaaaaag

SEQ ID NO: 24742 - DNA, 430 bp, Zea mays
  unsure (1)..(430): unsure at all n locations
tctctgacagccgtcggacataagactctattttcgagggccagcagagaccggtggacataagcttatgtttgacggtctcgtagatagccgtcggaggttaagtggccgtcgaatgtgtgtcgttttactgtagtgattcatggtcttcaaagttccctgattgctttctttacctacatcttcttatctaaaatgattctgagttatgttcagtttcttttctgcctgaagctatagctttaaaatatgtcttaactaatagcaatgaagttttttgtcacgaagcanaaggaggtcatatatgttttgaagtatgctagtatgatgttgatacatattggngcgaatgtctctgccgaanggtcctcaaaaataataatactgacagnttntcataattngtctcatgagtaanntaacatatgtt

SEQ ID NO: 24743 - DNA, 320 bp, Zea mays
  unsure (1)..(320): unsure at all n locations
agcttgggcttaacgctacggtgacatgctgcaatttgcgcggctgagccggcggactcacgtcgcatgatttggtgcacatttctttttcgagagaaagagtgcattcattcgccaaaaagtataattactttctaggttaacgagctcactgatacaaaagaaaaggtggttctctcattgtgcgtcttgctagctgagctaattcgtgagctgctttattgcactctcttcaattntactaaaccacacatctcaagcattactcaaagcatgtttaatctccaccatagatgtcttaagagttttcactagacaat

SEQ ID NO: 24744 - DNA, 477 bp, Zea mays
  unsure (1)..(477): unsure at all n locations
catttgagaaagacaggattngtagcgcatgccaagcaggaaagcaaagtggcactcatcatccacacaagaacatcatgacaagtgacaggccactggagctcctacacatggatttattcggcccgatcgcttacataagcatcggcgggagtaagtactggctagttattgtggatgattattctcgcttcacttgggtgttctttntgcaggaaaaatctcatacccaagagaccttanagggattcttgagacgggctcaaaatgagttcggcttaaggatcaagaaaataagaagcgacaacgggacggagttcaagaactctcagattgaanggcttcttgaggagganggcatcaagcatgagttctcttctccctacaccccacaacaaaatggtgtagtggagaggaagaatcgaactctatnggacatggcaagaaccatgcttgatgaatacaagacaccggatc

SEQ ID NO: 24745 - DNA, 440 bp, Zea mays
  unsure (1)..(440): unsure at all n locations
agcttctcaagtacgtatgttcttttatgtggtcttggcacaacggacatacaacctcggtccatgacctatccctatattgagtaatggcaacatcgagatggtccatgaaaaaataagtgtacatgaaagtgaaacaaggacatatcgagatgtacctagcacatgaacgtacaaatatatttaaaataaccctaattaattgaagttaatccctaaatcatgaacgaattaattggcctgaaaatgaaaaaaattgcgccatatatgtaccttgaggtgagacaactctttatgaagaatcctcaaattaaatcaactacgagtgcatatcttggaattctngagtttttcttcatttctgtctatattacaaaattgacgcccaaatcgtatcatatgagagagatgacacacggtgatcatatatatgcatatac

SEQ ID NO: 24746 - DNA, 385 bp, Zea mays
  unsure (1)..(385): unsure at all n locations
agctngcacgagcgtgaaccgaggacctgctccaccggaatagcgaaatcgtgctcgccggagttcagaaccccgccggcgcacgtggaccaggtaaatcactgcaccatttttcgattcaatgcacagatagcctctacatcaccccgtgaagctcaccgtgccattggattgaactaggtcgccgtggtttggccggcacacccgccgccgacgagaacacccgcctgcgcacgtggacccgacgattccgaccacccccgccatcgagccgtacaccgttgtgaccgccagagcctccccgagccaaccccgcccctcgccggacctcttttgccgccggtaagccacgccgtccttttctttcccgcgggtactggttaca

SEQ ID NO: 24747 - DNA, 425 bp, Zea mays
ctatgcagatcacttggtatcaatgaagatgattgatgaagttcatgcacgaaagggaaaaataaaggcatttacatcttattgtggtgggttaccatctccagctgcagcaaacaatctgcttgcctataaattcatgtagatgtatccatgttctaagtatttccgctattggtagtagcacaatgaggtttctacatccaaatattcttaacaatatttcacgtggcatattttgtggaatactaataagtatcttcctccttttcagttggaacccagctggtgccctccggtcagggaaaaatcctgctgtctacaaatttcttggtgagacgatccatgtagatggtaagtctgttacaagtttatttcttctaacctgctacactaaaagagcaaatgcttgctcgcctgttcttcct

SEQ ID NO: 24748 - DNA, 393 bp, Zea mays
  unsure (1)..(393): unsure at all n locations
acatatgttaattaaattatatgcgtcagaaaatgtgttcaagccaataagtcggaacagaatttgagaatgatctcagagcagcacatcatgaataaaatttgttagagtgaacacactaaccagttcaaaccaaaaagtttaagctgttgggagaaggtagacaacccacttatacacttcgacacctccactcacgtgcatccagataggaaggcgcaaacgtggaaatataggggcggaggcacaaatgaagcctcttctttcgatggttggtgggatggagcaagaaaggctctatttggaccattgcaaaaaggcctcaattcaattatcattntatggtcttgggccatttggaatcatcgtaatcggtgtgttttcaatggtaca

SEQ ID NO: 24749 - DNA, 463 bp, Zea mays
tactaagctgatatgtgctcgacatcactcatgattgcaacacatatgtgcacatctcaatgatatgttcacaatctgctccttgatgaacgcattgtctatagcaacataaagagattagttgaaacattaagagataggtaaaagtcataaaattacccaaaaaacatagataaacaaaaaatgggtcatgtaaaatgcaaagcttgaccccaaaacatgggctataacgctatgtagtcaatcaaaaaccaactagttgtcaataagagacaaaaatggcttaacaccactagcttatgattatagcaaaaactatgtgtcagagcaactcaactagtagctaaacaactcataaagcacctagtccaactagaggaggcatagactcaaaataactagcataacacttcaatgcaaactgtccttgaacatgtgctctctacaaatgtatgtatgttca

SEQ ID NO: 24750 - DNA, 238 bp, Zea mays
aggtcgaaaatagccaataaaatctacctaggtagctgaccctctacaattcattactgcaccgaataacacttcttgaaggacaggaaccctttatcctaaaagacaggtgaacccattttactacgtgcgaaactaacagcagcggtaccctgagaatcatataaaaacacacaaatggaaggctggagatatacagtttacccatccttgacaaacctcgtttcatcccgacgtg

SEQ ID NO: 24751 - DNA, 428 bp, Zea mays
  unsure (1)..(428): unsure at all n locations
gagaacacatggtatgattaacaaatgttcattttgtgaaagacattgattgtagcgcatgtcaagccgggaagctagttggaacccaacattcacacaataacatcatgacgaccgactggccgcttgagctactccacatggatctattcggaccgattgtgtacataatcatctgcgggaataagtaatgtcttgtaatagcggatgattattctcgcttcaactgggtattctttttacaggaaaaatctcaaacccaacagaccttaaagggattcttgagacgggctcataatgagttcggcttaacgatcaagaaaataagaagcgacaacgggacggagtcaagaactctcaattgatgcttgctgangaataggcatcagcatgattctctttgctacatcacacaaatggtgtatgaa

SEQ ID NO: 24752 - DNA, 352 bp, Zea mays
cacctgcaagcatgcaagcttggaggtgtctatggggagccaacttgttgttcacttctttcagcttctaccacagcggtttggatgcgattgggtgaaccccgggcgaggatgtgcctgtggcaaaacctacctaattatatggcccacatactcctgtccttgtgtcaaagacctcctactgctttgcgtgtgcactaattaacgtatataggatccgttggattgcgccctagactttgtataagccacttacgaccagaaccgcgggattaagtaacacaaatgacacccaccaatatttttgcagcagacatttatttccaaatttgactaggtacgaaaattttac

SEQ ID NO: 24753 - DNA, 500 bp, Zea mays
  unsure (1)..(500): unsure at all n locations
cgtgacacttatatactcaacttgttagttagttcaccattatgttgtggaaagagtntccttttttattntagtttatcattntattaattagttgttcatgtgtacgtgagcttgcactatcttcaagttgcttaattgtattagttagctcaacattaaaatctgtaatgtttcatattgttaaagaaaagttttctaaatcttttgtgagattaataactctgattgtagcacttttaatctatgttttgcttagtgcaagcttctttaaagaatttgacagcatgggcaagttcttgattatagtgtttctcatcattactatcactactaatattactctcactagatgatgagtatttagcgttatctcatgctaaaagaatttgggagaagaatgttgtcagcatccctcggtacgggtatcttatgcgctatgcataatatatcagcgtggagtatangctgatgaccctaatatcacggtgtgtcgtcat

SEQ ID NO: 24754 - DNA, 318 bp, Zea mays
tcattctgagaaagacaggatttgtagcgcatgccaggcaagaaagcaagttggagcccatcatccacacaagaacattatgacgaccgataggccgcttgagcttctgcacatggatcttttcggcccgattgcttacataagtatcggcgggagtaagcattggcttggaatagaggatgattattctcgcttcacttgggtattatttgtacaggaaaaatctcaaacccacaagaccttaaagggattcttgagacgggctcacaatgagtttgccttaaggatcaagaaaattagatacgacaacgggacgga

SEQ ID NO: 24755 - DNA, 343 bp, Zea mays
tgccgaatattcaagagggtagcccgtccaagcaaggggcggagaatggtggtttggtgaatttaaagtatacgtacctgtgatggaaccttccaagtcatctgtccttgtccaacgaaccttgtacaaccctgtatatgcacataaccactcgacaagttcggtatatgtatccttttgctcgcccaagatcgtttcacccgtcacatatatattacaacacatcggaggaacgaataagcggaagcaaattacaattacttaatttacattcatccaaatatagagagagtgttatagttattacaaaaccagaggtatgagtgcataagtattattatta

SEQ ID NO: 24756 - DNA, 451 bp, Zea mays
agcttgtgtggttgccactacatatgccaatcaggatttgctgtagagatgtgtgcattgagtttgtagggcctcattgggatacacaagtgtccggcaaacagggcagaaatattcaccaggaagggattgaatattcaagatacattcattatcaaaccccattgctgaaacttgttaaactctgcccagagcccgttaaatatcaagcctacacaaaaaaggcataaacttgcatgctgcatacgcgcttatgggctgaaaaggaaaaaactgaaatcctacaaaaaaagtgcatctcaactattcgggaaacagcaaagttagaaatacttcattatcaaaaacttcttgataagacagcaagttaccaactcgtggcagtcactctacaatcacagcataaacacaaaaagaaaaaaagactgaactaaaatgcactacatcttac

SEQ ID NO: 24757 - DNA, 450 bp, Zea mays
  unsure (1)..(450): unsure at all n locations
ntaactctcgcgagaccttttcccatttctttctaaccatggtgagttcattatcgtatgtgatattctatgcatatttactttatttgttctcttgtatggtgtactgtttgtttcctaatttgaatggatgaatgtatgtatgcttgcaatcgcatatagaacgatccggttgaagagcccgatgaactcgcatgagaagtccctgagcagcagtcagttggtggatgcaagtgtcccttgacctatctctgtcctattcattatttaattcaccttccgctttacacatttatgcctaaggattgactagcttttgttatccatgtcctttgttacctatttgggttggattattattgtttagctttatgctattgctcaaactctaatcaatgaacatgatgagattatctatgatacgctgtntcccctctcttttatgatgta

SEQ ID NO: 24758 - DNA, 385 bp, Zea mays
agctttgtgtggaattggagaggatttgatcacttgagtgtgtctagaattgaatgcctagctcttgtaagtggttgagaagtggaaaacttggatgcaatgaatggtgggtggttgggggtatttatagccccaaccaccaaactatcagtttggtggggctgactgtcgtatggtgcaccggacagtccggtgcacaccggacatgttcggtgcgccagccacgtcaccaaaaccgttgggttccgaccgttggatctctgacgctgggcccacctggatatccggtggcgcaccggacatgtactgtatagtgtccggtgtgccactacgcgcgtgcctgacttctgcgcgctctggcgcgcattaatttgtgttgcatgtg

SEQ ID NO: 24759 - DNA, 463 bp, Zea mays
  unsure (1)..(463): unsure at all n locations
tcttttacataccttagtttaaaaaatgtttaagaaataatctgtattgattntaaagaaattcaaagaaaataaacgagaatagtttgaaaataaccaatcgaaactagaggtataaaaagtggttttgagataaattttgaaaaaaacagatattttcaaaagtgttgtcttgaactagttctcaaagtgttttttaaataagataaaaagggaactaaatcttgaaacatgtgtaggaaatgggtgacgcctaagaggggggggtgaattangacttctaaaactttcgctaaactaggccacaattaaatccctatgagcaaaacctatgcaaatagtcaaactagaatgtgcaaactatgttttgtctaagtgttgctatctctaccgcaatggctaagtttaatctacactaataagtatgactacaagatgaaactatatgctaatataatgtgga

SEQ ID NO: 24760 - DNA, 446 bp, Zea mays
  unsure (1)..(446): unsure at all n locations
agctntatatggacgacggtgtctgactctttttaattggtctgaacctggagaaagatacttctttagacctgatatggtgaaagaggttgaagaaaaggttcagagaattatccataatatgaagaaagctcaagctcggcaaaagagttatgcagacaaacggcgaatgcccttatatttcctggaaggagactatgtttacctgaaggtctcgccaatgaagggcgtattgcgtttcggagttaaaggaaaacttgcaccacgatatattggtccttttcttattctggaaagatatgggccagtggcgtatcgactccaactccccgaaaccttgtctgctgtgcataatgtgttccacgtatcacaactgaagaagtgtcttcnggttcctgatcgataccgtgaagtgactgatgttgtcctggaaccagaattaacat

SEQ ID NO: 24761 - DNA, 480 bp, Zea mays
  unsure (1)..(480): unsure at all n locations
tttacgggtgcacgggctgcagctgaaccagagtgatattctgataagatatgaggacattcaataccataaatgctatggctgcggcctgaaccaagactagtgacctgctggagccggtcgcggatccaaactcgtttcgtatgtacgccgctccagcaagtccagcggatcaacttttcggctacttggagttggtgggccctacatgatgtaactgatccgtccccacggctcagctttgtccctgggaacacggccgagatattctttgtttatacggtcaaagaaccaaaatgtgccccaccgcggcaccgcctaataagctggactattaaattcgagactgatgcatggacggcaatccgacgcgtattacatggatatatngttcgttaatccatacccgcgagatataactcgattcatatgtgtacctataaacgttcgtgagtatagatctgtatctatacacgtact

SEQ ID NO: 24762 - DNA, 451 bp, Zea mays
agcttgaagtaaagataaaatgctgatttcttaagcataagatgaagatctttgagtgggttattttcaaaaatccactcaaagctcgggggctacacccattgggtgcacctccggtgcgcccaatatgttcttaactccagaagacagaatgctgatttctaaatcataggctgaagacagagcgccgatttctaaggcataaaatgaagacctttgaatagttagttttcaaagacctactcaaaagttccaaaagttggcctccaaagcacgatatgatgacaaggtgctgatttccaaagcaccgaaggaggacctttgaaggctgtttttcactgagtcactcacagttcagaagaacattcaacaggtgcacctttgcaagcgcccatcacgaaaatgaatatcaagccacagaatcgcaagctggacctagaatctttgggct

SEQ ID NO: 24763 - DNA, 464 bp, Zea mays
  unsure (1)..(464): unsure at all n locations
atcacagttcttttcgggcgacagcgcctttgtgcatangcgccagtggcttcatgggaaggtttggatacacaacaagaaaaatatattgcctattctgtggtgaagacaatggccatactaccaggatgtgccatgttaccatccagaagcataaggaaatagcggaagcagcatcgcaacagagtcagccgaagcatgtcatgcataatgcttcgtatcactcaccttatattccataatatgtatgcaaccaccctgcatcttctgttgcttcggcgagccaaccccatacattctgtcagcaacctgcaccgccaccgtcgatccaaagatgtcatcagccagaagggagtcagcgcactaaccttcagcgggacttcatagaatgatccgaagctcgcacatgtaatatcactgtgccagagtcgaagcacatttactgacgaatattctacttcaac

SEQ ID NO: 24764 - DNA, 425 bp, Zea mays
agcttattcttatggtcattttatgacctcctctctaaagaattaaagcgttcttaacttgggtaaagtattacccctataatccccatttatggttaatttccttaaccaatgttctagttgccaaacacttataactatacaacttgactgaacaatttgcctagtgaatgcactctacgtgtgtcaaacatatgcaatgccaatgctatgatgccatgctcaagtcttagatacaataacaccaagggtgttacatcatagtttaatgatgtccggtagagactatacctgagcagtggtcaatagtgtctttcattgctcaaaggctttattgcacttaaaagaccaattgaacttgatgtcattattcaacaaacattgtgattggcttcacaagcttatataaatctggtatgaatctg

SEQ ID NO: 24765 - DNA, 351 bp, Zea mays
  unsure (1)..(351): unsure at all n locations
cccttgaccacttttattcacccaataatattctttataatcattttatcatgcatatgcttaattctgatgggacccaatatgtcaccctattctggttatctttttaccctgtttacccctgaatttatgaggagtccttgctattgctatacatggttttgggtgttgagataactattacacttgatcattctttattaactgtctatttctgatcatgataagataacttgngatttattattaattttgatctactattactttggcttggtatttacttacatttagtaactgctaataaacattgaccaactcattaaaagcaatgctcatctttaaccccta

SEQ ID NO: 24766 - DNA, 425 bp, Zea mays
tacgtgacacttataattctcagcttaatatgcacatgtgtcgtgttttgtatgtttcttgctctaaaggaatatgatatatgaggtccgtgggtagtgatgcctatgtcggattcaatcctacgttgtcttggttggacttgtgtggaccgtgatgcttttgcccgattaataggagaactaatgaaaagtcgtatccaaataaattaaatgtgcatgttattgtcatatcatatttgtgttgcgtaaataaataaaatgtgatcgtatgtgcaatggtgttaatgatgaacgccgttatcatacgaatagcttgcgcttgcgtatagtcactgcggcgtcttacaattaaatgtgagcctgctactatgtatttatatagctcgtgatactttcattgattcatcatatgcatgctgatctca

SEQ ID NO: 24767 - DNA, 463 bp, Zea mays
  unsure (1)..(463): unsure at all n locations
agctntcctctcaggttgagataagctntaatacacaaattctccccctttgacatcaaacaccaaaaaccatactcaagcaagaacatatgatgatgtcaagggacagcagggtgttaaggaggaaaacgactatcaaaactcccccttacttattgagcatatgcactaacaacattaaggagagatacatatatgcaaaaagattaatacttccttttgtacctttaccatgttgtagtgtacttctcatcttgaaagtatttaatctcttgagagcttctccacacttgtgcctgattcattttcctaactttttcttgttgctaagacaccaaacttagaacaagttatagtgttgggcacaagaagaaacttctattctcatgattatcaaaagatatcaactgaagcgaactnttacggctatcaattgaaagataccaattgcaaagntcattta

SEQ ID NO: 24768 - DNA, 357 bp, Zea mays
  unsure (1)..(357): unsure at all n locations
atctaagctatgccctaaaatgtctatttggtagggtaggtccacatggttcatgataacgagggttacattntataccctgccggttatcccgaacacaaaattaggagaattcattctaggaagtctcactctggctctgatcatgcttttatgtataagagtgaggcatctaattctatgaaatccactcatgttaaattgcctaagaagaaaactcctactgcgtcaaatgagcctaatatttcatttaatacttttgatgcttcatatgttttaactaacanatcacgcaaaatagttgccaaatattgttggggcaaacacaatgggtcaaagacttgtgtttgagtacct

SEQ ID NO: 24769 - DNA, 441 bp, Zea mays
agcttcaagcatactttagcatcattcctatttgttattgtttcttgcgtcaaatgttactttgtttgctaacttgttatcaatattttgccatactcaagatgcaaatcttcatatttcatgaatgcctgctgtgttttgtcttgttcaatgaaagtggtatatgcttaaattctattattattcagagttcatgtatagggttacattgtgctgtatgtctaggtttctaccactttgtagacgttaatgaacagtgaaagtggcactaattgaatcaatgttgttacagatgcggaagccaagctggaggaggcactgcaaattgatcccaacaagtctgatgcactctggtgcttgggaaatgctcagacttctcatggattcttcactccagacactgcaatggcaaatgagttctttgcgaaggcaactgaatgt

SEQ ID NO: 24770 - DNA, 231 bp, Zea mays
cacgtgatatgtttgactaacgtgcatttcttataagatataccctgtgcagcttgtcaagcaggttaacaagtgggatgagcgcatcacagcaagaacgtgatgaccacttctagacccctggagctgctgcatatggacctcttctgaactgtcgcctatctgagcataggagggagtaggatgggttaagtattgttgatgaattttcccgcttcacttgggtgttct

SEQ ID NO: 24771 - DNA, 466 bp, Zea mays
  unsure (1)..(466): unsure at all n locations
ctcttagtcacctgcggcatgcaagctttgggttcacattgaggtcttgcactttattctgtgtcagtacctattgtcgtaaaacaacaacaagaaagctatgtcaacatatagttttagcaaagcagttcataggaagtaccactggtcctaatgtaaagttactgactaaactctaacatcaatgcatataagatatgtgtctgcagtttgtaaaataaaaatagatcctatagctcacgttaacagttaaacgactgtcagacaaaagtatcatcaaaggaaaagtaactgtgcaaattgtacttgttgataatcctgctctcacatgtagtcataggaagactgatctatcagctggcctctgctctccttatcatgagcnactaaggataaagtccctgtgtggcatccaggagattngcggatttcatatagacttagacctgtgtatttgtagctctac

SEQ ID NO: 24772 - DNA, 434 bp, Zea mays
aacatatcctttccaagctatcaatatacctccccttgtaccatcatcatgcggatatacccaattattaaactcagaaccgaatatagaggaaaggaggaactagtttacagaacctaacttggtttcttgcaaacacacaatatctgctttggatgaaagaatgacatcccagatagcatctcggtgagccttgttgttaagcccccggacgttccataacaacatagaagaagggttcatttgtcaacaaataaaagatgaccacaaggatgataccctcagaacccggcaatgagatccactgatttgatctcctccccctcatcaactgtccaaccaaagatggatgccaatgctaccatgtgggcatcagaagcatggttgacaaataatttgttgtatgcatcctgagcttactggctatatttttc

SEQ ID NO: 24773 - DNA, 452 bp, Zea mays
agcttcggattcccaactttagaagacggactttcggtgctgtcgaagaacgatctggccgacagcctggcttacaatagtttaaaggtgcgacaaataaaatttttgtatatttttttttcgtttgacaaaacctattgacgcacacatatgtctttttgtagggcttgatacttatcaatgccctcatggcacaaaaagatgccgaagacgaagggtgtactatatccctgagcaaccttcgttccgaagtaattgaactgaggaacgaaggtctcgaaaaagataaaatattatactcattgataaataaaataaaggaagacgaagctgcttttaaaagtcaagctgaagctcacaaacgcgaaattgaagaccttcggaaacaactgtccagagccaaggaagaacgcatactggaagaaacaaagcgtgaactcagcgatcaatgg

SEQ ID NO: 24774 - DNA, 349 bp, Zea mays
tctgcccgagcatgatccaatgaccatccccaccggaatagtgttatcgcgctcgctggagtttgtgaacccgccggagcacgtggaccgggtaaccctgtgcaccatttctcaattccttgcgcccatggcctctacatcacctcgtggagctcctcgtgcactttaattgaaccctaccgccgtggtttggccggagcatgagcatccgacaacctccactgcctgcgctcgtggccagggcaactccgaccacctcagacaccgacccgcacaccgacgtgaccgccgtgacctccccgacgtccctgaccaccccaccggagctctactgccgtcggtaagcctc

SEQ ID NO: 24775 - DNA, 446 bp, Zea mays
agcttgtgaaggacccagatcatcaaagcttattagttcctggatgagaagtggtcacccaagttttgttgatgaagcactataagaccaatcaaggaaggaatccatgtggaagttcgcaagaggaaggtttgtgtgttggcatcgatgcttcttcaataagctagctgccaagcgaaacctataagcctgaagatgatcttgagtagccagaatcagcgtttgcaatcggcaaccagatgctcctcaaggccagatcttgttgaagttccatcccctcgaagagttgcaaagtgaagatatgtagctgaagtaaagctatacccataacccttctaagctgaatctcgaggacgagaatccttctaagtggggtagatttgaacatcccaaaaattcaaatcttggaattttttcaaactcgctctcaaattcaaatgaatttc

SEQ ID NO: 24776 - DNA, 497 bp, Zea mays
  unsure (1)..(497): unsure at all n locations
tgacacttagatactaagcttctaagggagaacacattntaggattaacaaatgttcattttgagaaagacagggtttgtagcgcatgccatgcgggaaagcaagttggagtccatcatccacacaagaacatcatgacgaccgacaggccgcttgagctactccacatggatctattcggcccgattgcttacataagcatcggcaggagtaagtattgtcttgtaattgtggatgattattctcgcttcacttgggtattctttttacaggaaaaatctcaaacccaagagaccttaaagggattcttgagacgggctcaaaatgagttcggctcaaggatcaagaaaataagaagcgacaacggaacggagttcaagaactctcanattgaaggcttccttgaggaggagggcatcaagcatgagttctcctctccctacacgccacaacaaaatggtgtagtcgagaggaagaatcgaactctattggacatg

SEQ ID NO: 24777 - DNA, 412 bp, Zea mays
agcttcagacaaaatcttatgccaatgacttggattatcagataccttcttctttatcaaattaatcaacgtcctattactagactcggcctgtccattggcctgagcataatatggagacgaattaagcagcttaattctgtataattcagcaaattcacgtacctcttttgacataaaagaagtaccttgatctgtagtcaaggtctggggaatgccgaatctatgaataatatgctcagttatgaactcaattacctccttgtgcgtcatgttctttagagcaacggcttcagtcctgaaagggaaataggctttaaaccttttcctaaatgaatttggtgattgaatgtccaacacaaacaattggactaattagtttgctctaaatatattgtctacaggtgccaaa

SEQ ID NO: 24778 - DNA, 484 bp, Zea mays
  unsure (1)..(484): unsure at all n locations
taccactacaaattaacattctattcatattatacctcttgtcgccacatgaaaatgataagtgaaatattaattatgttgaaacttcgatacataaaatgatttcacatgttactcacgcaataagtgggagtagaatggaagaaacgccaacatcttgtggattttatagtccaaatgtttttgagaactatatgtggatatatgttgtgtccccgtaaaaattcatgaattntttaggctatttggtgtattattaatttcttgttgtagaaaatcatcaaaatacaattaaattcataaaaatattatagcatcgaccggaaattgcaaataagttaccaatattaataaatagtttataaaaagataatcctaagttcccacatggatataatcttaagtcctcacatgaaaatgatatagtctattattttgatataaatttagacattattttaatgatgttggactaagatatgtt

SEQ ID NO: 24779 - DNA, 410 bp, Zea mays
  unsure (1)..(410): unsure at all n locations
agcttatgaagattcttcatcccaacatgggctagtcggcggtgccagagccaacccatgttagtcttagcaattaagcatgtgtcgagctcagctctatcaaaatctaccaagtatagctgacccactaacactcccttaaaagctattgaatcatcacttcttctaaagacagtgacacctatatcagtaaaaagacagttgtagcccatttgacataattgtgaaacagaaagcaagttgtaatctaaagaatctacaagaaaaacattggaaatagaatggtcaggagatatagcaattttacccaatcctttgaccaaaccttgatttccatccccgaatgtgatagctcgttggggatcttggttnttctcatatgaggagaacatccttttctcccctgtcat

SEQ ID NO: 24780 - DNA, 381 bp, Zea mays
  unsure (1)..(381): unsure at all n locations
actaagcttctaagggagaacacgtgataggtttgactaacgtgctattcgaaaaagatagaccgtgtgcagcttgtcaagcatgtaaacaagtgggaggagcacatcacagcatgaatgtgatgaccacttcaagacccctggagctgctgcatatggacctcttcggacccgtcgcctatttgagtataggaggaagtaagtatgttctagttattgttgatgacttttcccgcttcacttgggtattctttntgcaggataagtctgaaacccaagggaccctcaagcgcttcctcatgagagctcaaaatgagtttgagctcaaggtgaagaagataaggagcgacaacgggtccgagttcaagaaccttcaagtgg

SEQ ID NO: 24781 - DNA, 444 bp, Zea mays
  unsure (1)..(444): unsure at all n locations
agctntntaaaattgaaatgtttttgtggtctatttatggncaaacataacttaagagaggttaaatgatttgacgattctatatatcgaaaaaagttgttgtatgaaattgatctcaacgatataagggatgacttcgtatcacaaaatgttagaagatatttttaatgatatcagatgagaagtaagtgtttttggctatattttacatttgttatcttataaacatcaaaaggtgcataataatttttataagttaaatattcgatattgtatgtataattatatatatttgtgtgtggatgggcccaccatatcgattttcgcactgggcccctaaaaaatcatgaacggccctgcctcctggtgccatctttcttctccacgaataggatatgggtggcccaagacgatgtgcttggcctgatgtaaccttctctgaca

SEQ ID NO: 24782 - DNA, 398 bp, Zea mays
  unsure (1)..(398): unsure at all n locations
taccacatttgaagcatgatcgctntcccttggtcttatccttgcttggctgtccctttcgaccttttagcgccgtcttgaatcttttaatgatgagggccatctcttcatcattaagaccggcagcctcaatttgtgccaccttgctgggtagcgtctccttgctccttgttgccttgagagcaatgggttgaggctcgttgatcggaccattcaatgcgtcgtcgacgtatctagcctccttgatcatcatccgcccgcttacgaattttccgagtacctcctcgggcgtcatcttcgtgtacctgggattctcacgaatattgttcacgagatgatgatcaagaacggtaaatgaccttagcattatgcggacgacgtcgtgatccgtccatcgc

SEQ ID NO: 24783 - DNA, 440 bp, Zea mays
agcttctaaagggagaacacgtgatatgtttgactaacgtgcatttcgaataagatagaccttgtgcagcttgtcaagcaggtaaacaagtgggaggagcgcatcacagcaagaatgtgatgaccacttcaagacccctggagctgctgcatatggacatcttcggacccgtcgcctatctgagcataggaggaagtaagtatggtctagttattgttgatgacttttcccgcttcacttgggtgttctttttgcaggataagtctgaaacccaagggaccctcaagcgcttcctcaggagagctcaaaatgagtttgagctcaagataaagaagataaggagcgacaacgggtccgagttcaagaaccttcaagtggaggagttccttgaggaggaagggatcaagcacgatgtctccgctcctatcaccatacaaaat

SEQ ID NO: 24784 - DNA, 424 bp, Zea mays
agcttaagcatagattaatcgtgcttaagcgtttgtaggaatattacaatataatatatatttgcacagaaaaacagttttacctagaaattatgggtacttacctggattaatagacatgtttttgcagcctttctgcacgttcccagcttcttaccttcagcccttcaccaaacagcagcagcatcacaaatcaacaaacaatagattaaactgttaaagagatgaacaaatccacaagaagactaaaagaaaagaaacttatcttcttctcatcttctttccttcagcctttcaccaaacaacagcgacacaaatattagagagatctcataatcacaattcacaaataaacattaacagctcatagcagacttaaactaattcaaatagataatagactagttcatgacacacaacacac

SEQ ID NO: 24785 - DNA, 462 bp, Zea mays
  unsure (1)..(462): unsure at all n locations
tggacagtgtcctatgatgggtcatggtgaacctttggttcttgtgcagctgctattctgatctcaccatctaatatcaaaacttgctatgcagctagattggagttcaactgcacaaattacattgcagagtatgaagctcttcttctatggctttgaaagattaatgcaatgggaataagaagggcagttctcaaatctgactcacaagtcagcatanggcatgttgataaaagcagctgatcatgagacccaaagcttgaaaagtatcttgatacagtctaaagaatggaagcatccttcgaaggtttctcagtaaagaacattccaagatgggaaaatgagcatgcagatctactatcttaatcagtggcacatgggcttccgcttncctagaagtgttcttcgaaactctcagatcaccttcagtcgagctcatggaacgagtagtgcttacaattt

SEQ ID NO: 24786 - DNA, 391 bp, Zea mays
agaaagacagggtttgtaacacatgtcaagcacggaagcaagttggtgttcatcatccacacaagaacatcatgacgactgacaggccgcttgagctgctccacatggatctatttggctcgatagcttacataagcatcggtgggagtaagtactgtctatttattgtggatgactattctcgcttcacttgggtgctctttttgcaggataaatctcaaacctaagagaccttaaagggattcttgagacaggctcaaaatgagtctgggttaaggatcacaaagattagaagcgacaatgggacacagttcaagaactcacaaattgaatgctctcttgaagatgatgagcataaacatgagttttcttctcctacacaccacaacaa

SEQ ID NO: 24787 - DNA, 290 bp, Zea mays
  unsure (1)..(290): unsure at all n locations
tggaggcgtcngatgggtgtctacttggtgtatactccttcttcttttcttccgtcgccttgaatgcgacgggttgagcttcggatgtagatggatcatcaagctcgttgatcttcctcgagccttcgatcatgcactcaatacttacaaaatgcccgattacttcctcgggggtcattgtagtatatctaagattaccacgaattaattgaacctgagtggggttaagaaaaatgagagatcttagaataaccttaaccatttcgtggtcgtcccacttgacgctcccg

SEQ ID NO: 24788 - DNA, 416 bp, Zea mays
agctttctcatttccaacttgagaataattccatctaattgtttcctatgtagctcatgcaaagactcatgttatacaattaccccttcaagaatattacgaccaggcataaacgcagtctgagagggtttaataattcgaccagaccaagttcatattcctgcccccgcccgcatggctgcaagatccaggcagacatcccaccgcaaaatccagctccaacctttcatgcggccgcccgagctccactgctggcgctcacaagatcgagcgacatccgacattctatgttggagcatcgtagcctatgcctagctcttgtgtgttcgcctgcatcaagtaacgatagacagaatcctaattcccaaaagatgaggtcatcctaagatggtgagtgtgtttcttgctctagtttc

SEQ ID NO: 24789 - DNA, 352 bp, Zea mays
tctaaatggagaacacgtgatatgtttgactaatgtgcattttgaaaaagatagaccttgtgcagcttgtcgagcatgtaaacaagtatgatgagcgcatcacagcatgaatgtgatgaccacttcaagacccctggagctgctgcatatggacctcttcggacccgtcgcctatctgagcataggagggagtaagtatggtttagttattggtgatgacttttcccgcttcacttgggtgttctttttgcaggataaatctgaaacccaagggaccctcaagtgcttcctcaggagagctcaaaatgaagttgagctcaaggtgaagaagataaggagcgacaacgggtcc

SEQ ID NO: 24790 - DNA, 435 bp, Zea mays
agcttctatagggagaacacgtgataggtctaactaacgttcatttcgaataagatagaccttgtgcagcttgtcaagcagggaaacaggtgggaggctctcatcacaccaaaaatgtgatgaccacatcaagacccttggagatgcttcatatggacctcttcggacccgtcgtctatctaagtataggaggaagtaagtatggtcttgttatatgtgatgatttttcccgcttcacttgggtattctttctgcaggataaatctgaaacccaggggaccctcaagcgcttcctcaggagagctcaaaatgagtttgagctcaaggtgaagaagataaggagcgacaacgggtccgagttcaagaaccttcaagtggaggagttccttgaggaggatgggatcaagcacgagttctccgctccctacacaccac

SEQ ID NO: 24791 - DNA, 304 bp, Zea mays
gttcctggattttaagtggtcacccaagttctgttgatgaagcaccagaagactagtcgaggaaggaatccatgtgggagtttgcaagacaaaggtttgtgttgtggcatcgatgcttctttaataagctatttgccaagcgaaagccataagcctgaagatgatcttgagtagcctgaatcagcgcttgcaatcggcaaccatatgctcctcaatgccagatcttgttgaagttccatctcctcaaagagttgaaagtgaaatatgtacctaagtaagctatacccatacccttttaccaatc

SEQ ID NO: 24792 - DNA, 424 bp, Zea mays
  unsure (1)..(424): unsure at all n locations
agctngcacatagtctcgatcatgtatgcctttagattgttcaagtcttctaaagctattactttttgtgaaaccgcattgaaaaagtaacacaagcgtgtgatgacaactttgacatgctctgtttcgagggatcttaccgcaattgggaggaacaccgtcatcatcacatggcagtcatgagagttgtagccaaatagagacaagtccttcatcctgactagtctgctgatattggatgagaaacctgtgggcactttgaccccacgcaaacatttgcaaatctttgttctctcctcaactgacaagttgtagctagctggggggaggtaaggcttccctttgccactatccactggcagtcatgagagttgtttacatcacatgcggtgcaccacaagcggttcctggaaccgcctgtgta

SEQ ID NO: 24793 - DNA, 360 bp, Zea mays
cgcctgtccaccaacggccaccagcagcatgggccgctccaaagcgcatcggcaggtcctcgctcccgtcctcgccgcgaaagcgaggacagaggacggaatgttgcatcctagctgggcagcaacagttcgccttccccggcatggctggaggacgcctcctccgcagagctggaggatggtttccaccaccagaagctggaagaagaggtggccagctgacccgtgcgggaggtagagccccggctcacctcgctctccgccccagcaaggatgatgaagatccttgaagctgagggcggggcagagatcgtagcccgacttgcttctccccacctaggaactggtggttaccgtctt

SEQ ID NO: 24794 - DNA, 329 bp, Zea mays
  unsure (1)..(329): unsure at all n locations
agtcacccgcngcatgcaagcttgtgcaagtccactcgagctaactttctgagaatctctgccccactgcaacatgacaccagatggtcatactccacgggccatggatgaactcagaatcattgcagagcatattggtaccacggatctggttcacgaactcttaacattcagagtcttccctactctgaaaaaacgggacatgcccaatcttaagggggagaagatagaacgggatcttgtccggcctccctaccacttcatattctagaaatatttccagaagccctcccaagagtggctggatacacttgaagagatgcgttatg

SEQ ID NO: 24795 - DNA, 326 bp, Zea mays
actaagcttctgcacctgtctctgctaacctagatgatgcagcttctctccatcaatgatcaaacgacgtgaacgctccttaatgacacactttgtttgaaacaacgtatgtcgctgattctgctgtgccttcttcatttgtgcactaagcacacgctgttcaacgtggctctaataatgctctgcatcatcatcaccaatctgttcttcaggtggtaccttattgcctacatcaatttgccgctagacaagcaagtgtagcttcatacatatcactagtatacgaatacccaccatcgtctttttacaccatttgactcatgtta

SEQ ID NO: 24796 - DNA, 331 bp, Zea mays
tgcaagcttttgggttgaactgatttctgcatcttctctaacatgcttcactggaaataaacaaacatggcgatgatgtactgcaccggccaaatatagaagatcccacggtggataatcagtggattagattaatttaaccttaacccttgtccttggctttggtaccatgttactaaccttgggaatttccaagagtgattcctgcattaatggacaggtatatatagacaatcatatgggccaatagtagataggccttcacttaacatcacccttcaaactcaaggtgtaagtggaggatatggaacatgttggtaccggtcttggg

SEQ ID NO: 24797 - DNA, 108 bp, Zea mays
tatctactattcatatttgtaaacatgtatcattaaccaattctttatatttattccacggcaatgacatcatcttatatgaaaatacataacaattcctattccttg

SEQ ID NO: 24798 - DNA, 406 bp, Zea mays
  unsure (1)..(406): unsure at all n locations
agcttggcgtggatcaggctctccttcatctggtatcagtgtttagtcccgactgtgcactatatggtagcccacgtagcgttgttgggaggacatcaacgtcgatcgttgcttgatggtacgtgccggggcacgttggaacacaggaagtttatacaggtctacgccgtgtgaatgtgtaataccctacgtcctgcgtggtgctgagtattgaattatcttgagttcgcagattacgggtggtttgcgtgaggtggaagatgaggtctcctatcaatctaatggtgagccagccaaagagagtttttcattgnggtacctctacaaccttatatagccaactagagagatatccctttatagatctttaagtcttgctcaagcctattcctttcgctacaagctc

SEQ ID NO: 24799 - DNA, 403 bp, Zea mays
actaagcttctcactgacgctagagttgtaggtgacacactggccaccattgttcatacctccgacactatcaatgtataatgggctaactgatccaaagaaattcctcatgagttacaaagctaccatatctacatatggtgttaactctgcagtcatggctaaatcattcgtcatggtggtcaagaatgtggctcagacctggtattcatcactttgaccgaggactatcacttcgcgacaaaagctgaaagaaatgctcctcataaacttctaaggtttgcaatcaaaacccattacttgccaagctctgttccagtgcacccaagatccatacgaataccttcagtcatttgtccgaaggttccttcgtcttcgaggtcaagcaccaacagttcaagat

SEQ ID NO: 24800 - DNA, 426 bp, Zea mays
  unsure (1)..(426): unsure at all n locations
tactcaagctngacaacgatgaaatgtcgctcatcatctatagcttccttcttatcctcaaacaaaggatggggaaggattacaagcgcccctccaataatgtgtgctacaagtgtggtaagcctggtcactttatagcaaaatgtcctatgtcaagtgatagtgacaggagcgacgacaagaagggaaagaggaaggaaaagaagaagtactacaagaagaagggcgacgatgcccacgtgtgtcgggaatgggactccgacgagagctccaccgactcctcctccgatgatgatgccgccaacatcgccatcaacaagggacttctcttccccaacgtcggtgacaagtgcctcatggcaaaggacggcaaaatgaagaaggtaaaatctagagcctctactaaatatacaacatctagtgatg

SEQ ID NO: 24801 - DNA, 444 bp, Zea mays
agcttccaagcaattcttaaaatggtatgatcttgagatgagttctcttcctgtaaatagaaatgagaaatcattcaaaactatgtcttgtgctgctccacaagatattcataaatgtagccatcaaacaaagaacatagttttggctcaaatacaaaatagctagaattttaagtagccaagaaagtgacatgcaaagaacaagcgaccctacccttagccgtgaaacaaagaatgcaactaagccattgatgccactacaaggcctatcgagaagttgatgtgtcttcaaactgaccagagaaaccattttaatgaaaaccactgcacctaggcatttatcttacctgtcaagttcaccgagcaagtaagctcatgggccagacaaccatgaagtggaagaaccacaggtacctcccattgtacatcgacatactggacatc

SEQ ID NO: 24802 - DNA, 395 bp, Zea mays
tggagaagcataaatccttgaagtcttggcttgtaaactgcttgccggggtcaactgttaattcggagggtactccgaatcggcaaacaatggtttgccaaaagaatttctgtgcagtctttgatgttattgtggaaatagccctcgcctcgatccatttggttaagtactcgacagcaacgaatgtgaacttgatgttcccctgagctgtgggcaggggcccgacgatgtccagcccccagcgctggatatgccatgtgtgggcgatcggttttgtgaattgcgatgggctgcctgatcgtagagaaaacttctggcatgcttcgcatgaccttgtgacccgatttgcgacgcagatcattgcgggccaattgataccttatcatatcaccttt

SEQ ID NO: 24803 - DNA, 442 bp, Zea mays
agctttgtcggcctcaaggatgttcgccaccaccagtgtttcagcaggagcggcatcagaagaatccttagctaacatatgcagcatggcacttatctctgcgtcactcggattcaaaggcacctcaaaatgaacctgcctctcatcggtaggaatttcttcgagtgaggcaaccaaagcactaacttcttcggaagagggttgcactctaaggcccgaaccgctatcatcagtaggaggatttgacacgaaactggtaaaggcctgtgaaggaggcagattccatgccgagtatgcaacaggagcgccgatgttcgacaccttgcctctgagtatcatctcgagccggctcaccaagtccacaacaggaattcttctgctagttacccgggttgaatcagccaggcctcgatatagatatgtggggtatgctctgtctttc

SEQ ID NO: 24804 - DNA, 365 bp, Zea mays
tgaagccatggtaagtagcatatgcaagtgaaatacgaattgtttctatcctagctacgggtgcataggtttcaccaaaatccaaaccttcgacttgtgaatatcccttggctacaagtcgggctttgttccttatcaccacaccatgctcatcttgcttgttgcggaagacccacttggttcctacaacattttgattaggacgtggaactaaatgccatacctcattcctagtgaaattgttgagctcctcttgcatcgccaccacccaatccgaatcttgaagtgcttcctctatcctatttggctcaatagaggaaacaaaagagtaatgttcacaaaaatgagcaacacgagatcgagta

SEQ ID NO: 24805 - DNA, 436 bp, Zea mays
agcttcgcctttctagctgctgtgacaggggacacatttctcaccagcctttcgacgaacccctgaccctgagtccttcaaagctttgcaggtgacctcgaacagcttccggagctctagtcccggcagcatgctcgggcgtacagcaagcagaaacatgaggtagtccgacagcgcctcgactgctcccagatacttgttggccttgtccttgagcagctgtcgatcgctgcgggcgaggaagatggtggtgccgatgtgccacaagaagacgtcctcttggaactcacagccgaaaatacccagctggatgcctttgagcttgtcccgctttcttcttctcttgaccgccttctggccccagagtgtggtgatgtcctccatggagtagccgccgtcagcactgtcggacagtctcttgtgtatccgctcgaac

SEQ ID NO: 24806 - DNA, 351 bp, Zea mays
  unsure (1)..(351): unsure at all n locations
tgttgacacatttaaaaattctgtntcttctgttgctgtttcatctgatatatggtctgggaatgctaaagaggattacttgagtgttgttgtgcattatgttaattctgcatgggaattggaaaaaggataatatgactaatgctaattgatgtctcacatagtggtgaaaacatatctgagagaatattagaggtgttaaaagaatatggtcttaatgataaaaccttttttgtaaccctggacaatgcttctgcttatacctctgctatggggagacttactcctctacttagtggttattgttgggatgtttgtttgcatcaaacgtgtgcatgtcatattctgaat

SEQ ID NO: 24807 - DNA, 363 bp, Zea mays
agctcttaaagggataactcattttaagacttacaaaaggttattttgagaaagacagggtgtgttgcgcatgtttatcacgaaagcaaggtggtgttcatcatccacataagaacatcatgacaaccgacagggcgcttgagctactccacatggacctattcggcccgatagcttacataaacatcggcgggagaaaatattgtcttgtaattgtggatgactattctcgcttcacttggatgttctttttgcaggataaatctcaaacccaagagaccttaaagggattcttgagatgggctcaaaatgagttcggcttaaggatcaaaaagattataagcgaccatgggacagagttca

SEQ ID NO: 24808 - DNA, 398 bp, Zea mays
ttacgtgacactataaaactaagctatgaagatctattccttatgggctagtctgcggtgccagagccaacccaagtttgtcttatcaaccaagcaagtgtcgagttcatctctatcaaaatctaccaagtatagctgaccctctaacactcctttaaatgctattgaatcatcacttcttctaaagacagttacacctacatcagtaaatagacagttgtagcccatttgacataattgggataaggaaagcaaattgtaatctaaagaatctacaagaaaaacattggaaatagtatggtcaggtgatatagcaattttacccaatcctttgaccaaaccttgatttccatccccgaatgtgataagctcgtggggatcttggtttttctcatatg

SEQ ID NO: 24809 - DNA, 366 bp, Zea mays
  unsure (1)..(366): unsure at all n locations
atggtccttaagtctccttgaaatccttaagggtaaatgcttgagatatttataacatgctttcataagtgcataaaatgtcattagcatcacacttatactatgacccaatgcactttacactctttatgatatagacatggtctcattaacctaattatgtgcacttggcattttagaccaaaaatttgttttcctctctatgcacatatctaggtggagcaatctatattgtatagaattgtttaagcttaattgacatatcctttttaatcatgtctctttcctttggtacatttgcatatttcttatcttcattgtgtgccaaagctaagactaatatgttntcatgagcatctcatgtat

SEQ ID NO: 24810 - DNA, 416 bp, Zea mays
tattaccatatccattatttgcttgatttgttgtatcgatatgagtagaggcgaggtgatgagaacccgatacccaacttttggtgcccatctggacaacaggttatcgcatgtcatatgcaagttgtgcccttgatcactcctgtttacctaataatggtccctattaatcactgtgacatgcttaagttaatttgatgggacctaatatgcttccctagcattgtttattccccaccttgcaaacaaatgaattattgggtagctttgctattgctctacctgatttcgggaaactaatgatttattatgaacatgttccaattattttggtgtttaattattgtgcatgataagatcatattggtaactggaacatggagcgaccaccccggataatagtgctaccaccaagg

SEQ ID NO: 24811 - DNA, 465 bp, Zea mays
attacagaccagactaaagtgagtgcattttattaatattattcaaaccagggaggcacaaactcctcccgagaagctaaaagcaaaagatcttaagtggaggaccgaatcctcccgcacttcagtcttgattttcttcttttggaaccaccttggcacagaagcagcaaaagtctgctacttcctcacctaaaaacaacgaagggataaaccctgagtatggaatactcagcaagtcttacccgactaaagaaaagactctcaagggtatgctggttatatgggagtcaaggtaaggcttttcaatattcaaagactctgtgttgcagaaatgcttactaaagtggatccttataaatccagtgttaattcgtcaagttaagtaaaattacctgcactagaagtctttctaccctagttcaatcactggtcctgcacatgccaattttttttacaaagcccatt

SEQ ID NO: 24812 - DNA, 285 bp, Zea mays
gatctattactaagtttattatttatatacgcctttgttgaagacttgctctccttctgttggtttacaatccaatccttagcgggatagaccatacaatacgtttaaattcctgcaattaaaaagttcaatagtgcacttaacttttacataaactatttgtgtgcgctcaattaaaagaaatcattctattcttatgggtggcaagaatgataattcatttgccgttcgcatataaggatcatcattggcgaaacccatccttgggtgtgtaatgccctcttt

SEQ ID NO: 24813 - DNA, 376 bp, Zea mays
  unsure (1)..(376): unsure at all n locations
ctctggcagtactgctcgggattttctcttctcttcgtcngcgagataacaagctaacgaatgcaatgatacatgcatgatatgatatgtgctttagaaatctcaacttctgacggtgtatgatctacttgagttagatgaagagaaaccttacttatgtaagacttcttggtggtatacttggtaaattggatcaaacttaactaatgtatgtggtacgcttatttttggggatcctctgaattcttttcaaagccgtagtgagaattgacaagaattcaagttggacttgatggagtgagatttatttctccctaccttttctctattctctgtaaagttttggagcgggttcgaactacaagtagctttaata

SEQ ID NO: 24814 - DNA, 427 bp, Zea mays
agctctgcatgaagcccatcactggtgtcagccgtgtcactgtgaagaaaagcaagaatgtaattcaccacgcaaactggcctatctttattgttgtctggctaacatggtatatattatctttattgttgtctggctaacatgataaatgcacatatttttcccagatactgtttgtcatctcgaagccagatgtgttcaagagcccgaactcagacacatacgtcatattcggcgaggccaagatcgaggacctcagctcccagctgcagacccaggccgcagaacagttcaaggcccctgacttgagccagatcacgagtccagagacttctggcccgggccaggaagacaatgacgaggaggtcgacgaaactggtgttgaggccaatgacatcgagctggtgatgacccatgcatctgtttc

SEQ ID NO: 24815 - DNA, 398 bp, Zea mays
acctgtcatagcatcagcacatgccatcacagtttcttctgaccataccagtaacttggcctttcgcatgctggggattggatatgattggacctttcaagaaagctcaatgaggatacacccatgtattggtggcaattgacaaattcactaaatggatagagttccagcccattgcctctttaacctctgctaaagccgtggaattcatacaaagcataatattcagattcgggataccaaacagtatcatcactgacttgggatccaacttcaccagttcagaattctttgacttctgcgagcaaaagagcattcatattaagtacgcatctgtatcccatccgatatccaactggcatgtcgagcgatccaacggaatgatattggaggcactc

SEQ ID NO: 24816 - DNA, 362 bp, Zea mays
ctcggctggtatgtcccaaagttcgtcgccacgccatgtcgtcatctttacacctacagctacaaccgtgctctgctttctcgtgttcctatataacctatctggagggattgctaatggcgtgtttggtctggagaatgaactcattctgcatggaatcatgtgcagcatgagtttttcatcccgcgtcatggacatgcttgcagtagtagagggtgcgttccttgttggttcagcaactctgttgttgcattgcgttggggccttgggggcagcctggcaactgcaactatgcctagaatggatacgatacagtagtacgtacaaacagtcagcaccattcgttagttcagccatacata

SEQ ID NO: 24817 - DNA, 372 bp, Zea mays
gtatgtgctacttcaccggtcttgagtcgatgcgaatgtccaatgagtgctctgtgacctctcttggtatgcgtggcatgtccaatggactccacataaatacctcagcattgcgtggatgaagtcgatgagcacttcttcctatttcaagttgagctcgaagctgatctgtagcgccttctcgcccaagccactggggttgaggggatggtctttgttgcttcagccagctcaaagcttgtggcatgccgcttgcggtcgggaacctcgttggtgatgttctctaggtcgacgatgagagcctcatactctacgagtgcttcggcgtactcgacgcactcgacgtctcactcgtatgcgtggcgatgcgtg

SEQ ID NO: 24818 - DNA, 410 bp, Zea mays
  unsure (1)..(410): unsure at all n locations
agctttattgccggtctgataacgggtnttatttcngcaaggctaaaaaaaagttaaaaactttcctgccaatatggttcatggacttgaactcaagatctcatatatttaatatattatgttgcctatagtttttttatcctaatacatatcgctaggtaagatatttttaaaaactaatttactcatcagaggatctctaatatcgtttggtagactgaaaatctagactacttagtccgagttcatagtaccaaccaaaattaatgtaggctatttagtctgtgtttacgttactgaccgataganaagacccttcatatgtttttaataaaagacaaatgcttacaatagtcatgaagactactagttagaacaaatatgttgaaccaatgcgcactggcgcacgt

SEQ ID NO: 24819 - DNA, 371 bp, Zea mays
acttaagtgggacatggactcccatatgtattacatccgtttcttagacgcgaccacttgagcccttgaccctttacgaacaacatgcaagacctgtctgaaatctccaccgaagacaatggttttaccaccaaatggcagtgcggggcgacccattatatcgtgcatgctattgtccagtgcctccacggcttgtctcttagtcataaaagcctcgtcccagataatgagagatgctttccgtagcaactctgctgttccactctgcttcgtgaagctacatacagcgccatcatcaatagtgagtggtatcttgaagcgtgaatgggcggttcttcctccaagcattatggaagccgcaacgccagatg

SEQ ID NO: 24820 - DNA, 445 bp, Zea mays
  unsure (1)..(445): unsure at all n locations
agcttcggcattgcaaaccgacttaaagatataatgaccttttagtccataaatgtctgagtcaatgttgtaagtttttataaggggcatacttgtaattcctcacaagctgtgtcctgtgcctataaatagtgaacagtattccgttactgttcacgcattctgatttttgcaatcgcatctctcggaatacaacctttgtcaaggcataggtattattgtatttaatgattcaatgtattaagtgaatatgatataatgtatctgtgaaacatttatccgttntataccttttattttgtattatcttacaatgtttattgaaagttcgttacgaaggttgaacttcgtaataagacttttatcaaccttcgtcctagaccattatcctcaaaggaataatgcttcacggacgaatgacagtatcatntaacaatttatgttg

SEQ ID NO: 24821 - DNA, 381 bp, Zea mays
tagttcagcaaatgttacattaacacttctttataatatttttacaataactcctattcttccttcataactttctctgcgacttcgttaagcagtttggtaacaacttcatcgacaatggcttcggccacattaattacttctattgctttcctcgtttctgggtcagccaatgggtcaaacggctctataggaggaggtagttcaactgtggtagaaagcatcaattaactcgaagtcacgaaaataaacgacaaagataaaagctattaagaaatacctatccgtctttcgagttccacagctttctcagcttctttcgttgcttcccgagcgtcatgaatatattttacgctcttcttcattatttcatgagccatc

SEQ ID NO: 24822 - DNA, 441 bp, Zea mays
  unsure (1)..(441): unsure at all n locations
acctgcagctgcagcttgaattgtctccctgttggaaacctatgtcatccttaatgctanggcgtctcccattatagagcatacttctagcaaatttgaatttttcattttctaagtcatgctcattaattttagcactaagttgagctatgtgatcattttgttgtttaattaaagctaggtgatcatggatagcatcaacattaatatctctacatctagtataaatagaaacatgatcgatagtagatgtagagggtttgtaagcatttaattcatcaatcttagcatgtaaaatagcattctcgtctctaagactggaaatagcatcattgcaaacattcatatctttagccttagcaattaatgtttcattctcaatcttaggctataaatagatttattcaatttatcaaccttagcaataaactagcattatca

SEQ ID NO: 24823 - DNA, 419 bp, Zea mays
tagtcgtgctcgtcccgccaatactctgtccttggtcatcttcaaaccacatggccgtgctcggtcctgcttctgttacctacacgggcttggcgctgtacacccctgcgattactcatcgtcagcgtcggcacgtgaatgcagtggcctgtgcgtcgtcgtctcaacaccagcgaatccttatatggcttggcgatgagttcttcatgcactaacaatgccttgcccatcaaatgaattaccactacacggtaaaaaacgcctccctttcctacagagctactcgtgttcagatccaatcaagtcttttcagacctatgtagaccttcatcttgatccgacagcggttgcggtttggtgcaagttaacttgtgtctggtaaggatctgattggtcttccgtcctgacgaatcgtgcgt

SEQ ID NO: 24824 - DNA, 451 bp, Zea mays
agcttctgcgcgatggcagaatgtggaaccttcttatagatgaaaagacttcgggggcctctacagattttcataagccgctaacaaatgtaatggacatggatgtaattttacgtgggctgcgtcccgcgtctatataatagatgaacagtactcccgtactggggaggctgacttggcatttgtttttggcatcacgctcgtacttttcaccttctctcatgaccgaaggtacatttgtaatttggaatcatttctggttttccatgttaataaaatagaaatgattctatggtgatgcttatatcatatttcatgctttatgtgagtccttcgtcattacttgttatgtttacgaaggtatgcctctcatgaccttcgtccgagactcattatttcccgaaggaacataatgcttctaaagacgagggattctaacacttaacacttt

SEQ ID NO: 24825 - DNA, 270 bp, Zea mays
gatagcatagcgagagacatggaacgagggcacgtctatcaaaaaacaccaaatacagctgaccctataacacacccttaaatgctattgaatcaacacggcgtctaaagacagcgacacctacattagtaaagagacagttgtaacccatgttgcataatcgagatacagaaagcaaatcggaatcgaaagaatcgacaaaacaaacatcggaaatagaatggtcaggagatatagctatggtaccaagacctttgacacaaaccttga

SEQ ID NO: 24826 - DNA, 393 bp, Zea mays
  unsure (1)..(393): unsure at all n locations
agcttgtcttgtgctcatctatcttcttcatccaaatatgatgatagccttagtagcaatccaatagactcatgagctccgaagtggctgccacgtctatcctgggcagaggaaactcatccttcgggcatgccttattgagatctatgaagtcaatacatattctccatttcccattggcctttttatcattacaattagctagtcattttgggtaagttacttctctaaccactccagcactgagaagccttttaactttgtttcttgctcctttggctttatcatctgacatttttcgaagcttctgctttcttggtctaatggtgggatctacattgagagaatgttcaataatgtctttgntgacaccacatatgtcattggctgacc

SEQ ID NO: 24827 - DNA, 345 bp, Zea mays
acctccccatactgcccttttaataaaggggaagatatcctcgatcctatgatgcaccgtggacatgcacaaagtatattatgtgttgattaaactcatgcattgcattcatagattgcaatctcgcggacagatagtcgatttatccaaacaagatgcacatcaagatgatccggtacagctccgactctgtttctaaaaactccgcccactcgatatgagcaaccccgtattgcataccggatatgcatctactgtattatgctgtagcttgatcatgatttatagtgaatggtgtaacttgatgcgtaaccaggaacccggaaagaactatagctcggcata

SEQ ID NO: 24828 - DNA, 304 bp, Zea mays
ttggtgaaaaatgtgcaagggtattcttggttattggctttaacctctggaaatgcttataagtgtagtttgactccaagttgtatctgacgtcactcaagtatttatgtatacaatcctaatggtgtaaaataccaaacccacttttacacctggtgcacccaattatgtattaattccccccacctgtgggatctctattggcaccccaagtttgaccccccagctgtatttagtatctacattcattgacaatttcttgtccaggactatgacctctattactttgtaccttgaccaattt

SEQ ID NO: 24829 - DNA, 423 bp, Zea mays
  unsure (1)..(423): unsure at all n locations
tcgtgaaaatattcttcgattctacactccgattatcaatattgtatctccttgtgacttagcatgattttccctttttcaaagcattcttccgaagatcaatactgtgtccccttcttgtgccatatgcagcatgatgtatgatgcttatgctatgcggaatgatgtgatgatgttatgctatgtaaaatgggatctattccgaagatacacacacatccctgcaatataacacataatccttttaaatcagcgttgacttttcgctgtaagcctcccttatgagcttcttcgccttttacttcagcggaatcagcgtatatctttcgctgtaagcctcccttatgagcttcttcgcctttactttcagcggtattcgcattgactnttcgcgcttcgcctcttacttatgcggtatcaacg

SEQ ID NO: 24830 - DNA, 436 bp, Zea mays
agcttatctcaacctgagaggaaagcttatctctaaggggtgatgtgttagtttaagctttgctagtgtgttattcatatgcttcttgcagtattatatgtgttgcatcatatggactagtgtttccgctgcgatgaattatttggcttctatagtgtaatagatagtcatgtggttaatggtgctttaagattaatggtgctttaagattaaaggtgctttaagattgctttagattggtatcttagtttaaattggtgaatagtggtaggttgatattcctgtgatatatccactaaattgaatgatgtttaactctgattacatgcatttatgtgttatagcatcatggcttgattcttgacacaatgcatactataaagtgctaaggtgtagaaatgtttcgaattgcctaagtatgtgcaaattggcgtct

SEQ ID NO: 24831 - DNA, 468 bp, Zea mays
  unsure (1)..(468): unsure at all n locations
tacccatgatgatgcatgtgaccagttaaaaggtcctcgttcatcaagcctacattctctataatccttaatcaacctatgtagaacatcacttgttcctaacccaagtctcaatttaagtacttccatccttatgattgttttgtgttccttaggatgaaaagagcattatagggaactttgcagtaagatcccaccatgctcccaatgaaaatattcttgcaggtagaagtcatccttcctcatgataacccctgagctaggccttaatgcaaaagacaacctctatccacaagatctaagcagggataagcatttttgtaaatcatattttgatacttcatcagaagtatctataaaggtatggatataaaggtaggaaatgcatcanacggtttccaagcaactcctataaacctaatgcacattacgctagacttaaactgtgtaaaaattatttaataacac

SEQ ID NO: 24832 - DNA, 420 bp, Zea mays
ggcatgcaagcttgactcaagtatccacacattaatcctttattccttttttccgactcatggacaaggcatcctccctggatccaagtgcataaactaacatatatcccgtcatcaagatgaatacaatcaatgcctgacctcgcgcgagtgctagaaaatcactcgacttctaccgagaaccttgattagcaagcagctactcgacctagcatactatgaatcattctaaaaaggaatcctaagttcatgctactagaggtttccagcaactcctacacttaagtgcacattacaatcctacaagcattaagtgtagtaaaatatcataattaacaagttatgcctataaccggagcttgccttcaattgctggggttgcggagagatccttaatagcatcctctaaagcctgcttct

SEQ ID NO: 24833 - DNA, 499 bp, Zea mays
gcttgtcatcacgacaactccattctaccccaacgtcctcttcatctgggggagagtgtaatcgtcccccatctccgacgacgaaccgactgtgcctgtggaagaacctcctcagcgagaagctcgccgccagaggaatcgacgccataacgcccgacgacatcatgaagccggagaacgagatccggcgcagcctgtatcacgagacaagatctcggaggtgggagaaactccagatgaacgagtctttatggaaaggagaaactcccgccgacgtgatcgtcggctagctcaagagcaagccgagcatgatgcaagacaacgtcgagagaaccctctcttcggacaaaacctgaaccccgacttcgctcgagccatgaacacaccaagcgaggtctgtggagtgctggcccggatagccgatggcctccaccggactccagacgtcgagggctatcagcgcctggctcactcggcagctaatcatcttctacctctc

SEQ ID NO: 24834 - DNA, 349 bp, Zea mays
agcttgactcaagtatccacacatgaatccttaattcatttttcccgtctcctggacaaggcatcctccctggatccaagtccatagaccaatatatatcccattatcaagatgaatacaatcaattcctgacctcgcgcgagtgctataaaaatcactcgacttctaccgagatcctgattagcaagcagctactcgacctaacatactagtattcatctcaaaaaggaatcctaagttcatgtagctagaggtttcaagcaactcctacacttaagtgcacattgcaatcctacaagcattaagtgtagtaaagtagcatatattaacatgggtatgcataaaaccg

SEQ ID NO: 24835 - DNA, 478 bp, Zea mays
acgcactcttatatactaagcttaccaatggacgtaaaagtgccttcctaatggacctttcatgaagatgtctatgttgagcaacctcccggctttgaagatagtgagtaccctaaccacgtttacaaactctctaatgcgctttatgggctcaagcaagccccatgagcatggtatgaatgcctaagagatttccttatcactaatggcttcaaagtcggaaaagccaatcctactttatttactaaaactcttaacaatgatttgtttgtatgccaaatttatgttgatgatattatatttgggtctacgaacgaatctacatgtgaagaatttagtaggatcatgacacaaaaattcgagatgtctatgatggaggagtaaagtacttcttgggatttaagtgaagcaactccaatagggcaccttcattatccaaacgaattacatttaagacattctaaacatgtgtgggatg

SEQ ID NO: 24836 - DNA, 450 bp, Zea mays
agcttgccattcttcgaagtcctaaaaatagttgacgtcttccaatggggtccccctcagtagcaagccttcgaagaattgaaagattatctgataaatcttacaacattatctccaccttcgccaggggctccattgttactctatgtatcagcttcgtagtcaaccgtaagcgatgcattggtctatgagaccgtgaccaatggtaccaaagcgcatatggttgtttactttgtctccgaagtattgagtccatccaaaagaaattatacataaatagagaatgttctttatgcggtcctgatgaactcaagaaagctttggcattatttttagtctcacaatattgttgtaccttcgtcacaaccactcaaagacattataagatacatagaagcttcgaaatgaaatggtaaatgggtagcagaactcaatgagttcatcaacgat

SEQ ID NO: 24837 - DNA, 477 bp, Zea mays
gtgacactttatactaagctggacaccatactgtggttagtggagtcgactaaccctttgtttggctataatacactgtctcggttagggtgatgtgaacgaaggcattcttgacgtctatttggtggactagtctcatgagagcgcacggtatacgattgttcggatggtggcaggctttacgacgacgctgaatgtctcatcgtagtccactccacgacactaaatgaagcctcttatgacctaacagacatcctgtggtaccgtcggccttgagcttgtgtcgaaagatccatttgctagtgaaaattttggtgccatgatgacctggcacaatgtcatacatgtggttggtctgtatggcatctcgtgttcacttgttctcgaatgctatggatcaagaacaaggcaacacaagtgttaatggttaaagaccttcgtgcttcgaagcattatttctcttaggtcataatgatc

SEQ ID NO: 24838 - DNA, 275 bp, Zea mays
actctacgtcttggttaatttctggctgcagcggattccatagacgggccacctgtgtgactgtcggtgctatccacgggcggggaccccatcagtgacacgtcgccctcacccgtcatgggactatcacgaccctatcactgttatgctgccactcggttacacgggctggtgctggctgtaacagatgcctccgcaggaacaatccctctggtgcaaggacggggaatcttagaaacatactgcccacaaaccgcatatgaaacccctggaat

SEQ ID NO: 24839 - DNA, 451 bp, Zea mays
acgtgacactatttattactcatcttgagcaaggctcacggtctcaccagttttctatctgatggcttgaatcgaacggaggggaactggagaggggttggccactgcggtggctcttggtcggcactgtcgggctgcggagatgtcgccggaggcaactgttggctcggtcgagtcctgcgatgtacggatgaagcaatggggaatgcaaccgatcgctgtggcgggtttttatatgcgcggacgcggccggtgcgccggctcaaccgtttggcgcgactcgggcactctgggcgcgcgcgcggacgtgctctggcgagctcttagcgcgtctaacacgtggcgcgttgcttctgaccgtgttcttcgctctgctgagcggccatgcgtacgaatcttcgcctaccgcctgtgggagatctcttacctgcacctatggctacctagttta

SEQ ID NO: 24840 - DNA, 424 bp, Zea mays
  unsure (1)..(424): unsure at all n locations
agctntgagcactcaacaaagagccaggtttctgtagtgatatgttagaatagatgataacataaatggtatgtttcattacaacacacagacatatttgttagtataggcaaattaatcaacatgaacttgcatacacaactaacgaatcatgctctaatgtacctcaaaacatcaaatgaattagtatgccaccttctttaccattgttgtgtgggttcccgtttgtggaaagagattaatgacatattcaattggaacctatgtcatgattttgaatcagtggctcgttttttgggttaggaataagacaaatagtgttagaaatatgggtagtgcagaaattatgttgtgtatttggataccccgtaacacacatttgttttatggagagatatggcgaatgatgcataagctgacggtg

SEQ ID NO: 24841 - DNA, 436 bp, Zea mays
  unsure (1)..(436): unsure at all n locations
ntatantatggacgtgataagctccttcctcaatggacctatcaatgaggaggtctatgttgagcaacctcccggctntgaagatagtgagtaccctaaccatgtctataaactctctaaggcgctttatgggctcaagcaagccccaagagcatggtatgaatgtctaagagaatttcttatcgctaatggcttcaaagtcggaaaagccgatcctactctctttacaaaaacacttgcaaatgatttgtttgtatgccaaatttatgttgatgatatcatatttgggtctactaacgagtctacatgtgaagagtntagtaggatcatgactcanaaattcgagatgtctatgatgagggagttgaagtacttcttaggatttaaagtgaagcaactccaagatggcaccttcatcagcccaacaaagtacatt

SEQ ID NO: 24842 - DNA, 374 bp, Zea mays
tttcggcaaggctaataaaaagataaaaactatcctgccagtatgggtcatggactcgaactcaagatctcatatatttaatatatcatggtgcctataggtttattatcctaatacatatcgttagggaagattattttaaaaactaattaactcatcagaggatctcttatatcgtttggtagactgaaaatctagactacttaagccgagttcatagtaccaaccaaaattaatggacgctatttagtctgtgtttacgttactgaccgatagaaaagacccttcaaagttttttaaaaaaagaaaatgcttcaataggatgaagactattttaaacaattatgtgaccatgcgcctggtcacgtgctcta

SEQ ID NO: 24843 - DNA, 358 bp, Zea mays
actcaagctgtaagtgggacatggactcccatatgttatacatccgtttctaatacacgaccacttgagcccttgaccctttacgaacaacatgcaagtacctgtctgaaatctccaccagatactatggttttaccaccaatatgcagtgcggggcgacccattatatcgtgcatgctattgtccaatgcctccacagattgtctctaatcataaaagccttgttccagataatgagagatgctttccgtaacaactctgctgttccactctgcttcgtgaagctacatacagcgccatcatcaatagtgagtggtatcttgaagcgtgaatgggcggttcgtactgcaagcattat

SEQ ID NO: 24844 - DNA, 283 bp, Zea mays
  unsure (1)..(283): unsure at all n locations
tgtattgaatgcctaactctttgtagtgcgttgaagcttgtaaacttggatgcaattgaatggtggggtgtgttccctcacttacnctctcctttcaacataaatcacattattcaactcaccatcttcaatctcatcttttctattctctttctctcatctaaatcctatcacttcctcnctttcctaattaattctctctcattattaatctacattcttacatcattccacttccttattccctcctcccatcatatacattagtaactattttttcttc

SEQ ID NO: 24845 - DNA, 420 bp, Zea mays
  unsure (1)..(420): unsure at all n locations
tggtccagantgattcaaagtgataactcctttgtccggttttattatccctaagtcccaatattagaggacaatgatctgaatcttgtgaagcaatactcttaataagaacattgatgattagcaactcccaatccactgaacaaaacactctgtatgacagctctctctcaatgtccaaccgtgccccatctcatccactcaatcaagtggacggtgagagctctaatctcccaccattcgtcaatcaatgcgtttatttgctaaattaatcctttgtaagcgttgtgatttactaataatatgtattatggtattataaatattctataaatttcttaaactttagaagataatataatcatatcgaatagctaagttatagtttataggagagctagataatggtgaatggttgaa

SEQ ID NO: 24846 - DNA, 404 bp, Zea mays
  unsure (1)..(404): unsure at all n locations
agcttctcttataggtccttttatcagtggacccacttatcagtctctgtgaatacatcctaaattctagaacaaganaatttgttggcggctctcctcggattctttacacactcagctagcttcacgcacggtgaagctgatggttccccgaaaaaaaggagtttccataacaatagcagtgtacgtactagcaagctaaagatattatgggttttaaaaagtcaagcacgctccccacccaacgctggttattctcaaccatatgaaatcaaggacgtcaaccgctaaactttgggactaagcaaggatccacagccacccttccgtcttgctctaatacaaaagtacaatataatatgagcatctccaataataagtcttatantttaattaggatctga

SEQ ID NO: 24847 - DNA, 348 bp, Zea mays
gtgacacttagaaactaagctatgccctaaaatgtgatgttattagggcttgtctcccatggttctggattacgagggctatattgtatatcctgctggatatcccgaacacaaaattaggagaattcatgctaagaagtctcattatgtttctcaccatgcttatatatatatatatataagaatgaggcatctagctctaggcattctacacatgttaaaatgcctaataagaaaactcctactgcatcgaatgaacctaatgtttcattcaagacttttgatgcttcttatgtgcttactaacaaatcaagcaaagttgttgtcaaatatgttgggggcaaacac

SEQ ID NO: 24848 - DNA, 363 bp, Zea mays
agcttgatagcacgaaaaatattttcaacttgaaccctcgtatatatacgcaaaacaccactgagcggtggggctcgcaatgcagaatgtttcactattctagcgaaaggaaggtgttttttggaccttctgctaaaggctttcattcttttcgcagtatgaatttgttacaaagaaacaaactaataatgcgaggggctactattggggccttcctctttcgaaggtcctcaaaacacggctaaccatttgctttcagtatactactgaatattacaggagcttcgtcaccagaaaagcttctgtataacacaagatgagcgaagcaagcttcgtccaccaggcttcatcatggtgaaatgg

SEQ ID NO: 24849 - DNA, 392 bp, Zea mays
cgacacactcacgccgtcgatagtgacttgtttgcatttagtatgtctcttaatttaattagcatgtcgtcgaccccataaatataacatgtgttgcaaatgtttctctggttttaggttagctagcaaccatacgatgatccaccattgacacacattcaattgagctctatgacacgaaagatgaagacatttacttatgatgcgtccgttgatttgcttctacgctattgagtaatgagtaccaattgccccacatagttccaccccagtttggtctgcgtcagaagttccctatggagcccttctcgaccgtctgtagaactccacatgtaagtgcctttgtactttgtgtgatctcaatcttacatgaaatgtgtagtccaatcata

SEQ ID NO: 24850 - DNA, 212 bp, Zea mays
agcttgtagaatcttctttgctgtcctgattatcgatacctggaccatggcgatgcttgggtcgaacacggaaggctgcccacgacagacgtgtttgtaccctaatggtggacgagctggcttcgcttttatggctagctccggggatcctcggctccgacgatagatcggtgtgatccatcgccaatgagttggggcctatgacgcattca

SEQ ID NO: 24851 - DNA, 372 bp, Zea mays
aacttaaataccaacttatagaaggtgtatctcttcttccatctgtttgcactgatggttgctttttaaacccacatctttatctctaccatatcttctttataccttcttgatggctatcccaactgtcagcctctatgcaagccatcagagaacttggtgaaaggcaagtctaatccgatcttctgaaggaaatcactagagagttgtgatctaaatcctgaataccatgatatcatcatttgtacataccttgtggagaatatctgaagccagaccagattgtcactgtataattgactcaaggcactaaaaaattgaatgtaatattgaatgcactgcaatctgatttcttgatgctcaaggattact

SEQ ID NO: 24852 - DNA, 353 bp, Zea mays
gaatgtgctaattgattcaaccttcattatctatgcacacgtatcaccctacgtcgaacatgtgacgtgcgtatacccagtggctacaaatgaaccttcgtcccttggatccacacgatgctcttatgaggagaagaggaatacccggttggttgctacaacattccggcatggacgcggagcaaaatgccatgcctgattaatccgtgcgtcctcgagactacctcggatcgaccacacacagcacgaacactcactgcccacgtcaccctgtatggctcaagcaatgacgtaaatcatattttgatacttactctgagcgactcatgatcgagtggttacccacgtatgaa

SEQ ID NO: 24853 - DNA, 301 bp, Zea mays
  unsure (1)..(301): unsure at all n locations
cctacctctttcatgtgcctactttaaaaacagaggcacaatatttagcttttgatacccatgnttacctcagcgctttggtcacatttaaggctggtttggtgctctctctacctaaatcttactctctaccatcgcataactctaccattatcacaataacttcaaattctaccccataacaccccttccttgtactctcatctctcacatccaaacacatacatactcaatctccatcatcctctatctacatagattacaatttataactaattctaacttctacctccacaataat

SEQ ID NO: 24854 - DNA, 453 bp, Zea mays
  unsure (1)..(453): unsure at all n locations
gctgaaaaggagaaagaagctgacgcattatacatagcctgactttgaatatgctttatctgctcaagtggagctccacaagtctgaagtgttaagactagaaaagaagcttgacaaagttaatgtcacacctggatttcgggacccaagacccgggcacgaacctaatcaccaagtgtgctaggaccaagtcttacacatatgatgactcattgtacagaaacgaatgtcacatctttaatatataataggagttctgtacaaaataaataaataattacatcatatgaagacaacgatccagcaacccaaagttgactgggagacgacgacctatacctctcacgaacacatcgcagcatccaccatgtgcctcatcctgcagtaccagttcttgacctgtggtgggtgtgagacaacaanggtgagctcacatatgtttatcgctcaaca

SEQ ID NO: 24855 - DNA, 382 bp, Zea mays
cactcaggatcatgaagaataccttcatgcgtatgtccgaatgttcttacgactgatggcgcatgcgccaacagtgcctaacgaaattgttatcgaggccatgattaatgggcttcggccaggacctacaacccaatactttgccatgaaaccccctcagaccctggagaaattgcttcagaagatggatgaatatatccgagcagataatgactttcggcaaagaagggaggaagcttacaggttctccgaaatgactaggggcttcggagggagaatccaccctatgcacgtcagatctatctattctactcagactgacgataggggaagtcagcaacaaatgccacagtattcctctcaagcttcggtgcagcaacag

SEQ ID NO: 24856 - DNA, 427 bp, Zea mays
  unsure (1)..(427): unsure at all n locations
agcttgtgaaggttcttcatccccacatgtgctaagcggtgatgccacagccagcccatgctagtcttaactattaagcatgcatctagaccggcctcctcttttgcaaaatcaactaaataaagtttgccgtctaatacacccttaaatgctagtgaaccatcacttcttctaaagacagacacatctacatttgtaaatagacagttataccccatgttgcataattgactaacagatagcaaattatatccaagagactctactataaacacattagagatagagtgctcattagaaattgcaattttacctaacccttttaccttgccttgattcccatcaccgaatataattgaatcttgngaatctttattcttgacgtaggaggtgaacatcttcttctcccccgtcatatggtttgtgc

SEQ ID NO: 24857 - DNA, 431 bp, Zea mays
  unsure (1)..(431): unsure at all n locations
acatgtgctaagcggcgatgccacagccagcttatgctattcttagctattaagcatgcatctagaccggcctcttcttttgcaaaatcaactatatatagtttgccgtctaatacacccttataagctagtgaaccatcactccttctaaagacagacacatctacgtttgttaatagacagatatacccgatatgacataattgactaacagatagcaaattatatccaagactctctactaaaaatacattagagatagaatgctcattagaaatcgcgatgttacctaacccttttaccttgccttgatttccatcaccgaatacaattaaatcttgagaatacttgattttgacgtaagaagtgaacatcntctttttcaccatcatatggtttgtgatccgctgtcgataatcatcttgtacccc

SEQ ID NO: 24858 - DNA, 442 bp, Zea mays
  unsure (1)..(442): unsure at all n locations
agcttgctggagcacattntgtgtccacaacacaacctatgtcacattcttactcaactctaccaagtttggcgcacgcatgtacttgtttcacacgcactntgctggcctttctactttcgattacctggccaggggcgtatctacattcaattgtcggggtcgaccgaccccgacgacttgcaccacgctatttgaccctgtcggccaagcgcccaaggctaatgagtaatgaccctgatgaccttgcttctcccctcctgatcacacagaaactgtctagttgatactcttttcatcttacaatagatacacatcatatttattgaagactcaagattttctaagtttgactaaatactacacaacagtataatatattataaatattattagattgattgtgacatattttatagcaaactatctaaatataccgata

SEQ ID NO: 24859 - DNA, 436 bp, Zea mays
tgccaacttttatactaattcgtatgataacatatcatatgcttaagcatccaatgtacttctatataaattctatacattgtctttctgtcatatgggtatggggacagtgggagatatatattctttacaaaatatacatgacatgtggaaggacgttaggtcttgaatggatagccgtgtttcaatatgtatatcatattcatatgcaccaaattaagatccaaagaacgtttgcttctaacttgtatatcgtgtcgtctgtgcgcattgttttgaccgtcatatctgcatagtgcgatgcaagctgtgacatcgtggtaatcgaatactacatacagaaacaaacattattcatcgtgctgtatgctgctaccttgtacttgcacacaaaaggaatattcttcaacccttgctgcgttcgaagatgcatcct

SEQ ID NO: 24860 - DNA, 331 bp, Zea mays
taactcaaataaaaccttttttaagcttctcattggggacttattgggatttctgaaattcacaattctgaaattcagaccttgagccaaagatcagggatgttcaccttgatccctaactcgaattctaatggccccattgaccaaaatgtgtctaactaacccctctgtcgtgtgccataaaatggcattgggacgcgagccctatacacggcgaaaccttggatttgcctcgggtttgggcagggagacagaccggaattcctgctccatatctctgaaccaggatgcaaatcctatacccccaacaagaatggtacttgagggagga

SEQ ID NO: 24861 - DNA, 405 bp, Zea mays
aatagtgccgaagcttcctggaggccatcaagacatcatacagtatccttctgcaactctgtataatatatctttgataaactaagaacctcggaaacaaaatatattgtggcctgcctcttgacttgaccatcaagactttgctggacaagcgctgcacttaccgctgagtgcgaagctgccacatataataataaatgagcccctggcattggtggagtcaatgttgttagatctatcagatactgtttcagctcttcgaaagccttctgctggattgatccccattgaaagacttcggctgacttcagcacttcgaagaatggtaagtttctctctactgatctggatatgaatctattgagagatgccaatcttactgtcaatctttgagcccacttcttt

SEQ ID NO: 24862 - DNA, 310 bp, Zea mays
  unsure (1)..(310): unsure at all n locations
tctaaagggagaacacattttaggactaacaaatgttcattttgagaaagacaggatttgtagcgcatgccaagcagggaagcaagttggcactcatcatccgcacaaaaacataatgacgaccgacaggccactggagctcctacacatggatctattcggcccgatcgcttacataagcatcggcgggagtaagtactgtctagttattgtggatgattattctcgcttcacttgggtattctttttacaggaaaaatctcanacccaagagaccttatagggattcttgagacgagctcanaatgag

SEQ ID NO: 24863 - DNA, 408 bp, Zea mays
  unsure (1)..(408): unsure at all n locations
tgcatcgctagatcaatgctgacgactatcgacgatatgttcgtgtgacacaggatgcatgcacactcgccagcaaacttgcgctgtggaactactcataccgatcgcgcacatattggacgaccattgtggcgatctgatgctcccatcatctttaacgatcgttcaccagtcgttgcctaacaatgccaagtagaatccctgacgtacaattgacgtagataacagtcactcatatatgaacccaacgaaaccgagaaatataaacgcgtgtatacagtgtgcggatgcttgacactgcctgatttagagaccacgccanggttagataaaatctgatgcttcaacagtgaaggtgtacagatcatcattacgggtagcatcattgaggatgacgtgcctattcat

SEQ ID NO: 24864 - DNA, 433 bp, Zea mays
agcttgccatacttgtcatatcatcaacatatgccagcacagcatctacagaccataccagttacttggcccttcgcatgctggggactggatatgattggacctttcaagaaagctcaaggaggatatacccatgtattggtggcgattgacaaattcactaaatggatagagttccagcccattgcttctttaacctctgctaaagccgcggaattcatacaaagcataatattcagattcgggataccaaacagtatcatcactgacttgggatccaactttaccagttcagaattctttgacttctgcgagcaaaagagcattcagatcaaatacgcatctgtagcacatccaagagccaacgggcatgttgagcgagccaacggaatgatattggaggcactcataaaaagggtcttcgataaaaatg

SEQ ID NO: 24865 - DNA, 378 bp, Zea mays
agcttggtttgtagttgcagtgacaccctcattcatatcatgtccaatgggtgaatgaatcgggagatatcaagattggttataaagtgaaaggttcgttcaagattggagagtatgttgacatattggagtgtgatgttgcacccatgtctgtgtgtcacatgctgctatgaagaccttggcaatatgaccgatattctcaacattgtggaagaacaaatcaatacacgcttgatctgaaagggagaaagtttgtactcaagcctatgacctgttggggaccttcggcatccgaaggtcctcataaacaggatttaacagtatttctggagtataatgtgtgaacaagtatcttcggactcaagtcggcatcacagt

SEQ ID NO: 24866 - DNA, 463 bp, Zea mays
  unsure (1)..(463): unsure at all n locations
tgaaggccaagtcaataagcaagccccaatatactttgtcttcgaagttcttagtttattaaagaacaattatacagaattggagaaggtgctgtatgctgttttgatggcctccatgaagcttcggcactatgttcaagcatacaatatagttgttccttcttcacaaccgttgaaggatattatgagaaatagagaagctactggaagggttggaaaatgggctgcggaactcaatgaattttgtattgattatgtgcatagatcttcgattcaatcccaagcgttggcagacttcattgctgactggacgtcatgggctcatgaagaataaacgagtaaagatgccgaagtttggacagtatttngcgatggatcttggngaaccttcngagcatgagcagctgctgtgttggtcgcaccttccaatagttaaacctgttatgcaacaagacttgatttc

SEQ ID NO: 24867 - DNA, 444 bp, Zea mays
  unsure (1)..(444): unsure at all n locations
agcttcgtactcagcaatgttatttgtgcaactganatcaagtcttgttgcataacaagtgttaactgtagaaggcgcgagcaacacagcagctgctcctgctccgaaagtgccccaagaaccatcgcaaaatactgtgcaaactatggcatctttactcgcttcttcttcctgagcccctatcgtctagtcagcaatgaagtctgccaacgcttgggactgaatcgaagatctatgcacataatcaatgcagaactcattgagttccgcagcccattttccaacccttccagtagcttctctatttctcataatatccttcaatggttgtgaagaagggacaattatattgtatgcttgaaaatagtgccgaagcttcctggaggccatcaaaacagcatacaacaccttctccaattctgtataattcttttttgataaact

SEQ ID NO: 24868 - DNA, 258 bp, Zea mays
tccaacccatattattgttaacaaacatgcgagtatcaagtccagccttcttaaaatcaactaattatagctgaccctctaatactcccttaaatgctactgaatcatcacttcttctgaagacaacaacacccatatctgttaatacacagatgaagctatattgcattatcgagatacatatagcacggtataatctaaagaatccacaagaaaaacatttgaaattgaatggtcatgtgatataacagaattacc

SEQ ID NO: 24869 - DNA, 374 bp, Zea mays
  unsure (1)..(374): unsure at all n locations
agcttctaaagggagaacacattttgggactatacaaatgttcattntgagaaagacatggtttgtagcgcatgtcaggcacggtagcaagttggtgttcatcatccacataagaacattatgacgactgacaggccacttgatctcctacacatggacctattcggcctgattgcttacataatcatcggtgggagttagtattatctagttattgtggatgattattctcgcttcacttgggtggtctttttgcaggaaaaatctcatacccaagagaccttatagggattcttgagacgggctcaaaatgagtttgctttaggatcaaaaagattaaagcgacaacggaacggagttcaagaactcaccaa

SEQ ID NO: 24870 - DNA, 438 bp, Zea mays
  unsure (1)..(438): unsure at all n locations
tctaaagggagagcacatctatgactaacanatgttcattttgagaaagaaagggtttgtagcgcatgccaagcatgaaagcaagttgatgcccatcatccacacaataacatcatgacgaccgacaggccgctcgagctactccacatggatctattcggcccgatagcttatattagcatcggcgggagtaagtatcgtctagttattgtggatgactattctcgcttcactcggtggttcttttgtaggataaatctcaaacccaagagaccttaaagggattcttgagacaggctcaaaatgagttcggattgatgatcaagaanataagaagcgacaacggtgcggaggtcaagaactcacatatcgaaagctgtcttgaggaagatggcatcaagcatgagttctcttctccctacacaccacaacaaaatg

SEQ ID NO: 24871 - DNA, 419 bp, Zea mays
agcttgtggaggttcttcatccccacatgttcttagcggcgatgccacaaccagcccatgcaagtcttatccattaagcatgcatctagaccggcctcttcttttgtaaaatcaactaagtaaagtttgtcgtctagtacacccttaaaagctagtgaaccatcacatcttctaaagatagacacatctacatttgtaaataaacagttatatcccatattacataattgactaacagatagtaaattatatccaagactctccactaaaaacacattagagatagaatgctcatttgatattgcaatcttgcctaaacctttcaccttgccttggttcccatcaccgaatatgattgaatcttgggaatccttattcttgatgtaggaggtgaacatcttcttctccctcgtcatatg

SEQ ID NO: 24872 - DNA, 336 bp, Zea mays
ttaccattcacacaaattatatcatgacgactgtcaggacctgaagctcaaccatgatctattctgccgaagcttcatatacattgcgggagtaactactgactagttattgtggatgattattctcgcttcacttgggtgctctttttgcatgaataatctcatacccaataaaccttaaaaggatgcttgagacaggctcaaaatgagttcggcttgaggatcaataaaattagaatcgacaatgggacggagttcaataactctcaaattgtatgccttcttgacgatgatggcatcaatcatgaatgctctttccctacacccacaacaaat

SEQ ID NO: 24873 - DNA, 456 bp, Zea mays
  unsure (1)..(456): unsure at all n locations
agctttaccaaatggacgtgaagagtgccttcctcaatggaccaatcaatgaagaggtctatgttgagcaacctcccggctttgaagatagtgagtaccctaaccatgtctataaactctctaaggcgctttatgggctcaagcaagccccaagagcatggtatgaatgccttagggattttcttatcactaatggattcaaagtcggaaaagccgatcctacgctcttcactaaaactctngaaaatgacttgtttgtatgccaaatttatgtgatgatattatatttgggtctactaacgagtctacatgtgaagaatttagtaggatcatgacacaaaaattcgagatgtctatgatgggggagttgaagtatttcttaagaattcaagtgaagcaactccaagagggcaccgtcctaagccaaacgaagtacactcaagatattctaagcaa

SEQ ID NO: 24874 - DNA, 462 bp, Zea mays
  unsure (1)..(462): unsure at all n locations
tcatttgcataggataattgatgctcaaaatgataatctgggtatgaagcacatacgagagaagataatggctggagtagccaaatgtttcaaggaagacgatcaaggtgtgatatggtttaaaaaccgcatagtagtgccaaagaacgaatagctccgccagcatattcttgatgaagcacatcttatccgttattctgttcatcccggaagcactaagatgtaccaagacttgaagcaacattactggtggacaaagatgaagattgaaattgcacgctatgtggctaagtgtgacacttgcagacgtgtcaaggccatacacatgaaaactgctggtccattacaatctttgccgatcccaacatggaaatgggaagacatcggtatggactttatcgtgggattacccatgactgcanaagggtatgattctanttgggttatcattgatcgacttac

SEQ ID NO: 24875 - DNA, 87 bp, Zea mays
  unsure (1)..(87): unsure at all n locations
ccccaccccccaaacagacatcgataatcaaaaaaaaaaaagaggaaaactgaacctgacccccaaaccnaaaacaaaaccacacac

SEQ ID NO: 24876 - DNA, 351 bp, Zea mays
agctgcactatcacatgttatcacatctattgatctgtttcaaagctttgtttgctagagaaatgcagcgcgtattacataactatcatgcattgtagcatctgacataattaaatgattgtgattacctctgcttcatgggccgcctagcattataaactgaaatccattgagccgctgggctccctaatctaaccttttttttaggtgtgtcatcttcttctagatctgcaaccaattttccacgtttttgtccaacctttgttcagaaacaaataaatattatcacagagaaatctaactatttatgaagagagggaattgttagttcagacctctagagccccatca

SEQ ID NO: 24877 - DNA, 456 bp, Zea mays
  unsure (1)..(456): unsure at all n locations
agcttaaccttgtaacgaggataagctgcctttattccaaaagtggatggtccttaagcctctttgaaatccttaggggaaattgcttgaaatgtttacaacatgccttcataagtgcataaactgtcatgagcatcacacttatactatgacacaatgcacttcacattccatataatatagatatgttctcattaacctaattatgtgcaattgtcatttaaggccaaaatatatgaccctctccatgcacatatttagggggagcaatctatgttatataaaattatgatcatgcttaatttgacatatccttttgatcatatctcttttatgtctataactaatgtgttttcaagtgtatttcaaaccaagtcatangtatattgaaagggaattggagtctttggcgaagacnangcttncactccactctactactcatccttcgtcgcc

SEQ ID NO: 24878 - DNA, 382 bp, Zea mays
gaaaatacgggccgattgttacagggggaactctaccatgttcataagcgtctatgaagcgccatattggctcaagcaagccccaaaagcatggtatgaatgcctaaaagatttccttattgctaatggcttcaaagtcggcaaggccgatcctactttgttcactaaaactcttgacaatgatctgtgtgtatgccaaatttatgttgatgacatcatatttgggtctactaacgaatctacatgtgaagaatttagtatgatcatgacacagaaattcgagatgtccatgatggcggagtcgaagtatgttctatgattccaagtcagcaactgcaagagggcaccttcattagccaaacgaagtacactcatgacattc

SEQ ID NO: 24879 - DNA, 456 bp, Zea mays
  unsure (1)..(456): unsure at all n locations
agctntatccaaaacccactgcaaaccaaattgtgatgcgatagcttcatctccataactcaaacgaggcgccctggtgcgaccaaaggtcatccccgatgccctatagatgaaggagggtagaagagacatagatgacatattttgtaggagagaagacaagtgtgccatcggtggtttttatagttcatgtgtataggaaatgagggtattgatgtaattatgtatgaaggtgtatgtcatcgtgtctctataaataggtgaacaatgcccatgcacaaacactctntggatctccaagagtttgacatgatcccaccttcctagagctctgactctaaagtctacaatttgtatcagccttcatataatatgcaggtgttacgaaggtaatcatgtaaagaaataggcataataagagaccgaaatatgcattcattgttcctctcgtatctc

SEQ ID NO: 24880 - DNA, 398 bp, Zea mays
ttacggacacttagaaactaagcttgacagcgcggagtagacttgctgcaaaaatctatgattcttcgtaaataatggtggagagacttatgcaaatttgtgcattccttattgtattttccctttgtccgcgtgcgatccgctttggtgttgacgaaatcttatttttgagccgtatgcgaaaaacaccttccctgtttttcgtacacaacgaagcatgaaaatttcctctgtctccgaagttttttcctcataaccgaagcatctgccttgtttgtatgatatgataatgatactatatatgtctaaatgaatggttatgaatgcaaatgtcatgatgtaatgtatcgcgcaaatgaatatgcgaatgtatattcgataccataatcatatgcttc

SEQ ID NO: 24881 - DNA, 344 bp, Zea mays
aagtgggagttcattatggaattctgaaattcagaattctgaatttcaaatcttcagccaaagatcaagcgtgttaccttgatccctaactcaaatcctattggccccattgacaaaaacgtgcataactaacctctctgtcttgtgccaaaagatggcattgggacgcgtgcctcggacacgtcaaaccagagatcttctccctatgtgcggtagtgagacaaaccagatttctttcctctctatcttcttatccactcaaccaaacctgctaacctgcacacacaaactacaaatggacctgagaggaagagatctctcaatgggaacatgtccataatctc

SEQ ID NO: 24882 - DNA, 440 bp, Zea mays
  unsure (1)..(440): unsure at all n locations
ttcatgagaacatgagcacgaaattgatttttattacggtttatcaccctcagactgatggacagattgaaaggacaaatcatgttttggaagatatgttgagagcttgtgcccttcagcatggaggaatttgggataaaagactaccatatgttgagttctcatataataatagctatcatgccagtctgaagatgtcaccttttgaagctttatatgggaggaagtgcatgactcctctatattgggatcagactggagaaagacagttctttgggcctgaactaattgaagaagcataagaacaagtccgtataattcgagagaatttgagggtggctcanaccaggcaaaagatctatgctgataataggaggagaccactggaatttgaggaanggagatatgtgtacctcaaggtgtcaccactttgtggaatg

SEQ ID NO: 24883 - DNA, 401 bp, Zea mays
  unsure (1)..(401): unsure at all n locations
agctntaccctgtagtctggactataagttggttacggtaggtgtgctttatgcagttggaccatttccagcatttgcgtaatgaggactctatggagaagcctcgtagtgagaccctggccattcacctcggaagtgaatacgggtctagctaacccgggctggaagggaatcacgactcatgggtaaagatgcgccacctctgcagagtgtaaaactgatatatcagccgtgctcacggttatgagcggcctggactcctcacatgataattgaacttgaagatgaaaataaatcgagatccgatgatctgccaatggtttgcttaagtgagttcacttaagtgtttttgatatactcttgtacctttgtttaaagggaatacttgggattcacactta

SEQ ID NO: 24884 - DNA, 380 bp, Zea mays
  unsure (1)..(380): unsure at all n locations
tatctcggcgtgctgccgcattatggtttatggaagtatctgtatcactgccgtcctgagatggccggtgggcaacattaattggttggaggtgccagtttggaaatgcgtcgtgggcggaagaccgagtatctcgagatacccctcaaagacagcattaaaggttggcgtctggagtggtttatagttgacaataattgaaattctctcccctcccggtcaggatgacagccagacgttcgtactccgagttggactgagtctcccacggatcaagatgtggncgacgcatgcgtgttgcttactgaagtcgggttactgaaagagagatgtctgactgccgaagctgtggtcacagattgtgttttcaataacattca

SEQ ID NO: 24885 - DNA, 391 bp, Zea mays
  unsure (1)..(391): unsure at all n locations
agcttgacaatagatgagttgtttcatacatatatgctttattgaaaatctaccaagctcatattaatattgaatggtgcaacaaaactgaaagggaaatatgcttacaccttttcctaattgatttgagggntgaattgcccaacacaaataattggactaactagtttgctctagattatgagttgtacaggtgccaaaggttcactacaaaccaataaaaggaccgagaaaggattcaaatatagagagctaaagtcagccgaagtgtgccctggtctggcgcaccggactgtccggtgtgccaccggacagtgtccggtgcatcaccggacagtgtccggtgcaccagggactccaactccgaactgctcaccttctgaaattctgg

SEQ ID NO: 24886 - DNA, 245 bp, Zea mays
tctaaacataattccatctttcttcactctctatcctaatgataaccctgtgctacaccctctgtaatcaaagcttttaacaaatgttttcataacactctttcttccatcacaatggaatccatctggtatctgtacagcacatgggctaattggatgaaatggatcaaataacatatgcaacttcttgctgtgatctatgttccacacccataaatgggaacaactgtatatacgaaccaatt

SEQ ID NO: 24887 - DNA, 401 bp, Zea mays
atcctgcacacataactcttttgtataccgttgatcatattctctttatatgcgatgactaatgcgttttcaagattatttcaaaccaagtcataagtatattgaaagggaattggattcttccgcgaaaataaaagctttcactccggaactcatacttctccaccactccgaacaactttctcttctttgggggagaaatgaacatcaacgaaaatgacttcatccttgtgggagagagtgaaagctccaacgcgaaaggacttcctcgtttgtataatcctaactcacttattatgaccaacagggaagatgcacttcagggctctaatgattccgtttgggatcatgccacaggggaaagtttaccccaactaagacccccccaccaataaaacaac

SEQ ID NO: 24888 - DNA, 451 bp, Zea mays
tgttgaaacatagagacataatgtgtttgacatggcttatttgcttctcaaattggtattgcttttgtcggtggcgacagcaagtgtggaaagggcattgtctgcaatgagttcggtgaagactaaatcgaacaacaagatgtgtgatagtcttttggatgattgtcttgttacatacatcgagagggatattttcttccaattgaatgaagaagatataattgaaactcttatggcgttgatgaaatacaggccagataaatagtattattgcaatctttatgttgaatgtatgcaattttcatgcttatttgctgagtgtcaaactttatatctatatatcaaattgtttaccaaatttactatgatattatatgtatattagatagaattttacataaaaattttgttgtacacatgctatataattattctatgtccgccactgtct

SEQ ID NO: 24889 - DNA, 441 bp, Zea mays
  unsure (1)..(441): unsure at all n locations
agcttattttttctggcattntggtgcaataacatgactttgtactaatatttatccactaatgcttattgggtattttactgtgattttctaaagttcttggcaaatgggtgctttctactaccactattcttgaaaaatgtcaaacaacagatttctaatttttcctatcttttttttgtgcaagagcaatcattctagaatttggcaactttttgcttaagggaaagggtggtaggaatttttggattaaatggcctttttcatggggtaggggccatgggtgttaccttacatttttaagtaagcttcatatttttctctcgtggtcatcttcatcaatagttgggtaaaaatttatttgcctactgctgcacacattttggcttccttatgatttaattagaacatgggccacaatcaagtttgaactattcaacc

SEQ ID NO: 24890 - DNA, 422 bp, Zea mays
agcttttagctcttcgttagaacaatactttcctaagaagaaccaccatttcatctaagtatgaacattatcctgaaaagggttaactgggtatgaagcaaggttatggattaaacatttctttatttaccctttttgtacctttacatggaaaatctcttgtgttgtgcttgatcctcgatcttgaccttttcttgtcatgatggcgacatctaaaccaagatatcaatcgaaagtatggtatcttgcgaaggacaccaaatgaacattatgatcttgatatatagattcttgaagtcacttaaatcataagcttatgataagtaccacattatctttcacaagagaaaacctatccactagcgatccttttagaccaatcatgtttatatattaagcaatcacccatgggtatactatac

SEQ ID NO: 24891 - DNA, 339 bp, Zea mays
tgcgactgggataaaacgagcatcccacatactatctacaaataagtatggtcgaggtagagtactatgcctttttatcacacgacttagctaaacctgtgtgaactccctaccaagatgaacatctgcaacacttagaggttgcatgcggatgagataagtaatgctattgcaacaggaacttctgaactcatcatataatataatatgacccatttaccaacctagtaagatatgcgaagcctgagtaccacgttcgaataatcatgagacatatgcttgatgtgatgtgcgacacattacatgatgatcatccgcttattgatgtgatccatgatg

SEQ ID NO: 24892 - DNA, 387 bp, Zea mays
  unsure (1)..(387): unsure at all n locations
tagcttgctattaattaatccctaataactaaaatatatgtgtaagaacataagaaccataagaaaatcaacaagcctaacctattntatgagtaaaagaggatataccttcaaactattataagcaagggtgtctaccagttcatccttcgacatcgcagataaaccaagctctatcttcggtaatcccatgttctttgccatttcttggcaaacaaatatcttcttgttgtccggtaagcaatataaaaaatcatcttcgtcagtaccactgtatactaaggatcctacgggatactttaaatccttggcatattgcctagcttcggcaatttgctcctccgttatgtatttccctacagcgcgacgcactataaatataattct

SEQ ID NO: 24893 - DNA, 121 bp, Zea mays
atctggaaactttgacaatgatatagaataacgtggaaagtgacatccttgaatatatcagctcttaccgatatattgctttgtgacaaactcttttgaccaaggaaacccttcctctttg

SEQ ID NO: 24894 - DNA, 453 bp, Zea mays
  unsure (1)..(453): unsure at all n locations
agcttcacatctctagactaactcggctgtgtcgttctttgccgttggccattataagccagacctgaagaccttcccaaccagagtcctagatgctgcgtgtatcccgcattgtccagcgtggacctcatctagaagttgcttcccagtagccgaaagaatgcatttcatgaggactcctgtcgtgccccttctgtatagtgtttccctaatgagagtgtagtgagctgactgccttgcaatgcgctctgctacattnttctcatccggctcttcctcattatttatgtatttaatgattgggtccctccagtcatcagaatctgactctggttggctcaaaatattgcactcttctgcccgatctaatgagatgctcgggtgcagtacttcttggacgaagactccaagcgggacctgagtccaactggatcctagctttgacaatgcatc

SEQ ID NO: 24895 - DNA, 396 bp, Zea mays
cccttttgtgtcaaatccgcctgtgactgatagcatattgtgccttagagtgcgaccctctactgaagaagtcagtactttggttgcttcgctcggggagattcctgatgatgaacggcaggtttattttgaagtgcctctgaaccctagtgatgccgacataaatgacatgcttgatctgttagctgaggattcatcccatgctgctcctgatggtacgttggcagtggtgccccttccagaggttgatacaactttggatgtcccgaaacctgtcagtactcgcccgaggcgccctatccgaactagtcagtccgagccttctgctgatgagcaaaagaagaatagaagacgcctccggcgagtatccagctttgatgatgatgccggtacctt

SEQ ID NO: 24896 - DNA, 420 bp, Zea mays
  unsure (1)..(420): unsure at all n locations
cttatgacatattacacatacgggtatgtcttttngctattatatntatgatactttctggattgtgtcaaatgaacacaggaatcacaattacaccaggaaatatttgtatcttatggtcttctactctctaccagatgaatcatcatctccgacatccaccgttcgttttttcgacgttgatgtctcattccattgcgaggctgcaactatgattttgttccttgaaccaggaggccgtcctcgcttacgtccagataggttagccaatcgaaccctattatcctcgacagttaaacacgtacggctgttgtgaccatcatgtatgccacatttctggcatatcctgctcatcttcttagctcctttcacacccaattttaaaacttgttgctcactactgttgattgttcttccctt

SEQ ID NO: 24897 - DNA, 448 bp, Zea mays
  unsure (1)..(448): unsure at all n locations
atattattcaactaaagtaagaagaagttgatattataccaaggtatgaaaacttcctatccttcagttgtttaagtattctatccttagtgggatgtaccataatataggttaaattccttgcaatataaaatgttcaatagtgcatataactttgacatcaacaaaatgtgtgcactaatttaaaggaatntagtctatccttttgggtttcaataatgatgattcatttgtcatccacatataaggatcatcatttgtgaaaccctctcttgtgtttctaatgctctctnttctaagtgtttcaacaaggtcctcccaagttctttgaagatgaattcaaaatctataaatataagaagtctggttgtatcaatcattgaatttcaattgattttatatcaagtatgatcgaatcaagaatagatgaaagaagtcatgatcactt

SEQ ID NO: 24898 - DNA, 405 bp, Zea mays
ctgcagcttcttaatgctctattatatgaaacattctcctatactgaacaggaccaccgaccgtagcctcatatggaagatgtattaagagatgctgcctaagattgaagaaaccccgcggaaatattgtttccaatttgcacaaaagcaccggtgcctctttcttcaactgttccatcacatatcttctgatgtttttagcacacaactgtctgtaaaatagctaacttcagcttacgttttccacacagcttctgaaatgtacccacgaaacattacaggcatgagcctctccataattatgtggaatgcatggctcttcaatccattcatcttcattgtcttcaagttcacagatcttctacaaccaacggcataaccattcggggaatgaatatccttcat

SEQ ID NO: 24899 - DNA, 473 bp, Zea mays
  unsure (1)..(473): unsure at all n locations
acaacacacattgacatcttacataaaatttctgagatcatgaatatntagttcattcctcaacattaaaaagcgggtcttatcaagtggcttattgaaaatatccgctaattgatcttccgacctcactccttctaaaatgatatctcctttagcaacatgatctctaaggaagtgatgatggatatcaatgtgcttggtgcgagagtgttgtacaggattattagcaattttaacagcactctcattatcacacaataaatgtaccttttctagaactacgccatagtctagaagagtttgtttcatatataaaatttgtgtgcaacaagcatccgcggcaatgtattccgcttctgcggttgacaaggcaacactattntgctttttggatgtccatgaaactagtgatctaccaagcagatggcatccaccatatgtacttttcctatcaattttgcaaccggcataat

SEQ ID NO: 24900 - DNA, 428 bp, Zea mays
agcttaacgacgatgagtgtgtctctcagctagaattgaaggagataatgcgcgcgatgactgaagctttcaaaaaataatatgactctgcggcgacatcctatgagcatcttgatcgacgagttgcggaacttgttacacacatggacgtactggagactcgtcccccaccacaagctccagccccagctgcttgaggaggacaatgacgatgatgacagagatgttgatgcatcgctgcgacgacgcctcacacgtaatcgacaaggtatgtgaagtaatggtagagatcgtcattatattcatgaaatagaccatgatccatatgataatattaagttctctattccaccgttcattggttcttgttggggactttgtctcaagtgctatgagtttagaacaaggcaacatagaaaatgttaatc

SEQ ID NO: 24901 - DNA, 457 bp, Zea mays
  unsure (1)..(457): unsure at all n locations
cctgctgcatgcaagcttctaatgtagaacacattntangacttacaaatgttcattctgagaaagacaggatttgtagcgcatgccaagcacgaaagcaagttggctctcatcatccacataagaacataatgacgaccgacaggccactggagctcctgcacatggatctattcggcccgatcgcttacataagcatcggcgggagtaagtactgtctagttattgtggatgattattctcgcttcacttgggtattctttctacaggaaaaatctcaaacccaagagaccttaaagggattcttgagacgggctcaaaatgagttcggcttaaggatcaagataattataagcgacaacgggacggagttcaagaactctcaaatcgaaagctntcttgatgaagagggcatcaagcatgagttctcttctccctacactccacaacaaaatgg

SEQ ID NO: 24902 - DNA, 270 bp, Zea mays
  unsure (1)..(270): unsure at all n locations
ctcagctcttgtgatgacacatgtgctccttatatgattctcttgacatgacactgcaattcttcctatcccttaacatactgcatcgtatatatntacgtgcttcctgtaactggattacatcagaagtttgtgattattgaagagtgggtgtctatcggtgattcattaatcatcgcaggacttggtcaagttagcaacatctctgccatgccattaacagcacaccgcatgtacatgattgcatatataaatgattcacttgatcat

SEQ ID NO: 24903 - DNA, 401 bp, Zea mays
  unsure (1)..(401): unsure at all n locations
agcttcgacggctgggcgcgcttggacnaatatgcgatgcaacaccgtgagcagggaggagctctagtgcgccagggagggagcgtctcggccaaccaaataaacagggacgcgggcggccgatcgccgaggaagagactgagctggggctgcacgcacgacgagcttggagcatgacgagctgcgcgtgggacaaaaaaacatggcgcgcgcatggagctctgtggcgagggagctataggcggctggggcagatgaagaagagacgcgacagagaggaacggatggagccggacgcgccatggggaagcatagaatgccggcagcgtgcggtagagagagagaacggagggacgcgacgctgggagagatggctggcgagtatggaactgctgggcgcg

SEQ ID NO: 24904 - DNA, 477 bp, Zea mays
ttcttaacttgtggactagttgctgtgaccttcttatgctctttaccaattgatgcaattcttgaagatctcttgtgactgtgggttatgacccacacacgctttcgctgcgccactccgattcttgttggttgatgttgatcggattgtcttcattggggttagcgactaacccccttaacacgatcattgatacgcactcggtgaagatgttgtcgactctgatcttgactgatttagagaggttgtatgatgccaattcggacatgtgcatgatggaatggtacagatagaaaaggcaagtataggtggattaaagagagataagggacaacacccaactagctaactctatggtactcagctagtaaacagatgtcattgcagaccaatggccacaacacatcaacactcatcacatagaagcaaatcagtcatcacagaatgacatattgcacaagcatacaacaacataca

SEQ ID NO: 24905 - DNA, 446 bp, Zea mays
  unsure (1)..(446): unsure at all n locations
agctnggatcacgaccacttcggataagctcgtcggagttagccacttcgcgaccgtgcgccacgtgcctcggtggtttaccacgtcgcagtagttccccttgtgcatatccggtgatcgccgatgaccccgccacggtgacagccacctatcccttgcaacagtattcttttcactctccgaccgccaccgcgccatccgaaattcaccggccaccgcccttggagactataaattgagggaggggatagttgcgccatgtaatcgtcaagctatagcacccactctcatctccactcgctcaccgtagctccgcaattcgggctttcccccaaattggtctccgccaccgtaaaacaccacttccccgtggactgtccgttctggaaggcaccatccaatttgcgcgttgttctcatgtacctatatgctggtgatagctctca

SEQ ID NO: 24906 - DNA, 411 bp, Zea mays
tacccatgacgaggcatgtggccagtttaagggtcctctgttagcatgaccacatcgacatggtccttaagcgactcagatggagacactacaccgagacttccttctcgtgcaagtcacccgctcggtctcatctttatcatttataacccacagtttggtacctgtcagatgtacatcttttccgatgttgaacccatcatgtccatgatggattcaccatcaagtcttctatttgaaaacttcccatcccatatgaagcatcattcttggttaaaacacaacattttggtttctaatgcaagactaagcatcagaaaacttttaaataaaacatgtatcaaggaatggtaatcagttgcaaggaacgaaatgcaacaattgtttatcactcaactactatcacctaat

SEQ ID NO: 24907 - DNA, 443 bp, Zea mays
  unsure (1)..(443): unsure at all n locations
agcttcaatgggagaaggaggatcatcggtgctggaatcatcattgagaggaggagcatcatgaaaggttggtagagaaacaaagaagaatgacatatgtataaaaacaaaggttgtggggtaaggcaacaaggagaggtagaaacatccttctatcgacgatgcactagagtatggtcgtctaaaaatatctcccctacactggcaaaggtggcaggaagttgtgaagattggacatggagcaagttggtgaaggcttaaaagtttgaactccacatgggttccatattaaaattgagattgtgatgctataatatgaaggaagatgaacaaaacatagaggggtgtgaataaacctaagcatttcccctccatttatggctagattccatgaatttntaaaatggatctttntagatttcacatgattcacaataactgac

SEQ ID NO: 24908 - DNA, 463 bp, Zea mays
  unsure (1)..(463): unsure at all n locations
tctngcaatatgtgaagtgagacctcaagtttatgatgatgatgtaagaactctgtggatgaccaatgaggtttttgatgtgggcgcaaatgtggtgggtgattaatcctccacccaataaaacccatcaacctcaagtcatccaagtcttgaagaaggtcatcaaccccaaatgatgccaaccgtggttgaagatgaacatgatagtgttgatggtgaagtgcctcttgatcaagtggatgatgaggaggagcaaattaaaagacagccatcagtgccccatcctcgagtccatcataccattcaaagagatcatccgatggacaaaatcctgtgtagcatcatgagaggggtaacaactcgatcccgtttacatattttgtgaatttactcgtgtgctcctctcttgaccacttaagttgaagaacgttggggatcagattggaaatgcatgcagagagtg

SEQ ID NO: 24909 - DNA, 421 bp, Zea mays
  unsure (1)..(421): unsure at all n locations
agctntcttggcacttctcgtcccacttatattctcttcccttctccagaagcgaggtcataggcttagcaatcttagagaatccttcaataaatctccgatagtatcctacaagtcccaagaaactccagacctcggtaactgtagtgggtatgctccacgccataatctccttgactttagcaggatccactgatattcctccattagaaatgatatgtccaaggaatggcaccttgtcaatctagaactcgcatttgctaaacttggcgtagaggtgattatctcttagcttatgttgcaccaacctcagatgttcctcatgatcactatcactcttggaataaataatgatatcgtcgataacaccacgacgaatctgtccagatactncatatataccttattcatcagattcata

SEQ ID NO: 24910 - DNA, 416 bp, Zea mays
agcttccaagtgcggttttaaccctctttaatcttcttcacacgcattaagcgattatcttatcgaggttgttcttgtagcttggtgcaatccaaaatagattaagcacatggttcacttagctcatgaacaaactcatatgctaccactagtttcaatcaaccaaaataaccaatattggtagaacatgaatttaaatatttcatttaatacacatgatactattaagtatatactgtatgcactaaccacatactattaggggatgatatgatcatgcacatcacaatggtacctttgctatgttggagtagaggatagtcaagaatctttcgatttagctctccaatagcaatgtgaagtccaattgaatagcttggtgaagaccaactatcaataaaaaatccattcttcat

SEQ ID NO: 24911 - DNA, 334 bp, Zea mays
  unsure (1)..(334): unsure at all n locations
tcttggaggccatcaagacagcatacagtaccttctccaactctgngaaatatttctttgataaactaaggagctcagatacaaaatatattggggcctacctcttaacttggccttcaagcttctcttgaacaagtgctgcactcaccgctgagtgcgaatctgtcacatataatatacaaatgagcccctggcgtatgtgggctaatgttgttagatctatcaaatactgtttcaactcttcaaaagccttctgctggattggtccccattgaaagacttctggtgacttcaaaactcaaagaatggtaagttctctctgctgtctggatat

SEQ ID NO: 24912 - DNA, 391 bp, Zea mays
agcttcagctccatctatgttatggattgctcttgagtcagaccaattgccttcggcgcttctggcagcttcctgacttccatgaatagcgatgggtccttgatccgaaggtatcttcatgccaagataagcaggatgaagaattgcttcgaaagcattgagggtgccacgaccaataattgcattgtaagggtattccatgtcaacaatgccaaacacaacttgctcagttctagtattgttgatgaacccgaaagtcactgacatggtaatcttgcccagtgctacaatttgtcttcctccgaagccacagagaggatgggtagcatcatgaatcttatcttctggctcttgcatttgtctgaaagccttatcaaatatgatgtcagct

SEQ ID NO: 24913 - DNA, 428 bp, Zea mays
agtagcatatgcttataatattcgattttgctcaagcctagctacaggtgcatatgtttcaccaaaatccataccttctacttgtgaataccccttggccacgagtcgagctttgttccttgtcaccacaccatgctcttcttgcttgttgcagatgacccacttggttcctacaacattttgattatgacgtggaaccaaatgccatacctcgttcctcgtgaagttgttgagctcctcttgcatcgccatcacccaatccgaatcttgtagtgcttactctaccctgtgtggctcaatagatgaaacataagagtaatgctcacaataatgtgcaacacgagatcgagtggttacacccttatgaatgtcgtcgaagatggtgtcaactgagtgatctcgttggattgcttggtggactcttgagt

SEQ ID NO: 24914 - DNA, 432 bp, Zea mays
  unsure (1)..(432): unsure at all n locations
agcttgagatggggacaaccgtancatgcacaaaaccccttcaaaagaataccaagctttccaagaagggcatgagcaaaattcatggtaagaaaattaatgctcatattattngctctaacaatgtacctatgtgcttcaacaaagaaagatcaaagagaagcgataggaggtgttatggatgcaaggagaagggtcatgaaattgattcatgcccccacatgaagaatcaaaaccttgcacgatcaagaaagatgaccataaaaaaggatgaaagcaaagggcaaatgcattgcaaggacaagcaccgcatttgtacaattgtcgtgaaaagggtcatctattcaaagtttgtccaaagggtaaaaatcctaagcctaacttagcaatacattcaaatatgcttatgagacccaatttgactcttgtgct

SEQ ID NO: 24915 - DNA, 105 bp, Zea mays
catataaaaatttaaaaaaaaaaataaaaagggtgaactagcatccaaaccgaaaaaaatacccgaaacaactacgcgggacattgcctcaagaaacaaaaacgg

SEQ ID NO: 24916 - DNA, 399 bp, Zea mays
  unsure (1)..(399): unsure at all n locations
agcttggctcaattatagcacggtttaatttgtcttcatgcctaactgacttctgttcgaggtttcttgaattttatcgagttttatgagtgatgacaacataaactacaaaaaaaaaaaacaacgcgtatgttagtatagacatgttgcatgtattgataaaagagaaagaatangaaattcttagcgaataagatcgaaacccatgaacagttaccaaactcatcttagagtggaagcttacagagaatttggactagagctgcagctgctttattagcaagcgacaaagagcaacaccttgttcctccgtcgtcaccgccaccggcttccttgcctcgctcctggtcggcctccatcgccatggtgagcctatacatgtagtccatacacattcct

SEQ ID NO: 24917 - DNA, 412 bp, Zea mays
  unsure (1)..(412): unsure at all n locations
agctttggcattattttcaagcttacaatataattgttccttcttcacaaccgttgaaggatattatgagaaaccgagaagctactggaaggattggaaaatgggctgcagagctcaatgaattttgtattgattatgtgcatagatcttcgattcagtcccaagcgttggcatacttcattgctgactggacgccaggggctcangaggaagaaacgaataaagatgccgaagcatggacagtgttttgcgatggatcttggggaaccttcggagcaggagcagctgctgtgttggtttcaccttccaaagttaaaacttgttatgcagcaagacttgatttcagttgcacaaacaatattgctgaatacaaagctctgctcttgggtcttcggaaagtaaagacaatggg

SEQ ID NO: 24918 - DNA, 412 bp, Zea mays
  unsure (1)..(412): unsure at all n locations
agcttgacattgtctccctgttggaagtcaatgccatccttaatgctagggcgtctcccattataaagcatgctacgagcaaatttaattttttcattctctagttcatgctcggcaatcttagcatctagattagctatatgatcatattgttgtttaatcatagcaatgtgatcatgaatagcatcaacattaatgtctctacatctagtacaaatagtaacatgatcaacactagatgtagagggtttgcaaacatttaattcatctatcttagattttagcatggcattcttatctctaagataggaaatagaagcattgcaaacatttaaatccttagccttagcaattaatttatcattctcaatcttaaggctagaaatngcaacattcaatttgtcaatcttag

SEQ ID NO: 24919 - DNA, 458 bp, Zea mays
tgaccccttttatcgaggattcagcccaaccattctgggtatggacatatggaacagaatgttacatttgaatacccaaagccatacaataattattgaaggcttttgaggaaaattcagctgcattgtacattcggattgattgaattccattttcacggtaatttgtctttaatttgataatttgagacattatcttgacaaatgcatggttgtgaccatcgtgtaaatgcgtcaattaaaaccataaaatacctgaaaggtccagatgttggctctattggaccacaaatgtctccttgaattctttcaagaaactttagtggttcagcttggattttaagatatgatggtcttaaaatcaatttccccgtagcacatgcagtgcatattaattcagaatttttgggaaattttgcatcaatcaacttatgaccaataaaattgttggtaatttt

SEQ ID NO: 24920 - DNA, 357 bp, Zea mays
  unsure (1)..(357): unsure at all n locations
agcttgaatgaccgctttggcagaagagcttctgaacgtgaagacttgttcggtccacggagtcgctttatccgaacgcgagttacttatcgcagaaggtgatgagtgaggtatccgtatcccggaggcgtaggagtccctcggctcggtcagccttggctgcttacgtgtactccgtcgtttccaggatccgcttttcgaagtagtcaaaaagcacgaaaggaattctgctgaaaagagatcttttttttgaggaaaaattcgacgcagagggggtctccccccttttagcccccgagggagggtcnggcctttgccaggagaggacgatccttctagaagactaaacctcttgcg

SEQ ID NO: 24921 - DNA, 454 bp, Zea mays
  unsure (1)..(454): unsure at all n locations
tctaaagggagaacacattntgggactaacaaatgttcattntgagaaatacaaggcttgtagcgcatgtcaggcagggaagcaagttggtgttcatcatccacacaagaacattatgatgactgacaggccactcgagctcctacatatggatctattcagcccgatagcttacataagcatcggcgggagtaagtactgtctagttattgtggatgactattctcgcttcacttgggtgttctttttgcaggaaaaatctcatacccaagagaccttagagggattcttgagacgggctcaaaatgagttccgcttaaggatcaagaaaataagaagcgacaatgggacggagttcaagaactcacaaatcgaaggattccttgaggaggagggcatcaagcatgagttctcttctccctacacgccacaacanaatggtgtaatggagagg

SEQ ID NO: 24922 - DNA, 405 bp, Zea mays
atcttgttttccctactacgagcaccccggtgcaagataatataagcctcatccccctcttgtgtttcatcttgcatcaaccaatctgggcagggacacgcaacatcaaattcactagtcggttgagggtcctcgcgggtccaaaacgccgacagcatgttaacttaaatactttatatttatttaatattcgtttagtataaatgcgtcacctatttattatttctcacctgtcgcgcgtaatcagcgcactaagtcacgtgcggtcgtgtttgttaacacgttacgtatttcgtctcgctccgctaatttctcttgcttagagtcgctgatgttatttaaattacttatcttactaataattgctagtgtggtcagctcattaaaacttggtgatagctctat

SEQ ID NO: 24923 - DNA, 363 bp, Zea mays
cgagctctgatctggtgccgcgaatcaatggagacggatgatatctgtcgggactcactgcccctacatgccgtgtgtctaagcttaccttgccaggatgacaacccgattcaacccgtctgcttctcgcagataatgagactgcctgagccattgtactgcattgcggaatggacaggcagattgactaattcagaaaagacgttgaattgcaaataatgctcgctaccatgtatgagccgatagttgacgctttatccttaagagagtcacacttcactgcgattgagtcaacatctagataagaaactcatctagtgcatatggtgaccgaaccccacaaccacacaactgattgtctag

SEQ ID NO: 24924 - DNA, 430 bp, Zea mays
  unsure (1)..(430): unsure at all n locations
tatgaagattcttcatcccaacatgggttagtcggcggtgtcagagccaacccatgttagtcttagcaattaagcaagtgtcgagttcagctctatcaaaatctaccaagtatagctgaccctctaacactcccttaaatgctactgaatcatcacttcttctaaagacagtgacacctatatcagtaaatagacagttgtagaccatttgacataattgggaaacggaaagcaaattgtaatctaaagaatctacaagaaaaacattggaaatagagtggtcaggagatatagcaattttacccaatcctttgaccaaaccttgatttccatccccgaatgtgatagctcgntggggatcttggntcttctcgtaagaggagagcatcttcttcttccctgtcatgtggtttgtgcacccgctatcgat

SEQ ID NO: 24925 - DNA, 418 bp, Zea mays
cgagctctgatctcgtgctccgaatcaatcgagacggatgcattctgtcttgacgcagatcccctccgtgtcgagtgtgtaggtctaccatgctcggatgactaagtcggttaccatcgtctgcttgtagccgttaatgagagtgatcgctccatactgctacagtcagtaacaagagcaaatatgaagactgatataacacgtgactgctgatgatagcccgcaccatacatgagtagataggtcattttataccgtagcagacgcaaacgttgataatgaccaggataagggggatgagttacaatactgatctcgtgcttttgcgaagcgaaccccacagacgagcagatgcatgtctagaggtagaggactagactgctcacagcctgtcactctagattagtattactatact

SEQ ID NO: 24926 - DNA, 457 bp, Zea mays
  unsure (1)..(457): unsure at all n locations
taatgcttatcaatccatgcctgatctgttggtctatacattgaaatttgncgatggtcttaaggatgatattaaagtcgttgtcatgcttcaaagaccacaagatttggatactgctgttgttcttgctcaattgcaggaggaggcaaataccatgctgaaaaagagggattatcgctggtcagatgcttcaactattaccaggcctactcgacaccccatggttcagcaacagaacactaagaatgtcagacagctgagtttgggcaagcctgaggataaaacaatgggtaacaagagttcttctacaaaggacagaattgcttcactgtatgcatatcgtaaagcgaaaggtctttgntataaatgtnggttacagtattccatagatcataagtgtgctgaaacagatcaattacatgtggtggaggagttgtggcagatggcccaagtaact

SEQ ID NO: 24927 - DNA, 454 bp, Zea mays
tatgaagattcttcatcccaacgtgggctagtcggcgatgccagatccaacccatgttagtcttagcaattaagcaagtgtcgagttcagctctatcaaaatctaccaagtacagctgaccctctaacactcccttaaatgctattgaatcatcacttcttctaaagacagtgacacctacatcagtgaatagacagctgtagcccatttgacataattgggatacggaaagcaaattgtaatctaatgaatcaacaagaaaaacatttgaaatggaatggtcacgagatatagcaattttacccaaacctttgaccaaaccttgatttccatccccgaatgatatcgttctttggggatcttggttcttctcatatgaggagaacatattcttcctcccggtcatggtggttgtgcacccgctatcgagttccaacttgagccctcggatgca

SEQ ID NO: 24928 - DNA, 405 bp, Zea mays
  unsure (1)..(405): unsure at all n locations
agcttattctttttatcagtgaagtatttaaccatgtctctggtggtggtttgcctagagacaggcacaaatttaagattatgagcagttctaatgtagtgttcaaatgcagcattttcacccaaactaataggaatttctagcctagcaagcaatcgaaccaattcattacgtgcaaccataggacagtactcccagttacgcatactaccatcaggattaaaagatatctgagactgagacatgcgggttttctcgcgcctcctgngacatctgtctctatgtcgggtcaggtggccagtgccaccactagagagagcagaatattgcttagagcaatgtatacacttagctgcaaacctaaccttcttaccgttcacgaatttgaaaagtttctcgaaatct

SEQ ID NO: 24929 - DNA, 385 bp, Zea mays
  unsure (1)..(385): unsure at all n locations
cacttctcaatatcaagatccttctcatcatgaagatctggtgccaaagaatcaggaacatatccaccatgaagatctggtaaaagacgatcaacatgaaagatccgaggctcctgtttgtgtaatggcatctccttgtctattttcatcaaagacaacagctctacatattgcacttctgatgcagtgacacgatttgcaactctgagtttcttgataccaatatctgcttccatactaaatgacctcagactgtcaacaagaccttgatgagtaatccggaaagcaccgaanatgcccaactgtgtcaaaaaataaataaagagacaagagggcagtaagccaatggagaattggattgccaaaacttgtagcacacagtttc

SEQ ID NO: 24930 - DNA, 405 bp, Zea mays
  unsure (1)..(405): unsure at all n locations
agcttgagttntgagggccctatattgcataggaccagtgactttctcaatcaaggactttgcaacccaaatttgtctaggtctactcttgcttggtggacctaggaatgtagctttgacctttccatttgctactttttttagaacataatgagcattgaatgcaaatggtcttgagtgcttangcaagggagttggtggtttggctttgcagttgtgggcaaaatgaccttcttttccacactcaaagcatttgacacgcttatgagtttgctttggcttgtattgagttgcagctttcttttgcacaagagaattgtatacaataccactcttgttgtttttcatgacagtgttaatgagcaattcattttggaggtattggccctttgtgaacttttgcac

SEQ ID NO: 24931 - DNA, 372 bp, Zea mays
  unsure (1)..(372): unsure at all n locations
agcttcttaagggagagcacattntaggattaacaaatgtgcattttgagaaagacaggatttgtagcgcatgccaagcagggaagcaagttggagtccatcatccacacaagaacatcatgacgaccgacaggccgcttgagctactccacatggatctattcggcccgattgcttacataagcatcggcgggagtaagtattgtcttgtaatagtggatgattattctcgcttcacttgggtattctttttgcaggaaaaatctcaaacccaagagaccttaaagggattcttgagacgggctcaaaatgagttcggcttaaggatcaagaaaattagaagcgacaacgggacgcgagtcaagaactcac

SEQ ID NO: 24932 - DNA, 393 bp, Zea mays
tagaagatctataaaaccaagcaagtgttggtaggcaagattttaaaattgagcaagcagagcaggcagcaaaaagcgtgccaaatgagctcgtggtgtgctcttatttatacacctagtgcgttgcaaactggagggcccttcttgtcattgattgttgctattctagcaaagggaaggtgtttttttggacctttggcttatggccttcgtccatatcacaatctaaattcgttattctaacaaattaaccttgcgaggggctactgttgggggccttcgtcttccgaaggtcctcaaaaacatgatttaacaatgtttctggagtataatacatgaacaggtaccttcagactcggatcaaaaccacagtgtgaagaaagacaaagaata

SEQ ID NO: 24933 - DNA, 409 bp, Zea mays
  unsure (1)..(409): unsure at all n locations
agcttgggcttctttcaaattatgtataactcgntaaactttttcttccatttctttaaccatatcaggtctaaaaaaccacctttcccctcgttcagaccaattcaatggagtacgacaccgtcgtccatataaagcttcaaagggtgccatcttgatactttcttgataactattgttatatgaaaactctgccaatggtaaacattcatcccatttttgtgggaattccagaacacatgcccgcaacatgtcttcaagtatttggttcactctttcagtctgcccactggtttggggatgatatgctgaactgtgaagcaacttagcacccagggacttattcagtgcttcccaaaacttggatacaaattgcggtccacgatccgacactatggtctttggaact

SEQ ID NO: 24934 - DNA, 373 bp, Zea mays
  unsure (1)..(373): unsure at all n locations
actcagcttataatgactgaatctacacatcttatctattggctnttagtcaaatccttccctgcaaatagtagtacctcttagcttttagtaaaatcctttacattatctaatacacacagtatgcttgttcttatctatcttgcaagtagttcaacatgagcgaactgcttatgagagaagacgggataaacaagtggaggagaatataaagaagatgcaagatttgggtctgaacaaatatacttctgttctaaataattctgtctcaccatctgcatcaacaaaggggaaacatgcagcacacaagataaataatagttcagattcggattcatatgtctctttctatctccttgacgatgatgatcaa

SEQ ID NO: 24935 - DNA, 392 bp, Zea mays
agcttatgttcgtttgcccgtctcacagccgtcggacataaccgtatgtccgacggcctcctatggcaccgtcggaaataagtaattttaaccggcgccccgagcccgcatcgtttgattctaccacgcgcagcccatgcagccaagccgctgccgccaccgtagacctctcgtcgccgtgactccgccgccgccgccgcaaggttgctccaccaccgcccaagcacagcacatgcccgacgacctcccctttcgccctgacgcgcagcccgagcacgacgccaccgaagccaccccgacgcagcccaacgccaccggagccgtcccgacgccaccgaagcctctgtccccatgctcgacgccaccggcgcccgccccgaccccgccggagc

SEQ ID NO: 24936 - DNA, 348 bp, Zea mays
  unsure (1)..(348): unsure at all n locations
ttgtgtggaattgggagaggatttgatcacttgggtgtgtctataattgaatgctagagctcttgtaagtagttgaaagatggaaaacttggatgacttgaatgtggggtggttaggggttttataaccccaaccaccaaactatccgtttggtggaggctgctgtcgcatggcgcanngaaaaaatactatgcctaaacatataaagtcatttggcccataaatattttgacttgaaagcttaacacctacttttgtactcatttgcaaaaaggacctttatgttgatttctatgctaagtatgcattcaccgttattggcccaactttgtggctgtgtaactttca

SEQ ID NO: 24937 - DNA, 282 bp, Zea mays
gcaggatcaccctggccggacttaagcctccatccacacgcgcgggtactcagctatcatgagagcgattgatccatgccttgtgcctgagtaacacctgagctgagtgcggagatgactgtaccatgtagattgctctgaagcgcgctgcataggccgaatacatcgcccactactagctttaacagatgcacacttggacctgactactccgaccatttgctgaaacaactcagacattggtgtggtcgccaagacctacagtacaacctctgcctgttt

SEQ ID NO: 24938 - DNA, 348 bp, Zea mays
  unsure (1)..(348): unsure at all n locations
agcttgtggcaccctcnggcgtcttgtcgcagccgaagtaccaagtctcccacttggaagcctcggggccgaacccttcgggcgtggtagcgtcgcagggactgctgataccgcgccgagtgtagtaaggccacgtcccgagcctcttctagctggttcaacaaatcttctcggttggtctggttgctttggtcgtcataagcctttgtcctcggggaaccgtattctaagtccgtgggtaggatggcctcggccccatagactagaaagaacggcgagaaactcgtggctcggctcggcgtcttcctcagactccaaaccaccgagggtagttcctttatccaccgc

SEQ ID NO: 24939 - DNA, 457 bp, Zea mays
acctataaaactcagcttggaggaatattgtggcctctgtcatcattctgggtagagtggattgatctgacatgccttgggtggattctccctccgaagcccttggtcatctcagagaacctgtaggcctcctcccttctttgatggaagtcattatcagcgcagatgtattcatccatcttttgaagcagcttctccaaagtctatggaggctttctagcaaaatactgggcagtaggtcctggacgaagccccttgatcatggcctcaatgacaatttcattgggcactgtaggcgcttgtgctctcagacgcaagaaccttcggacgtatgcctggagatactcctcgtgatcttgcgtgcattgaaacagagcctgagctgtgactggcttcgtctggaagccttggaagcttgtcaccagcatgtctttgagcttctgccatgaagtgatag

SEQ ID NO: 24940 - DNA, 420 bp, Zea mays
ctgcgagctctgttctggtgacgcgaatcaatcgagacggatgattgcgagcgtgacaagatgcccctacatgacatgagcttaggtgtaccttgcgaggcttaccaactcgatcttaatcgtctgcttctcgcagataatgagactgcttgatccatgctgcttcattgagtcactagcggtaacgtggagactggcgaaagatgactattgatataaagagtgacaccatgtttgatgagctaagtgcacatctccattagacgatcatgctaaaacttgagcagctagaacttgattgtagactcagctagtgcttttggcataccatgcccctgagacatacatctgcatgtctaaacgtagacgagtacactactcacatccggtaatgttagctgacgattaggatactcagtc

SEQ ID NO: 24941 - DNA, 462 bp, Zea mays
tgtgaagattctgtatcccaacatgggctagtcggcgatgctctatcctacccatattagtcttgacaattaagcaagtatcgagctcagctttgttaaaatcaactaagtatagctgaccctctaatactcccttaaaaactactgaatcatcacttcttctaaagacagtaacacctacatctgtaaatagacagttgtagcccattttgcataattgagaaactgaaagcaagttgtaatctaaagaatctacaagaaaaatattggaaatagaatggtcagatgagatagcaattttaccaagctctttgaccaaaccttgatttgcatccccgaatgtgatcgctctttgtggatcttcgttgttctcatatgaagagaacattcttttctcccctatcatgtggcttgtgcatgcgctatcaattatccaacttgagcccctagatgcataaacct

SEQ ID NO: 24942 - DNA, 393 bp, Zea mays
  unsure (1)..(393): unsure at all n locations
agctntgcttttgtactggtttggntgaaactgaggatttggtatagcaaagaccgtcaccatcccaatagagggctccagagaacactctaaaaggggagcatgtggtcaaccaccaagaatctagcagtgggcctagcttcgtaccatgatcaattcactctctctcgaatcttcagcatccattgcgcttctttcttgtgttgaccgaaaaaagctcggtatgattcaatacattctangaacctgnggcagtgaatcgatgaattggaggacagaccgcttttactagttattcttgcaggggtcttgggcaatcaagaccagccagtgactcaatgaggaagggagagtgggatagctacaagcgatccacggagtctttcgtaagac

SEQ ID NO: 24943 - DNA, 358 bp, Zea mays
  unsure (1)..(358): unsure at all n locations
atactcagcttcggtaggctaaacaatatggtatgatgcgtctctgtcttagtcattgctagaatgggcacgaactggtcattgtcatanggatgctatccatggagtagtagcatgattataatangcgtgacgtcaaactttctatttgaatagggaccaggtaatatatacattttgaaactagaaggtgtttccttagcttcaaagtctgggtcgaataaagagaaactccactggtaatgtgaaaagatccctacccgccttcatagaagataagacggaacaaacttcttctttgaaactaggctaaggcttgtattctttaaagtatctgtgttcattctttacctttctt

SEQ ID NO: 24944 - DNA, 349 bp, Zea mays
agcttgatggtctcggcgtagatgatgttgaggcagctgcccccgtccatcaggaccttggtgagcctgacattgccgacaacggggtcgacgacgagcgggtatttccccgggctcggcacatggtcggggtggtcggcccagtcgaaagtgatgggcttgtcggaccagtctaggtagactggcgccgccaccttcaccgagcagacctcccggcgctcttgcttgcggtgccgagccgaggtattcgccgcatgccctccatagatcatgaagtagtcgcggacctcggggaacccccctgctgggtgttcttcgttcttgtcgtcgtcgtgggccctgccaccct

SEQ ID NO: 24945 - DNA, 447 bp, Zea mays
  unsure (1)..(447): unsure at all n locations
tcgtcagaagccgcggagaagatggatcgaggaggattggtgcacttgagccatatccatggtcggtgttcccacactctcatgttctgatttgaagatgctatgtaagttgtcccatttcatatgaccgtgcctatcctgagatgtcgtgtgcttctgttagatccatttgcaaggatgaattaacttccgtctttaggacgatttaatttagctaatgttgtcatttgtctcccagatcagaggttagagtttggccatttttcagcttgccggatggnggcaaagtcatggtggcatgctacaaccatgtgtgtgggtacagacaaattatgtacataatctgaggttatgttgggctaattattatgctagctaatttagttgggtctaataagcggtctaaatttggtagcaaagtctccaaccagttgatagccggtcata

SEQ ID NO: 24946 - DNA, 344 bp, Zea mays
ggctgcaacttctccttgcacatcaaccttgacttacaaccgttccgattatctatctgcccggcacttgcttcaatagctgaagacaccgaaactgtgtacatgtcctattggcccatttatatctcccacagatatcatgctctccatctgtgctagccatcgcctgataatgcagctcgagaacttaataaaagctgctggcaaactactacaccgcctggatgacgagggcccagatatatacgctacgcctaccgatagcgatacgtagtggatgatgaaagtaccatccccacctgttgcactcctgtcgcataattccatgcacggggaatgtcacc

SEQ ID NO: 24947 - DNA, 473 bp, Zea mays
  unsure (1)..(473): unsure at all n locations
ctataaaactcagcttggaagattcttcattccaacatgggctagtcggcggtgtcatatccaacccatgttagtcttagcaattaagcatgtgtcgagttcagctctatcaaaatctactaagtataactgaccctctaacacacccttaaatgctattgaatcatcacttcttctaaagatagtgacacctacatcagtaaagagacagttgtagcccattttgcataattgagatacagaaagcaaattgtaatctaatgaatctacaagaaaaacattggaaatagaatggtcaggagatatagcaattntacccaatcctttgaccaaaccttgatttccatccccgaatgtgatagctcgttggggatcttggtgagttcatcaccctcgtgcgccgtcttgagcacgtcccaaacttacttggtgctttttagtccttgcaccttgttgtactcctccctacttag

SEQ ID NO: 24948 - DNA, 408 bp, Zea mays
agcttgatagcctggttagtaccataagataatagtatacgaattgactcaagcctagctacgggcgcataggtttcaccaaaatccaaaccttcgacttgggagtatcccttggccacaagacgggctttgttccttgtcaccacaccatgctcatcttgcttgttgcgaaaaacccacttggttcctacaacattttgattacgacgtgaaaccaaatgccatacctcattcctagtgaagttgttgagctcctcttgcattgccaccacccaatccgaatcttgtagtgcttcctctaccctgtgtggctcaatagaggagacaaaagagttatgctcacaaaaatgtgcaacacgagatctattggttaccctcttatgaatatcggcaaagaatgtatcgacc

SEQ ID NO: 24949 - DNA, 383 bp, Zea mays
actcagctgaagcctgggagtgcatagccaataggtacgatttgtttttatcctagctaccggggcatatgtttcaccgaaatccaaaccttcgacttgggagtatactttggccacaagtcatgctttgaatcttgtcaccacaccatgctcatcttgcttgttgcggaacacccatttggttcctacaacattttgattatgaccgggaactaaatgccatacctcattcctaatgaagatgatgagctccttttgcatcgccaccacccaatccgaatcttgaagtgcttcttctaccctgtgtggctcaatagacgaaacaaaagagttatgctcacaaatatgtgcaacacaagatctagtggttaccccttatgaat

SEQ ID NO: 24950 - DNA, 406 bp, Zea mays
  unsure (1)..(406): unsure at all n locations
agcttgttcaaaacatgagggcacagagcgacccatggtttgcagaatatttgttgcgcgtcggtggtggaactgaggaagcgaacaacgatggtgatgttcgtcttctagatgaggtatgtgtgccatatactggtaatgaccgcgaccttgatagactgatagatgacatttaccccaatctaaatgaaaacatgtctaacacaagctacatcacttcaagagcaatattgtctacacggaatgactgggtggatatgataaatatgaggatgatcgatcgtttccaaggggagcagatgatgtaccatagttttgacaccgcggtggatgatccctataactattacccatcnngagttctaaacacgctgactcctaatggactacccccgcacgttctgaa

SEQ ID NO: 24951 - DNA, 368 bp, Zea mays
cttcattcccacatgtgcttagcggcgatgtcacaaccaacccatgctagtcttagcaattaagcatgcatttagaccggccttcttttttgccaaatcaactaaatagaagttggcggctaatacccccttaaaagctaatgaaccatcacttcttctaaagacagacacatctacattaatgaatagacaattatatcccatattacataattgacttacggataacaaattatatccaagcgactcaactaagaacacattaaaaataaagtgctcggatgaaatagcaatttttcctaaccctttcactttgcctttggtcccatcaccgaatattattgaatcttggggatccttgttcttga

SEQ ID NO: 24952 - DNA, 392 bp, Zea mays
ccatggagagtaacataggccaataatatgcgaattgactcaagcctagctacgggtgcataggtttcaccgaaatccaaaccttcgacttgggagtatcccttggccacaagtcgagctttgttccttgtcaccacaccatgctcatcttgcttgttgcggaagacccatttggttcctacaacatgttgattatgacgtggaactaaatgccatacctcattcctagtgaagttgttgagctcctcttgcatcgccaccacccaatccgaatcttggagcgcttcctctaccctgtgtggctcaatagaggaaacaaaagagtaatgctcacacaaatgtgcaacccgagacctagtagttacccccttatgaatgtcgccgaggatggt

SEQ ID NO: 24953 - DNA, 417 bp, Zea mays
  unsure (1)..(417): unsure at all n locations
atgcgagctctgatcccgtggatccgatatagtcgagacggatgcatgctagctgtgatcgagtgccaccaccctggcggcgtctaggttatatctcgtcaagatcaatcactcatgataatcgagcgcttcagcatcgtgagatactgctcgaccgatggtgcttccacgacgacatggtggatcatgaactagatgcacaatanagcgctgaactggagaaggcttgctgacattgttgaaccatatcaccttctgtgaccatacagagacacacttaacgatgactcatctgaggctccgatgtagcatctccagtagagcgttcgtctggccacctccaccatcattctgcagtatggactgaggtatacgaggagactcctctcacctagtagatctactctgagattagat

SEQ ID NO: 24954 - DNA, 453 bp, Zea mays
tattacggacactataaaactcagctttctattttgatacaacattacgaccactattctggtattatttatattgcgtaagacatatcaatagctatcgtgccgcacaggctggcccaaatgattattctgcggctattgagaacaaataattacacactcttcgctacaatcttccaaaataatgcgtctccaatcttagcttacaattggctagtatggaaatgcaaagtggtggatgatcccaacctaacaatgattccacaggggaaaaatactatcccactgataatctacttcggaccaactcttgaagaacctgatagacttcggagatgtctcaggttctttctcaaccctcacattatttgctcaagaatttatgaaatgctcctcatctctgacatctgaaaatttgctgttattgaaaagcagcttcatcagacgcatatc

SEQ ID NO: 24955 - DNA, 414 bp, Zea mays
  unsure (1)..(414): unsure at all n locations
agcttctaaagggagagcacattntaggattaacaaatgttcattntgagaaagataggatttgtagcgcatgccaagcagggaagcaagttggtgctcatcatccacacaagaacatcataacgactgacagaccactggagctcctacacatggacctattcggctcgattgcttatataagcatcggcgggagtaagtactgtctagttattgtggatgattattctcgcttcgcttgggtattcttttagcaggaaaaatctcatacccaagagaccttaaagggattcttgagacgggctcaaaatgagttcggcttgaggatcaagaaaatcagaagcgataacgggacggagttcaagaactcaaattgaaggtttcctttatgagganggcatcaagcatgagttc

SEQ ID NO: 24956 - DNA, 392 bp, Zea mays
  unsure (1)..(392): unsure at all n locations
agctntggcatggtccactctttcataattggaaacactttgaaagctaagaattcttgcactaagtccctagtgccgatatgctccccaataactctaaattcagccaaagcaatttgggttggaccctctggtgtcatattgcatgggggtctggtctctccgaagatcaactctaacggactctgcactagcttctctttctcttcgtcaactttgacgtagaaccattcagatttccaactagctggccacttgcttcggtaactgatcactggaaattttgtagtcttgcggtaggcaaagttgtagcagccaaagttttcatgtagcccatctcctctagccttggtctgataatgaagctcgtgcactcggcagaaaccttcggc

SEQ ID NO: 24957 - DNA, 460 bp, Zea mays
  unsure (1)..(460): unsure at all n locations
tcatgcaattgttgcaaaaaatgagaggtgaacttggtgcctctatctgatactatctttttcggaatgccatgcaagcacacaattcgagccatgtatagttcggctaacactgcactgttgtaggtggtcttgactggtatgaaatgggccacttttgtcaaacggtccactactacctagatagagtcataaccagtataagtgcgaggcaaaccgactataaaatccattccgatctcatcccacttccactgaggaatctgcaacggttgcaacaaacccgcacgtctctgatgttctgctttaatcctctgacagctgtcacatacagccacatactccgctatctcccttttcacacagtaccaccaaaatcttttctttagatcttggtacatcttctcactaccagggtgtaacaccctgatnttgggggaaaaaatntctttctaattat

SEQ ID NO: 24958 - DNA, 399 bp, Zea mays
agcttgcatcttctgaagtgaaatccactaagtagaggttgttgtatctaaatcccttgaacaccattgattcatcatccatctttgatacaataacctctgttggagtgaataagcattgaagtccaagatcacaaagttgacccactgataataaattgaagctcaaaggtgcaaccaagagaacatttgatattgataaatcatttgaaattgccaccttgccaagtccttgcactttcccttttgaattgtctccaaatgtgattttatcttgtccatcgacattctcatcaagtgagttgaacatccgtgggttgcctgtcatatgttgtgtgcatccactgtcaataacccaatggctcccaccggtcttgtagttcacctacattcacagac

SEQ ID NO: 24959 - DNA, 458 bp, Zea mays
  unsure (1)..(458): unsure at all n locations
tctccgcttgatgctctaccctcccttaagtctcctgttgctcgtagacccttttgatttagctagaccgctctaaatcaccaagaacacctcaatttccactcgagtttcgtcgtcgtcgtgggcagaaaggctccgggccgaaattgtgcaattgatggtaaggttaaggtcgccaggggtagaaataggtgtggaccgagttatggcatcagtcgttgcgtatcccggccggtacaggctcgccggagggcatgctcaccatcgtttgccgttggggacctgngtctgcaaagaaacagaagtgcaggggcttaagtgagaatgtcagggagacagtgaatagtggctagggaatttttactagttatttgaacaaccagggtcctctgtgcaaagcctccagcttgggcgcgcgcgctgcgcgcacgcgggcacgtttcccccgttcgtgggcc

SEQ ID NO: 24960 - DNA, 393 bp, Zea mays
agcttatgttatatacacgaattattatatgagacaaaaccctgcggcaaagaacagtaccataataactttggctgctacaggttcgtctctcggttcagggcaagctgtcccgtaccaacctttcggaagagatggcccggcgattggatgacagaatggttttatgtgaagaatgacctatcagcacgagaagatatcaaaggtataattatgcgtcctatttggcaaagcttccgccttcggaggccgaaggtggaaatgagtgaagctgccgaagaatgccagagggccttcggccttatctgctcttttattggaacaagagatttagtacaggagcatattgccttccgggtgtggcctcttgcggagaaatgggaaatgccacaa

SEQ ID NO: 24961 - DNA, 448 bp, Zea mays
taagccagacgaagggggatcaagatgaaggacgggctgattaccatgctgtacgaaggatgatgcacagccgaagctatgcgcatgaaagcttcgtcgcgatagcagaaaggggaaccgacctaaagatgaaaagactacttatgccttaataaactcctataagtcatttgcaaatgtaatgggcatgaatgtaattttgcatgggctgcgtcccacgcctataaatagatgaacagtactcccgtactggacacgctgactcggcattcgcttttgcgtcatacttgtactttcatcttcttctcaactaaaggtacatttgtaattcaatattggccctattttttctatgacgatttaataaacttgatgatgatatatgattatttatgttatctttcatgtttcatatgctttggctttcattaatgaatattgcgatgaa

SEQ ID NO: 24962 - DNA, 168 bp, Zea mays
agcttagttttttttctatgttgaaagccaaggaagggtgtgtccacatatactcacacactcttgagcatgcaaagcggcaccgagccagtgctataacatattgcatggtacgcatgacacatatattgtgtatcactacattcggtttcgctgtgaaagaaggat

SEQ ID NO: 24963 - DNA, 408 bp, Zea mays
atcttatatacttagtctgataggacaggatacatcaataacatggttagttgtcaaaaaatcaacaaatttgcgctctctcctccccttctatcgggcgatcacctcatgtgacgtctcggatggccgggccaccgcgttctggctcgacgagcgacttcgccatctgctttcctgccttgttgtctcactgcgtcgacgccggtgctagcgtccacaacgtcctgtacgccggcatcgataacttcctgcaacgccgtctctcccccgcggcggaatccgagctgctcctactccgggtggccatcgacagcgtccgtctgtctatggggcatgacacccgccactgtgctctcccggatgacgacgacagaatccacacaggcgcgctctactaggggtctcgtt

SEQ ID NO: 24964 - DNA, 439 bp, Zea mays
  unsure (1)..(439): unsure at all n locations
tccctttacgccaaaacgcgatgctgccttcattggtttgtccttcangtagacatagtctccttccaggaaatataagggcattcgccgtttgtctgcataactcttctgacgagcttgcgctttcttcatattatgaataattgtctgaaccttatcctcggcctccttcaccatatcaggcctaaagaagcacctttccccaggttcagaccaatttagtggagtacgacatcgtcgtccatataaagcttcgaatggtgccatcttgatgctttcttgatagctattattatatgaaaactccgccataggcgaacattcatcccatttctgtgataagtccagaacacatgctcgcagcatatcttcaagtatttggttcactctctcagtctgtccactggtttgaggatgataggccgaactgtggagtaac

SEQ ID NO: 24965 - DNA, 370 bp, Zea mays
  unsure (1)..(370): unsure at all n locations
agcttcttaagggagagcacattntaggactaaccaatgttcattttgagaaagacaggatttgtagcgcatgccaggcaggaaagcaagttggagcccatcatccacacaagaacatcatgacgaccgacaggccgcttgagctactccacatggatctattcggcccgattgcttacataagcatcggcgggagtaagtattgtcttgtgattatggatgattattcttgcttcacttgggtattctttttgcaggaaaaatcacaaacccaagaaactttaaagggattcttgagacgagctcaaaatgagttcggcttaaggatcaagaaaataagaagcgacaacgggacagagttcaagaactc

SEQ ID NO: 24966 - DNA, 460 bp, Zea mays
ttgggaactatgctcatatccaatctgcctgagccagaactataagcgcttgccagatgaccccattccgatcgaccacgaccagcacccaacataagatttccctagttatttagccaagggcgtcccataccaccctcatggtagcacttttttcccgggtggtcactccatgttccaattaaatcatatgatcttgcttaatcgtcggattagcaaaaataatgtaaacttaccatttggaacattaatatcataaataggcgtgactgcataaatttaaagttgtagcaatagcatagctacctgattagatcataatcccaggttaaacaaggagtaaggttggaaaggttaggtgtatctaaataggtaacccatcaaattatgcatatatatcaaagaataaactttattaaatgtattggttgggatcaaacagagtatgcagagggagaag

SEQ ID NO: 24967 - DNA, 404 bp, Zea mays
agcttcttataggagaacacgtgataggtttgactaacgttcaattcgaaaaagatagaccttgtgcagcttgtcaagcagggaaacaggtgggaggagcacatcacagcaagaatgtgatgaccacttcaaggcccctggagctgctgcatatggacctcgtcggacccgtcgcctatctaagcatagggggaagtaagtatggtttagttattgttgatgatttttcccgcttcacttgggtgttctttttgcaggataagtctgaaacccaagggaccctcaagcgcttcctcaggagagctcaaaatgagtttgagctcaaagtgaaaaagataaggagcgacaacgggtccgagttcaagaaccttcaagtggaggagttccttgaagaggaagggatc

SEQ ID NO: 24968 - DNA, 447 bp, Zea mays
  unsure (1)..(447): unsure at all n locations
tgagtgggacgaaaggcgattgtgacgaaggataagatcattactaagctatgcgcagataagcttcggcatgacgacagaaaagaggaaccgacttaaagatgaaaagccaaactggaccctgaagagttgctatagagttactgataaatgtaaagggcatcaatgtaattttacacgggctgcgtcccgtgcctataaataagtgaacagtactcccgtactgttcacgctgacttgacattcgctttttgcatcacatttgtacctttacttttcatcaattcaaaggtacatttataatttgttattatgaatttgataaatagaaataagntaatgataatatctatattattattcgcatttcataaatgtaatcttctccatcatttatcgaacttacgaagggtcttttttcgtaaccttcatccagaattcattata

SEQ ID NO: 24969 - DNA, 396 bp, Zea mays
  unsure (1)..(396): unsure at all n locations
agcttcttcaagctggacttcggttccctttgagcaagtttgtagttgaagtgctaaaaatctaccagatcttcctccatcatatcacccctaaagctataatgagaatggggatttttgcctgggttgtgaggagtcaagggctagagccgagcgcgaagtgtttctgcagtatgcatgaactcttatatgagatgaaggctattggcaaaaaacagtaccacaacaacttcggttgttatggatttattgctcgccccaacgcaagccacccggtgccaaggtttcggaagcgatggcccggagcctggatggaagagtggttttatgtgaagaatgacttanaggcaagggaatacattaaagaagtaatcatgcgcnccatctggtctcgct

SEQ ID NO: 24970 - DNA, 473 bp, Zea mays
  unsure (1)..(473): unsure at all n locations
gaccttagaaactcagcttcgccttcgaggccgaaagttgaaatgaatgaagctgcctaagaatgccagaaggccttcngcgttatctgttcttttattggaacgagagaattagtacaagagcatattgccttcagggtatggccgctcgcggagaaatgggaaatgccgcaagaaaccataaaagaggccgacgaaggtggacttatcaagttgaagtacacttttaaatttggagataaattcgntgagccagatgatgactggttaaaaagcattgaaaatttaagtgatgaactgcttggggcttattcgaaagccgaagacactgcaatgtcagcggccttctgaggccgaaaaaagaaaaggctgaatcgggtatttgatgcaatcgggtttgtctaccctgactattgctatcccattcgaaggcagaagagaaaaaacacaacctctgcaaaagaagaagctgc

SEQ ID NO: 24971 - DNA, 408 bp, Zea mays
agctttagttgattcagagtcccttgctggattatccccaggtttaacttttccatttcttgacataaagtgttttcggaggtctttgctataagacagtggcaggaagtcttacgactcaatgcatctgccaccacattggccttgcctgggtgataatggatttccagttcatagtctttaatgagctcaagccatcgtctttgcctcatatttaactctgactgggtgaagatgtacttcaaacttttatgatctgtatatatgtgacagatatttcccagcagatagtgacgccaaatctttagggcatgaaccacagcagctagctccagatcatgagttggatagtgctcctcatgtcggcgcaactgccttgaagcatacgcaatcactcggccctcttgc

SEQ ID NO: 24972 - DNA, 315 bp, Zea mays
ggttggagcgcatgtcaaaccagaaaacaagatggcgctcattattcacaccagaacataatgaccgccgacattgcactggaactactccacatggatctattcgggccgatagcttacataaacatcagcgggaagtaatactatctagtaattgtggatgactattctcgcttcacttgggtattttttttgcaggaaaaatcacaaacccagaagactttaataaagggattcttgagacggactcaaaatgagttcggattgagaataaaaaagataagaagcgacaacgggacggagttcaagaactca

SEQ ID NO: 24973 - DNA, 385 bp, Zea mays
atcttatatgacacctgcactccctcgtgtgtagactatgtcgaggcccatgtgggatactctctactaatatcaaccaccaagtcatccattcgatcctcgctatgtcataaattctttgtggatctgtgagattctgctccacttctacatgggagcgccacacaacagatttaggcagtgacccattcttgcaaaagtgatgatccattctttcgagctctctcacatactaaacattctgacacttggtacacggacaacttatcacacaaggctcaccagagaatgcgagagtcaataattatagtgcaaccctaacgcacttcctggaatgacctagagtggcgctgttgaatacatcatacatcacccttcttttatt

SEQ ID NO: 24974 - DNA, 225 bp, Zea mays
ctctcaattattccaagagcacgagaaaacctttataaagtctttgttcaacaacaaagatgctcttgcatggccagctcatgatctttgcggagtaaatacggatgatattggacactcactcaatgttgaactatgcttcatagccacaaagcataggcttctgcaaatgtcccatgataaggccctaggtgctcgctacgaacgtaaaagacttctcggtgc

SEQ ID NO: 24975 - DNA, 353 bp, Zea mays
agcttaaaggatactattcaactaaagtatgaagaagttgataagacgccaaggtatgaaaacttactctcatttagttgttttagtattctatccttagtgggatgtaccatattataggttaatttcattgcaatataaaatgttcaatagtgcatataactttgacatcaatcatatgtgtgcactaatttaaagaaatttaatctatccttttgggttctaagaatgatgatacatttgccatccgcatataacgatcatcatttgtgaaaccctcccttgtgtttctaatgctctcttttctaagtatttcaataaggtccttcctgtgagcacctagaggggggggg

SEQ ID NO: 24976 - DNA, 453 bp, Zea mays
  unsure (1)..(453): unsure at all n locations
ctataaaactcagcttctaagggagaacacattntgngactaacaaatgttcattttgagaaagacaggatttgtagcgcatgtcacgcatggaagcaagttggagttcctcatccacacaagaacatcatgacgactgacaggccactcgagctcctacacatggacctattctgcccgatagcttacataagcatcggcgggagtaagtactgcctagttattgtggatgattattctcgcttcacttgggtgttctttttgcaggaaaaatctcatacccaagagaccttaaagggattcttgagacgggctcaaaacgagttcggcttaaggatcaagaaaattagaagcgacaacgggacgaagttcaagaactcacaaatcgaaggcttccttgaggaggagggcatcaagcatgagttctcttcttcctacacaccacaacaaaat

SEQ ID NO: 24977 - DNA, 413 bp, Zea mays
agcttgttgactctgcaactacaacaaccccactattttgaatagatctaccctcatcataggagtgtgtgtggaaattgaatccatttatggtatagctattatacttgtgtgcaaccatcattggtgccttggctaaaattttaatctcgtctgatgcttcttcacacgtttcttccacctgaatttgaaatgctaccgttaaagtatatgtgaattccatctcaaataaatctattaagtttatttcttacttacatgcaacctaagccactcatgaaaggattgatgttgtatgtggttgatatctcgtttattttgaagaccatttgaggatagatagtgagcatgcttgctgtaaaggtcattttatcacttcaacatgcaaaaggtagtgatcatgtgatgagaag

SEQ ID NO: 24978 - DNA, 437 bp, Zea mays
  unsure (1)..(437): unsure at all n locations
atttggcaggaaaacagngcaaatatctatgaatgctgtggtaacttcacacctactcgtctgtttatatagtgccgcaggtaataaggcgaagcgccaaaagttttacaccaggcggacacccgctcgcactcgctgaacggtggaccacagagaccaaacagtaactctgcaaggtggggccgctacgcgcagggagagtgaatcgtttctcggcaacgagctcagggaaggtgttttttggaccttcggctccccgaagcttaagagacttttttcacggatcaagctcgttacgaanaacgatctatcaccgcgaaaggggctactgttgggtctatgcttcgtcgccgaaggtcttcaagggagaagcggctttataatgtgtgagcaggtaccttcggacttgtatcagaaagggagaagctcaaaagata

SEQ ID NO: 24979 - DNA, 410 bp, Zea mays
  unsure (1)..(410): unsure at all n locations
agctgggggcaccaagataggcgcctttgtgaggagcgctttcaggttcccgagggcttcctcggcctcaggggtccaagtgaagcactcggccttccttaagaggcggtacagaggtagacctctttcgccgaggcgtgagatgaaacggctcagagccgcgagacatcccatgaccctctgtacgccctttaagtcctagatgggccccatgctagtgatggctgcgatcttctccgggttggcttcgatgccccgctcggagacgatgaaccccaagagcatgcctcggggcaccccgaagacacacttctcgggattgagcttgacgcctttcgccttgaggcatcggaatgtcacttcaaggtcggaaaggaggtcggaagctntcctcgtcttgactacgatgt

SEQ ID NO: 24980 - DNA, 435 bp, Zea mays
  unsure (1)..(435): unsure at all n locations
agtctcctatgcttctgaatgccgaagtattcttaaacaccttccctgagctcgttaccgagaaacgattaaaatattccatgtggcgggtacacgcgtcctggcgattcaccttctcgggttctgtggcccatcactcagtgggtgcgagcgtctattcgttcggtgcggaagacttgatgattcaccttcccacctgcggcactatataaacagacatgtaggtgtgaagttaccacagcattcattgctattgcactgttttgctgccaaaaatttgaccatagccgaagcttgttcatcgcactcaaccgaagcaccgctgttggttttgcttcgtcacaagaggaagagcttcgggaaaattaaaaaagttaacaacttcatcaaanattgtgaggaattcatcatcaaatggcaagggtgcgttccact

SEQ ID NO: 24981 - DNA, 403 bp, Zea mays
  unsure (1)..(403): unsure at all n locations
agcttctctttgttggccctctattctgaattctgaacttatttcttgggttgccactaatctgcaggatgacatgcaagctgctggagttgctcttgttttaattggaccaggtagtgttgaacaggtatgttttcatctacaataaaagaacctaatttctatgttatgttttaaatttgatgctagttatgaaatgcaaaacccatgtgttcggcaagagtgataagtgattagccatcttatgcatgcaatatgcgttgttcggtttataagcaagttggtgtgcagtttctagagcatcttcaagagaccctctatatgtctctttatcacaagaaatataaatgaacaaaaaaatcatgcttcaacacatcttttccattctanaaaaacacccttc

SEQ ID NO: 24982 - DNA, 456 bp, Zea mays
tatgaaggttcttcatcccaacatgggctagtcggcggtgccagagccaaccaatgttagtcttagcaattaagcatgtgtcaagttcagctctatcaaaatctactaagtatagctgaccctctaacacacccttaaatgctattgaatcatcacttcttctaaagacagtgacacctatatcagtaaaaagacagttgtagcccatttgacataattgggaaacagaaagcaagttgtaatctaaagaatcaacaagaaaaacattggaaatagaatggtcaggagatatagcaattttaccaagtcctttgaccaaaccttgatttccatccccgaatgtgatagctcgttggggatcttggtttttctcatatgaggagaacatccttttctccccggtcatgtggtttgtgcacccgctgtcgagtatccaacttgagccccccgatgcat

SEQ ID NO: 24983 - DNA, 398 bp, Zea mays
  unsure (1)..(398): unsure at all n locations
agcttcttggcagcagcaaggctcttttcggccgccagcgccaaggggcagaggcgccaggggcttctgaggaagatttggggatctgccaagaaaaatttactgcctattctgtggtgaagacaagggccataccaccaggatgtgccatgttaccatccagaagcaaaaggagatagcagaagctgcagcacaacagagtcaaccgaagcaggtcatgcatactgcttcataccattcgccttacattccagaatatgtaggcaatcatcctgcagcttctattgcttcggcaagccaaccccaagcatcttggcaacagcctccaccgccaccaccaacacaacgaggtcagcagccagaagggagtcagcacaatcaccttcagncggacttta

SEQ ID NO: 24984 - DNA, 453 bp, Zea mays
  unsure (1)..(453): unsure at all n locations
tataaaactaagcttctaagggagaacacattntgngactaacaaatgttcattttgagaaagacaggatttgtagcgcatgtcagacagggaagcaagttggtgttcatcatccacacaagaacattatgacgactgacaggccactcgagctcctacacatggacctattcggcccgatagcttatataagcatcggcgggagtaagtactgtctagttattgtggatgattattctcgcttcacttgggtgttctttttgcaggaaaaatctcatacccaagagaccttaaagggattcttgagacgggctcaaaatgagttcggcttaaggatcaagaaaattagaagcgacaatgggacggagttcaagaactcgcaaatagaaggcttccttgaggaggagggcatcaagcatgagttctcctcttcctacacaccacaacaaaatg

SEQ ID NO: 24985 - DNA, 354 bp, Zea mays
attctttatatttactccgcaacgacacgatatctcaataaactggcttgatgacaaaacactgacacagttacactctctgctcgaattctatctggcgatgaactcatgagacttctctgatggcctggccaacgagttctggcgtgacgagcgacttcaacatctgcttccctgccttgttgaataactgagtggacaccggtgctagcgtgcactactacctgtattgcggcatcgatgacttactgctacgccgtctctcccccgcctgggaatcggagctgatcatactccgggtggtcatacacgagcctacgtctgtatatggggcatgacacccgcgctgtgctc

SEQ ID NO: 24986 - DNA, 408 bp, Zea mays
  unsure (1)..(408): unsure at all n locations
agcttatttcatttatggtagtatatggttttaatcctcgtgccccaattgatttgctacctttaccaccttctgaaatagtgaacttggatgctacacaacattctgaatttattcttaagttacatgaaacaactaagttgcaaattgaaaagatgaatgaaaagtatcgtattgctgctaataaaggtaggaaggaaatgaaattggaacctggtgacttggtgtgggttcatttgagaaaggataggtttcctgatttgagaaagtctaaacttatgccacgagctgcaggtccttataaagttcttgcaaaaattaatgataatgcatatacacttgagttgccaccagattttggggttagtcccacctttaacatttcagatntgaagccatatatgggtg

SEQ ID NO: 24987 - DNA, 459 bp, Zea mays
  unsure (1)..(459): unsure at all n locations
tttgtgcacttatcaccttggacaagaggggagtaaaccctatacccctcttgaacccctatctcctaaaaccttggttgaagggggggagattaagcaaatgtgcaaatcatgacctaacctttggccaaagttaagtaacatattaatctacaaataatacagagggaacattgcataaagaccacttgagaaaccccaaatccattccttaaatagagagagagctagagctctctaattctctctaagtcaaattctacacctaatctaaagatccaccgtgttcagcttgtagatggcaccaaaaccacctaagttgtataccaaaaatgtggcataccacctaaggcaccccctggaaaaagttgagactgagcccttgacgtttgacatgtcttggcatcacttttgtcgcgaagtgggcatggagacaagccagatntggcgtccgcatat

SEQ ID NO: 24988 - DNA, 406 bp, Zea mays
  unsure (1)..(406): unsure at all n locations
agcttcatatgataattacgcatccaaagcaccaagtcttgcttccaatcgttcaccagagaccgtgaatatctcgtttcccccaaatcagttctccgccaccgtaaaagagtcctcaccgtggccagcttgttccaggtcagtccaagtgctttggtcgtttgttctagtatccttaagacctcctcaagcttcctgacccctctgattgaactagactgccctgggttgccgtgaacgcctgtgttcatccgttgcccatacggtcaccatggtcagggcgttttagtatgccattagtgaaattaatttaggggaaactttggttgaggtgtgaattangtgccagtcgatggagagcgtcgatcattgcgtaaatcagccggtacaggcacgccggtgatcc

SEQ ID NO: 24989 - DNA, 448 bp, Zea mays
  unsure (1)..(448): unsure at all n locations
ntctcaccatatatagcatgcttaatgaaacttcgtagtatgatgcagcttaatacgaaaacttggtcatcaagctgactgttgaccttctgaccagtcggcactaaagtaggtcggctgcctttctggtagatgtggttaagtcggctctagcagcattggaaactagacttcaagagctttccaaaaagtacttatgcgccttcatagcttttggaaatcaaaagatatgactgtttcttctggacggatctgttgcgctggactgactcggatatagctcttcttgctgattcgcccttattatgttttgtccttcctctttggtgaacctaagtaatatcaacatacacgacttangtagcataaaattctcattagtgtttaaatgaaattcataaagtagcgcgtgcacctcttgctgtagcttcttagctcggctacgtgt

SEQ ID NO: 24990 - DNA, 396 bp, Zea mays
ttcagctcggacccgggatccttagagcacctgcagcatgcaagctttttccttcaaactgcatccagatatttttcaagctttagatctcgtgccttgcttcttttatccacatgggcagcaataacttgagaatcagtctttaagatggcccttcttattcccattgcccttagtttccgaagccccaatagaagtgcttcgtactcagcaatattatttgtgcaactgaaatccagtttgactgcataacatgttttgacttttgaaggtgccactaggaccgcagctgctcctgcaccgaaggctccccaagaaccatcgcaaaacactgtccaagcttcggcatctttgctcgttccctcttcgtgagcccctggcgtccaatcagcgatg

SEQ ID NO: 24991 - DNA, 360 bp, Zea mays
caatgaatgctgtggtaacttcacacctactcgtctgtttatatagtgcggcaagtaaaaatgcgaaacgccacgatttttacaccaggcgggcacccgcttgcactcactgtgcggtggaccgcagagaccgagcagtaactctgcaaggtggggccgatacacgctgagaaattgaatcgtttctcgacaacgagctcatggaaggtgttttttagaccttcggcgctccgaagcttaagatacttttttcacggatcaagctcattacgaaaaacgatctagcaccgcgaaaggggctactgttgggcctgtgcttcgtcgccgaatgtcttctacgaagaagcgaccttcggctga

SEQ ID NO: 24992 - DNA, 393 bp, Zea mays
  unsure (1)..(393): unsure at all n locations
agctttaaccctaaatagggattaaaggggtaaaacctaacccaagttgagaaaacctaaaggctttaagggaaaagtcataaaatgaccctaagaataaacttgaatcacatttatatccctaaggtaccaaaaaccctaattggaaccctggaaaaccctacaaccaaatcctagggacttatgtgcaaaaatgatgaacctttggactaaagtgtaaaaactactatgtttaaacatataaagtcatttggttcacaaatatgtgaatttgcaagttaaaccctaagttttgggcttatttgcaaaaatcacctcttaagcactatagagcctaagtctgaaattcagtttagttggttcaactntggagccctgtatcttctaaaatat

SEQ ID NO: 24993 - DNA, 431 bp, Zea mays
tgccttcgcctcagtatatcacccgcagtccaacagagttgtggaatgcgccaatggaaaatttttcacagctgtcaaaaagatgctcctcgacaaaaaaaggcaggtgggccgatttgttacccgaggcggtctgggcgctaaacacgactgagtgcagggcgactgggttcacccctttccgccttctatatggatcggaggccatgaccccacaagaaataaaacatgggtccccacgaacagtttcgtcagctgtccccgacgtggacaaacccacttcgaaggatctcatcgatggagaccgagtcttcgcaatacaggctctaaataaataccaagcccagacaaaagcatggcgcgaccacgcagtcatcccgagggaattcagcgaaggggacctcgtactcgtccgaacagctcggacagag

SEQ ID NO: 24994 - DNA, 402 bp, Zea mays
  unsure (1)..(402): unsure at all n locations
agcttaatggcttgctactcacaagtttttaggattttcagatgaagcccatcacgacacgggctttgttccaatgcatctaagaccatgatgagtatcttcagacctttgttcaaaggtttctccggcttagggctcaaaaaccaacactcccaaatgaaatcgtgattgaggcaaggataaaggggttttgtccagaaccaactgcccaatacttcaccaggaaacctccccaatccttagaaaagatgcttgaaaagatagatgaatatattagggggacactgatttccgccaaaggagggaggaggcctanaggtatttagaggtgacctgtggcttcngaggaaggttcatccaagcatatctgaagcattcacaatccaagccaaaacgaagata

SEQ ID NO: 24995 - DNA, 451 bp, Zea mays
  unsure (1)..(451): unsure at all n locations
tgtcaagcatattttggtccccatctcttaaaaagggtccatcaaggttagntaacaaagatctatgaacccaaatgtcatttgtgctatcacaagttgcaattttggattgcctagttataaatgaattaattgaagagttgggggcgggatagttaccaatcggacaatccttacattgatgtcctttctttcggcatatgtagcaaaggcgatcttcatgtcttgaagatttcttctttccttggttattacttgccatggntagtaaatattttcttttctaaaactatgcctttntgtttcaaatggggacaagacttaactaagtgtcccttcttagagcatttaaaacaaagtttatcatcctttgtaataatcaagccatttttaatatanggacatgacctaatcaagtgtcccttttcaaagcattcactacacttcttac

SEQ ID NO: 24996 - DNA, 336 bp, Zea mays
agcttcatcatctgaaaagaaattgccctggagaaaagacatgatctcagttctctaatcttcgctataaacacgagatatattgagcactgctctttcaagaaggtcgaccgaaggtgcttctattgtttcaaaaaatacttccgaaggtaaaggcagcccctgtgccgctgacttggctagcagatcagcgtgctcattttctcctcgtggaatattcttgacagaaaacccttcgaaggaagcttcaagccttcgaactgtatccaaatatttctcgagctttggatctcttgctttacaactcttattcatatgaccagaaataacttgggg

SEQ ID NO: 24997 - DNA, 445 bp, Zea mays
  unsure (1)..(445): unsure at all n locations
taatgccacgaattaaatgagacaaaataaatntcatccatcctctcattatgcaaagagacatgaaactgaagatatttcaaagccataacatagtcctccattattccaatttgcttcaccttgaggagatcagtgatcgcatgacggtattcataggcaccaaatttagcttgttgttgcatctacaaaagccacaagaacccagcttgtgacgaagtttatagatctgaaaccacttagcaacattcccatccatatgtagagaggctgtaataacccacatcgaatgaccaacattgaaaatctgaaaataattctcacacttatcaatctagatcgtgcaattctcatcaacaaacttgggaaaagtcaacttgggtaaagtctggcaaggtgatccacatgaggttcttggggtcgaacataataagtatgagagcga

SEQ ID NO: 24998 - DNA, 378 bp, Zea mays
atgcctgcacgcactccagcttctgagttagagaaacactgacttcactccttatgtccactatataggagacacatgttggtcggccatcttgctttgtaactgcctggaaagctgggtgtcactaaaaccaacaagtctgagcctctcaacgggcgatgcttgatctttcgcctacgcagattctgcatgctcaggcatttggctgagcacgctacttggtgaattgttggggattcaagcatcataagtagagctgttggttgacatacaaatcagctattgctttaagcacgaacccattacaccctgacatgagttgttggaacctgaacgccgactcacggcgtgtacgtctgggacgcccgcacacacgga

SEQ ID NO: 24999 - DNA, 190 bp, Zea mays
  unsure (1)..(190): unsure at all n locations
tcggcgatggttaanaattntggcagcacaacagtgcaaatagctatgaatgctgtggtaacttcacacctactcgtctgtttatatagtgctgcaggcaacaaggcgaagcgccagaattcttacaccagacggacacccgcttgcgctcgctgcgcggtggacccccatcacacacacccaactctgc

SEQ ID NO: 25000 - DNA, 412 bp, Zea mays
  unsure (1)..(412): unsure at all n locations
agcttctctttatccccgaaacgcgatacacccttcattggtgaaactttcaggtaaacatagtctccttccaggaaatataagggcattcgccgtgtgtctgcataactcttctgacgagcttgtgccttcttcatattataaataattttctgaatcttatcctcgacctctttcaccatatcaggcctaaagaagcacctttcaccaggttcagaccaatttagcggagtacgacatcgacgtccatataaagcttcaaagggtgccatcttgatactttcttgatagctattattatatgaaaactccgccaaaggcaaacattcatcccatttctgtgagaagtccagaacacatgcncgtagcatatcttcaagtatttggttcactctctcagtctgtccactgg

SEQ ID NO: 25001 - DNA, 461 bp, Zea mays
  unsure (1)..(461): unsure at all n locations
ntagtctcctaactaaactntagtccctggactaaagaaaccattctagccctaaaggaggaaaacaattgtaccccgtttggatgagatattgtagtatggaattaagaattggaatcagctttccataattctattggttggttgcacatggaactggaatcagaaacccaattccctataattaggctataagtaaaaaccctctctcccagtacaaagcatcaccccttggaccatacaattccaaactctaattcagtgacatccaaataatagaattggaattacatctcatttcaataccatagccggtttggtattgaaccaattcaattccatatcttccaatatcaacatccaaacgaaacacttgacctcaaaattgaaaatcataggagtcgatatatatctattgttagaatataagtgaattatccatgtntctcaatcaacttaaa

SEQ ID NO: 25002 - DNA, 397 bp, Zea mays
  unsure (1)..(397): unsure at all n locations
agcttcatatctctggacaaactccgcggcatcactcttcgctgttggccaatagaaaccagatctgaaaactttcccaaccagagttttggacgcagcatgtactccgcattgtccggcatggatttcccctaacagttgcttcccaatagccgagtgaatgcacttcatgaggattcttgtcgtacctcttatgtacaatgtgtcccctatgagggtgtagtgggctgattgtcttgcgatgtgttctgctgccgccttgtcatccggttcctcttcatttttatgtacctgatgataggctctctccagtcattggggtccaactctggttggctcaatgttgtgcactcttccgtctgatctgagaanatactctggcgtgatacttcttgga

SEQ ID NO: 25003 - DNA, 448 bp, Zea mays
actaagcttgacgggccctttgttcagtggagtgggaagacatattttcctatgtccttcaaagtgctgcctctgaagagccccctgctgtttggcattagagacaacaaaatgggtaaaagacgattctattctgaagccttttggtccaaactggagggattccatgatgttgtccaggaggtttgggaatctgtggcagctgtaaattgccctttcatgactctgaatttgaagttaaaagctacaactaggaagttgcaatcttggagtgggaagcatgtgtgatatgtgaggactcagttggctctggcaaaggaaattctacataggctagaaataacgcaggatagtagatccttgtccttggctgaaatctggctaagaaatttgatgaaaaaacactccctgttgttatcatcgcttcaacggaccattgctagatcga

SEQ ID NO: 25004 - DNA, 396 bp, Zea mays
  unsure (1)..(396): unsure at all n locations
agctttcttcggtgccatagcgaaggtctatagcttccgaaggtgttcacgaagactctaagtggaagtgagttcaccggaggtgggcgccaatgttggtgacttgttctcaaatgcttcgaattaagaacaaggcaacataaaaagtgttacacattaaggtccttcgtccttcgaaacattatgtcccttcgggaaataatgatttatgacgaaggttatcatagacataccttcgggaatataataagtaatgccgaaggattcatataaagcatgaaatataaacatcaacataaaatcatttctattttattaacatggagaaatagaaatgattntaaattacaaatgtacctttggtcctgagagaagggtaaagtacaagcgtgatgc

SEQ ID NO: 25005 - DNA, 430 bp, Zea mays
  unsure (1)..(430): unsure at all n locations
tactaagcttgtgaaacanagagacataaggggtttgatatgggttatttgcttctcataatgggattgcttttgccggtagcgacagcaagtgttgaaagggcattttctgcaatgagtttagcgaagactaaattgagaaacaagatgtgtgatagtcttttggatgattgtctcgttacatacatcgagagggatattttcttcgaagtgaatgaagaagatataattgagacttttatggcgttgaggaagcgcacgccanataagtagtattattgaaatctgtatgtttaatgtatgcaactttcatacttaattgctgaatgccaaattttatatacatatatcgaattgtttaccaaatttactataaattatatgtatatttgatagaatctacataaaaattttgttgcggcacacccta

SEQ ID NO: 25006 - DNA, 417 bp, Zea mays
gagcttgtgttatgtatctcaagttattgatacattcttttgcattgtatcaacaccacatgcaccaggttaaattgctaaatacacacaaatgatatgtccaaactctcaacaagagccagactcctataagaaacgtataaagtcttaaaagccgtgctcaaattggatgccactgattagaaggtctgtttataaggtgaacatgtatgacaaggatgtcacatttagggagtccatcgacaaactacacaactctacatcggattaccaggcagaaccagcttcactctacaaaactgttcagtgtgaaagatcatatgatacacatcaaaagcagggttatcgggagagtaaccctacacaatccacaagacagctttgttacagaactatcagtcgattaccacacaatgg

SEQ ID NO: 25007 - DNA, 439 bp, Zea mays
tactaagcttcctcttggtagcggaaactaactgcatgttttgcaaatttcctatgctcagccggagcaccaattgatcctgctgatgatagcacggtgaaggatgcaactgagtatgggtttcccctgcctcttccagcgggcaaaccaacattagacgagtccttaacacgttctttctctgatccaatacctggagcatcacggtacgtagctgttgcaacagaatgactttcctgccggtgacgaggcctccatttatcacgggaatcggactcagacagcagccttcctgtgaacgtctgtttatcagcatgaagttcatccttctctgcatcaaccttcttgtctgacctggagaacttctccttgtcatcggagccccatcttgatgaccattttgcatcacgttgaccctcattctccacgctactggtgg

SEQ ID NO: 25008 - DNA, 408 bp, Zea mays
  unsure (1)..(408): unsure at all n locations
agtctttcttctaaggattctctgntaagaatatccctcgagggcaaaatgaacatgctgatctgttagccaggtctgcagcacatgggctgccgctaccttcggatgtattcttcgaaacaataaaggcaccttcagtggagttacttgaaagagcagttcttactatttctcctgtgtacagcgaagattggagaactgaaataatatcttaccttcagggcaaattcctatcagatgacgaagcttataataaaagaatagaggcaagagctcgtccgtatatcattatagaaggggagttatacaagcatggagtttgtgccccgctgctcaagtgcttgtctagagccgaaggtatagagttgatgaaggagatacatgcangcctntgtggatcccacatcg

SEQ ID NO: 25009 - DNA, 375 bp, Zea mays
agacagagagaaccaacccgattcttgaagacatgttgagggcttgtgctttgcaagacaagttacgtctggacaataggctaccttatacaaaattctcctacgactataactaccaatccagtataaagatgtcaccgctacaagcactctatgggaggaattacaaaacatttttgcattgggaccaacctatcgataagcacgtgtatctgccagatattctgcttgaagctatagagaacatcatgatggctcaagaaaatctgaagacatcacagtccagacagcgaagctatgctcacacccgataaagagaactgactcttgaattgtgagattatgtctacttgaaagtgtcatcgatcagaggaa

SEQ ID NO: 25010 - DNA, 382 bp, Zea mays
  unsure (1)..(382): unsure at all n locations
agctntgttaggccatgcaagcaaatttgcatatcttgatgtggtaatgcgaatccttgctagcacaaattcaagacaagttgaaccacgatccaaacgcatagccaccttcactattcgggcctagcatggcagtggctacacaatgaccatcgagctatccagacatccatttaatcaacttatatgtaaagaaaatatgaatcaaagaggacaccaagatctgtggaactcttgtgaaaaaaacacggataacgatgaagcaaatctctcaatctttctattgagagaagaagagatcaagtggtaccaaaggtcaaacacaataacactgctaaccattttcggcggctggctcttagccgccgaaaataacgaggac

SEQ ID NO: 25011 - DNA, 442 bp, Zea mays
  unsure (1)..(442): unsure at all n locations
tgtggcgccctcaggcgtctngtcgcagctgaagtaccttgtcttccacttggaagtctcggggccgaacccttctggcgtggtaacgtcgtagagactgctgataccgcgccgtgtgtaataaggccacgttcagagcctcctacagttggtccaatgaatgctctcggctggtctggttgctttggtcatcggaagcctttgtcctcggggaaccgaattccaagtccgagggtaagatggcctcggccccatagactacgaaaaatggcgagaagcccgtggcccgactcggcatcatcctcagactccaaaccaccgagggtagttcttttatccaccgcttgccaaacttgttgaggtcgatgtagatccttcgatttaagtcctgcaaaatcataccgttggcacgctccacctgcccatttgtcattgggtgagc

SEQ ID NO: 25012 - DNA, 383 bp, Zea mays
agcttgccgtctagaatacccttaaaagctagtgaaccatcacatcttctaaagacagacacatctatatttgtaaacaaacagttatatcccatattgcataattgactaacagatagcaaattatatccaagagactctactaaaaacacattagagatagagtgctcatttgagattgcaattttacctaacccttttactttgccttgattcccatcatcgaatattattgaatcttgggaatccttattcttgacgtaggaggtgaacatcttcttctcccccgtcatatggtttgtgcatccgctgtcgataatccagcttgaaccctcggatgcataaaccttcttctccttcgccatgaggcatgtgtgatgctc

SEQ ID NO: 25013 - DNA, 452 bp, Zea mays
  unsure (1)..(452): unsure at all n locations
ntaacattatttaaggatccaaagccagccaagaatattaactacttcaaacaggaaaaatattcagggcccattcagcatggctcctccaaacacgccagagcatttgagacactttttgcagctctgcctcctcagtcctcactcccaaaaggctgtacctctactgttcaccccaagacgactcctcaaaatgtgttgagaagcccgttttggggtcaacagtatagaaagccggagctattttgggctgagcagccggagccacaaaagtggctcctcaagtgctccggctcctccggaggagcacttcaggagccaagccaaacgggccctcaaagcaagagtttaaagatttaaaaagttacgacagcttaagaaggtagatgtggataacctaanggcaagtaaacctaaccaaggttgataacaagagaagaaaacagagatta

SEQ ID NO: 25014 - DNA, 407 bp, Zea mays
agcttattattttcagattctgcctattcacccccctctaggcgactttcaattggtatcagagcccggtacttcattagagcctaaccgctcgaagtgatgtcgggagcatccgccaagagggagatcgggaccggcgacaagtccacaagctcggggagaacgcactcaagggagttcgcccacaagcacaaggaggaatcctcttcctccatcaagtcccaacggaagggtgacaagaagaagaagatgaagaaggtggtctactacgagaacgactcttcgtcaccctccacctccggctcggaatcggcatccgccacttctaagcgccatgagcgcaagaagtatagtaagatgccccttcgctatcctcgtatttcacaacgcactccattactttccgt

SEQ ID NO: 25015 - DNA, 436 bp, Zea mays
  unsure (1)..(436): unsure at all n locations
tacctgactccttcttctctaccggcacaatattggagactcactttgtgtatctgcaagggctgataaaatcagcttctagtatccggtggatttcgtccttgatgcattggagaagatctggacgaaatattctatctctctgcttgaaaggtctgaaacccgatttaataggcagccgatgctccacgatctctcggcttaatacaggcatctcagtgtaattccaagcaaagcaatctgaatactccttcaatagaccgatcatctcatctctaggatcggtctccagggtcttgtttataaaagtcagccttggagtttcaccatctcctatgtcaatctcctccaaggatcggccgatgtaacccctgtcctagttatcaagatctctgaatcctcttcatgctcccacaganaattagatatctttgtg

SEQ ID NO: 25016 - DNA, 408 bp, Zea mays
  unsure (1)..(408): unsure at all n locations
agcttcaagtctgcanggaagaagctgttggaccaaattcagattattaggggtgcatcgaacgggcacgatactgctcttcactatattagtcctcaaccctgaagcttccccaaacaaatccaaaatcatcacagcagtatttaagtcactgggctctggttttaggaagagcgccacatcatcggcgtaaagtgagatctggtgatggatggaataagaagaaatgggctgcagcaacccatgctcctcagccttgaccacaagcacattaaggacatccataacaagaataaaaagcagcggagacaaggggtcgccttgccgcaagccccttttatgagaaatgaagctcacaagcaccccaagaagtcataagaataccacttatcacatccctccacacta

SEQ ID NO: 25017 - DNA, 277 bp, Zea mays
tgcttgctttctcttttgtggcactagtgctaaactcaaatgtatttctctctcttgcttgctctctcttttgtggcacttgtgttggttgttgtggtctaaatcttgtgtatatgatggatcaatgaatatatgtggttgggagggcttgagtatgtcaactagatgacttggaatgttgcttgagctcccacacctttaaatggccggcttgggtggtatttattgccaccaaccaaattgtatcccttggagaatgttgctagcgatgggcgca

SEQ ID NO: 25018 - DNA, 402 bp, Zea mays
agcttcttttgttgggactcattgggaattctgaatttcagaattctgaaattcagaccttgagccaaagatcagggatgttcaccttgatccctaactcgaatcctaatggccccattgacaaaattgtgtctaactaacccctctgtcgtgtgccagaagatggcattgggacgcgagccctagacatgacaaaacttgggacttgcctcgggtttgggcagggagacagaccagatttcctggctccatatctctgcaaccagtaggcaaaatcctatgacctccacacaagaatggtagcttgtagggaggagaagaagttttgtgcactgaccaaggcgagagcatgctcggatgagcgaccacacgcgccagagcttgtgcagaacacacgggcac

SEQ ID NO: 25019 - DNA, 380 bp, Zea mays
cacccctgttgtgatatattgaatgcttgtagaacctgtgagaagtccaccttataaacaagtgtggtggcccaaacttacccatctcaagaacacactttgatatgggccagaaccaactcttcagagagggaccataacttgattgggtggagatctcaatggtgatgatccaaaggctcaagtgaatggatccttacaatcactgcaccactggtgcgttggttatctcacatggaacaccagtgacctcgccaccaaggcttattcctactagcgcaatcaaaaacacacagtaaaacaggaagaacgccaatcaaacttattgatcacgaggtggggtctcacaaactgatgaacgacgacactgttccatgaca

SEQ ID NO: 25020 - DNA, 397 bp, Zea mays
  unsure (1)..(397): unsure at all n locations
agctttctaaagctctctataggcttaagcaagccccacacgcttggtacgaaaggcttaaggatttcttgctttctaaagactttaaaattgggaaggttgacactaccctattcactaaaagaattggcaaagatttgtttttttgtcaaatttatgttgatgatattatttttggatctactaatgaattgttttgtgaggaatttggaaaaatggtgtcaaaagaatttgaaatgtctatgataggagaattgagcttcttccttggtcttcaaatcaaacaattgaaagatggaatctttataagtcaatcaaaatatttgaaggatatgctcaagaagtttgggttagagaatgcanatcctatcaagactcctatggcaacaaatggtca

SEQ ID NO: 25021 - DNA, 453 bp, Zea mays
ttgagccttatctatttgccttagtgatagatgaggtcacttaggatatacaaggagatatcccttggtgtatgcttttcgctgacgatgtagttctagtagatgaaaaccgggaaggagtaaatagaaagctagagttatggtgtcagactctagagtcaaaaggatttagaattagcgggaccaaaaccgagtatataagatgtgactttggtactacaattagtgaggatggagatataagtttcggatgccaagtagtaccaaagaaggacaccttctgttatttgggatcgatgctacagagagatggtgatattgatgaagatgttagccatagaatcaaagcgggatggatgaaatggcgtcaagcatcgagagtcctatgcgatcagagagtgccacagaagttgaaaggcaagttctatggagttgtgttggatagaagtgctt

SEQ ID NO: 25022 - DNA, 387 bp, Zea mays
agctttaattgtgttgccatcaatcaccagaaagggggagatcgaaagctctcttgagggttggtggaatggatgacaacccacttaaaggactaacaggtgtgctaagcgttgaacatgtgcttaatgcagagctgacacggttcaacacagtgagcaagtgtgatggtccgaagactgcaatatctatatataatggacatcacaagccagatgagcatcgctttagtgagactcagtgtgcgtaactcaaagacaaccgatcaagccaacgatggacgcccgaacagcttcaacgtactgattgcactgtagaaggtcaaggataccctcgataccccagccaagggtgaataagaatacttgcacagtcaacgttgatcgagt

SEQ ID NO: 25023 - DNA, 461 bp, Zea mays
  unsure (1)..(461): unsure at all n locations
tgtgtntacaagaaggaaagtgggagcgctgntgtatttctgatcttgtatgtggatgacatattattgattgggaatgacattcctatgctggagtccgtcaaggattcactaaaaaagagtttttctatgaaggacttatgggaagcagcatatattttgggcataaggatctatagagataggtcgaagaggcttataggattaagtcaagatacgtacattgacaaggttttgaaacggttcaacatggaacagtccaagaaaggtttcatacctatgtcacatggtaaacaccttatccagatgcaatgtcctgcgacggctaatgagcgggagcgcatgagtaaggtaccatacgcctcagcgattggatcaatcatgtatgccatgataagtacacgcccagatgtttcatacgctataagtgctacgagtaggtaccaggctgatccaggtga

SEQ ID NO: 25024 - DNA, 412 bp, Zea mays
  unsure (1)..(412): unsure at all n locations
agcttggaaaaatctggaataaatcggcgataataaccagctagtccaaggaaacttcggacttgatgtacagtggttggtggtttccactccaaaatatccttgactttgctgggatcaaccgcaatccccttggcagacaatacatgtcctaaaaattggatctcctccagccaaaacgcgcatttactgaatttagcatatagttgatgttcccttaagcgcgttaatatgatccgcaaatgccgagcatgctcctcttcattcttggaatatattaaaatatcatcaatgaagactaccacgaatntatccaactcgggcatgaataccgagttcataagatatgtgaagtgggcaggagcatttgttaatccgaaagacataaccagatattcaaataatccatacc

SEQ ID NO: 25025 - DNA, 461 bp, Zea mays
  unsure (1)..(461): unsure at all n locations
tatgaagattcttcattccaacatgggctagtcggcggtgccagatccaacccaagttagtcttagcaattaagcaagtgtcgagttcagctctatcaaaatctaccaagtatagctgaccctctaacacacccttaaacgctattgaatcatcacttcttctaaagacagtgacacctatatcagtaaagagacagttgtagcccatttgacataattgagatacagaaagcaaattgtaatttaaagaatctacaagaaaaacattggaaatagtatggtcaggtgatatagcnaatttacccaatcctttgaccaaaccttgatttccatccncgaatgtgatagctcgttggggaatcttcattttctcatatgaggagaacatctttttctcccctgtcatgtggtttgtgcacccgctgtcgagtatccaactcgagcccccggatgcataaacc

SEQ ID NO: 25026 - DNA, 407 bp, Zea mays
agcttattaatgaggatagatgcaagaactcgaccatatgctataatagaaggggaactatacaagcgtggggtctgttctccgttactcaagtgtttatccagagccgaaggtatagaattgatgaaggaaatacacgcaagactatgtggatctcacattggatctaggcctttgcttggaaaagtttttcgttaaggattttattggccaaaggcagcttccgatgcaccggaattagtccaaaagtgcgaagggtgtcataaatgtgctagagatcaaaaacaaccttcgtctttaaatacagtaatacaacccacttggcttgtgcaaaggtggggccttgatttgtatgtccattaccaccagcacaaaggaacttaagatatgttgtaatggcagtggat

SEQ ID NO: 25027 - DNA, 457 bp, Zea mays
  unsure (1)..(457): unsure at all n locations
tttgagaacaagtccccaaccacccccagaggagctgttgtgatgtttcattctactttagtggacgagcattattttttatctaactcacccatacagatcccacccttgctggtatgatgacatctgaattgagtaagccaggcttgcagttcaggacccctctcctgctacagggggtccagcaacctgcaggtccggttctaaagaatgggcgctcatttcctggagtggtccgaagctgtgtagccgcttagcctggtcccgtaccctaagccttcacctccaccactctgcaacgggtaccttagtatttggggctgtgattctgtaggtccggacataaggcttggtttcccaggctaaatcctgtaggtcctgttgcatgaatcataggatggcagataccagacgatgggtccaatgggtgtgctactaacacttcanaactgaagct

SEQ ID NO: 25028 - DNA, 376 bp, Zea mays
  unsure (1)..(376): unsure at all n locations
agcttgcgcgggcttagaacagtctcgcctgccaacgcgccgaggacttggaggcgaggctcaacagcctgcgcaaccgtgtggataaagccgaggcctcgacacgcgcggaggtcgagcggacgcatgcgcagttcatagacgcgtaccgggagatgggtgcgcggaccgccgccttcgacgtgcccagccaagaggtgggcctccgcttactggagtggttacaggaggagttggcggtgctcccaaccatcacgacgggcctcatgtcctttgcctccctcgtcacctgtgaaggggccgtgaatgctntgtcccacgaggggtgcgggcatttcgaggtctttgaccaatcagacgagaacttcgaacgtgt

SEQ ID NO: 25029 - DNA, 453 bp, Zea mays
  unsure (1)..(453): unsure at all n locations
tataaatgtaccatgctctaacttcgtgtgtgtgcaaacattattgggcgtacatgtgtacacccatgtcctttactatatccgctccccagccaggcatgagagcgcgcttctagaataatgtctgtgcttacctgcgtgattgaaagcatgggctcatcctgtagcagatcccattctttcgacgaggctgaagcagctgaaaatgcaaaggtaacttgtcacttagaccaggctgatgctatcaggaggttatgattttgtgttggtaagcagcaacacttggttccttctgacattagcagtgtgggtgcagtctgcagacattgaccggaggattntgcaagaaacaaaagccgaacaacacatccacaagctcttacttctcggtaatgccaacttacttgaacttaagagctgtttnttcttcttcatgtgaagaatatctgttct

SEQ ID NO: 25030 - DNA, 405 bp, Zea mays
agctcgtttatattatcttgaatgtactacgtttggctgatgaacgtgccctcatggagttgtttgacttgaaatcctataaaatacttcaactcccccatcattgacatctcgaatttttgtatcatgatcctactaaactcttcacatgtagatttgttagttgacccaaatatgatatcatcaacataaatttggcatacaaacaaatcatttgcaatggttttggtgaatagagtaggatcggcttttcagactttgaagtcattagctataagaaaatatcttacgcatacataccatgctcttggggcttgcttgagcccataaagcgtgttagagagtatatagacatgtgtaggatactcactatcttcagagccgagaggttgctcaacatagacc

SEQ ID NO: 25031 - DNA, 383 bp, Zea mays
agtcttttaacatactaagcacatgtcgggaaatatggttaccggtaaacctagtacctgagtgaagccgggcgcagactttatccctcacgcgacctaagactaagtctcccatgctagctattgtgggtacaagtgtggtcactgcacagcggcagctatggtcagtggagcattgtatgccaaggcggtgaggcctggacgcgaacggggaatcgatggggacggttgacatgtgtggggacggagtgccctgacatgtcgtgtgtttaggtttaccttgcaaggataaaactcgattcgaatcgtctgcttctcgtaggtaatgagactgcttaaccccttgtactacattgagtaagaagtgaaatgaggttacatga

SEQ ID NO: 25032 - DNA, 432 bp, Zea mays
  unsure (1)..(432): unsure at all n locations
ttgccaganaaggagatgatatgaagccttggagtgctttatatattccattcaattcttatcaactcagactatcaatcttccatgatctatatacatgaatgacccaaggctgactttcaaaatgctatgtcttaaactcatatcatctcgatgaagatattatatgttcgcctacagtgaagagatatcatgtgctanaaatcaaggcctacaacatggatgagagcctaaggatgggtacacttatcttttaagcgcaagtattttacaatatcatttgttatgtgacctgagtagtcacatacaaaaattgaagcacttcaaatgtctctaaattgatattaccattctttgaacaatttcctctcatatggtagattgcacattcatcatttccatactatggcaatctacctgctctaatgtgtt

SEQ ID NO: 25033 - DNA, 391 bp, Zea mays
agcttatgaagattcttcatccctacatgggctagtcggcggtgccagagccaacccatgttagtcttagcaattaaacatgtgtcgagcccagctctatcaaaatctactaagtatagctgaccctctaacacacccttaaatgctattgaatcatcacttcttctaaagacagtgacacctatatcagtaaaaagacagttgtagcccatttgacataattgggaaacagaaagcaagttgtaatctaatgaatctacaagaaaaacattggaaatagaatggtcaggagatatagcaattttacccaaacctttgaccaaaccttgatttccatccccgaatgtgatagctcggtggggatccctggttttctcatatgaggagaaca

SEQ ID NO: 25034 - DNA, 440 bp, Zea mays
ctttccagaaattgctaagtacgacggggatgacataagtgttgaacctacatctccgtcgacccctccaacagttactgaaccatctgtcgatgaagacgagttctactgccctgatgtcagtgatgagtggtacttcagcgattcagataggtcaactcgtaatagctactggaatatttattagctccatgtattccagtagtagttgcacgatatccttttgaacatccaagtactcgggttgtccaactagtcatgttgtccaagtagtcctgtgatgtatgtctaagtctcaatggtacctcgtggccttaagttattatgatgttaagattaatgtagtatgtgtactatgtttaatcttaaatattctaatggtggtgttcctactgcaacggttcatgagatcatcttattattatattctttggtcatat

SEQ ID NO: 25035 - DNA, 380 bp, Zea mays
ttcttttttttatatgccttggccaagtcatgatctagatacaacaaggtgtcatctgcatattgcagaatggataaaccaccgtcaaccacgtgcgggataagaccttcaaatcgtccatcattttttgccctgttaaccagaatagccagcatatccactactatgttaaacagaatcggagaaagaggatccccttgtctcaagcctttgcaagtctgaaaatctcctcctatctggtcattgactttgattccaacatgaccccttgtcatgattgaattaatccaattacaccattcgttggaaaatcccttcatacatagagtctgttgcgcaaaagcccagttcactctatcgtatgctttttctaagtcgat

SEQ ID NO: 25036 - DNA, 241 bp, Zea mays
  unsure (1)..(241): unsure at all n locations
aagggnacatngatgggacctaatagtgacctagttatgtttacccttcaccttgtatacaaatgaggtattggatagtcttgctattgctctacctagatatcgggctttatatcatatatgaatcatgataatgagttattattgccaatggattctttattgatgatgataacattgaacatggagcgaccaccgtacccgagaaaacactgctaccacaagggtggaatagggcatc

SEQ ID NO: 25037 - DNA, 352 bp, Zea mays
agctctgttctgctgactgcgaatcaatcgagacggttgatatctgtctggattaaatgcccctgcatgtcgtgttgctaagtggacacttgcaaggatgaagactctgttcgacatcacctgcttctctgaactaatgagactgcttgacccatgctgctacattgaataataagtggtaggctgaggagttgccacaaaacgtggattgtaaagtctgcatgactccatgtatgatgagactgtccactttgagccttaagagagtcacacttaactttgactaaggtaaaatattgatttataaactcaactagtgcttatggcaacctaaccccgcatacaaacaact

SEQ ID NO: 25038 - DNA, 455 bp, Zea mays
tggcgactgccagttcgacctctggaagcatactatgtggttccatgcgtcactatgttcaccaagctccggcgcaatcgctgcttggacgtggtccaaagcggctgcaccgcgctgtccatcttcaaacaggggggacctcatggtcatcgtcaacgccggtgactctcgggttgtttctggcaccgcatccgacaacgacgccgtcacgacgtccagctcatcattcacctgaacctcaacctgccacataagtcactactgaccggccagcggccatgaattcttgtgcgctgggacgacgaccgttgctgacgttgtgtgagtgtcctcgaacaagatgtatgtagaggagtagcacatctggtggtgcaacggctaggtgtactacctcgctaatcagcccggtgtgtacttcgtttggcaacccaaccagagtcatcggtactcgccat

SEQ ID NO: 25039 - DNA, 356 bp, Zea mays
  unsure (1)..(356): unsure at all n locations
tttacgggtagaagaataactaaacgttacgngctctacttctacttagctccaataataaggagcagctacatgcgctattgaaacgcgaccacttttagtcgatcaacatttaatgacatatacgattaactatcttaattaactaacgtaacccgattcttaacttgggtttctattttatttgcatacacaacgtgattatcgcgcatcaaatataggggggtagactggcttgtttaggggtagactaaagcaccgcgagccgtgccatacaccacgcactagacaagcagcgcgcgcgcaatgtcgcacacacgcgttgcgtactatccgtgcacactatcgtgtcacgc

SEQ ID NO: 25040 - DNA, 404 bp, Zea mays
  unsure (1)..(404): unsure at all n locations
agcttatctccttgcggtgtttgtactactctaataaagtttagtatattggaataaaaaaaggcaaccatgcccctaatgcggagagagaatgaggttagagggtatgggtggaaaatggggttccctgacccacgtttagcttcttttagcacctcttgagtagcttatgagataataagtgttaaattttattacaccaccattagctcttctgtttaaatcaccaaatggctaaaagtagctaaaaagctgctaaagtttatctcttgagattgaaacaggtctttagtctttctatatatttagcatataataataccagaagtgagggttattttaggtgatccaaactttctctaagggataagtttcaaagttcaactgtctaaatgattnttatt

SEQ ID NO: 25041 - DNA, 267 bp, Zea mays
  unsure (1)..(267): unsure at all n locations
ttaatctcaagggccggattttattaaaggggttaaaatttgtacaaccttaatttggggggataaaatttcttttctaatatgcacccaaatcangtggtacccttacttttcttctttttttctaaataaaagaaaattattttggtatatataaaaggttgaacctagtaaaataaaaccctatggaaggtttgaatggtgcatcatgcctgagtacatatttcttttgattgatgaatttgccttgtgngaaatcttctcatc

SEQ ID NO: 25042 - DNA, 353 bp, Zea mays
  unsure (1)..(353): unsure at all n locations
agctttatagatatccaacttcagaagaatatggggctgcttttgttgatgcagatatttggctatttgttgaaccaggacaaagttgtcctggatgcatctacccttgacaaaagcgctctgatttgctgccaccatttcattaagtttcccaggcaacctattggccagcagctntgcaacaagtttagcaaagttgtgaatgaggctaatcagctggaaatccttgaccatggtagcatcctccttctttggtaaaagtgttaataatgctgtgtttaggagttgcaaatttctaaaattaccacactaaactgaaccagggtagccataatatcatctttaataatgag

SEQ ID NO: 25043 - DNA, 434 bp, Zea mays
tctaaagggagaacacgtgataggtctaaccaatgttactttcgaaaaagatagaccttgtgcagcttgtcaagcaggtaaacaagtgggaggagcgcatcacagcaagaatgtgatgaccacatcaagacctctggagctgctacatatggacctcttcggacccgtcgcctatctaagcataagaggaagtaagtatggtctagttattgttgatgacttttcccgcttcacttgggtattctttttgcaggataaatctgaaacccaagggaccctcaagcgcttcctaaggagagctcaaaacgagtttgagctcaaggtgaagaagataaggagcgacaatgggtccgagttgaagaaccttcaagtggaggagtaccttgagaaggaagggatcaagcacgagttctccgctccctacacaccacagc

SEQ ID NO: 25044 - DNA, 402 bp, Zea mays
  unsure (1)..(402): unsure at all n locations
agcttggagactttggtgtttctgcttgtatgtttgatagaggtgacaggcaaagatctaggaatacatttgtaggaacaccatgctggtaaatcataaaccaaatttctataaatatttgtattaccagatcatttttacatgttttttttttgtaaatnttctatgtaggatggctccagaagtgctccaacctggcactggatataatttcaagtatgttggctgtgtatatatttgtaatttatttgcacgtaagacatgccaggatttatcctataaactgaaataaatggccaaaagatcaccttgtattctctgtgaattggtttatatatggccttcctcttgcattatatctaaaacagattntgtgttaactnttttgatggctgtttgttt

SEQ ID NO: 25045 - DNA, 286 bp, Zea mays
cttggtatatggaggcaaccacaccataaacttggttggttgatgtgccctaatggtacatgatggacatgaagctcgcgctaaatccataattcacatattcctttaattgactagaacgcaaaattgattctccattcaataccactcaatattttgcacaaattatgggtttagtatatgtgatcgactgaacttgattatacctttcaaactctctttcgcattagacgcaaaatgagaggcgttactaccattaagcaggggcaaatattgagatccccta

SEQ ID NO: 25046 - DNA, 269 bp, Zea mays
  unsure (1)..(269): unsure at all n locations
gagcatgtggtattacccgaacctaaagcgcatgtcttaagttaatggctatgtggaaccgacggaaaacagtatgaagctcgcggccactgtcagcagggctgttctgtcttgcgtctgggctgaaaacgaggggttctacatggtgcacgggccgaanattgaggctgtggcacgaccactaacataagctaagatcaagcatgtggaaagacaccgaacctaacttgcatgtcttgagtgaatggcaccgtggaacggatggaaaa

SEQ ID NO: 25047 - DNA, 461 bp, Zea mays
  unsure (1)..(461): unsure at all n locations
taacctaagttaagaaaacctaaaggctntagggtaaaagttattatatgaccccaacaataaagttgaatcacatttatacccctgaaatgccagaaaccctaattggaacccgggaaaaccctgaaatcaaaccctaggggcttatgtgtaaaagtgatgaacctttggactagagtgtaaaaactactatgtttaaacatataaagtcatttggttcacaaatatgtggacttgaaagctaaaccctaagttttggactcatttgcaaaaaggaccttgattttgattcctatgctaagtctgaaatcagggttataggcccaactttggggctgtgtagctttcaaaataatgagaattcatgttaggtgaccgcatcaaagttgaagacctaacataggagaacaactttgcttaagaaggcaagcatagttattaagaanaagtcagagataatt

SEQ ID NO: 25048 - DNA, 380 bp, Zea mays
  unsure (1)..(380): unsure at all n locations
agcttaatacccctcctaaaagattggctaattatggtaagggcaaggctcccatgtctcaggataacgagggctatattttatatcctattggttatcctgaggataagattaggagaattcatgcaaagaagactcattctcatcatgcttttatttacaagaatgaggcttctagctctaggcgttctacacatgttaaaatgcataagaagaaaactcttattgcgtcaaatgaacctaatgtttcatttaaaactttngatgcatcatatgtgctcactaacaaatcaggcaagataattgccaaatatgtatggggcaaacacgaggggtcaaagacttgtgtttgggtacccaaggtgcttgtttctaatgtg

SEQ ID NO: 25049 - DNA, 447 bp, Zea mays
gacctataaaactaagcttaccgctactggcggaggaggctggacggtggctggattggttgctggtgtggttgagctcgatggtggcttgagtgggctggccacagcggccgtagctctggcggcaatggcgggcggaagtgagctcgccggagcttaggaacagtggctggccggtgacggtgagtgcggcgcgaataaaggtgcgcccggtgaggctttatatgcgcgggcgggcaccgccgaaggcgtgggcgcgcggtggacttgaccggacgccggggcgagcgcgcgcgccggttgggcgagctctggcatgcccaccagagtcgaacacatgtgcccgtgcgttctggccaagctctggcgcgtgtggtcgctcatccgagcctgctctctccttgggcagtgcacaaacctcttgtcctccctacagctaccattctt

SEQ ID NO: 25050 - DNA, 397 bp, Zea mays
agcttgtacagttgtacgtcatgttattttcctccaaatagctttgcttattgttcttttttctcaatactcagtcactaatatctatctgtaggtcaaaactcatattgggacgatgacacacatagcatgcagctctcatttggagttgatgagtttttggtactccctccgttcttttttatttgtcatgttttagttcaaaaataaactagcggacgacaaatattcaagaacagaggtagtattattttatttgttgcttttagtccagttatacaagcacccattacatgttttttctgctgggtgcatttgttttttaggggaaaacagcaagggagacccttgctgtggtgtatatttataaatatatataaacacacaatagaataaa

SEQ ID NO: 25051 - DNA, 460 bp, Zea mays
  unsure (1)..(460): unsure at all n locations
tgcaatctaccatataattggatcttttccatgctaaggtttaatcttttaagttcattctcaagtgcttcatttttcctatgtagctacaaaagacacaaagaaatataccaattaaaagcaatgtgcacttaagaattaattgttaccatcctttggatatcacttggttgtaggccttttgcttgattcccacaaaggttaatccttattccctacaacataagttcttgctagagatgaatatgaagttagtgatataacaactcaattcatctttgggtcaatcttaaaggatagacaatgtaagattgatagcttgagataagaattgagttgaaccgctcaagcaccccaaagcttcatatcatctgtgggtacctgcaaaacttattaagtacattttggtacccatttntggatgggtccaccaacgttagctagcaagtacttatgcacc

SEQ ID NO: 25052 - DNA, 357 bp, Zea mays
agcttgtgaatgttcttcatccctgcacgtgctaagcggcaatgccacagccaggccatgctagtcttagcaattaaacatgcatgtagaccggcctactcttttgcggaaccaactaagtaaagtttggcggctaatacacccttaaaagctagtgaaccatcacttcttctaaagacagacacactaatgacagacacatctacatttgtgaatagacgattatatcccatattgcataattgactgacagataacaaattgtattctagagactcaactgagaacacattagatatagagcggtcggatgaaataacacatttacctaacccttttaccttgccttgattccca

SEQ ID NO: 25053 - DNA, 357 bp, Zea mays
tgttatatcgtgtggtaatgcccggcattttattgctaaatatccatatataagtgataatggccgggatgacgaaaagaagaggaagaagaatatggcgaagaaaagattcttctataagaagggtggcgacgtgcaccttgagctagaatgggactccgacgagagctccatcgactcctgcgacgatgatgctcgcaacattgacgacaacataagacgtctcttcctcaacgcggccatatatgccttatggctaacgatagaagacagaatgtacattctagagatgactccagatacactacttctgatgactagggtagctctagtgataatgatgatgattagacttct

SEQ ID NO: 25054 - DNA, 360 bp, Zea mays
  unsure (1)..(360): unsure at all n locations
agcttatcaaatgctttgagtgtggaaaagaaggtcactntgcccataactgtaaagccaaaccaccaactcccttgcctaagcactcaagaccatccgctttcaatgctcaatatgttctaagaaaagtagcaaatggaaaggtcaaagttacattcctaggtccaccaagcaagagtagacctagacaaatttgggttgcaaagtccttgattgagagagccactggtcctatgcaatatagggccctcaaaactcaagcttgatttgtctgtggatgtaggtgaactacaagaccggagggagccattgggttattgacagtggatgcacacagcatatgacatgccatccacggat

SEQ ID NO: 25055 - DNA, 280 bp, Zea mays
  unsure (1)..(280): unsure at all n locations
gctaccgattacactaacgcttggtggctacatccatanggacactgcttatcaactagagaggaacacttatattgcttatgcaggatacatctgcccgaaggacggcatcgtgtccagccagcactaacatgagcttaactagagctacaattagtgcgctctgaatgttccaacgacgatctccagatggtgcgcatgctcttcctcgctgtttgacatgatgacaatgtcgctaatgataaccatgacaaaggtcatttactatatcctgaatact

SEQ ID NO: 25056 - DNA, 407 bp, Zea mays
  unsure (1)..(407): unsure at all n locations
agcttggctaacagctacagtttccatattctagtagtcagacagtgtctactagaccttttgatcttgttaatttgatgtatgaggcgctactcccttcgttttgaaagggggcatcattatcatgtgacttttaatgatgatttttctcgtttcacatgggtgtatctcttggattcacattctcaagtgctcattgtctatcagaattttgctgctatggttcatacccaatttgattcacctattcctgttttttgggctgactctgctggcgagtatttgtcccatgctcttcgtctattcctcgctgagcacgacacccttcctcagtattcttgtactggtgctcacacatagaatggtgttgctgagcgtaagcaccgncatcttcttaagactattcc

SEQ ID NO: 25057 - DNA, 451 bp, Zea mays
ttaccaaatggacgcgaagagtgccttcctcaatggttctatctatgaagaggtctatgttgagcaacctcccggctttgaagatagtgagtaccctaaccatgtttataaactctctaaggcgctttatgggctcaagcaagccctaagagcatggtatgaatgccttatagatttccttataaataatggcttcaaagtcagaaaagccgatcctacgctctttaccaaaacacttgaaaatgatttgtttgtatgccaaatttatgttgatgatattatatttgggtctactaacgaatctacatgtgaaaagtttactacgatcatgacacagaaattcgagatgtctatgatgggggagttgaagtacttcttgggatttcaagtaaagcaactccaagagggcaccttcattagccgaacaaagtatactcaagatattctaagc

SEQ ID NO: 25058 - DNA, 263 bp, Zea mays
atgtacgccaggctgtgagctctgatctgctgactgcgaatcaatggagacggatgcgttcgtgcgggacggatgcccctgcatggcggcggttcggtttaccttgtgaggatataaactcaattcgaatcgtgtgctgcttatacctaatgagactgcttgatccattgctctgtatcgagttataagaggacacttgatgagatgacactagactgtcaatgttcatcatgctcgctaccatgtatgagtagatcgtccac

SEQ ID NO: 25059 - DNA, 430 bp, Zea mays
  unsure (1)..(430): unsure at all n locations
aaaactcagcttgtgacacctncgtgaggctccccgagcaagaatctgatttccttcgccggaaaagccagtccacgctcgccggagctctcacccccgccggagcacgtggaccgggtaagccactccaccatccttcgattcctcgtgcacacagtcgttgcgtgaccccgtgatgctaaccgtgccctcggattgcgccagttcgccgtaatttggccggtatactcgccgccgacgaggacacccgcctgcacgcgtggaccgggcgattccggccacctccgacgccgagccgtacctcgacgtgaccgccagagtcttcccaagccgaccccacccctcgccggacctccctcgccgacggtaagccgcgccgcccttttctttcccgcggttactggttcagtgaatggaacgactgctggtg

SEQ ID NO: 25060 - DNA, 324 bp, Zea mays
agcttattttcattatgaatccactacttgtgaatagcgtaagctctaccattcataatcttgtgtgcagcatcaactttgaaaatattcacactttcataggaagtctattgatatccctgaagggtgtcttggatttgtatgtcaccttaaaaattatctgcttagaggttcccttgttttacaatacaatatctaacgctgaattgtcggcatatgtagttatttatatttgtattggcaccataagacatgcgactcctcattactatggaacttgcgagcgacttgcttgtgcggatattgtataataatttccatgtg

SEQ ID NO: 25061 - DNA, 448 bp, Zea mays
  unsure (1)..(448): unsure at all n locations
ntacattaagtgcttggtgaacacttaacacacctattatttcttttattgtggtgtcatccaaaccactgaaacctacaagagagcttttagactcagttgcaagatttgcttaaaatggggtttattcgacctagttcctctccataggattgtcctgctatttttgttaaaaagaaagatcaaaccttgaggatgtgtgttgattatcgacctttaaatgaagtaactatcaagaataagtatcctctaccatggaatgatcttttgttcaatcagcttactcgggcaaatgtgttttcaaagatttatcttctgttgagctatcatcaaattcgagtccgacctgaagatgttccaaaaatggctttcacaacgagatatggattgtatgagtatttatgtatgtccttatggcttactaatgctctagcatattatacttata

SEQ ID NO: 25062 - DNA, 399 bp, Zea mays
  unsure (1)..(399): unsure at all n locations
agcttctgttcggtttttcggctttaaaaaacttcggttntatagaaaatgaaaaaccgagaagtttggtttcagttttttactttggtttttcggtaaaaaccgaataccaaatttatactcaagacaatacatacaacaagtttacatgatagattacacataattttaaaaagtaaaaattatataggtacaaatatttagagatacatcatacatcacatacaaaaaagtgaataacaatatgattgtatcacacatttagttcacataatcgaatagtcaaatttgagaattgataaaatttggtattcgattcttttggtatttcgattcggtatacggggaaaaccgattacgataccaaaaactggacttcttagatacaaaaaccgaaac

SEQ ID NO: 25063 - DNA, 420 bp, Zea mays
ggtcctaaagtaacgatggagattcagactcgtccacttttgaaaactaggaaaaatttcagggaattaacatcgatttgggtcatggctcctatatgaggacatggccaaatttttagtttacacaaacataccaccaacattctaccggcacaaacacaccagaacaaacacaagttggactagcggtcaaactaagaagaaccatatgccacataaatacatgtctaaaggacccaacaaacaagactagaaatttgcttataagatagtaatgcttcacacattttccaattatttattatcgggataaagatgagggaagcacgtttgttcacaatcatgaattattagaataaagatgagagaagcatatttgtgcacaaatgacaaacacaatgcaacaatcaggatgcatgc

SEQ ID NO: 25064 - DNA, 365 bp, Zea mays
tgcttcttaagggagagcacattttatgactaacaaatgttcattttgagaaagacaggatttgtagtgcatgccaagcaggaaagcaagttgggtcccaacatccacacaagaacatcatgacgaccgacaggccacttgagctactccacatggatctattcggcccgattgcttacataagcatcggcgggagtaagtattgtcttgtaatagtggatgattattctcgcttcacttgggtgttctttttgcaggataaatcccatacccaagagaccttaaagggattcttgagactggctcataatgagttcggcttaatgatcaagacaattagaagcgacaatgggacggagttcaag

SEQ ID NO: 25065 - DNA, 436 bp, Zea mays
ccccagacaacggtattttctatccaacattgtatactatgagctaccaagttgtggtagcatcatctggaggagacgacaccaccatggccaaatctttcaccatatctctcgaaggcccaaccctcatatggtacacgaggctgccgccattgtcaatcgactcatggaaagaactctcggacaagctcttattaaattttcaagggtacataccagacacagacgctctggcagaattatcactctgcaggtagcatgagaaagaaacccttcgagagtactacaagaaattcctcttgttgaaggcatagctgccttcggttgattaccatatagctattcactatgcaatcagcgaccttcgtgcagatgttctatacaaccactgcataagagacccacccaataacttgcaagagttatatcagctctt

SEQ ID NO: 25066 - DNA, 402 bp, Zea mays
  unsure (1)..(402): unsure at all n locations
agcttgatctgnggcatangtacagcagggccaaagcgaagtttaatccgcgtgattggttacccgcactatcttattttggattaccgtatgcgttgactttatttgagattatgtttggttgcttgcatatgtgagtcacagtctgcatgagtggatgcaaaataagtcattttgatgctattaacctgcatccatccattgtatctagctagccaggacggtgttagtctacgtatggacgtacagctatccaatcaggctgaatgtgaatcatgttgacaacatgattagctgcgcaatctctctgttgtatacacttggcaaggacatcgattggcagtttttcaaaccttgccaagggctaatttgatgagcatagatccctagaggttccatgag

SEQ ID NO: 25067 - DNA, 414 bp, Zea mays
  unsure (1)..(414): unsure at all n locations
tgtggaggttcttcatccncacatgagctaagcggcgatgccacagccagcccatgctagtcttagctattaagcatgcatctagaccagcttcttcttttgcaaaatcaactaagtaaagtttgccgtctaatacacctttaaaagctagtgaaccatcacttcttctaaagacagacacatctacattcgtaaatagacagttatatcccatattgcataattgactaactgatagtaaattatatcctagagactctactaaaaacacattagagatagagtgctcattagaaattgcaattttacctaacccttttaccttgccttgattcccatcaccgaatatgattgaatcttgggaatccttattcttgacgtaggaggtgaacatcttcttctcccccgtcatat

SEQ ID NO: 25068 - DNA, 410 bp, Zea mays
  unsure (1)..(410): unsure at all n locations
agcttcttcagtgtcataaaatgtcatgctgattgctaatgcagaaactcanggcagctattgctgcaacctactatacggaccttggtattgaagattcagacatatttgtctctgatggtgccaaatgtaacatatctcgcttgcaggtgccaaagcagatttgactctcccattcttaaatttacaattcatcttaaattgtttgctaatgattctcctaattcaacattttaggtactttttggatctaatgtgacaattgtggtccaagatccatcataccctgtaagagagctcttgaattacttgtaactgtcagttacttacactnttcatattactgattctagacttatgtgtgatgataattgcgatatgtttttttgtcgtatataatacttaccgat

SEQ ID NO: 25069 - DNA, 453 bp, Zea mays
tgagtccgcgcctggaagtctccgaggcgagggaatgggcatcatatgtggagttgttttcgccgttgctgtagccgaccgccgagatctgtccaagtgctgtcgttgacgacacctttgggaagctacaagcgtccacacgtcccctatgttggtagtagacctctaccatagaggacgggcgattcaccgtcaggagcaccatcgacaccgccgccgtgtttctatctcggtgggggaactttctccgggtcgccgtccaaatggtggtgaagaatcccgccgtagatctagttttctccgttcgtctttgttggatctcaacgagttgaggtatgaatttttcgatccaaggctctaattcttgtgatgaagtggatttcggattcttctgcatttaattgccttgcaaaatgcgctctgattgattacggcctactgaacactatagct

SEQ ID NO: 25070 - DNA, 409 bp, Zea mays
  unsure (1)..(409): unsure at all n locations
agcttatatatactgcactgccaattttagtccatcagtatacacctagacaagaattacttgattatttgtaccacctgttgagtgaactaaaagtatgtgatgatactaatacacaagcatctacatttctttaaaggttntctaatagttgattatttgtgctagcaggggtaaaagactgaaactaaaattgcccaaaacaatcaaaccacgagctcgaagctaagttttgcaactagactatgtaaaaaaactctactagaaggttttgtggcaatacatgtctgcattgaaatttgatgttggaacagcattgatttgttctgtcgtcacatatgttatctagaagcatgcatatatgcaagctcaagcatatgtacgctggtgggaagccaaaaatcagata

SEQ ID NO: 25071 - DNA, 460 bp, Zea mays
  unsure (1)..(460): unsure at all n locations
tgtccgctttgctggngaggaggtggttccgcagccaagatttgactaattgttgnttttaagagcttcttcatggtagggcttcggttccctctacatgacatgataggagaagttttaaagaattttgagatataccttcatcagttaacacctaatgcaatagttagactcagtgtttacatatgggctctccaaggccagggtatgagtgctaatgccgaagctttctgtcgggtgcatgagctgcactactagacgaaggccagagcagatggtcttcataagaactttggctgctacaacttttcatatcgaaaagatacgaaggcccgagtaatcggctatcgccctaagtggccgaccggttggacaagtgaatggttctacatacaagcagacganaagaaaagggagaaattgatgactatgatcatgagtccaatgaaattaagcttca

SEQ ID NO: 25072 - DNA, 405 bp, Zea mays
agcttcttctttcattaacatatactgcgatgatgaaggtacttccttcatgatcttcgtttgaagattgttatatcctaagggagataatgcttccaaggacgaagggcattaacacttaacattctgtgttgccttgttcttaactcatagaatttgagaacaagtcaccaacattagcgcccacctccggtgtactcacttccacaatcttcggcaaagcatcaaccttcgtcgtgccgccgaagaagataacagcgccaggggctgcactgcaaccactggacacaaaccaggagactctctctctccgagaggccagaagccaaaagagaaaggccaccagtccaacacttcatgaggaggaattggaccatgagattatggacctagaaatcattcacc

SEQ ID NO: 25073 - DNA, 464 bp, Zea mays
actaagcttcacgtggggaaccccgcggtgcatactcaggtcagaaacttctttattttttgcgccatgtatggggtgcgatgttgattcacgatgactccatggctatcatcttcagcaccctgaccatattcaacactagggaggtttttcttctttggatccctctctcgcattgcggatctagaaggcatcctgcattgcatcacgaaccgtccaacaagaggtcttcgatctccgagggcaccgatcgtggaggcaggctcttccctcttaacctcagcaaaaaccacttcaacgaactctaatgcacgaagacctcaaccaacctcctccctgcgtatgactgcacccatgtaaatttaaatgctatgaatcttctacagtattttcgaaaatgcgagtagttggatccatcgggctattcatagatcacttggattatctatattactactggatct

SEQ ID NO: 25074 - DNA, 400 bp, Zea mays
agcttctccttttcttgcgcatatttttctgacttttcgagtagtttattctttaaactgtcattttcggcttggacctcagccaaggagccttccatagactgaataataaagtctttcttctctaaagcaccttcgtgttctttagccataatttcaaaatcttgaatggcaaagtccttcttcttcagaacagcttcgtaattatcaactttttcttctaaatctttgatgatagctttgttcttctcctcttcaagatcttgttgcatatttagcactttacttaataatatactctgccaaaacaaccttcgtcagaaaaagaccataatgataataattataataatatttttaccttaaaattcgcatagagcacgctgccggcgacatgata

SEQ ID NO: 25075 - DNA, 392 bp, Zea mays
agtttcttttggagaccacgtgatagggctaaccaatgttcatttcggaaaagatagaccttgtgtagcttgtcgagcatgtgaacaagtgggaggagcacatcacagcaagaatgtgatgaccacatcaagacccctggagctgctacacatggacctcttctgacccgtctcctatctgagcatatgaggaagtaagcttggtctagatattgctgatgacttttcccgcttcacttgggtgttctttttgcaagatgaggctgaaactcaatggaccctcaagcgcttcctcatgagagctaagaatgagtctgagccttacgtgtataatataacgagcgacaaccggtcggagacgataacttgaagtggtgagttcttgaggagaa

SEQ ID NO: 25076 - DNA, 404 bp, Zea mays
agcttcttaagggagaacacgtggtaggattaactaatgtgcaattcgaaaaagatagaccttgtgcagcttgtcaggcaggtaaacaagtgggaggagcacatcacagcaagaatgtgatgaccacatcaagacccctggagctgctacatatggacctcttcggacccgtcgcctatctaagcataggaggaagtaagtatggtttagttattgttgatgacttttcccgcttcacttgggtgttctttttgcaggataagtctgaaacccaagggaccctgaagcgcttcctcaggagagctcaaaatgagtttgagctcaaggtgaagaagataaggagcgacaacgggtccgagttcaagaaccttcaagtggaggagttccttgaggaggaggggatc

SEQ ID NO: 25077 - DNA, 438 bp, Zea mays
  unsure (1)..(438): unsure at all n locations
tccggcgatatggtgtcgttggtaccgtcaaaagtccttttctatcttcggcaagccaatgtntttgcagagagttctaacaattntagcttcgctgcggnttcgaaggcacctcagcttttcttcgttaaccctaccgaacagtgtagcccctggcttatatccgcaggctatggcacattttttaagctctgctttttcagcgtctgtcagtccttgcccaagtaaatcttgaaattcaaaatcttcttcctccaaaatgtcttcagcttgctctttccccttttcagtagctgtgctcgccgcagccacaacagattcttcttcagtcatttttaagagtatgttatcaataacttcaagcgtttcttccaggttcggatcttctgtggccccggtttcagccccggcagcttcngctgcgccagtttcagcttc

SEQ ID NO: 25078 - DNA, 399 bp, Zea mays
  unsure (1)..(399): unsure at all n locations
agcttgtgaagattcttcatcccaacatgagcaagtcggcgatgccagagccagcccatattagtcttagcaattaagcaagtgtctagttcagcattgttatcattaaaatcaaccaaatatagctgaccatctgacacttccttaaaagctattgaatcatcacttcttctaaagacagtaacactaacatcagtaaaaagacagttgtagcccactttacataattgagaaactgaaagaaagatgtaatctaaggagtctacaagataaacattggaaatggaatggtcaggagatataaaaatcttacacaatcctntgaccgaaccttgatttccatccccaaatgtgagtgctcttttgggatcatcatttntctcatatgaggagaacatt

SEQ ID NO: 25079 - DNA, 439 bp, Zea mays
  unsure (1)..(439): unsure at all n locations
acacataaaactcagcttggaagatcttatcccacatgggatagacgctatctatatcaacccatggaatcttagcaataacaagcgtctagatagctgggtnatcattaaaatcaactaaatatagctgaccatctaacactctcttaaatgctattgaatcatcacttcttctaaagacagaaacaccgacatcagtgaatagacagttgtagcccattgtgcataattgagaaacacacagcaaattgtaatctaaagaatctacgagaaaaacattaaaaatggaatggtcaggagatatagcaattttacccaaacctttgaccaatccttgattgccatccctgaatgtaataactcgctggggatcttcatatatctcatatgaggagaacatccttttctaccctgtcatgtggtatgtgcacccgctatc

SEQ ID NO: 25080 - DNA, 404 bp, Zea mays
agcttcatcataatgacagcgaaggttcttcattctcagataggcagaaatgtgctaacttatgctgatgatatcattgtgaaaagcacgaagcaagaaaatcacattgctgatctgcatgagaccttcgctaattttatacaggctggtctaaaactgaatccagaaaagtgtgttttcagagtgaagaatgggaaattccttggctgcctaatttcaacaaaagggattgaggctaatccaaataaaatcgaagctatccttcgaatggaaccaccaagtacaaagaagggggctcaaagattgacaggaagactggcgtctctcaacagattcatatctagatcagcagagagaaatttaccattcttcgaagtgctgaagtcagccgaaggttttcaatg

SEQ ID NO: 25081 - DNA, 448 bp, Zea mays
tgtggacgggacacacatgacaagacatcctagctatccaacttccaattttgtcatgcactctcacctactcacgagtgcttggtaccatgtgtcaagtcccaacggtcttgcaagactacaatcccctctaactacaactatggtgcatgcaagcaccaaacagtaaagatatgcaaacgatactaaacaataggaataaacctagaacaagcatagaattggtggtcccgtagatcatgatccatccacttgttgctcctatagttctggacttggttcaccaaggacttgagctggttgtagatctcttgtggcccttctcccttgttgatcatgacgaaccttccgagctccccctctatgagctccatcttggtgaacttgcacccttgtgcccaccttaagtgtatcttaatttccttagcgccctcaacccgtcaccttg

SEQ ID NO: 25082 - DNA, 363 bp, Zea mays
  unsure (1)..(363): unsure at all n locations
agctntggagatcattcaagntttggttgttttaactatatacttacacctcaaggtctccgacttcggcctctcggcggtcgccgacaagttccaccccgacgccctcctccacaccttctgtggcacaccttcctatgtcgctccgaaggtgctcgcgcgccgcagcaccaaacgtacacgcctcctccccctcagaccgcccgtcctcgcccaacgacactccttgccgcatatgcccgcagcggctccctcgcatcctgtcgcagatctcgtgccctcaccatcccaagcccacccccttcctcggatctaacccctcctcatgtctccgtggctagagctgatatcctcgttcatggc

SEQ ID NO: 25083 - DNA, 417 bp, Zea mays
  unsure (1)..(417): unsure at all n locations
tcngcagccgatgcgtgcagcggctgaaggatgtgtttcattctgttggagccagctctgcgaaatttacaccttcagctgaaaatctgcccagcacattaaaatatattgaaggcgaggttgatgcccttgacgaagttattggtgggcacgccgacttctgcgccctggtagcttctcggggcacagctactgcttttctgaaggctggctgcacgcatggaaatattgtgaacagaccaaactttagcttgtcagcatcagatctgatagatatcccaagcctagcccgaagcattggaaatagattcatgacccagatctgggtaagtggcgggcgaaaaatggcaggtgacgaagctcgaagccatcttaagccagtaagaaacttatgnnttgtacttttaccttctcctt

SEQ ID NO: 25084 - DNA, 362 bp, Zea mays
agcttgtgaatgttcttcatccccacatgtgctaagcggcgatgccacagccagcccatgctagtcttagctattaagcatgcatctagaccggcctcttcttttgcaaaatcaactaaataaagtttgccgtctaatacacccttaaaagctagtgaaccatcacttcttctaaagacagacacatctatatttgtaaatagacagttataccccatatgacataattgactaacagatagcaaattatatgcaagactctctactaaaaatacattagagatagaatgctcattagacatcgcgattttacctaaccctgttaccttgccttgattcccatcaccgaatataattgaatc

SEQ ID NO: 25085 - DNA, 279 bp, Zea mays
aggccactgtcggtacccttgagactatggtaccccttactacaggatgaagatgccgtagccacgccgctatctttaattgccgggtaaaagaactgtgcttggggccaaatcatggctcgccccagcctcaagcgaatactctgggccaacaacagcacccgaccccaccacgtggacaggtccgggggtgccacgtggccacaaaaggtgatatactccaaggtatcaacagtgagtctggacccccatgggaaagtgtccgacccctgtatatac

SEQ ID NO: 25086 - DNA, 396 bp, Zea mays
  unsure (1)..(396): unsure at all n locations
agcttcagtcccatctatattatggattgcctttaagtctgtccagattccttcggcccttctggcagcttcctgacttccatgaatggcaataggtccttggtccgaaggtatcttcatgcaaagatatgctagatgaagaattgcttcgaaggcattgagagtaccatgaccaatgattgcattgtaagggtattccatgtcaacaatgtcgaacacaacttgttcagtccttgtgttgttaatgaatccgaaggttactggcattgtgatttttccaagtgctataatctgccttcctccgaagccacaaaggggatgtgtggcatcatggattttgntcttcggctcctgcatatgtctgaaggccttagcaaatatgatatcagctgcgct

SEQ ID NO: 25087 - DNA, 398 bp, Zea mays
  unsure (1)..(398): unsure at all n locations
ntatcaaatggacgtgaaaagtgccttcctcaatggaccaatcaaggaagaggtctatgttgagcaaccttccggctttgaagatagtgagtatcctaaccatgtttataaactctcaaaggcactttatgggctcaagcaagccccaagagcatggcatgaatgcctaagagatttccttatcactaatggcttcaaagtcggcaaagccgatcctacactctntactaaaactattgcaaaagatttgtttgtatgccaaatttatgttgatgatattatatttgggtctactaacaaatcaacttgtgaagagtttattaggatcatgattcaaaaattcaagatgtcgatgatgggggagttaaagtattttctatgctttcaagtcaagcaac

SEQ ID NO: 25088 - DNA, 168 bp, Zea mays
ctcttttcaacatccttaggcacttctctagcatcgtgaatgcccttctcacttctttaaataatttctactgccatttctcggtcaccattatcccagatatcagtaaaaaactttccaccaattatgcttgcttcggccgaacggtctatagtgtcttcaaaggac

SEQ ID NO: 25089 - DNA, 206 bp, Zea mays
gtcgtcaagtttggatcacagagaaaatatcttcaggctgtacagctcaattataagaaataatgtatatacaagtgaggcagagacatctgtgcaaaccctggaattatggacctttaggctatctacacactttatagaaaagaacaccaatatgcgcaaaaatgaaaaagccatatattatacaaagtatgttttgcaatgat

SEQ ID NO: 25090 - DNA, 267 bp, Zea mays
  unsure (1)..(267): unsure at all n locations
ctgaccgagcggagaagttcttaatccttctattcctatcttatcgacgacgacgggcgagccatccaaagaactacgtggagagatntatgatgtcgacaagctataatgctataataactagctaggtatgtaggatcggagtcggagaaaacaagccaacgagtcngccgtggggatggcgaaacgggtgtgtgggcgcaccttgcgagatagcactactaatggtggcagctgctgcggcgtcagcngccattctctcttgct

SEQ ID NO: 25091 - DNA, 66 bp, Zea mays
aactaagctacaatgagacatgagactcaaaacacctgatcccactctccccctttttttttttaa

SEQ ID NO: 25092 - DNA, 253 bp, Zea mays
tcagcttatccgagaaggtgtcttcttgtgccccgtgcatgctctttgggttcatcgtctccgatcgaggcatcgaagccaacccggagaagatcgcagctatcaccatcatggggcccatcaatgacttaaaatgcgtacagagggtcatgggatgtctcgcggacctgagccgcttcatctcacgcctcggcgaaagatgtctgcctctgtaccgcctgttaaagaatgccgagtgtttctcttggacccc

SEQ ID NO: 25093 - DNA, 187 bp, Zea mays
cagctctaccaaaatctaccaagtatagctgaccctctaacactcccttaaatgctattgaatcatcacttcttctaaagacagtgacacctacatcagtgaatagacagttgtagcccatttgacataattgagatacagaaagcaaattgtaatctaatgagtctacaagaaaaacattggaaat

SEQ ID NO: 25094 - DNA, 203 bp, Zea mays
atgagtattgcaaatgttatctggtgtgagagaaggaaaagacgttacatgacatgagcaccatttgcgttacgtcaacagaatagctgcggagagctctaatagttggattctagtgtgataacaaccatgtgttatagtgctagagacgggtatgtcacgtgtttcatacattgtcgatacatggatgtgtgaccttagtg

SEQ ID NO: 25095 - DNA, 359 bp, Zea mays
ctctccaagctatcgttgagctatgtcccacctcaccactcgctcgatttctcgttcaggcgcgcggtttcctccccacgttgcgaactcctatttcccaagccatcatactcgtcttcctcgactctttccctccgcgcgcacaatgtgctcgcctgccgccacgaacgtcttatctagcttgttcgtagcatcaactatcattctatacctgcaagtccctcttcgacctcaataggagctcctgatcatcggaagggtagtagatggcaacggtgggatgcaatgcatgagacatttgcttcttgctggacttctccacgatgatgatcagctgttgctgtgtactgcatgggtgg

SEQ ID NO: 25096 - DNA, 327 bp, Zea mays
  unsure (1)..(327): unsure at all n locations
tgatgagtntattaaaaatacatcggtgtcactggtgttaagttgagggttattcgcgcgtgtaaagtaataatgtgattaatacttagaacttttagtcgatagtagaaatttgtttggcttatatagagaggtggtgacatgccaaagtagtcatcgcttcctctatatcttgagtatggtcaatacgcggtatgtgttcatgaattgggaagtaagcacatgatnggttcgagttatagaatatgggttacnggtcatatgatttggtggatgtgtgaaaatacatgtgaatatgtatgnttatataaaatgtgtggcatatgt

SEQ ID NO: 25097 - DNA, 244 bp, Zea mays
  unsure (1)..(244): unsure at all n locations
tgctgcacttaccgctgagtgcgaactgcacatattattcatatgagcccctggcgtcngtggagttaatgttgttaaatctatcagatattgcttcaactcctcgaaagctttnntgtggcttgatccccattgaaagacttccgctgatttcagcacttcgaagaatggtagattcctttctgctgatctggatataaatctattaagagatgccaacctccctattaatctttgggccccc

SEQ ID NO: 25098 - DNA, 225 bp, Zea mays
  unsure (1)..(225): unsure at all n locations
tcaccgaaattcaaaccttcgccttgtgaatagcccttggccacaagttgggatttgttacttgtcaccacaccatgctcatcttgcttgtngctgaatacccacttggttcctacaacattntggttatgacgtggaacctaatgtcatacctcattcctcgtgaagttggtgagcatctcttgcattgccaacacccaatccgagtctcttagtgcattcttc

SEQ ID NO: 25099 - DNA, 196 bp, Zea mays
ctttcttggatatgcttcgtgtaacatagcttatatattttagtagttaaatctgaagttcccgatgtgtatgttgatactattatggaatctcgtgatgccactttctttgagcatatatttccaatgaaagacattcatatcaattctagatactcttctgagataattcccgaacataatacacctattgaga

SEQ ID NO: 25100 - DNA, 228 bp, Zea mays
attcttgcactatgtccctagtgccgatgtgctccgcaataactcttaattcagccagatcaatttgggttggaccctctggtgtcatgttgcacggaggtctggtctctccgaagatcaactctaacggactctggactatcttctccttatcttcgtcaactttgacgttaaaccactcatactttcaaccagctatccacttgctacggttactgatcactggaa

SEQ ID NO: 25101 - DNA, 257 bp, Zea mays
  unsure (1)..(257): unsure at all n locations
tattttcttaacacattctatagatttttcataacaccttttcttggatgcacgaagctcttcaatgtttttttctaaatggtttgcccattgttcactaatttctcgttntgattcttcaactgtgcattcttctttatctctggctagctgtttccgaagatcctcaatttcgcgcttctgagcctcaacttgagacttgaaaagtagttcgtcttctttattttattcaccacgaatgaatatttatctttttc

SEQ ID NO: 25102 - DNA, 138 bp, Zea mays
  unsure (1)..(138): unsure at all n locations
tattctgcatggttcttgggaaccttcnggccgtgcacttgctttttattcaccttcaaaagtagaacatgctacgcagtgaaacttgatttatttgtacaaataatatcgctgagtacgaagctttgcttttgggtc

SEQ ID NO: 25103 - DNA, 211 bp, Zea mays
  unsure (1)..(211): unsure at all n locations
atatacttgactntgctgggatccaccgctatccccttatcagataatacatgtcccagaaattggatttcttccaaccagaacgcgcacttactgaacttatcatattattggtgctctcttaagcgtgtcaacatgatccatatatgccgagcatgctcctcttcattcttggaatatattaagatatcatcaatgaataccaccacaa

SEQ ID NO: 25104 - DNA, 194 bp, Zea mays
gagagcaattcgaggcttcgtagccttcaataatcttgaaaaattgttgccatgagcctcccttcactatttatgatgctctccggatggaactgcacgccctgcataataagaacgttcatggatgtatactcaaaatggacaacagcgatgctttctaaatacgatcacttgtctctgttttctatatgtat

SEQ ID NO: 25105 - DNA, 297 bp, Zea mays
  unsure (1)..(297): unsure at all n locations
gaagatagtgagtaccctaaccatgtgtataaactctctaatgcgctgtatgggctcaagcaagccctaatagcatgttatgaatgccttagagatcttcttatcactaatggattcatagtcggaaaggccgatcctacactctntaacaaaactcttgaaaatgatttgtttgtatgccaaatctatgttgatgaatatcatattgggtctactaacgaatctacatgtgaagaggttagtaggatcatgacacanaaattcgagatgtcaatgatgggggagttgaagtatttc

SEQ ID NO: 25106 - DNA, 291 bp, Zea mays
tactcagctgccatacttgtcaaacaacaacatctgccagcacaacaactacatgaccatacttattacttggcctttcgcatgcttgggactggatatgtatggacctttcaagaaagctcaatgaggatacactcatgtattggtagcaatcgacaaattcactaaatggatagagttcaagcccattgcttctttaacctctgctaaggccgtggaattcatacaagacataatattcagattcatgataccaaacagcatcatatctgacctatgatccaacttcac

SEQ ID NO: 25107 - DNA, 250 bp, Zea mays
  unsure (1)..(250): unsure at all n locations
atcttgagcttggcctatctgcaatgtcataagatgatcttgcagatatcattgtttattatatcctgaacgtgcatatattttttcttgtaaaataaattatatttgtagcttttcttgctatcgatatgctctcattctttgttgattttttatggcttgattctaagcaagtttaaggcccaaaaggaagcagaagatgagagctgtcanatagctcttatgaatcttcgatcaaaagtcattacac

SEQ ID NO: 25108 - DNA, 237 bp, Zea mays
actttgtcttggtcttgcttgactgccccttgcgaccttttatcgccgtcttgaatctcttgatgatgagagccatctcttcatcattaagtccggcagcctcgatttgtgccaccttgctatgtagcgtctccttgcttcttgttgccttgagagcaagaagttgaggctcattgattggaccattcaatgcgtcgtccacgtatcttgcttccttgatcatcattcgcccactca

SEQ ID NO: 25109 - DNA, 193 bp, Zea mays
gcgagctcttgcgaatcactattatctcagagaaagacaacacatgagacacagtgtttttatctcgtggttcggccaaatataacactttgctacttccacgttgtggcgttccaatggacgatggttgcaatcaacccctttcaagtgatccaatgatcaacttgaataccacggtgttcttatagttttc

SEQ ID NO: 25110 - DNA, 100 bp, Zea mays
atcacacgacggcagacgatgtctacgcggaattcttgccatgccttcattgctacgaacgcaccagtagcacgctcatgcttctggcacgcctatgaaa

SEQ ID NO: 25111 - DNA, 227 bp, Zea mays
ctggacttcacctcatggatgacctcattgacgtagtataccgtcttctatatggtccagacccctactgttgaccccgggcccttaatgtccatggtggtctgaccaccaccttcttctatgggaacctcctgactcccctgggaatggtgctccgtcctttcgatgaccagcaccgtgctcaccgactctgtagctgctgcaatgtacaaatacagcaactcccc

SEQ ID NO: 25112 - DNA, 202 bp, Zea mays
acttctcgactaagtcggggacaggtcctcatgaacaggtgaaagtacgcgttagcggcattgtctaccgatccgatggattcccacgcctctgggatacggatacctcactcgtaccttccgcgagaagcaactctcgctcacacaaacatgcctgttaccgacagagagtccatatgctcgtaacatgatgaaaaaagac

SEQ ID NO: 25113 - DNA, 414 bp, Zea mays
cacacattatactaagcttgatatgtccacatcacaatcattaatcatggtatgaaccaattgtttattcttctctgaccatacatgttaccttaatcttaccactgtcgttgaaccactggatgtactacgggtgtggatgtggaaaccgtttcagcccaagcctctctaccatgtgtgtgcttgctaagatgttgaagcttcctccatcaattattataagacaagatcgttccaaaactacacatcttatttggaacaaattgtcgcactggaatcgttcagctttaataatttgggcactcaatacacgtcgtacgaccaggctctcattgtggtcaacatgttcatccccaatatgctttcatcatcatgctcttttcagatcttgggaacaagcatggatatgtatca

SEQ ID NO: 25114 - DNA, 229 bp, Zea mays
tccttgatcatacatgcctacatacgcatccaatccttaattaacctatgtggagcatcacctgttgctaacccaagtaccgatttaagtacttccatccttatgattgtttgtattccttatgatgaaaagagcattataaggaactttgcagtaagatcccaccacgctcccaatgaataatattcttgcaggtagaagccatctttcctcaagataacccctgagc

SEQ ID NO: 25115 - DNA, 428 bp, Zea mays
  unsure (1)..(428): unsure at all n locations
acacttatatctcagctgtgaagtcttatcctactgtgctagcgggatgcccagccagttcctgtctttcttagctattaagcatgcatctagaccggcctcctctttngcaaaatcaactaaataaaagttgccgtcttatacaccttttaaagctagtgaaccatcacttcttctatagacagacacatctacatttgtaaaaagacaattatatcccatattgcataattgacttacagataataaattatatcccaaagactcaactaaaaacacattagaaattgagtgctcattagagattgcaattgtacctaacacctttaccttgccttgatgccatcaccgaatatgattgaatcttgggaatccttattctcgacgtaggaggtgaacatcttcttctgcccgtatatggttatgca

SEQ ID NO: 25116 - DNA, 431 bp, Zea mays
  unsure (1)..(431): unsure at all n locations
gttcgttctcatgctatcttaccatgagagaagaagacaacggtgtgtttgaatcccttaccatccaatcaagctctatgcaatccccattatgtttatatatgtgtgtttatttgataacttgcagcgagaaagagtataaggtggcaatcaaggatgctgcaagaattgatatgtacagccttaaaatgttcttggctggcaggaatcgggatctgccacaaaacactatccangctctggatatcgctttgagagaattcccaacttctgagtattacattcacacactcatgcanaagctatggcgtgaagtgtgatgcatcgtatattcatatttatcagccacttatgaactgtatatgaatgttgtaaattngttacttcaactccggtggcaggtatacaccgatctcaaaatcgtttttctc

SEQ ID NO: 25117 - DNA, 204 bp, Zea mays
tcgattgtgataataagatagcttggagagatatatgagtaatctaatcacatctgcttaaaagagggtttaaaaacaattacacgatatggtcagaacatggtgagttggatccgtgtgaattgcctggtaatgacgacagagttgtcggaattttatatcttataagtgatggtcaagtggataatgtggatgctaatcaag

SEQ ID NO: 25118 - DNA, 82 bp, Zea mays
gtcttggtcttgcttgactgccccttgcgaacttttatcgccagcttgaatctcttgatgatgagagccatctcttcatcat

SEQ ID NO: 25119 - DNA, 310 bp, Zea mays
tgctcaccccgttaaaggggcttaggggtagtcgcctttattaatgtcttccatgcatgcacacaaaaggaaaaaatggaattaatccacaaaaaggggcaaccactggggggatggatcataagttacatctctcacagaccgcactactacatgcttttcgttgtgccatgctatgttagaggcaaaaagtgtcatcttaatccccaatcccactcgaataggtgttatgtatatgtataacttctttgtactctagacaagaaaatataatgtgatcatacaagaatttgatgcaatctctgtagaa

SEQ ID NO: 25120 - DNA, 169 bp, Zea mays
ctcatcatccgcataataacataatgacgatcgacacgcgcctggagctcctacacatggatctattctgcccgatcgcttacataatcatcggcgggagtaagtaccgtctatttattgtggatgattattctcgcttcacttgggtattctttttacaggaaaaatc

SEQ ID NO: 25121 - DNA, 230 bp, Zea mays
  unsure (1)..(230): unsure at all n locations
ttcctgacttccatgaatagcaatgggccctctgtccgaagtatcttcatgcaaaatatgctggatgaagaattgcttcanaagcattgagagtaccacgaccaatgatttgcattgtagggtattccatgtcaacaatatcaaacacaacttgttcagtccttgtgttgttgattaatacgaaggttactggcattgtgatcttgccaagtgctacaatctgcctttct

SEQ ID NO: 25122 - DNA, 361 bp, Zea mays
  unsure (1)..(361): unsure at all n locations
cacactttatgactaacaaatgttcactttgagaaagacatgtattgtntcgcatgccacgcacgatagcaagttggagcccatcatccacacaagaacatcatgacgaccgacaggccacttgagctcctacacatggacctattctgcccgattgcttacataagcatcggcgggagtaaatactgtctagctattgtggatgattactctcgcttcacttgggtattctctttacaggaaaaatctcaaacccaatagaccttattatgattcttgagacgggctccaaatgtagttcgctgatggatcacgaaaattagatgcgacaacgggacggagttcaagaactctcaaattg

SEQ ID NO: 25123 - DNA, 159 bp, Zea mays
attaggtaatttctattagggcattgcaaaattaaacatacaacttgttgaaattttgcctattgaatgcactctatgtgtatcaaacatatgcagtgccaatgctatgatgtcatgctcaagttttatttatagtaacaccagtggtgttacacgggc

SEQ ID NO: 25124 - DNA, 85 bp, Zea mays
ctttgcacctttatccgctgtgactcctctaggaagccctggatagctttcttctcttttagacttaacaaaggctgtgttactt

SEQ ID NO: 25125 - DNA, 411 bp, Zea mays
  unsure (1)..(411): unsure at all n locations
aagatactcacgatgctcgagatgttgcaaaggcagctgaaaaaattgcagagcttgaaatgcggataggtattacctaattgctgttgactntatgttntatttctgtgacttcgaactcatttatgttttgtatcgcagctgaactatctcctcccccggagcttttcgagtcattgtgcgaccccgaagcaaaaaatgaagatgaaatttcaaagatggcccgagctatatggatgaagctgtggtcaactactaaacgaagctggagaagcagttntaatagaagaatagctattggtgtagaaacattcggaatattaatggtaatattgctgaacaaagtgtgtaatattttacagttntgaatgaatatatgagtcgttggtatccagttctttacgatgcatg

SEQ ID NO: 25126 - DNA, 103 bp, Zea mays
aacatgtgggatgctctcatcacacattaaatgtgatgacgacatctagacccttggagatgctgcatatggtacctttttgacccgtcgcctatctgagcat

SEQ ID NO: 25127 - DNA, 209 bp, Zea mays
  unsure (1)..(209): unsure at all n locations
aagcttgatggaagcatttntgacaatggtacatgaattgtaccacaattcatcttagtctattcacttataccactgagaaggtgtctgatgcactgcacaccttataaacatttccaagcattggttaattctctcagtttgtccatctgattgtggatgataaaccgagctcaagtgaaacttaattccagcaagtcgaaacaact

SEQ ID NO: 25128 - DNA, 201 bp, Zea mays
gattgaagattaacttcattattcctgtcattatgatgccattggctctttcaacaagtccatttgactccggacgcctgactgatgcataatggatcttcgtgccaatttgatcacagaattctctgaaaacttcggagtcgaactgtgttccattatctacagtgatggcctttggtactccgaaacgacaaacaatat

SEQ ID NO: 25129 - DNA, 166 bp, Zea mays
ataaaatgcatttactacctttacttgctgatccataccattattgatctggatctatctgcgagaggacattttttccctatatggtggctcgtgcatatcactgacccgatgctaccgcagaattagctggactagaccatctgtggtcacagtatacatgcta

SEQ ID NO: 25130 - DNA, 61 bp, Zea mays
ggaagctctcatcatgtccaaaatgtgatgacacatctagacccctggagttacttcatgt

SEQ ID NO: 25131 - DNA, 401 bp, Zea mays
cagcctgcaagagaagatacaaaattcttcgactcattattcaaagcgtttattgtattttatagaaaatggataggctgagaaaagataggggtggaaactttaccttcattgatatccccattgacaagaatactctgatctttgagagtcaaggccatgataaaccttgagaccagataagtggtcttgttgttgcataacaaaaacaaaggcacttgttaccattgctattcacaacatatttaaacaaaacttttgatcgttgtaactgttatccaactattaatggttccaagaaaaaaatctgtgtgactaaaaagatttgttatcactacataccacttgtgtttcctaatggctcaatgcacatttcataataccatctatatcatgatatc

SEQ ID NO: 25132 - DNA, 203 bp, Zea mays
atgagcaaaattcatggtgagacaattaatgctcatactatttgctctaacaatgtacctatgtgcttctacaaagaaagatcaaagagatacaatatgatgtgctatggatgcaatgagaaaggtcatgaaatcgattcatgcccccacatgaagaatcaagaccttgcacgatcaataaagatgaccatcataatggatga

SEQ ID NO: 25133 - DNA, 406 bp, Zea mays
tcttcatgcgattctcacttatatgacccacacgacagtgccacatgtaggtaggacttatatcattatgccgaggccctttatcactaatattacagataggtgcatcatcaagatttataatgaataacccattcataatggatgcataagccacatacatgccattcttatagatcacacaaccattgttttcactcgcaaatgaataaccatccttcatcaaacatgaaggagacataatgtgtcgactcatactatgaactagataacaattatttaactccaaaatatatcctgatgggaggtgggttgcatcgtcctgacggcaacgcagcaactcttgattattgctacccggaaataacttctcctctttcacgctttactcttatcattcctgatc

SEQ ID NO: 25134 - DNA, 167 bp, Zea mays
catcatcgccaagatcttgaatccctggacatacaatctggccaacgatcaatgcgaggtctacagcaacgcttggaacatccaatagctacgtcgtttctacccttaagatgtttcaagtcgttcatataccccgttctctttacatacaatgataaagtctaacc

SEQ ID NO: 25135 - DNA, 182 bp, Zea mays
catgtgtcgagtgtagctctatcaaaatctactaagtatagctgaccctctaacacacccttaaatgctattgaatcatcacttgttcttaagacagtgacacctatatcagtatagagacagttgtagcccattttggataattgagatacagaaagcaaattgtaatccaatgaatctac

SEQ ID NO: 25136 - DNA, 127 bp, Zea mays
cgatgttgctgactgtgatgttgcgcccattgatgcctggtatattctgcctagttgaccatgggaatttgattcagatcgcgtgcatcatggtggatcaaatcaatattctgtcatcaccatgata

SEQ ID NO: 25137 - DNA, 303 bp, Zea mays
  unsure (1)..(303): unsure at all n locations
tctaagcttatgatgagcagtgagccagtccacttcactttgtgtgtactcctcaactgtcaagtggatttacatgcctgcttgttggtcattctntgacccttcactttcttgaagtacacagtaacagctttgacccgtgcatctgacattgaaccatttataacttttctagcagcattgtggaatacacagtttgcatgttcttcggttgctgtttcgtccaatctaaattgttccttgccaatgaagaaacaattaaattcatttatagatgcccatggtgagtcaattttaaataca

SEQ ID NO: 25138 - DNA, 245 bp, Zea mays
ctcacatttcttgttgcccattatatattctctaattctcataattggctcacatcataattttatactgttcattccctctttcttattttcttgaatattgctcatggcgctcactttaaggtttttaattaaggttgcacattcttatcttgtcaaagactcaattgtgttgatcatgttacttttaagtatatacttggtgaattctctattacttaagttgttttgatgctcatgcttac

SEQ ID NO: 25139 - DNA, 145 bp, Zea mays
agtacacccttaaaagctaatgaaccatcacttcttcttaagacagacacatctatgtgtgtgaataaacaattatatcccatattacataattgactgacatataacagaatatattcaagccactcaactaaaaacacattag

SEQ ID NO: 25140 - DNA, 216 bp, Zea mays
tatcaaccaagcaagtgtggagttgagctctatcataatctaccaagtatatctgaccctctaacactcccttaaatgctattgaatcattacttcttctaaagacagttacacctatatcagtatatagacagttgtagcccatttgacataattgggatacggagagcaaattgtaatctaaagaatctacaagaaaaacattgtgaatagtat

SEQ ID NO: 25141 - DNA, 302 bp, Zea mays
  unsure (1)..(302): unsure at all n locations
ctcatgagttctgaataaactactgatctacaacggaatctattcttggtaaagtgaattcatacttcngacatgccttgtttatgtttataaaatcaatgcacattctccacttcccattatcctttgtcaccataacattgttatccagccactctggatattgtacttgcctcgtagcatccgcactgagaagtcatcttacttcatttggtgcaccttcagctttatcctcagacatttttcgaagtctctgctttcttgtgctgagtgaatgctcaatgacatctctatttgcacca

SEQ ID NO: 25142 - DNA, 206 bp, Zea mays
aaatgcgatatttaataccacggtgtacccaaaactgtggtatttttggagttttggaaactacaattatggcctcaggtctcttctatatctctgaatgcatactgtgattcttctagtggaaccaaacaaatctagaatatgtaaggtattttaaaactacactattttaaaattgcaataccaaacatgccctaacctatacg

SEQ ID NO: 25143 - DNA, 263 bp, Zea mays
  unsure (1)..(263): unsure at all n locations
tctatntggagaacacgtgatatgtgtgactaacgtgcatttcgaaaaagatagaccttgtgcatcttgtcaagcacgtgaacaagtgggaggagcgcatcacagcatgaatgtgatgaccacttctagacccctggagctgctgcatatggacctcttcggacctgtcgcctatctgagcatatgagggagtaagtatggtttaattattgttgatgacttttcccgcttcacttgggtattctctttgcaagataagtctg

SEQ ID NO: 25144 - DNA, 196 bp, Zea mays
acatgcatctagatcggcattgtttttattaaaatctactaaataaagcttgtcgctagatacacctttgaatgtgtatgaaccataacttattctaaagacagttacatcaacatttgtgaattaacaattatattccatgtgagccgacttacagaaagcaaattatattcaaacgattcttccaaaaagacat

SEQ ID NO: 25145 - DNA, 255 bp, Zea mays
acgatctctacttatgaatatccattaaatatcttataagagattgtgttgtaacacaatcaatattttcctatttatcaacctctagtatatgaatgacaagaaggttactaaaacaacgaaacctcatgatatgaactatattacccttacaagcatcatgcataacatcaattgtgaaaaaatgaaagtagcatgattatttaattaaatttacatggcaagtttaattcatatcatggtgagtgatttatg

SEQ ID NO: 25146 - DNA, 265 bp, Zea mays
taagctgaccaagaacgttgatacacctacctcatccgaagtggcaagctgttgcgttgatgggtctgatttacaccgtcaattcgaacgccgagttaccctgtaccgatatgacaatgcattttattcgataaagcctcaccatggttgctatgatccattggcttatcctcttttcttcccaagaagggagctcggttggcattcatgcatacccaatgtcggtgtcaacacttgcttaattgatggacgacaatccatatat

SEQ ID NO: 25147 - DNA, 204 bp, Zea mays
atgtgttgagttgagctctatcgaaatctactaagtatagctgaccctctaacactcccttaaatgctattgaatcatcacttcttctaaagacagtgacacctacatcaattaatagacagttggtgtccatttgacataattgtgaaacggaaagcatattgtaatctaatgaatcaacaagataaacatttgaaatggaat

SEQ ID NO: 25148 - DNA, 207 bp, Zea mays
tgactaacgtgcaattcgaaaaagatagaccttgttcagcttgtcaagcacgtgaacaagtgggatgagcacatcacatcatgaatgtgatgaccacttcaagaccactggagctgctgcatattgacctcttctgaccgtcgcctatctgagcatatgagggaagaagtatgggttagttattgttgatgacttttcccgcttcac

SEQ ID NO: 25149 - DNA, 500 bp, Zea mays
  unsure (1)..(500): unsure at all n locations
cacttatatctcagctggggtcccatgcattttgttatctactgtgcctggtgcgcttctttttgtaaccaagaatgaacttctaaagaaactcatcaaaaattctcacataatgagatgaagccaattttgtggacttgcactgtcgctgccccacaaatgactgtcttgctttacagtctaaatggattggtcttgtaccatgtaagttcctatgaaaatacgaattatgcctattttgtttatgaaacttctttgtcctgtgggattggcatgttacatgtattactaaaatgacttgtgcttgttacaaaccacatttttctgttaancattgtgcatactgcactgagatattntgaataaatgtggggtgggatggccttctgataatgccgtgttgtgtgtggtaatctgtgtcttggtgtgaccttgacattggtggattgcatggacatgtccttctttctctctcaaatacaactgtatactctatgcgt

SEQ ID NO: 25150 - DNA, 194 bp, Zea mays
agttctggaaccatttatctattgtgtaccttcaaattatgaatgttacatagttatcttcgctactgcatatcagtaagttaatactctgttgggtcaagcatttgaataagtacagtttaccatctgaatatgatgcttaatgttatcattgcacatgttatccatctcactactattggctggctgtatgc

SEQ ID NO: 25151 - DNA, 286 bp, Zea mays
  unsure (1)..(286): unsure at all n locations
cacacttataatctcagcttctaagggagagcacattntatgattaacaaatgttcactttgagaaagacatgatttgtagtgcatgccaagcatgaaagcaagttggtgcccatcatccacacataaacataatgacaaccgacatgccactggagctcctacacatggatctattcggcccgattgcttacataagcatcggcgggagtaagtactgtctagtaattgtggatgattattctcgcttcacttgggtgttctttntgcaggatanatctcacacc

SEQ ID NO: 25152 - DNA, 156 bp, Zea mays
gataacatgcccccttcttgtgccacatgcagcatgatgtatgatgattatgctatgcaaaatgatgtgatgatgttatggtatgcaaaatgatattttgtgccgaagatacacacattcctgcaatggggcacaatcttttgtatcaatactgac

SEQ ID NO: 25153 - DNA, 202 bp, Zea mays
ttgcactcaccaacatttccaaatcgagtgtcactgaaagggaaatgtgcccttgggccatttctaagtattttggtgattgagtgtcaacacacagtgcttaaatgtgaatcaatgctcatggatgaacaaagtgcaaatctatatgaaaggtatgtttctaagtcttaatacattggttttgtgtacttatatatttgtc

SEQ ID NO: 25154 - DNA, 61 bp, Zea mays
acctttatctcactttctttttcgaagttgttcacgcgacatcttttgactgacttcaagc

SEQ ID NO: 25155 - DNA, 246 bp, Zea mays
atatacacatttactcaagcctagctactggtgcatatgtttcaccaaaatccacaccttctacttgagagtatcccttgtgcacaagtctagctttgttccttgtcaccacaccatgctcatcttgcttgttgcggaagaccacattggttaccacaacattttgattaggacgtggaactaaatgccatacctcgttcctagtgaaattgttgagctcctcttgcatcggcatcacccgatctg

SEQ ID NO: 25156 - DNA, 406 bp, Zea mays
  unsure (1)..(406): unsure at all n locations
atgcttgagatatttataacatgctttcatatgtgcatatactgtcatgagcatcacacctataccttggcacaatgcacttcacactctntatgatatagatatgatctcattaacctaattatgtgcacttggcattntagacaaaaaaatatgttttcctctctatgcacatatntaaggggagcaatctatattgtatagaattgtntaagcttaattgacatatccttttaatcatgtctctgtccttgggacatgtgcatatntcttctctctatttatgccaaggctaagactaatatgttgtcatgagcatctcatgtattaagtcttagatcgaaggggaaatggagtattcggcaaagacatcgcttccactcaactncattggtattatacactc

SEQ ID NO: 25157 - DNA, 362 bp, Zea mays
  unsure (1)..(362): unsure at all n locations
atcgcatgccacgcacggaagcatgttggagctcatcatccacacaagaacatcatgacgaccgacatgccgcttgtgctactccacatggatctattcggaccgattgcttacataagcatcggcgggagtaagtattgccttgtaatagtggatgattattctcgcttcacttgggtgttctttttgcaggaaaaatctcatacacaagagaccttaaagggattcttgagacgggctcaaaatgattccgcttaatgatcaagatcatagaagcgacaacggactgagttaagaactctaaattgaaggcttcttgcgagganggcataacatgattctttctcctaccccacaacaat

SEQ ID NO: 25158 - DNA, 216 bp, Zea mays
cgcatgccaagcatggaagcaagttggtgcccatcatccacacaatgacatcatgacgactgatatgccactcgagctcctacacatggatctattcggcccgattgcttacataagcatcggcgggagtaagtactgtctaattattgtggatgattattctcgcttcacttgggtgttctttttgcaggaaaaatctcatactgaaagggaaat

SEQ ID NO: 25159 - DNA, 65 bp, Zea mays
ccccttaccactatatgaagacacaacaccagcgcacgagactttagacgcgtggtataggagct

SEQ ID NO: 25160 - DNA, 433 bp, Zea mays
  unsure (1)..(433): unsure at all n locations
agcttcacgcctttcgccttgagacatcggaatgtctcttcattgtcggaaaggaggtcagaggctttcctcgtcttgactatgatgtcatcgacctaggcctcgaccgttcggccaatgtgttcaccgaacacatggttcatgcacagctggtatgtcgcacccgcattcctcaagccgaacggcatggtgacatatcactacatgccgaanggtgtgatgaaagaagtcgcgagctggtccgactctttcatcctgatatggtgataccctgagtacgcatcgaggaaagacagggtttcgcacccagcagtggaatccatgaattgatcgatgcgaggcaganggtanggaaccttcggacatgctttgtntagaccagtgtagtctacacacatttcgcatttcccttctttctttctcacaagcacag

SEQ ID NO: 25161 - DNA, 505 bp, Zea mays
  unsure (1)..(505): unsure at all n locations
tctccttgtcatcatcaaccttgacatagaaccactccgacttctattcttgttgccgattgcttcggtagctgattacaggaaactatgtgggtttccgataagcaaaattatagcaaccaaaattgtcatgcaatccatcttttctagccttcgtctgatagtgcagctcgtgaactcggcaaaagctgtccgcaaacggttccaccgcttggcttctgagggcccagatataaacactaagcctaacgatagcgttaggagtcaactgatgaaagtagataccaaacctcttcagtacctctgcaatagtcccatgaagggggaatcttaatccagcctttagaaagctcttaanaataattatttcatccttctctggttntggggtagtttcttccccaccgaagcgtagtagcttcttctgactntcactgaanaaacccgactntaccatcttggagagatcagccttcgaaacagtagactntccgaagtccaagtg

SEQ ID NO: 25162 - DNA, 326 bp, Zea mays
  unsure (1)..(326): unsure at all n locations
ttctatcaagaatattccacgaggagaaaatgagcacgctgatctgctagccaagtcagcggcacaggggctgcctttaccttcggaagtattctttgaaacaataaaagcaccttcggtcgaccttcttgaaagagcagtgctcaatatatctcttgttacagcgaagattggagaactgagatcatgtcttttctccagggcaatttcctttcagatgacgaagcttataataagagaatagcggcaagagcccgtccatatgtaataatagaaggggagttatacaagcatggagtctgttctccattactcanatgttatct

SEQ ID NO: 25163 - DNA, 465 bp, Zea mays
  unsure (1)..(465): unsure at all n locations
ngaagccatggtaagtagcataggcaagtaatatacgaattgactcattcctatctatgggtgcataggtttcaccgaaatccaaacattcgacttgtgaatatcccttggccacaagtcgggctttgttccttgtcaccgcaccatgctcatcttgtttgttgtggaagacccacttggttcctacaacattttggttaggacgtggaacaagatgccatacctcattcctcgtgaagttgttgagttcctcttgcatcgccaacacccaatccgaatcccttaatgcgtcttccaccctgtatggctcaatagaagacacaaaggagtaacgttcacaaaaatgagcaacacgagatcgagtggttacccccttatgaatatcgccgaggatggagttcacggcgtgatctcattgtattgcttggtggactcttgggtgtggcggcttggaccatcgtcatc

SEQ ID NO: 25164 - DNA, 366 bp, Zea mays
  unsure (1)..(366): unsure at all n locations
agcttgtgccggcacagcccaatgaaggcacgacgtggtttatggccagactggtcactatttttgcactttggattggcacggtacgtcccaaaagttttttaggctttcttggcccgaacatgtttagcacgattgagagcacctatagggggggtgaataggtgatcttgcgaaatntaacactaatatcacaaacttggtttataaaatactagttagcttaaaccaatgtgctataaagcgagctcttgagaagaaatcatatacatggaaaagcaacacaatagacacagtattttattccgtggtttggcaatgtctacttcactttgtcgtgactctcttcggtaaagattgccttaa

SEQ ID NO: 25165 - DNA, 432 bp, Zea mays
ctatgagctcatagaatatctaaacatagggctactaaagtatcttcttttgagcttgtctatgggcaagaagcagtgttgcctgtggaaataagtttgaatgctgtcaggttcgccagacaaaatgatctaactgctactgattattataattcaatgatggataatattgatgaggtgaccgacaagaggatgatagctttgggagcaatagaaaaggacaagatcatggtagccaaggcctacaacaagaaggtcaaagcaaatatattccaagtaggggacctggtgtggaagaccattctgcctctaaggaataaagaccggaagtttgggaaatggtcgccaagctcggagggtccttataaagtaaaacaggtgatgtctggcaacgcctatttgctacaaacattacaaggcaaggatttgcct

SEQ ID NO: 25166 - DNA, 245 bp, Zea mays
  unsure (1)..(245): unsure at all n locations
agcttaagagactnttttcacggatcaagctcgtttcgaataacgatctatcaccacgaaaggggctactgttgggtctatgcttcgtcgccgaaggtcttatatgaagaagtggtcctccgctgaagctgtttgtataagatagccgaaggtttctcttctggaagcttcggtattaccaaccgacttaaagatagaatgaccttttaatccataaagggctgagtcaatgttgtaagctttta

SEQ ID NO: 25167 - DNA, 466 bp, Zea mays
  unsure (1)..(466): unsure at all n locations
actcagcttantaaagctgggcttcggttcccactgagcaggtttgtagttgaagtgttaaaaactttccaaattttccttcattaattgacccctgaagctatattgaagatgggagtcttcgtctgggcaacaaggagccaaggtatagacccaagcgcaaaatgcttctgcagcatgcacgaacttatgtatgaaacgaaggccactggaaaataacagtatcataacaacttcggttggtatggatttatcgctcgtcccaactcaagctacccagtgccaacatttcggaaaagatggccaggaaattggatggaggaatggttntatgtgaagaacgacatagtagcagggaagatgttaaggaggttattatgcgccccatttggtcctgcttcggcctccgaaggccgaaggttgagattgacgaagtcgccgaagcatgtcaaaaggcatttggtac

SEQ ID NO: 25168 - DNA, 495 bp, Zea mays
  unsure (1)..(495): unsure at all n locations
agcttctggcaacagcaaggctccttccgttcattatcttcgagaggcagaggcaccaggggcttccgcggaagatatggcgatcaaccgagaagaatcttttgcttattctgtggtgagaacaaaggtcataccaccaggatgtgccatgttaccatccagaagcaaaaggaaatagccgaagcggcagcacaacaggctcagccgaagcaggtcatgcacactgcttcgtatcattcgccttacatcccagagtatgtaggcaatcaccctacagtttctgttgcttcggcgagtcaacctcaagcttcctggcaacagcctccgccttcaccaccgctgcaacaaggccagcagccagaagggagccaatatgctccacaccanagggacttcagagaacagtccgaagctcgcacagtcaacagcactgtgccagagtcaaagcacatctatttgacaatatcctaccttaatagcaatcttttttcattc

SEQ ID NO: 25169 - DNA, 492 bp, Zea mays
  unsure (1)..(492): unsure at all n locations
ntatcaaatggacgtgaagagtgccttcctcaatggaccaatctatgaagaggtctatgttgagcaacctcccggctntgaagatagtgagtatcctaaccatgtctataaactctcaaaggcgctttatgggctcaagcaagccccaagagcatggtatgaatgcctgcgagattttctaatcactaatggcttcaaagtcgaaaaagccaatcctagtctctctaccaaaactattgcaaatgatttgtttgtatgccaaatttatgttgatgatattatattttggtctactaacaaatctacttgtgaagagtttagtgagattatggtacagaaatacgagatgtctatgatgggggagttgaagtatttcttaggatttcaaatcaagcaactctaggagggcaccttcatcagccaaacaaaatacattcaagacattcttacaaagtttggaatgaaggatgccaagcccatcaagacacccat

SEQ ID NO: 25170 - DNA, 426 bp, Zea mays
  unsure (1)..(426): unsure at all n locations
agcgccacctggtccaccgggacgtctgtctatctctccgcgccgtgcgccgtatccagccccgcgaagctggccaccaggagcatcgcgacgacgcagacgcaccttgcctggagctccatttttttccttgttgcctggtagtgcacctcacgctctgctgccttggctgcactacacttcactgaaccctgatgaagtctctgatggagtggtggctatatatacacagtctcggggcctcgagcgtgaacggaactcatcatcgtttgcttgaggttntgcgcgcctcatggtgtgaaacgctcggagtggacgctgcactagcgctgcctttgtgcggcatgcgccgagctctatccgttntaagtagcattacctactgcgctccactatagtgaggcagggcttaacgaccatactaca

SEQ ID NO: 25171 - DNA, 481 bp, Zea mays
tatgaaggttcttcatcccaacatgtgctagacggagatgctttatccagcccatattagtcttagctattaagcatgcatctagatcggcattctctttcaaaaaatcaactaagtagagcttgtcgtctaatacacccttaaaagctaattaaccatcactccttctaaagacagatacatcaatattcgtgaataaacaattgtagcccatgtgacacaattgacttacagacagaagattgtacccgagcgactctactaaaaatacatttgatattgagtgctcgttagtgatagctatcttgcccatgcctttgaccttgccttggttcccatctccaaagatgatcatatcctggggatccttgttcttgacgtaggaagtgaacatcttctcccccgtcatgtggtttgtgcatcagctatcgataatccagctggagcccccggatgcataaaccttgcaggaatttaagct

SEQ ID NO: 25172 - DNA, 514 bp, Zea mays
  unsure (1)..(514): unsure at all n locations
gcttgtggaggaccagatcatcgaagcttataagtttctggatgagaagtggtcacccaagttccattgatgaagcactataagagcaatcaaggaagggacccatggataagttcgcaagaagaaggtttgtgtgttggcatcgatgcttcttcaataagctagctgccaagcgaaacctagaagcctgaagatgatctttgagtagccagaatcagcgtttgcaatcagcaaccggatgctcctgaaaggctagaaatttgtgaagctccatctnctcgaagagtctgcaaagtaaagatatgtagctgaagtaaagctatacccataacccttctaagccgaatctcgaggacgagattcantttaagtggngtagaattgagcatcccaaanatcaaatcctaaattntctcanactcgctctaaattcngaatgaaattcanatttcatttcanaatgtttggttgcgagttgatatcaacacatataatatagtcggctatattctct

SEQ ID NO: 25173 - DNA, 488 bp, Zea mays
  unsure (1)..(488): unsure at all n locations
tggacattatttatcagagaagtaagcaaattcttatgatatatttaagantttcttcacgaagcatgaaaagaatggaatgtgttttttcgccgaaggctcaaaanaatggtatgtatgcaaagtttcatgcatcgtaaagaattaaactataaatagattgtatattacatttaaaattacaatatattacacatttttacatttcaaatgtntctacaatggcattcaatcctctgtaagcactatttctgcagcttcgttcaatagttggttgacaaccttgttcataatggcttcggtcatttgtctaatttcatcgtcccccttcgggtggcggccggagatgcctcaacagcttctgagggaagacaagatacggctatattactattacaaaccgagaacggagttcggaaataaaaattacagcatgataaaaaccactacataatacctatgtgcccttctggctctatactattttc

SEQ ID NO: 25174 - DNA, 455 bp, Zea mays
  unsure (1)..(455): unsure at all n locations
agctngtgcagttgtgactgttaatggatggattttgtttcatggacacatatcaacactcaatagataatcccattcctatacttcggcgctgaactggcaaaacatacatgattaatctacttcatctatgctgttcttgcacacagctgtaaaagccaaagcatcagataaagtatgtaacacgcttttaatggtgcttcaaacaaatgaagaagatgaagatacagtagttgtctaatgtctcatgcttgtattttgagtttccatcatgatacaagtccagaatctatctattgttgtgctcatatcagaggccaaagaacttgatccatgattggcttctttgctagactcacttatatgaaagagttgcatataaccttacgtacaagcctttggttacctaattaatgcgtagatgtctgcatatatctgtaagcagaatatgatac

SEQ ID NO: 25175 - DNA, 329 bp, Zea mays
  unsure (1)..(329): unsure at all n locations
agcttcacaggtattggcctcttcgccttcatctagcgagaggctctcttgaaaggacgctttntcttctgaaagttccctgactttctgctccaggctttccacctgggaggttatggaggtgcactggagggcgaggtcatcatattggttatcaagggtatgaaggtatcctgccatgtagacaatggtgggatcattctcaataggatctcctcctgatagggcctgaagtcttttcctccaggtgggggtattcttgntgctgggtggaaagtagcgaaggggggtttcaatgattactttgttgtagttctgacaaagctgtc

SEQ ID NO: 25176 - DNA, 497 bp, Zea mays
  unsure (1)..(497): unsure at all n locations
tganatgtgttttcctccatgcatttttgatatgcaagtacacctaatcatacatctcgtggatcagataaaaatattagggccactatatttacatcatatgtttcagttggagcgatacctgngagtattaaaaggttatgtgcgaaatcgcgctcacccagagggttcaatcatggagggatacactacagaagaagtgattgagagctgtatagattacatcagtgacggaacaatgataggtgtgcctgtacctaaacatgagggtaaactatgtgggagagggagaatgggcaagaaaacttttcgcgttgaggattacaagctagtacattgtgctcatggtagtgtactacaacatctcacgatagccgagccttacatagaggaacacctggatgagcttcgtanagaanatcagaaccgcacagaggactggatcatganggagcacaaacatcgtttcagcgaatggttaatggacaaaacattcc

SEQ ID NO: 25177 - DNA, 421 bp, Zea mays
  unsure (1)..(421): unsure at all n locations
agctntgtaagtgaggcaagagacactctttgtgtggtggtccttgcggggtctaagtgacccatgagattaaggaagaagcctcactcggtatcaagcttcattnttaatatagatatatcttttgcattctatttctttgcaaaacaattggatgttaaatgaatagttgttctctacgatgatagtggtgggaaatagaagtcctgaatgatctggggtcagtttctgcgcaacgacgatttatcaaaggagaggaggtcccatctatgccagcaagggagcttggccaactgcgacaacaagatcccatcttttattggtttagtgatatacaacananactcgaatgagatatatganaattgaagtgtacaaagaaagtctcacttcttagactttgtctttgtgatattcacat

SEQ ID NO: 25178 - DNA, 497 bp, Zea mays
  unsure (1)..(497): unsure at all n locations
ctaagcttctaagggagaacacgtgatacgtttgactaacgtgcaattcgtataagatagaccttgtgcagcttgtcaagcagggaaacaggtgggaggctctcatcacacaaaaaatgtgatgacgacatcaagacccttggagatgctgcatatggacctcttcggacccgtcgcctatctgagcataggaggaagtaagtatggtctagttattgttgatgacttttcccgcttcacttgagtgttctttttgcaggataagtctgaaacccaagggaccctcaagcgcttcctcaagagagctcaaaatgagtttgagctcaaggtgaagaagataaggagcgacaatgggtccgaattcaagaatcttcaagtggaggagttccttgaggagaangggatcaagcacgagttctccgctccctacacacctcagcanaatggtgtggtagataggaagaacacgacgctcattgatatggcgaggactatgc

SEQ ID NO: 25179 - DNA, 483 bp, Zea mays
  unsure (1)..(483): unsure at all n locations
tctcctcgacaagtgttgcacttaccgctgagtgctaagccgccacatataacaacagaggagcccctggcgttggtggagttagtgttgctaggtctatcaaatattgcttcagctcttcgaaggctctctgctgaactggtccccattgaaaaacttcggctgacttcagcacttcgaaaaatggtaaatttctctctgctgatctagatataaatctgttgagagatgccagtcttcctgtcaatctttgagcccncttttttgtgcttggtggttccattcgaaggatagcttcgattntatttggattagcctcaatcccttttgttgaaactagacagccaagaaatttccctttcttcactccgaagacacattnttctggattcaactttaagccggcctgcctaaaattagcgaaggtctcctgcagatcagcaatgtgattatcttgcttcgtgctntttacaatgatatcat

SEQ ID NO: 25180 - DNA, 451 bp, Zea mays
  unsure (1)..(451): unsure at all n locations
agcttctaaagggagaacacantttgngactaacatatgttncatttgagaaagacaggatntgtagcgcatgtcaggcagcgaagcaagttggtgttcatcatccacacaagaacatcatgacgactgacaggccactcgagctcctacacatggacctattcggcccgatagcttacataagcatcggcaggagtaagtactgtctagttattgtggatgattattctcgcttcacttgggtgttctttntgcaggaaaaatctcatacccaagagaccttanagggattcttgagacgggctcaaaacgagttcggcttaagggataagaaaataagaagcgacaacgggacggagttcaagaactcacaaatcgaanggcttcttgaggtgganggcatcaagcatgagttctcttctccctacacgccacaacanaatggtgtagt

SEQ ID NO: 25181 - DNA, 486 bp, Zea mays
  unsure (1)..(486): unsure at all n locations
ctcagcttctaagggagaacacattntaggactaacaaatgttcattntgagaaagacagggattgtagcgcatgccaagcagggaagcaagttggcactcatcatccgcataagaacataatgacgaccgacaggccactggagcttctacacatggatctattcggcccgatcgcttacataagcatcggcgggagtaagtactggctagttattgtggatgattattctcgcttcacttgggtattctttttacaggaaaaatctcaaacccaagagaccttaaagggattcttgagacgggctcaaaatgagttcgccttaaggatcaagaaaataagaagcgacaacgggacggagttcaagaactctcaaatcgaaggctttcttgaggaggagggcatcaagcatgagttctcctctccctacacgccacaacaaaatggtgtagtggagaggaagaatcgacactatagacatggcag

SEQ ID NO: 25182 - DNA, 321 bp, Zea mays
  unsure (1)..(321): unsure at all n locations
agcttaggaactcgctaccgatgtgtgcacccncaactcctatttccaatctccttgattntttattagcaaaattagctcgagttgctttcgcaggatcataaatttctctaggggattggcatatccgcgagtgagcagaattaattggaggcttcgtgatggcgggcgcgaaggcggatgtagacgcagaaacaagagatggcagcggggtctgcagtggcggcggcggcctctttagcgagcagatgctgattgataagctcaacaggctcaacaactcagccactagcattgagagtatnctttctcccgtgtcta

SEQ ID NO: 25183 - DNA, 477 bp, Zea mays
  unsure (1)..(477): unsure at all n locations
tctanagggagagcacattntgngactaaccaatgttcattttgagaaatacagggtttgtagtgcatgtcaagcagggaagcaagttggtgttcatcatccacacaagaacatcatgacgaccgacaggccgcttgagctactccacatggatctattcggcccgatagcttacataagcatcggcgggagtaagtattgtcttggaattgtggatgattattctcgcttcacttgggtgttctttntacaggaaaaatcacaaacccaagagactttaaagggattcttgagacgagctcaaaatgagttcggcttaaggatcaagaagataagaagcaacaacgggacggagttcaagaactcacaaaccgaaagctttcttgaggaggagggcatcaagcatgagttctcttctccctacacaccacaacaaaatggtgtagtggagaggaagaatagaactctactggacat

SEQ ID NO: 25184 - DNA, 310 bp, Zea mays
  unsure (1)..(310): unsure at all n locations
agcttctagccgatgcctgtctccatgatgtgntctacatttgctgatcaagccgntctgcgtggaccctccaatgactctgccataagtgccgcccgttcaagatggctgattgttgcctgctccagagtgtgtgttgtgtgcccagttacatcgtggcacctatcatgtgctcgtacagtggcagggcctgaccaccgatgctgctgcttgggagccactgcacgacttcaagtacctacttggacgttcacctcaaggatgagctgntngaagagatggggagagatgttatgatcgacatcttcta

SEQ ID NO: 25185 - DNA, 478 bp, Zea mays
  unsure (1)..(478): unsure at all n locations
tatccatcttgatcattagacgtggatgcctttgttggttattaaatttagccgnttgctgaaccaacatgaaattatcctggataaagcgacctttaataaaggcattttggtttggagagaccaaatcattgagtcctgaaaccaggcaactagctaatatcttggtgattagttttgcaaagctgtgaacaagactgataggtctaaaatctttgacctgatcagctccatctttctttgggattagagtgataaaagcagaatttagcttgtggaaattgtcaaatcttctattccaaaccgccatcaccacagccataagctcatctttaataatggaccaacaagtcttatagaatctatcagtaaacccatccggtccaggagacttatccgagggcagacaagttatagcattgcacacttcttgcttagttatggggttgtccaactctaccaagcttggaaatggagc

SEQ ID NO: 25186 - DNA, 343 bp, Zea mays
  unsure (1)..(343): unsure at all n locations
gagcttcaaatcaagcaaccacacattgtctacaacaacattatatgtgcaacaattagctcaatgaccaaatcaccaagaaaaccatgcaaccaaatagcttcctccactgcctcagtcaaagacataaactcaacttctatggtaaataaagcaaccgtatgcttcaatgttgccttccaactgatgcgcgacccacaaagctgaaacacataaccagtgatggaacacctataatcaagatccctagcaaagttagaatcagaataaccaacaacctgtcccggattgactggcctttgatcaaatatccaaccatatngtgttgtgcctctgagataat

SEQ ID NO: 25187 - DNA, 506 bp, Zea mays
  unsure (1)..(506): unsure at all n locations
tgagacgggaacaaccgtggcatgcactacatcccttgaagaatatgtttatgatttgaggattgccaagaggaagaaacaaaagatgaaattcaacacctcctccaaaagcctcaaccacgccttctcaaaaggtaacatccaaggtaatgatcaagccacacttcacattaagaggtgtagtgaatgctttgaagaggggcacttgattaggtcatgtccctatattgatggcttgattattaacaaggatgatagactttgttttacatgctccaagaagggacacttacttagatcttgtccccatttaaaacaaagaggcatagggttagaaaagaaaatttttactaaccatgtagcaagcaataaacaaggaaagaagaaatcttcaacatttggaaaacgcctatgctacacatgccgaaagaagggacatcaatgcanagattgtcccattggtaacaatntcactcctaacttgtcaatngattctcatataacta

SEQ ID NO: 25188 - DNA, 351 bp, Zea mays
  unsure (1)..(351): unsure at all n locations
ctgcagctnttatatatctcaataagcattaagtacaagtgcttgtttcaagcgtttcatggagggtttggatatggtggtaggaatcaggagagagaagaaatcttggactctgctgtagcttttgacctgttgatagccaacactctctttaagaagagataatcccatttaatgacctatacatagttattaagggcggaaggcgggcaccaccttntaaacctttaagcaaaaaaacgtaagacgacgcgacgccttaattatatatataaatatataaaaaagatcaaatattggttatatatcacanattcgaagataatatgcacacacactagcaccactatc

SEQ ID NO: 25189 - DNA, 474 bp, Zea mays
  unsure (1)..(474): unsure at all n locations
cttgacaagcattcagcagccgcttgagcggctgagtctgcggagtcaccaacccgtggggctgatgatgagcttgtgctgttctttttgtgccacagaagtatccgcttgcgagcgatttcacatacctcttcatttgacattacatcccagaggccgtcactggcaagaataaggcactcgtcatccttagcccgcggaactattgttacctctgggactggaattatccatggcttcagatatctgtcacctgcaacaaatagaagccaatacagttatgatataatataatacatgtttttgcatcttggaatcttgtttcaagtaaaacaactaanactagcatgctaagagtactcagttcttctacaggcagatttgaattgaagaanaaatgtcctgtcctgtgtcctctgtggtccttgctaatgcagaggagacctagcaacaaacgtgctcacttccatgata

SEQ ID NO: 25190 - DNA, 475 bp, Zea mays
  unsure (1)..(475): unsure at all n locations
agcttgtgaagattattcattccaacatgggctattctgcgatgccagagccaacccatattagtcttagcaatcaagcaagtatcgagttcagctctattgaaatcaactaagtatagctgaccctctaatgctcccttgaatgctactgaatcatcacatcttctaaagatagtaacacctatatctgaaaaagacagttgtagcccattttacataattgagaaatagaaagcaaattgtaatctaaagaatctacaagaaaaacattggaaatggaattgtcaggtgatatggcaattntaccaagtcctttgaccaaatcttgatttccatcctcgaatgtgatagctctttagggttcatcgntnttctcgtaggaggagaacatcattntctcccctgtcatgtggntngtgcacccgctatcnaatatccaacttgagccctcgggacgcataaacctacaaacaag

SEQ ID NO: 25191 - DNA, 234 bp, Zea mays
  unsure (1)..(234): unsure at all n locations
gggtgtctctggcctcanatacaagtgagtntgattgcaaagaatggatcaagaaagaagaaagcaatccaagcgcaagagctcgaaagaacacaagcaaatcactctctctaatcactatggcgttgtgtggagtttggagaggatttgatctctttggtgtgtctagaattgaatgctagagctcttgtagtagttgggaagtggaaaacttggatgcaatgaatggtgggg

SEQ ID NO: 25192 - DNA, 418 bp, Zea mays
  unsure (1)..(418): unsure at all n locations
agctggtgaaggttcttcatccncacatgtgctaatcgtcgatgccacagccagcccatgctagtcttagccattaagcatgcatctagaccggcctcttcttttgcaaaatcaactagataaagtttgccgtctaatacacccttaaaagctagtgaaccatcactccttctaaagacagacacatctacgtttgtaaatagacagttataccccatatgacataattgactaacagatagcaaattatatccaagactctctactaaaaatacattagagatagaatgctcattagaaatcgcaattntacctaacccttttaccttgccttgattcccatcaccgaatacaattgaatcttgggaatctntattcttgacgtaggaggtgaacatcttcttctcccccgtcatat

SEQ ID NO: 25193 - DNA, 508 bp, Zea mays
actcagcttgacacatagctcattaaatacctctgatcatatctcttttatatgctatgactaatgtgctttcaagtttatttcaaaccaagtcataggtatattgaaagggaattggagtcttcggcgaagacaaaggcttccactccgtaactcatgcttcgccatcactccgagcaactccctcttcttcaggggagaaatgagcatcaaggaaaaggacttcatccttgtgggagagagtaaaagctcaaacgcaaaaggacttcgtctttggtataatcttaactcacttatttatgaccaaaggggaagattgcacacccagggctctaatgattccgtttttggcgattcatgccaaaaagggggagaaatgagcccaaagcaaaaggaccgcaccaccaccaccaaattcaaaaacttagtgctttccaaaagtctttatcatttggtatcctattgtgctcaaaagggggagaaagtagtatttcaaaaatggtatatc

SEQ ID NO: 25194 - DNA, 443 bp, Zea mays
  unsure (1)..(443): unsure at all n locations
tatactctatacttaacattgatctaactgtctaaactgaatttagttggaccaaccagaggactaaacatactaagaatcactaaatttgctgcccatcaatttataggtactaactccttttatacatatattaacactagatttctggattntatatttctcttttaactattttaatgtcctatgggaaaaccaactccaaatacattccaatttttttacccagctccatcttagacatattaaacttacccacaaattntcaatattnttgaagctatatttctatttctaaaattcatttaagccacttaaaggtacttctaaataaatcanaaaactaacagttgctgcanaaacccctatagctaattttacaggaactacanngtntcatggactctgaaaaaattgttcactatgntatcatttttctacat

SEQ ID NO: 25195 - DNA, 500 bp, Zea mays
  unsure (1)..(500): unsure at all n locations
tgtgaagattcttcatcccaacatgggctagtcgttgatgttatatccaacccatattagtcttagcaattaagcaagtatcgagtttagctctgttaaaatcaactaagtatagctgaccctctaatactcccttaaatgctactgaatcatcacttcttctaaagatagtaacacctacatctataaagagacagttgtagcccattttgcataattgagaaacattaagcaaattgtaatctaaagaatctacaagaaagacattggaaatagaatggtcaggtgatatagcaattntaccaagtcctttgaccaaaccttgatttccatccccgaatgtgatagctcgttggggatcttcgttnttctcataggaggagaacatccttttctcccctgtcatggtggttgtgcatccactatcaattatccaactcgagcccncggatgcataaacctacaaaacaagtttaggccttgttcttaggtacccaaat

SEQ ID NO: 25196 - DNA, 441 bp, Zea mays
  unsure (1)..(441): unsure at all n locations
gtcgagtgagttcaccggatgttgtcgccaatggtggtcacttgttctcaaaagctacaaatcaagaacaaggcaacacaaatgttaatggttaaagacctttgtccttcataacattatctcccttatgatataatgatctttggacgaaggtcatgaagaacataccttctttcttgcaatatacaaagatataaacatgatcgtatgaaacatagaaaaagcatgaataatcattttagatcattagattatccatattatcatcatatatctttgaacaaacatcaatgatattaaattacatttgtaccttcggcttgacagaaggtaagaatccgagagtgacgtgcgagtgattactagtcagcgtgaacagtacggtgtttattgtcatctatttataggcacaggacacgacctgngtataatacattcatg

SEQ ID NO: 25197 - DNA, 415 bp, Zea mays
  unsure (1)..(415): unsure at all n locations
ataaaaatacagttttgatgccttatctacctccactagacggtggtgcagccttatgcaccaacttcagccttatgccttagctacaacatctttcaaatccttggatcattgataaccaatgttgaaccaaagctagcaccaaacactagggtgctaagagatataatgcttagtcagggtcaaagaaggcattgattgataatcatatacttatgcaatttgttgaaatggaagtaaacgccactagactgaaggcgagtttgactaatgaattctaataataggttaaattcaaggatattttcgcaacaaacagagcaagactgtttttcatgacgaacttgatggcttatgaggcanaagaanaaaaantaaatagtggtgagtggtgacatgctacaatgaaacaaac

SEQ ID NO: 25198 - DNA, 381 bp, Zea mays
  unsure (1)..(381): unsure at all n locations
gtcacctgcggcatgcaagcttctaaagggagaacacattntatgattatcttatgttcattntgagaaagacaggatctgtagcgcatgccacgcaggaaagcaagttggagctcatcatccacacatgaacataatgacgaccgacaggccactggagctcctacacatggatctattcggcccgatcgcttacataagcatcggcgggagtaagtactgtctagttattgtggatgattattctcgcttcacttgggtattctttttacaggaaaaatctcaaacccaagagaccttaaagggattcttgagacgggctcaaaatgagttcggcttaaggatcaagaaaataagaagcgacaacgggacgaagttcaa

SEQ ID NO: 25199 - DNA, 420 bp, Zea mays
  unsure (1)..(420): unsure at all n locations
gacctatgatactcagcttctaagggagaacacgtgataggttggactaacgtgcaattcttataagatagaccttgtgcagcttgtcaagcaggtaaacaagtgggaggagcacatcacagcaagaatgtgatgaccacttcaagacccctagagctgctgcatatggacctcttcggacccgtcgcctatctgagcataggagggagtaagtatggtctagttattggtgatgactnttcccgcttcacttgggtgttctttttgcaggataagtctgaaacccaagggatcctcaagcgcttcctcaggagagctcanaatgagtttgacctcaaggtgaagaagataaggagcgacaacgggtccgagttcaagaaccttcaagtggaggagttccttgaggaggaagggatcaag

SEQ ID NO: 25200 - DNA, 449 bp, Zea mays
  unsure (1)..(449): unsure at all n locations
agcttctgaaatcaccacttcatcagcttctggattaggaatgatactctcccctccagccctaacgatgaaaatgtcacgaaagtatctccctctcatcgctntgatttgcccttgcttaatagtcgactttccaaaaacaacatgcctcggcctccatggccggtcttcggcatcttcatttccactttctacatcaaaactctcgctatcgctggagctttcagataacccaaccatcatttcattagtaattttctctgtattggttttctccatagctctgtagaaatcggccaatgcggggtcagtaatcttcttcttctcaaccattcagacgatggttgtgaagttgccgaagctcanaaagttaatcaagctccagaaagcaaagaaaagttaaatggcaacatagtgcnacaactagaaacatgaaaatactacgacac

SEQ ID NO: 25201 - DNA, 346 bp, Zea mays
attctcagttgaagctattaaagtcctacttgcgccctacaatgatataagaaagacttaatgcattggctatcatatcaggtgaaggagatatgctataaaagattgcctatgaatatattattgaagatttcattacaaagaacacaaagagattgatgattttcatgtgaatattatgtaccagatacaatactaagtttacacctttatcacatactactattcttattgtaatatgttaaattatgcctctactttcatttcgcactctgggacgcctctgaccggagcgcaatggtaagggatgatggagagaggtagccgcgaggatgggcataaccct

SEQ ID NO: 25202 - DNA, 358 bp, Zea mays
  unsure (1)..(358): unsure at all n locations
agctntctcaccatatatagcatgcttaatgatacttcttataaagatgcagnntaatacgaaaacttggtcaacaagctgactgttgaccttctgaccagtcggcactaaagtaggtcggctgcctttctggtatatgtggttaagtcggctttagaagcattggaaactagacttcaagagctttccaaaaagtacttatgggccttcatagcttttgggaatcaaaatatatgactgtgtcttctggacggttctgttgcgctggactgacttggatatagctcttcttgctgattcgcccttgatatggtttgtccttcctctttggtgaacctaagtnatatcaacatacacg

SEQ ID NO: 25203 - DNA, 488 bp, Zea mays
  unsure (1)..(488): unsure at all n locations
tctaaacaccaatgcatctttgatagtacagaatactgaactgtcttcatatgtgcaacatataactaaaatatatgttggcaaatgttcctaacgatactacgaacctaaaaggcaataaaattaattaggataataagttgagtatcattacaaataaaatcatatctatctgatgtgcctaataatttcttgtatttcttctggaatgttgtctttggattcattgtccttgtacttcaataattctactaagaatttggtcctcaggtcattcccattctgcacattcattattacatatcatagaacacgattaataatcaattatagaagaacaatattgacaaagtattagaacaaattgngtactcacagtgcatatgcagggtaaccttataccattccaatcgtgcataaagttgataacaagaaagccagatanatccctacaaattaaaataatacgttgttacatatatgtagac

SEQ ID NO: 25204 - DNA, 447 bp, Zea mays
  unsure (1)..(447): unsure at all n locations
actgagataagcaataggtctatgtttctgcattaacaccgnccctatgcccttctcacatgcatcagtctcaacttcaaatgtgtcctcaaaatttggtagggccaaaacaggagtagtagtcatggccctcttaagagtctgaaaagcctgttcttcttcagaattccactgaaaattcttggtctgcaataagttggtaagtggcttagcaatcatcccataattcttcacaaatctcctataatagccagtcaaaccaagaaatcctctcaaatctngtacagaagcangagtaggccatcttagcatagcatcagttntggagggatcagttgccaccccttgctgagatatcacatgcnccanataaagcaattcagttttgccaaaagcacattnggtcttctttagaanaaactggtgttccctcatcttcccaaaact

SEQ ID NO: 25205 - DNA, 460 bp, Zea mays
catacgtgcgccctgggaattcctgtgacctttgaagctgccgacagcagccgggagagtctctccgggactacatccggcgattctcgaagcagcgcaccgagctgcccaacatcaccgactcagatgtcatcggcgtgttcctcgctggcaccacctgccgcgacctggtgagccagctgggtcgcaagaccgccaccagggcgagcgcgctgatggacatcgccaccaagttcgcctccggccaggaggcggtcgaggctatcttccgaaaggacaagcaaccccagggctgcccatcggaagatgcccccgaggcgtcaactcagcgctgcgccaagaagaagggcaagaagaagtcgcaagggaaacgcgacgccgccgacgcggaccttgtcgccgccgccgagtacaagaaccctcggaagccccccggaggtgccaaccttttcgacaagat

SEQ ID NO: 25206 - DNA, 175 bp, Zea mays
gccaaccagcccgctcaccgaacaaataatgtcgagctacccagcgaggggggttgctgaccaacctgtccgccgagaaacctatcgaggccgggctggcaactatcctgttctccaagcaacctatcgaggtgcgcctaccaaccaacctacccgccgaccaatccagcgatgc

SEQ ID NO: 25207 - DNA, 493 bp, Zea mays
  unsure (1)..(493): unsure at all n locations
tggacgtgaagagtgccttcctcaatggacctatcattgattatgtctatgttgagcaacctcccggctttgaagatagtgagtaccctaaccatgtttacaaactctcaaaggcactttatgggctcaagcaagctctaagagcatggtatgaatgcctaagagattttcttgtcaccattagattcaaagtcggtaaagctgatcctactcttttactaaactgttgcaaggacttgtttatatgccaaatttatgttgatgatattatatttgggtctactaacaagtcaacttgtgaagagtttagtaggatcatgatacataatttcgagatgtcaatgatggnnggattgaagtatttccttggatttcaaatcaagcaactccaagaaggcaccttcatcagccaaaccaaatatattcaagacatacttaagaagtttgggatgaagaatggcanacccatcaagacacccatgggaaccatggg

SEQ ID NO: 25208 - DNA, 238 bp, Zea mays
agcttgtactcattcatctagtctagaaaatattcaatcatatatgcatgtaatgcaacacactggatcagcctattgcatatgatagtgatggatgcaagcaagaacaaacaattaacaactgtcttcaaggttgttgacgcctttgtgaagcgccaaacactcaacaagaaccgtggcggtgccctctgcacaggggcggacggtccgcacgcaggggccggacagtccgtggcct

SEQ ID NO: 25209 - DNA, 450 bp, Zea mays
  unsure (1)..(450): unsure at all n locations
gcttgctcanacatagttggcataattgcttagccctagctctatgttggcaccaacagctgttccttttgttattcagaaagttgcttacaaattatggctacaagatagaatttgtctcaaggtatagattgttaagtttgtgatccaaattcaagataaggggccgagttagcgagcgaagcagaggcctggccaacagccatggatgccagagggtgcgggtggcggagccccacacggtacatgtgtgtgtgtgtgtgtatttggaggatatattggaagccctgggcttccaaatgttagaggaatccctgaccgatcaccctcgacctggctggaccgcaccagcgcacccacctacaccccacacgcaggctgtcaggtgtgtccccatgctcaagcactangtcaaccttccccacgtgcgtcagtcaaactccagtccaa

SEQ ID NO: 25210 - DNA, 496 bp, Zea mays
  unsure (1)..(496): unsure at all n locations
ggtacccaggtacattggtccattcctggtgattgagcaatgtggtccattggcgtaccgacttcagctccccgaaacattgtctgctatgcacaatgtgttccacgtgtcacaattgaagaagtgtcttctggttcccgatcgaaccgctgaagtgactgatgttgtcctggaaccagatttaacacactcggagcatcctattccagtcttggatctaaaggacaggatcacccgaagaaagactctcanattctacaagatacagtggaaccagcattctgaagatgaggctacttgggaaactcaagactttctgaataagaattgtccaggcttcctagcctcttggtaattggtaagcctgtatagctcttgtaataaagaagtaacccccacattacccctgccttataccaaaattaaggaaataaaaatgtgatgtgtttctttacattatctaccctatgatcttaatctcgggacgagattcttt

SEQ ID NO: 25211 - DNA, 428 bp, Zea mays
cggtccatttattgctaactgtcccgacaatgatagtgatcaggtatcttggaacaagagggagaacaagaagaactataagaaggcaaagggtgaggctcatctgggcaaggagtgggattcggactgctcttcatccgactccgacaatgaaggactcgccgccaccgccttcaacaaggcatgcctcttccccaacgagcgtcacacttgcctcatggcaagggagaagaaagtaagcactcataatactagtacttatgcttcttcaagtgaggatgagtctagtgatgatgatgagatagaatactcatgcctattcaagggattagatagaaccaacgtagacaaacataatgaattgatgatgccttgatgatagaaatactttagaaagcaagaagatttgtgatgaagacatgaaaatt

SEQ ID NO: 25212 - DNA, 422 bp, Zea mays
  unsure (1)..(422): unsure at all n locations
agcttaatagtgaagaggtgcctctaaattgctttctctttgtaacaaatgtttacataacaaacttgttggttatgtatgatnacatttatcttccactatttcaattgtgaatgctttggtgtgtgtgaacccaaacttactggttntgagcttgatgcgaaaaacacccttccttcttttcacgtgttttaggtttggctgcgccgaagcttactatgtgctactttttagcaatatattacatatgccgcattgcacttagaattaatttggagggtggctgacaccattgcctttgtgtgtttgtctctttactccacattctgttaagaatgacttcagagtcttgatcacctttactangtgatttcatctagctctacattccctaatgaatgactttcgagcattctcacctt

SEQ ID NO: 25213 - DNA, 399 bp, Zea mays
tcagctccgaaagcgtcggctgttgaaagcatgacagcttgttttggaaatgtgcccttgggccatttctaagtattttggtgatttagtgtccaacacaagtacctaaatgttaaatggtggacaaagttcaaatcaagtataaaggtatgtttctcagacttagtacattgttttagagactaatgtattgtgtctaagtgctagaaacacgaaaaataaagttgaaattaaagatggctttgttctgccaaagtcagctctgtctggatgcaccggacagtgtccggtggtgcacactgtccggtgcaccacgctagctcatgcgaacttgctgctctcgggaagtgattaacggcgtacagctataattcaccggactgtccggtgtgcaccgga

SEQ ID NO: 25214 - DNA, 451 bp, Zea mays
  unsure (1)..(451): unsure at all n locations
gcttgagcaaggctcacggtctcaccaggaagctatctggtggcttgaatcgaacggagggggacgggagaggggttggccacngcggtggctcttggtcggcactggcgggctgcggggaggtcgccggaggcaatggctggctcgggcgagtccggcgcagtacggaggaggtaacggggaaggcaaccgagcactggggcgggttttataggcacggacgcggccggngcgccggctcaaccgtttggcgcgacgcgggcacgcggtgcgcgcgcgcgggcgtgctctggcgagctcagagcgcgtcgaacacgtggcgcgttgcttctgcccgtgttcttcgctctgctgagcggccaggcgtacgaatcttgccctaccgcctgtgggagatctcttcccctgaacctagagctacctagtcatgtgagttccaagagtagatgtg

SEQ ID NO: 25215 - DNA, 484 bp, Zea mays
  unsure (1)..(484): unsure at all n locations
ctgcgttcagttctgttattttagcttcggcctccgccaataattcttcagttgcttggagctcaaagttcttcttctcaacagcagctgtttgctcctttattttgctttctaaattttcaattataacttcgtgtttcttgtcttcaaaatcttgctgcattttcaaggctttgctcaacagcatactctgcacgaaaacaaccttcgttagacatgttttcattattaaaaacaataaaagttaagggaaaagtagttcacctctgaaatggaataaaataaactaccgacgatatgttgtcgtcggtagcggctaatgtctgtttctagcttcggaaaaccgatactctntgacagagtaccgataactttggctccagtttgatctcgaatacaatctaatatttcatcaacaatgcctncaaagaggagtgctcctggtttgtacctgcaagatttggcatactctnttagctcttct

SEQ ID NO: 25216 - DNA, 442 bp, Zea mays
  unsure (1)..(442): unsure at all n locations
tcgaggtaccaagtgcacgggagaagtcaaggaggttgatttattnttgccaaggtgaagaagaaggcttgcatagtcaagggtgatcgagttgagaagagctataacacaccaaggatcactacatacggacgtgacttacagccaatgaggtaacagctacaggtatgcggagtaagtcataatgctcaagatcaagctctaagaaggagatcaaggtcactataaggagaacaagtgtcaaaaccagaactggaagcaacccataagagctaagttcaccttaatctgtattcgggctgatcctatgtttggagatgttctatgtgaccttngcaggatgttggagctaagagatgtgaatctagatcaagttaagccgacttgatgatttatgagttcaccttcaaagctcaagcatgtgaaatgctatggatgtaat

SEQ ID NO: 25217 - DNA, 300 bp, Zea mays
gcttgattgtgtcttggaacggattgctagctcttgtattgaatgtgaaatattggaatgcttggttgaagtgaatggaggtggttggggttgtatttatagccctcaaccacttctagccattgcttcttttctgccgaccgtggacggtccgcgcccctggtccggacggttcacccctgcacatcaacggctgaaatcgcaacggtcagcagtaacagctatatcaacggctatatagcatttaatgcgtcgtcagatgtcagataaaggcagtcgcggacggtccggtcgtgcacc

SEQ ID NO: 25218 - DNA, 503 bp, Zea mays
tatccaggggttccttagacggaggcaacttaagtctctgatcatttatgcgtagatatttcacaattcgcttttgacaatggattgtggattaccgggaaaactaagacatttacatcatctcccttaacagaagaaatagaagctcgaggtatcgacagagctgagcaaaagcaccagtgcgtatggtccacgtgactgatggatgtgcaaagctccggaatctcctacggggatgatgatctcgtactacgatgatgcgctttgtttgcattcccttcgagcacgagacagaaagagatagcaacaattcgggctaacaaagggactagaaccgacttcttcttctttgatcttacctatgataaatgagaatccgctgtcttggttggttgaggatgaagcatatcggacataatagtatttcaatggaaatcctgttactactttactctcacttcacttttcatggcgagatagacttgactctccatcttcaagtg

SEQ ID NO: 25219 - DNA, 179 bp, Zea mays
gagagcttcatcatgaaggcttccacaatgaggatgactggtatgaatattttcatcatggaaactttgcttttgatgatgcttctcctctctcaacaaaattgcaggctacaccatggccacagtcttacaagccaccccagctccccatgtatgacggtcacacagaccccaagcaa

SEQ ID NO: 25220 - DNA, 495 bp, Zea mays
  unsure (1)..(495): unsure at all n locations
tcggcatctntaattgcttcttcttcctgagcccctggcgtccattcagcgatgaagtcttctaatgcctgngactggatcgaggatctatgcacataatcaatgctgaattcattgagttccgcagcccactttccaatccttccagtagcttctctgttcctcataatatctttcaaaggttgagatgaaagaacaattatatggaatgcttgaaagtagtgccgaagtttcctggaggccattaagacagcatacaacaccttctccaattctgtataatttttctttgataagcttagaacttcggagacaaaatatactgnggcttgctttntgatttgtccttccaatttctcctgcaccagcgccgcactcactgtagagtgcgatgctgccacatataatagtaacggagcccctggcgcangtggagttaatgtntgtagatcaatcangtattgcttcagctcttcgaaggcttttctgtgagct

SEQ ID NO: 25221 - DNA, 479 bp, Zea mays
  unsure (1)..(479): unsure at all n locations
agcttggacggtgttctatgatgggtcttggtgaaccttcggtgtaggagtagctgcggtcctagtggcaccttcaaaagtcaaaacatgttttgcagtcaaactgtatttcagttgcacaaataatattgctgagtacgaagcacttcttttggggcttcagaaactaagggcaatgggaataagaagggccatcctaaagactgattctcaagtcattgctggccatgtggataagagtagcaaggcacgagatccgaagcttgaaaagtatctggatgcagtccgaaggttggaagcttccttcgaagggttttctatcaaaaatattccaagaggtcaaaatgagcatgcagatntgctagccaaatcagcggctcaggggctccccctaccctccgaagtatttttcgaagcaataaaagcaccttcgggtgagcttatggagagagcagtgcttactattttctcagtacaca

SEQ ID NO: 25222 - DNA, 486 bp, Zea mays
  unsure (1)..(486): unsure at all n locations
gtaagggtaatcttcacctaagagaaagattacgaatgctcatggctaaggtatggaacaaaatgcttcaattggtagttgatcaatagtagctccttccaagaggcattctttcaattggtaataatatattctatggaaaggaatgtcaatatgaaggttaaattccttttgtcttaaatttataaattagtgcaaattgtgaattcactgctccatgtgcattaacttaacaggaatttaatttatgcctttacgccacataaatgatgatttgtttgccattcatatatatatatcatcatttattaaacacttccttgtactactaatatctcttttcaaagtgttntatcgtctagttttaaaaggacaagagataacacagaaggaagtctccactaatgatgaaaagaagaatactaatgtgacaccaccacagatagtaagatctgtcacataggataacacaacgacattctatat

SEQ ID NO: 25223 - DNA, 354 bp, Zea mays
  unsure (1)..(354): unsure at all n locations
agcttgtggaggttcttcatccncacatgtgcttagcggcgatgccacaaccagcccatgcaagtcttagccattaagcatgcatctagaccagcctcttcttttgcaaaatcaactaaataaagtttgtcgtctagtacacccttaaaagctagtgaaccatcacatcttctaaagacagacacatctacatttgtaaatagacaattatatcccatattacataattgactgacagatagtaaattatatccaagagactcaactaanaacacattagagatagagtgctcattagatattgcaatcttgcctaaacctttcaccttgccttggttcccatcaccgaatatg

SEQ ID NO: 25224 - DNA, 452 bp, Zea mays
  unsure (1)..(452): unsure at all n locations
acatcgccatatcactgggtgtctagagactgatggtgtatggagattctctggtagtcatcaatcagataaacaaggaatgggattgttcaagtgattcaatgggaagatactgcgccgccgtccgaaagctataagataaattcgaaggtctggagtttcatcatatataaagagatcggaacacggcggccgatgtactgtccaaactcggatccggtcggactcangtcccgcccggggtcttcgtgcaagaaattctccagccgagcgtctcgacggatcaaatagaagaatgcaacatcatagatcaacccgagtcagactctgatgactggaggcaaccgattattaagtatataaagaatgaagaagaaccagatgacaagaactcggcagagcgcattgccagacaatcagctcactatacactcattgnggaggtattatac

SEQ ID NO: 25225 - DNA, 422 bp, Zea mays
  unsure (1)..(422): unsure at all n locations
gcttagacatcattcaaggatccaaagctagccaataaatattaactactccaaacaaggaagatattcagggccgtattttaaaatattaaagcatgagaaaaataattgttgaaaaaagtctagggcatgtaacatatttcattcgatgccatctcgtgtcactgtacatactaaaaaaactattgagccattatagtgggttagcacaagccatccagtcaaactaaaaatattaatagcaaggggtgcttatgactntgtatcatggtcacgcaataaaaaaacaaatataccacacagtangatcaaatattaatagcaagggggtgcttatgactntgtatcatggtcacacaatanaaaaacaaatataccacacagtaagatcaaataacatttctaacagtaacgtgatattt

SEQ ID NO: 25226 - DNA, 346 bp, Zea mays
tacgcagatcttgggcgccagggcacaagaagattgtctcggcaacagacattagtaggctccaagcactatattctttatgtccctgggcccacaagtcggggcccagtccctttgtgcatgccccccttcagctataaaaggggaggcatgcgacgttacacacacacgcaatcttaggtcacaccttagactcgcaaactcatacaagctcacaagcaatacatctcacagtggagtagggtattacgcttcggcggcccgaaccactctaaatccatgtgtgttcttgagttcttcctgttcattccaacgatcaagcaaaacacctaagcccctcctcatc

SEQ ID NO: 25227 - DNA, 469 bp, Zea mays
  unsure (1)..(469): unsure at all n locations
agctntatcaaatggacgtgaagagtgccttcctcaatggaccaatcatgtttataaactctctaaggcgctntatgggctcaagcaagccccaagagcatggtatgaatgcctaagagatttccttatagctaatggcttcaaagtcggaaaagtcgatcctactctctttactaaaacaattgcaaatgaactgtttgtatgccaaatttatgttgatgaatattatattgggtctactaacaaatctacttgtgaagaagttagtaggatcatggtacaaaaatttgagatgtctatgatggnggagttgaagtatttcttaggatttcaagtgaagcaactccaagagggcaccttcattagccaaacgaagtacactcaagacattctcaccaagtttggaatgaaggatgccangcccatcaagacacccatgggaaccaatgggcatctcgacctcaacacg

SEQ ID NO: 25228 - DNA, 500 bp, Zea mays
  unsure (1)..(500): unsure at all n locations
ggcttagaatatctggagtatacttcgtttggcttatgaaggtgccctcttggagttgctttacttgaaatcctaagaaatatttcaactcccccatcatagacatctcgaatttttgtgtcatgatcctactaaactcttcacatgtagattcgttagtagacccaaatataatatcatcaacataaatttggcatacaaacaaatcattttcaagtgttttggtaaagagtgtaggatcggcttttccgactntgaatccattagtgataagaaaatctctaaggcatttataccatgctcttgnggcttgcttgagaccataaagcgccttagagagtttatacacatagttagggtactcactatcttcaaagtcgggacgttgctcaacatagaacctctatcttgatggccattgaggaaggcactcttcacgtccattngataaagctcgaagccatgaaaagtagcataagccaataatatacgaattgact

SEQ ID NO: 25229 - DNA, 393 bp, Zea mays
agcttaacactgtgtgcactcttattggcacaagatacttggttcaagagcacatcgcctatagagagtatggccgctcgtgagtgagtgggagatgccgaaagaagctgctttcgggtctagtcagggtggcctagtctatctaaaatataccttcatatatagaggcgagtttgatgagccaaacgatgagtggttgagcagtattgagacaaccagtgacgaattgcttggggcctatacaagggtcgaagatgatgcaatgaccttggccttcgaaggtcgaggcaagaaaagtttgaatagaagttttggcgtcattggtttcatataccctgattatagctatccctcgcgaaagcagggaaagaaaaaaaagctgcacttcggcat

SEQ ID NO: 25230 - DNA, 383 bp, Zea mays
  unsure (1)..(383): unsure at all n locations
atttggcaggaaaacagngcaaatagcattgtatgctgtggtaacttcacacctactcgtccgtttatatagtgctgcaggtaagaaggcgaagtgccagagtttttacaccaggcgcacacccgcttgcgctcgctgcgcggtggaccgcagggacaaacagtaaactctgcaaggtgggaccgctgcgtgctgggaaattaaatcgtttctcggcaacgagctcagggaaggtgttttttggaccttcggctccccgaagcttaagagaactttttcatggatcaagctcgttacgaanaacgatctagcaccgcgaaaggggctactgttgggtctatgcttcgtcgccgaaggtcttcaagggagaagcggcttaaaat

SEQ ID NO: 25231 - DNA, 363 bp, Zea mays
  unsure (1)..(363): unsure at all n locations
tgcagcttctaagggagaacacgtgataggattgactatcgtgcatttcgaanaagatagaccttgtgcagcttgtcaagcaggtaaacaagtgggaggagcacatcacagcaagaacgtgatgaccacttcaagacccctggagctgctgcatatggacctcttcggacctgtcgcctatctgagcatatgaggaagtaagtatgggttagttattggtgatgacttttcccgcttcacttgggtgttctttttgcaggaaaaatccgaaacccaagggactctcaaacgctttctcaggagagctcaaaatgagtttgagctcanagtgaaaaagataagaagcgacaacgggtccgagtc

SEQ ID NO: 25232 - DNA, 502 bp, Zea mays
  unsure (1)..(502): unsure at all n locations
tcgtgaatggtatcttcggcatcatgtccaagcagcttcagctgaagctgtttctttttacaggaccttcggcgatgaagcatggtcccaacagtttcccgcagggataaatcccgacggagatcctcatctccacttaaattataattagaccatatgtcatttgttattaatacaaatactgacacttatgtaagaaatcattatgtgtacatcaaaataaacatattngtacaataagtaatctcttgacaatgtaattatttatttttatcattactagtacacgaaaacatcgttgcgtgtaagtttaacaggtcccgtgactccgtgagaaaaaatagcaatgagaaatgttntttcgtccccattctcatttatccgtgggggaaatttttttctatgtttacattccctagggctactttgggaacctcatatcttttcggaattagaagggattgaggtagaaatgaactaattttctctacaatcctctttg

SEQ ID NO: 25233 - DNA, 322 bp, Zea mays
  unsure (1)..(322): unsure at all n locations
gcttcnggaagccaatactcttcgataaagtactgataaccttcgctctggttcggtctcggagacaacctaagctttcatcgtaaataccgccgaagagtagtgtccatggctgatacccgcaggatatggcataggctctcaattcttctttctcggcctttgacaattcttggccaattaagttttgaaaagtgaaattttcttcttctgaggtatcttcggctatctccttctctttcccaggcactgtggccatggtctcttcggcggctgtagcaagcttttctgcgggcatatncagaagtattttatcaatatc

SEQ ID NO: 25234 - DNA, 357 bp, Zea mays
  unsure (1)..(357): unsure at all n locations
tcngcttagcgcanagaccgtgatggagaatgaaactgacctacatgtgaaaagactgcttagtcctcgatagattactccttagtcaatagtaaatgtcaaggacttggatgtaatttcacccaggctgcgtcctgtgcctataaatagatgaacagtaacactgtactgttcacgttgacttgtaatcactcgcacatcactcttggattcttgccttctgtcaagtcgaaggtacaatcttaattcaatattataaatggttgttcatgatcatataatgagaagatagataatctaatgatttaatattatcattcatattgtccccatgttcctgcttttaattatacatgt

SEQ ID NO: 25235 - DNA, 318 bp, Zea mays
gatgccaaagcaaacttggccagagcgggagctgcacgggcagacatatggttttccggccagacgccgtttaaaaaggccagtatacccagcgtattttaaacctgggtgcatgtcatacccaccgtattttaaacttggatgccatgcatactcggcgtatctcaaaacgcgacgcgccaaatgactcactttggttaaaacctgcgtattcactcctcgccatacttcaaagcgcgactggtgtatattggtgtaccttaacgcatgcctagaacgtcggcgtatttaaaacgaccaccgttcgtcgtatactta

SEQ ID NO: 25236 - DNA, 522 bp, Zea mays
  unsure (1)..(522): unsure at all n locations
tattagcgacctatgaaactcagcttctacactgatgaccgaccagctgtgacggtgcccaagcctcttgctacagatgacaaacttgctaccctttatgcctacaggaaagcaaaaggtctctgttataagtgcggcttagcttattcccgaggtcacaaatgtgctgatactgttcaactacacttggtcgatgaaattaggaaattccttcaacttcctgaggaagaggagtcacccacagcagagcctgcagaggaattacatatgctgtccttatctctggccaccacatctgcaaaggacactcctaaaaccatccgatttttgggtcacattggagatattgcaattctgattntattggattcaggcagctcagcgtcatttctcagctctcaagaggcgtccactctacctgaggtcaggcctctggctccactagtgcgagttcaagtcgctagtggcgcccaactcacttgctctgaacaactactagatgtcacttggtacattggtggt

SEQ ID NO: 25237 - DNA, 457 bp, Zea mays
  unsure (1)..(457): unsure at all n locations
ggagcgttgttgtatttctgatcttgtatgtggatgacatattattgattacgaacgaaattcctatgctggagtccatcaaggcttcactgaaaaagagttttcctataaaggacttatgggaagctgcatatattttgggcataaggatctatagagatagggcgaagaggcttataggattgaatcatgatacgtacattgacaaggtgttgaaacggttcgacatggaacagtccaagaaagggttcttacctatgtcacaaggtatacacctaagccagaagcagtgtcctgcgacggctaatgagcgagagcgcatgagtaaggtaccatatgcctcgacaattggatcaatcatgtatgtcatgataagtacacacctagatgcttcatgcgctataagtgctacgagtaggcaccanngtgatccangtgaggatcactgaacatcgat

SEQ ID NO: 25238 - DNA, 498 bp, Zea mays
  unsure (1)..(498): unsure at all n locations
ntcagccgggccatacgacgggcgccgntcccgacccggtttcgtaccctgactaccatcaccgagtactcggnggagacaaggccagaactgtggctcgcggactaccggctggcctaccagctgggtggaatggacgatgacaacctcatcatccgcaacctccccctgttcctctccgacgtcgccccagcctggctagagcatctgcctcctgcgcagatctccaactaggacgacctgntcaaagctttcgccgacaacttctagggcacatatgtgtgccctaggaactcctaggatctccgaagctgccgccagcagccgggagaatccctctgggactacatccggcgattntcaaagcagcgcaccgagctgcccaacgtcaccgactcagatgtcatcggtgcgttcctcgccagtaccacttgccgcgacctggtgagcaagctgggtcgcaagaaccccaccagggcgagcgagctgatggacatc

SEQ ID NO: 25239 - DNA, 479 bp, Zea mays
  unsure (1)..(479): unsure at all n locations
ntgtatgtccgtggccgcactgatcagaaaaagtccaacttatgttgtttatgaaaggggaagaaccagaggggtcgctccaagtcaagggggccatccgatgaattattttgcaaatactgcaagaagacgaaccatgtaattgagaactgttacaaactgcagaacaaggagaagaggaacaaggagaagggtaagactggaggtactgtctctgttgcatccgaaaataattctgataatggtgatgttcttattgcctttgctggttgcgctgctgatgatgcccaatggatcctcgattctgcttgctcatatcatgtttgcactaaaaaatctctggttagtacctatgaagctgtgcagaacggacgtactcttcggatgggagaataattcccttgcacttgtgctggcatgggcaccgtgcagatcaagatgttcgatgggatagacgcacattgactgaagtacgacat

SEQ ID NO: 25240 - DNA, 333 bp, Zea mays
  unsure (1)..(333): unsure at all n locations
agctntgattgtgtctcggaacggatngctagctcttgtattgaatgtgaaatattggaatgcttggntgaagtgaatggaggtggttggggttgtatttatagccctcaaccacttctagccattgcttcttttctgccgaccgtggacggtccgcgcccctggtccggacggttcacccctgcacatcaacggctgaaatcgcaacggtcagcagtaacagctatatcaacggctatatagcatttaatgcgtcgtcagatgtcagataaaggcagtcgcggacggtccggtcgtgcaccctggacggtccgcgaggacgctataattcat

SEQ ID NO: 25241 - DNA, 471 bp, Zea mays
  unsure (1)..(471): unsure at all n locations
tatccaggggttccttagacggaggcaacttaagtctctgatcatttatgcgtagatatttcacaattcgcttttgacaatggattgtggattaccgggaaaactaagacatttacatcatcttccttaacagaagaaatagaagctcgaggtatcgacagagctgagcaaaagcaccagtgcgtatggtccacgtgactgatggatgtgcaaagcttcggaatctcctacggggatgatgatctcgtactacgatgatgcgctttggttgcattcccttcgagcacgagacagaaagagatagcaacaattcgggctaacaaagggactagaaccgacttcttcttctttgatcttacctattgataatgagaattcgctgtcttggttggttgaggatgaagcatatcggaaataatagtatntcaatggaaatcctggtactactttactttcacttcacttttcatg

SEQ ID NO: 25242 - DNA, 286 bp, Zea mays
  unsure (1)..(286): unsure at all n locations
tccatctttgaatgtgaagaatattnntgtttgttagaacagcctctgaccaactattgttctctgaatatgcccttttatggtaaaaactttcaatcggcgagtagttttgaatacaaaactaagaacagcagttttgtgtccctaaagttatatgcttgtagagtaattggtgggtcaaggattctaatgaagacagaggggggggggagtacatacataattatgccatgttagaagcacagacatgccacactatttccattgttgcgagcgacatatgaac

SEQ ID NO: 25243 - DNA, 384 bp, Zea mays
  unsure (1)..(384): unsure at all n locations
tcaccctangtgacatatatatactatctttagacatcttattctaatatgtttagtgacgtgtatttaaattaaggtcgataatatatatacattagtgatgttcatatataaacacgttgaaagggaattaggcttacacctgtttcctaaatgattttggtggttgaattgcccaacacaaataattggactaactagtttgctctagtctatgagttatacangtgccaaaggttcacacttagccaataaaaagaccaagaaatgggttcaacaaaaagagcaagggataaccgaaggcagccctagtatggcgcaccggactgtctggtgtgccaccggacagtgtccggtgcaccaccggatagtgtccggtgcacc

SEQ ID NO: 25244 - DNA, 488 bp, Zea mays
  unsure (1)..(488): unsure at all n locations
agcttgtacgtaagaccacaataactacttgtttctctgtntcaatttgtagataagtgtgctatgtgtgtagaactcctacaacatgtatcatcatctcaaaagacaaaattaaaaagagagagcagaagatcgaactagcactagtacaatttggctctatacaagcggtaggctttntacatcacaggcggttcggttagaaaaccgcctgtgatgtcccaagcggttcggtacgcctgtgatgtaatagtatcacacagcggtttggtttaggaccgcctatggtgctctatccttttcacacacggaccctaagaaaaaaccgcctgtgattgtgaaaatatgataatacacattatatatgaaaataatgttatnttttaacagaaatatgcaactacaatttagatgaattaacattttaattttaacaataatatgcaaatacaatntaaatgaattataatagcacacatagataacta

SEQ ID NO: 25245 - DNA, 509 bp, Zea mays
  unsure (1)..(509): unsure at all n locations
ctataaatactaagcttgtaaggttcttcatcccaacatgggctagtcggttgtgccatagccaacccatgttagtcttagcaattaagcaagtgtcgagttcagctctatcaaaatctaccaagtatagctgaccctctaacactcccttaaatgctattgaatcatcacttcttctaaagacagtgacacctacatcagtgaatagacagttgtagcccatttgacataattgagacacggaaagcaaattgtaatctaaagaatctacaagacaaacattggaaatggaatggtcaggagatatagcaattttaccaagacctttgaccaaaccttgatttccatccccgaatgtgatagctcgttggggatcttggtttttctcatatgaggagaacatccttttctcccctgtcatgtggttcgtgcacccgctgtcgagtatccaacttgagcncncggatgcataaacctacataacaacattagttcttgactttacgtac

SEQ ID NO: 25246 - DNA, 336 bp, Zea mays
  unsure (1)..(336): unsure at all n locations
tgcaagcttaataacctactatatgcactttttttctcttcatttatgaatcaaacatagacttagtgttagccataacatacaagattaattntagccataacatactagattaattgtcatcggaagtccttacccaccatatgtttaatcaaacataaacttaattttagccataacatacaagattaattttagccataacgtccaagattaatctttatcgaaggtcctcacccaccatattattaatcaaacataaacttaattttagccataacatacaagattaactctagtcataacatacaagattaattctagcccttacataca

SEQ ID NO: 25247 - DNA, 481 bp, Zea mays
  unsure (1)..(481): unsure at all n locations
tcgcacctctgaactaactcggctgcatcattctttgctgntggccaatagaatcctgacctgaagactttcccaactagtgttctggaggctgcatgtattccacattgcccagcatggacctcctccagaagttgcttctcagtggacgggagaatgcacttcatgaggacgcctgatgtaccccttctgtataatgtctccccaatgagtgtatagtgagccgactgtctggcaatgcgctctgccgagttcttgtcgtctggttcttcttcattctttatatacttaatgattggccttctccagtcatcagagtctgactcgggttgatctataatgttgcactcttctgtttgatccattgagatactcggctgcagtatttcttgcacaaagactccgggtgggacctgagctcgactggatcctagcttggatagtacatcggctgccgtgtttcgatctctttctacatgat

SEQ ID NO: 25248 - DNA, 457 bp, Zea mays
  unsure (1)..(457): unsure at all n locations
gacctatgatactaagcttctaagggagagcacattntaggactaaccaatgttcattntgagaaagatagggtttgtagcgcatgccaagccgggaagcaagttggcgctcatcatccacacaagaacatcatgacgaccgacaggccgctagagctactacacatggatttattcggcccgatagcctacataagcatcggcgggagtaagtattgtctagttatagtggatgatcactctcgcttcacttgggtgttctttttgcaggaaaaatctcatacccaagagaccttaaagggattcttgagacgggctcaaaatgagttcagcttaaggatcaagaaaattagaagcgacaacgggacggagttcaagaactcacaaatcgaaggcttccttgaggaagagggcatcaagcatgagttctcttctccctacacgccacaacaaaatg

SEQ ID NO: 25249 - DNA, 286 bp, Zea mays
agcttacccttgaagccttgaataagctacagaatgaactcttccagccgctcagtcaaaaggaccgaccgtgagaatcaaagcactgcccctgagtcaaagttaacaggaaaagaggatagaaggagttattaccataaagagaggcaaagattcttggaaccagagaccacaaacatcatggtcattgaccccaccactcacccgtgccccccgcacgcgtgcccgcctctatgcgcactatgcaccgccgccatgccccctttgcagcgcactaccccgcgcc

SEQ ID NO: 25250 - DNA, 471 bp, Zea mays
  unsure (1)..(471): unsure at all n locations
ataatatacgaattgactcattcctatctacgggtgcataggtttcaccaaaatccaaaccttcgacttgtgaataccccttggccacgagtcgagctttgttccttgtcaccacaccatgctcgtcttgcttgttgcagaagacccacttggttcctacaacattttgattaggacgtggaaccaaatgccatacctcgttcctcgtgaagttgttgagctcctcttgcatcgccatcacccaatccgaatcttggagtgcttcctctaccctgtgtggctcaatagaggaaacaaaagagtgacgctcacaaaaatgtgcaacacgagatcgagtggttacccccttatgaatgtcgccgaggatggtgtcgacggngtgatctcgttggattgcttggtggactcttgggtgtggcggcctttggtttcatcctccttgtctgatcatttcatctccncttgatattg

SEQ ID NO: 25251 - DNA, 286 bp, Zea mays
gcaagcttgtgtcctggttagtggacatccctgcgaatttctctattattagagcggtctctaccaataatagatccgatgagaacaactatgactagatgaagcacgtgctatgtagatctatcgttgatgccacgttgcccatgggatgggaggagcgaagtggagctcgcgccgaagcggaagacgggtgagctaagagatgggctcccgatccctatgggcaatggggaggttcagatttggctggactcgatgcaacttttacacctagtgagcattctta

SEQ ID NO: 25252 - DNA, 377 bp, Zea mays
  unsure (1)..(377): unsure at all n locations
ntaccaaatggacgtgaagagtgctttcctcaatggaccaatcattgaataggtctatgttgagcaacctcccggctntgaagatagtgagtatcctaatcatgtctataggctctctaaggcgctttatgggctcaagcaagctccaagagcatggtatgaatgccttagagatttccttattacaaatggcttcaaagtcggcaaggccgatcctactttattcactaaaactcttgacaatgatttgtttgtatgccaaatttatgttgatgatattatatttgggtctactaacgaatctacatgtgaagagtttagtaggatcatgacacagaaattcgagatgtctatgatgggggaagtgaagtattttc

SEQ ID NO: 25253 - DNA, 218 bp, Zea mays
  unsure (1)..(218): unsure at all n locations
ctgcagctttgccctttacatcataaaaaaaaaaatttgatttatagttcacgcgaatagagaaattnggatgtagattcagcccggtcagcttgttgactgaggtagagtacttatgctccattttgcttatttaggctttctggtttggtgtgataccatgtgactatatgtgtatcatcattccttgtgctttgtaaaaccaatttaattgtgat

SEQ ID NO: 25254 - DNA, 368 bp, Zea mays
  unsure (1)..(368): unsure at all n locations
gtagcataggccaataatatacgaattgactcaagcctagctacaggtgcataggtttcaccgaaatccaaaccttcgacttgtgaatatcccttggccacaaatcgggctttgttccttgtcaccacaccatgctcatcttgcttgttgcggaacacccatttggttcctacaacattttggttaggacgtggaactaaatgccatacctcattcctagntgaagttgtgagctcctcttgcatcgccaccacccaatccgaatcttgtagtgcttcctccaccctgtgtggctcaatagaggaaacaaaagagtagtgctcacaaaaatatgcaacacgagatctagtggttacccccttatgaat

SEQ ID NO: 25255 - DNA, 217 bp, Zea mays
gcttctaagggagaacacgtgataagtctaacttatgttactttcgaaaaaaataaaccttgtgcagcttgtcaagcaggtaaacaggtgggaagctctcatcatgcccaaaatgtgatgacaacatcaaaacccctggagttacttcatatggacctcttcggacccgtcgcctatctaagtataggaggaagtaagtatgggcttggtataaatg

SEQ ID NO: 25256 - DNA, 391 bp, Zea mays
tcagctccatctatgttatggattgctttcgagtcagtccaattgccttctgcccttctggcagcttcctgacttccatgtatagcgatgggtccttgatccgaaggtatcttcatgcaaagataggcaggatgaagaattgcttcgaaagcattgagggtgccacgaccaataattgcattgtaagggtattccatgtcaacaatgtcaaacacaacttgctcagttctagtggtgttgatgaacccgaagttactgacatggtgatcttgcctaatgctacaatctgtctccctccgaagccacagagaggatgtgtagcatcatgaatcttatcttctggctcttgcatttgtctgaaggccttagcaaatatgatatcagctgcact

SEQ ID NO: 25257 - DNA, 331 bp, Zea mays
  unsure (1)..(331): unsure at all n locations
ctaagtgcaatgaagcctttgagcaactgaagacactattgaccactgctccggtattaactcaaccggacatcactaaacctcttgacgtatattgtgatgcatctggcagtgggctcggctgtgtactgatgcaagagggccgagtaattgcgtatgcttcaaggcagttgcgccgacatgaggagcactatccaactcatgatctggagttagctgctgtggttcatgccctaaagaattggcgtcactatctgctgggaaatatctgtcacatatatacagatcataaaangttgaagtacatcttcacccagtcagagttaaatat

SEQ ID NO: 25258 - DNA, 492 bp, Zea mays
  unsure (1)..(492): unsure at all n locations
tgtcagaattgtttngaagaactcaagagaaggttaaccactgtttcattattggtaatgccagacatccacaagggatttgatgtatattgcgatgcatcacaccttggacttggatgtgtgctaatgcaagaaggaaaagtaatagcttatgcctcaaggcagttgagaaagcatgagaagaattaccctacgcatgatttggaactagctgtcgtagtgcatgctttgaagatttggaggcactatatgattggaaacaagtgcaaaatcttcacagatcacaaaagcttgaaatatatattcactcagaaagaactcaacctcagacagagaagatggcttgagttgattaaggactatgatttggaaatacaatatcaccccgaanaagcaaatgtagtagctgatgctttgagccgtaagggtcaagtgaacaacatcactactcatttgatgtcgcaagaattgtgctgggaaatggaacaactc

SEQ ID NO: 25259 - DNA, 329 bp, Zea mays
tgaacagatgagcatcttcactgatctccaacacagaccacacagcttctcagataaagaggagaggagaataatgggtttcccaactatataactaactttattgacatagtatgtaaaccaaaatgcaggggatacccacactctggtaacagtcattacaaagatccaaaccaaacatagttcatcatgacaaacataaatgcacaggatatagcaaactaccctgtctaactaagactaactaagaccgagactaacgctaagactgaagcttctacgtatatatatttcgtattaattacaagatccaactctaacgatctatg

SEQ ID NO: 25260 - DNA, 405 bp, Zea mays
  unsure (1)..(405): unsure at all n locations
gtagtcattctaagacgcataatatgtggtgttctgtttaagtatgacgatgactaggaggttttgtttgcactctgataattttgtgaatcgcttgtttaagttctatgtagttggattacttgaaatggatcttatgctatcgggtaatcagaggaaatttacaatatcctgacaaactcgcacatttgttctttgactcgcagcacggaataggagctctactgctcaccatggatcaagtgccgaagaagatggccatattgggttggccacactatcatcgatatgacctgccaaagttttgggcgtgtaaaanaggttgcatatcattattggcggatgccggattcttgcagcatcattatgtgaggatgaatgcatgcgtaggtatacggctatacc

SEQ ID NO: 25261 - DNA, 510 bp, Zea mays
  unsure (1)..(510): unsure at all n locations
ctatgaaactcagcttctgctaaatggccttctctattctgaaattnttcaattcttagttggcagcctgttcttgttggtcctcatcatgataataaaattgctcgacacaagatatgaaggcttcattcattttgggctcatcaaatattgatgggttagcatagctatagtgaggattcagcaaaaaagctgtcaaatgcaatggagaatcaagtcttccattcatcttcttctcaattacagccataacatctttgaatcgagactcaacattgccaaaggcctctttgatctctctttttgcctttagtagctctccataaaggaaacccatggatggcttcacatccncatcaaccanacggacgactttgaccaatggctanaaacagccaacattagcttcacatccttccaaaaggctggactcaatatagtagctgtggcctctnttccctttcttgattcacaatctttaatgagtcccanctgctatgaactaccatc

SEQ ID NO: 25262 - DNA, 462 bp, Zea mays
  unsure (1)..(462): unsure at all n locations
atccttatagtcacctgcngcatgcaagcttgagtgagacggaaggtgattatgacgaatgattatatgatcaccaagctctgcgtagaaaagcttcngcatgacagtagaaaagggggaaccgacttaaatatgaaaagccaaattagacctcgaagaattactatagagttattgataaatgtaaagggcattaatgtaattttgcatgggccgcgacccgtgcctataaataggtgaacagtattcccgtactgttcacgctgacttggcattcacttttgcgtcacgcctgtattcttttcctttaagccgaaggtacatttgtaatttatctttngttacacaagtnatacaaataanaagagattaacaataatgtttacagaaattttatgtacttctgtatttnngttgaatggtctccattttttatcatgatcatgaaaatatgtccttcat

SEQ ID NO: 25263 - DNA, 479 bp, Zea mays
  unsure (1)..(479): unsure at all n locations
gcagcagcttcaaccttttcagacgcaatttcctctgctccttcttcttcaactgcagtgggctctgtctcagccggatctatctcagtgggctctgaaggcccagctttggtttcagcttgaatttttgcagcttcgacttctgctggcttcgtttcagcttcgggtagagctttggaagtttcagcaatttttcctgaaggagcaggactcaaggattntgctatttctaacaaaacatctaacacatttgccatccttatcctcttaggggttgaggcagaacccttttgtgacttcggcactgttatctctgttgacgggctcaaaatctctagcatntttgttattttttcaattntcgaccattcagccttatccttatcagccttcgtctcaaccaacttaactgaaggtaacttcggcattacaaccagctcttcagtgctctgtgcaatcggagcagtcacacttggttc

SEQ ID NO: 25264 - DNA, 195 bp, Zea mays
  unsure (1)..(195): unsure at all n locations
atgtgcttatctgtgatgccacagccagcccatgcaagtcttatccattaagcatgcatctagactggcctcttcttttgcaaaatcaactaagtaaaacttgcgcgctagtacacccttaaaagctagtgaaccatcacatcttctaaagacagacacatctacatttgtaaacaaacagntatatcccatatt

SEQ ID NO: 25265 - DNA, 486 bp, Zea mays
  unsure (1)..(486): unsure at all n locations
tatcctttgttccgtactgctcgtctgctccccgttcacccctctccctctctctctctctctctctctctccactttcctttcctggcagcgacgagtgacgacagtggcaggcgggcgggcgggcgagcgtccacggcgttctctatgtcttcgttgtccccttcaccggcggctgccaacgccctttgccaggtcttcgttgtcaccttcgccggcgactgtcacgggcccttcgccagctcttcgtctgccccttccccggtaccgggtatgctcgcccgttctctttcctccatcctgttcaaaaggacaacccanatttaaggtacctgtatagctatttgggatctgacccaattacggacaggtttggtggtgaaattgcacacattaattgaggtangtatctgagccccccccccgccgcgggaaanaaatcttatttttccgtgtgttttattcttgacgtcagccatttatata

SEQ ID NO: 25266 - DNA, 385 bp, Zea mays
  unsure (1)..(385): unsure at all n locations
agctntcctaccgtgacggctacccgcctgtggttgtcatcggcggggagggggaccgaggacatctgcgaaccctccaagccgaccctcggcgtcatctccaaaagcagcagccgccgctccgtcaagtggagcaccctccggcgatggatggcggcgaccacccccgcggcggtaagccctccgtctcgcaactcctgcaaggcctccagaagaggctggagattcttctgtctgtcgcgtggggccccatagcgccagttgctgccgacggcggtcaccacttcgtgagaaaacgacgggagcctnccatcgtcgtaccgaaggtaaaaccaccggcgctgccaccccttgttcgaagacacaaggatggcggngatgtact

SEQ ID NO: 25267 - DNA, 435 bp, Zea mays
  unsure (1)..(435): unsure at all n locations
ntaccttgattcctaacaaccagcatatccttgagagtcttttttctttgacgagtaagacttgcgaaagtacactccgtactcagggtttccaaacccatgttgttgtaggtgatgaaacggttgagttctgctgtttctgttccaaggtggttcccaagcaggagaatgaaaactaagacttatttgggaaggtgttttgccttcttgtgatgtaataataagtttacgcactcaagtacccgaatatgtaataaccactctttctatatttttcttatgaatgtaaattatgttattgtaatcctttccgcttactccttatttcgatgatgtgtaatgtctgtgtgatgggttaagtgctcttgggcgatgtgatggagatattagatacagaacatgatgaatcattatgcacacctgcatgactgtctg

SEQ ID NO: 25268 - DNA, 499 bp, Zea mays
  unsure (1)..(499): unsure at all n locations
tactaagcttacatgtctcgtatgattcanaatcaaacgaagttaaaagcccatcataatgaagcttcttcatgcgattctcacttatatgacccaaacgacagtgccatatgtaggtaggacttaaatcattaggccgaggccttttagcactaatattacagataggtgcatcatcaagatttaaaatgaataacccatttataatggatgcaaaagccacaaacatgccattcttagagatcacacaaccattgttttcactcgcaaatgaataaccatccttcatcaaacatgaaggagacataatgtttcgactcatactaggaactagataacaattatttaactccaaaataaatcctgatgggaggtggagttgcatcgtcccgacggtcaacgcagcaactcttgcattattgcctacccggaaatcaacttctcctcttttcacgtttctacttcttatcattccctgcatcgaattgcanatatgggc

SEQ ID NO: 25269 - DNA, 314 bp, Zea mays
agctgcagcttgtccatatattggtatacactcatccatgtctcttcttaaattataacacacaacagataagtcttaaaacacgattgttcattcacattcacatacaagtctcaaccacacaaatatacaatacatagtcatgaccacacataaatgatcatacatgttcactaaagttttaaccacatagtatataagtcttaaacacacgatacataaactagaaatcatgtggcatgtcgtctggatcacttgatatatcttctatgacatctaaaaccctaatctctaaaccctaacgaggatagttc

SEQ ID NO: 25270 - DNA, 490 bp, Zea mays
  unsure (1)..(490): unsure at all n locations
tatctcanattatggggtggaggatgggaactgattntatgtattactagaatttgtttctactctgtaacttacaagactgatctttgactcactcctctataacaaaaatgtaacacataagtatctccgatatcttgctaataatagtatactgatatattttccataaaaccgaattagtttaattgatatatgcctaatattactattattagaatggaattcaattccaatgatccaaacggggtgtaatcaaaatatatacaaataactaagtatttatatgtgcaactataattntgactaagtgttggtatctctatcctaaagagttatataatataggttntaaccttattcactagtaaaattctaagctagaaatgtgaagcacatgaccaagataatgcagcataaatataaaggcttaaatgtgatagagatataaactctagttgacgtgtcgatggtttaaaagcacataact

SEQ ID NO: 25271 - DNA, 366 bp, Zea mays
  unsure (1)..(366): unsure at all n locations
gctngcattgatatntacatttcttgtattgcatctatggcttgtctaacctagntgagataaccgccaacaaagcgagtgaaaaagcttaactcggatcaaacttgacaagtcttagtttntaagattttagcacttaaactcttacttattatgcaattgttggttcttgaaatatgcatgaggtactgctcttagggggagtattcaaaactcaaaacactcatgaaaacccctagtgcaaggccaaaatgcaaatttcaccatttngcctatttctctaaaaatatctatcctatggcanaatattttgaaaattatgagaaaatatatgagggtgccaatacctgtccccaacaagtgtat

SEQ ID NO: 25272 - DNA, 452 bp, Zea mays
  unsure (1)..(452): unsure at all n locations
ngcttcgaactctntcactgccttcgaaccagccttagccagntgcaaagcgcgtgcattntccattangaatggntggggagcgatctaccctgaggtgtccttggcaccttcgtcagatgtgccagagacaaaggttgaaggcttatctacaacaacagaggctactacctaccaaaccaaagcagctaccatggatccttctgaagatagtgatggtatcgacatcgaggaagatatcaccatcatttattcgacgaagccaagtcacatggacttcggcaaatcaaagatcaaaggaggagacattgaggtatttaattggtttggttatattgacaacattaactgggtctgactatgaggcgatgacttattgtcaaaaccgaaagaagacgaagtatgtgtcttccaaagctntttgaaagctggacttagattctcactacata

SEQ ID NO: 25273 - DNA, 181 bp, Zea mays
  unsure (1)..(181): unsure at all n locations
tacccaaaaagttttatgattnttggagttatcaatttaattctaaaattccaaaggactaagtttagggctctttaaatgctaaataatccatggctgggactaaaaatcttggaactatttttattaaatactagaagaaattaaaagtctagtaaaattggtcccatatttttatcac

SEQ ID NO: 25274 - DNA, 221 bp, Zea mays
  unsure (1)..(221): unsure at all n locations
agcttgtggctatttagtattgaagtttactggatcacctattcacccncctctangtgctctcaatnggtatcggagccgttctcttcacgtaagggactaatcgcccgtatagatggatcctacaggaaaggggatggtggtcaacgataaggagaaggagtccatcttcaacgagccaggagatgacaagcccactgactctggctcgagtcacaaga

SEQ ID NO: 25275 - DNA, 494 bp, Zea mays
  unsure (1)..(494): unsure at all n locations
tactcaagctaatatgataattagagtccttgggtgaagttngacatgtgttggacattgtttgatcacaaaaccccaaaaccctagtttcttagaataaaactacctaaccctactagggtgttaacctagaagaccctagtttccctggtgtaccatgaaggaaagttgtattcaagatacaacttgatgtatctctattataattgcatattcatagcatcacatgagcattcatgtatacgtatggttatatatagaaaacgaagaagaagtaagtgtcgaagaagaagagactgcaccaccaactgagactccacctgtcaggaatcgtttttattttgacatctgtggaacagatcccgattcccctacaacacaaggcaagccccagtgcatttaccccttccttggtgttntaaactctttatcacttgaaatgatgcattangtgataggagttgggtgataaacaattgctacatntccttctt

SEQ ID NO: 25276 - DNA, 470 bp, Zea mays
  unsure (1)..(470): unsure at all n locations
acaatgaggaaatggcgctcgtcatcaatttctttcgccaaatcctcaaacaaaggagggggaaagactacaagtcccgctccaagaaggtttgctacaagtgtggtaagcccggtcactttattgctaaatgtccattatcaagtgacagtgacagggataacgacaagaagggcaagaggagagaaaagaagaagtactacaagaaaaggggcggcgatgcccatgtttgtcgggagtgggattccgacgaaagctctagcgactcctccgacgacgaggacgccgccaacatcgccgtcaccaagggactcctcttccncaacgtcgggcacaaatgcctcatggcanaggatggcanaaagaanggtaaatcaagatccctcactanatatgaaacctctagtgatgaagataatgctagtgatgaataagataatntgcgtatcctctttgccaatcttaacatg

SEQ ID NO: 25277 - DNA, 190 bp, Zea mays
  unsure (1)..(190): unsure at all n locations
tggtaaattttgaagtntttgctatatttattcaatttatttcatctaattgaatttcttttgataattcaaatttgaactgcaagtcattcgcatgacgaaaaactgatattcatgttattcatcatcatttaccaccttatcgcgtaaccgactataacttgtaaacatcatgttcacgacacatgac

SEQ ID NO: 25278 - DNA, 380 bp, Zea mays
gcttatgaagattcttcatcccaacatgggctagtctacgatgccagagccaacccatgttagtcttagcaattaagcaagtgtcgagttcagctctatcaaaatctaccaagtatagctgaccctctaacactcccttaaatgctattgaatcatcacttcttctaaagacagtgacaccaacatcagtgaatagacagttgtagcccatttgacataattgagaaacggaaagcaagttgtaatctaaggaatctacaagaaaaacattggaaatggaatggtcaggagatatatgcaatttaccaagtccttggactaaaccttgatttccatccccgaatggtgatagctcgtggggatctttggttttctcatat

SEQ ID NO: 25279 - DNA, 434 bp, Zea mays
  unsure (1)..(434): unsure at all n locations
tctnctcaattggcgccactcctactctctctcgtatatcatcattccggactcggnctctccttgtgtggccacatatccagcgcaacatacgcatctctgccacacttagttgttggacatgtcgtattttaatgggccaacattctgctccatacaacataaccggccggattgctgtcctgtagaatttgccttttagtttgtgtggcacccggnggtcgtataagacacccgcagcttgccgccacttcaaccatccagctntaattctatgactgacatcctcatcgatgtctccctccttctgaagcattgatcctaagtaacgaanaatgtctttcttgggtaccacttgcccatcaagactaacatcgccatcctcataccccatggcactgaaatcacacttcatatactcttgtttagaccta

SEQ ID NO: 25280 - DNA, 148 bp, Zea mays
  unsure (1)..(148): unsure at all n locations
gggagccctcttcgaccgaatgtggggtcctcacagccgggatgttggtaaagagcggtttgagaccacgaggggtcangtaatggttgactcttgtttggtgttgttgtgggttatatgtgggtttgctgaatctgtgtgttgtatc

SEQ ID NO: 25281 - DNA, 491 bp, Zea mays
  unsure (1)..(491): unsure at all n locations
cgagcacattagcctccacactactaaatntaccaaatgtgcttacaatgatgattggttgtcttggtattcagaatgatatccataaaggatatgatgaatctgtgatagattcgaaaatttcagatcattaatgaccatcaataatgaattgtcatttccaactagttatggttggagtcaggaagttttgcacgctcctgacttgtgattaactgcatgtactggatgtacaagttcccctatggtttttagtacgtgggaatccgtgaaaaatttcccatgcgtacattgngtatgttttcccaatctcaccaccgcagcgtacatgaatgggcacacagaaaactggggatctatgtgagaattcattctccgtcgatcattaagtcttagaatctcttcatgagaatctatntatggctcgtacgcttgcttgaatcatgagcttttccaggcattanggggagaattcgagtaccaaaaagaat

SEQ ID NO: 25282 - DNA, 240 bp, Zea mays
  unsure (1)..(240): unsure at all n locations
tgcaagcttgaggctgactcgccgaagcagcanatacttgtttatgattgcccacatattctgggatgtagggcgaatgatacgaagctgtatgcatgaactgcttcagctgagcttgntgtgctgctgcttcagctatctccttttgcttctgaataagaacatggcacatcctggtagtatggcatttgttctcaccgcagaataagcaaaagattcttctcgggtgatcgccaaatc

SEQ ID NO: 25283 - DNA, 485 bp, Zea mays
  unsure (1)..(485): unsure at all n locations
taganactcaagcttacctcggatggctcgctagaccactataaggcctgtttggttcttctgggcttcacccagcgccctggagtggacagcggctagaccttcagccgtgtcgacaagttcgacaccgttcggaccatcctctacctcgccctaccgagattgggcggtctatcagctcgatgtcaagaatgacttactcgtggcactctgatagagattgtctactgcagccaacacacctgcttcgtcgacttcactcgactggatctggtctgtcggctgaaccactccctgtacggactcaagcatgttggaaactgcgccggagagacaaccctgcatgttgccggcgagttcctacctcccaggtaagttcttcaggtatgagaaaacctctcagggactcacacgcacacgaactcttttggagaggaacacagcagatttggtggcgtcctattgactggcttttcttaacctct

SEQ ID NO: 25284 - DNA, 294 bp, Zea mays
  unsure (1)..(294): unsure at all n locations
agcttcatcatcatatctgtagataccctgattcgttgtgatggtgattntttgtattcttgctcttttgattnttgaaggaaacacatcttataatacgatagcacccattggaagtcctcgcatacagtgcaggggagaattatgctttatgtgttgccccttcaccacgatatgcccaattgaatgtagtttcatcagctatgctccattatggatgttcagaggcatccaatttcagtgtgtactgcaatacttgggtccacctgtacttgatagatgttctgcatttta

SEQ ID NO: 25285 - DNA, 486 bp, Zea mays
ctggttatgtaaatggccccagcacaggattcgaagtcggaacttgctgcgtataataatgcgttgttattaaatataagtcagttgcctaattttccgaactcaaacagactgactgtctagtaagatgacgttcttagctaataatcatccaatgttatcacaaagatgaagaattcaaaagtggtctttttgcgcgctgatctaggcggcaacacatccgttggagaagaccgcacgcctcgccgtccgatttggtacggcggcggtcgtgcccccatgtatgcacgccaccgttacctagtccaccacgagtcgatcgccgccgtcgtcctggttggctggttgcgtccgttccggggcatgcaccctcggttcatcttgctccctgcctccgtctctctatataagcagcaggtgcattctgaagcggcaactcactgcatatctgacatctcagttgctgaacgcctgaaccgcaagtca

SEQ ID NO: 25286 - DNA, 400 bp, Zea mays
  unsure (1)..(400): unsure at all n locations
agcttnccttttaccctgaaacgtgatatacccttcattggtgagactnttaggtagacataatccccaactagaaagtacaagggtttccgtcgcttgtctacataacttttctgacgagcttgggcttctttcaaattatgaattattcgtcgaaccttttcttctgtttcctttaccatatcaggcctgaagaaatatctttcacttggttcagaccagtttaacggagtacgacaccgtcgcccatacaaggcttcaaagggtgccattttaatgctctcttgatagttattattgtacgagaactccaccaatggcaagcattcatcccatntctgtggaaattctagagcataagctcgtaacatgtcctcaagtatntggttcaccctctcag

SEQ ID NO: 25287 - DNA, 395 bp, Zea mays
  unsure (1)..(395): unsure at all n locations
atttcatttcctgccatatcattagaaacatgcccttgcgagccattagattcatcaaatggcgcgtctatcgctatttcaacaagaccggtggtattggtgaagacacgatattcgtgcgcatttgatgcataactcagcaagaaatcctcatccactctaggagcaaacttcgagctcttgactttcttgtttagaataaagcatttgccaccaaagactctaaagtaatcaaccttanggttgttaccgatgagaagctcgtagaccatcttcttataaatcttatgaagataaagaccgttgattgcatgacaggcggtgttgaccacctctgcccagaagttgtcacgtggtcttgattcatccaacatggttctagcgacttcgattag

SEQ ID NO: 25288 - DNA, 355 bp, Zea mays
  unsure (1)..(355): unsure at all n locations
agcttgtgatcctctggtcaaccggtgcagtaactacaaccacttcatgttgttggctcacccctacatgtcagtctgtggcgtcggctttcttcaccaacatggtccgcctgcatggcatgccccagttgatggtctccaaccttgaccccatcttcacctccacatcctggtgggagctcatgcgcctcatgggctgattggcgccaaactacacaagacaactaagttccaatgcccatacagaggtggacaaccgtgtcatcgtcatgtaccttgcgccacttcgtggctatcgtccccatcagtggctagccggctaccctgngccgagtacatctgagagaatacatac

SEQ ID NO: 25289 - DNA, 420 bp, Zea mays
  unsure (1)..(420): unsure at all n locations
ctgaaggcgtagaaagaatgcgaagatgagagcactcagctagccttcagaaatctacgctcgaaagttataacgctntggaatgaggcccttgagaaagacaagattcttctttctttggtcgaaatgctaaagatgaatgaagctaatttggctaaattctctgaagcagatcaaaatatttcgaagcgtgacaaggagaaagaagtagatgcaagacgcatagcggatctagagtatgctntatctgctcaaatagaattgcacatatctgaagtgacaataatggagaagaaacttggcgaagtcattgaaaattttaatgtcgagcaagcgaagcgagaaatatctgacataaaagatctatggtgcaaaagaatgttgaagaacttcatcagacaaaggaagaatgatattctg

SEQ ID NO: 25290 - DNA, 486 bp, Zea mays
  unsure (1)..(486): unsure at all n locations
tactcagcttctaagggagagncacatttgggactaaccaatgttcattntgagaaagacagggtctatagcgcatgtcaagcaggaaagcaagttggcacccaccatccacataagaacatcataacgactggcaggcagctcgagctactccacatgaatctattcggcccgatagcttacataagcatcggcgggagcaagtactggctagtaattatggatgattattctcgcttcacttgggtattctttntgcagganaaatcacagacccaagagactntaaagggattcttgagacaggctcaaaatgagttcggactaagaatcaagaagataagaagcgacaatgggacggagttcaagaactctcaanatgaaggctttcttgaggaggagggcggcaaacatgagttctattctccctacacacctcaacanaatggtgtagtggaagggaagaatagaactctattggacatg

SEQ ID NO: 25291 - DNA, 242 bp, Zea mays
  unsure (1)..(242): unsure at all n locations
gcaagcttggactaggtcgtcccagtcggagatctgtctctgttgtatgtgctccaaccaggcgcgagcggtgtcggagaggaacanggggaggttgcggatgatgaggttgtcatcgtccgttccacccagttggcaagacagacggtagtccgcgagccacagttccggtctcgtctcccccgagtactttgtgatagtagtcgggggtcggaaccgggtcgggaacgtcgcccgtcgta

SEQ ID NO: 25292 - DNA, 504 bp, Zea mays
  unsure (1)..(504): unsure at all n locations
tatnggaatacgctatgatggcactggaagggaaaaaggcgtatattttaaggtattcaagcattatctgttcatttatacttgattccaagacaaagttcaattactatgatgatataggaaaaagtttttgaacaatggacatttctttgcattttggtgtaatgctaaatttctgcaggtccaatgggaaggatatggtcctgaagaggatacatgggaacctattgataacctgaggttagtattttggtagtgtcatctgcttgttgccttgtatgtctatttgtactctaatccttgtttcacgaaccagtgactgtccgctgaanattagagaatttgtacaagaagggcgcataagaaaaattctcccgcttcctgtgagtatttagttgggtgtggttntcctctctgtttagctccccagttttaattggtgacatctacctaatctattctttcaaaagggtgatgttgatgtcatttgtggaggcccaccat

SEQ ID NO: 25293 - DNA, 245 bp, Zea mays
gccgggaagcaagttggtacacatcatccacacaaaaacatcatgacgaccgacaggccactggagctcctacacatggacctattcggcccgattgattacataaacatttgcgggagtaagtactggctaagtattgtggatgattattctcacttcacttgggtattcattttacaagacaaatccaaacacaaagaccttaaaggattctgaacgcgctcaaatgagtcacgtaatgataa

SEQ ID NO: 25294 - DNA, 438 bp, Zea mays
  unsure (1)..(438): unsure at all n locations
ngaacacgagcatcactacgcataaaggagaacaatgcgaataatatggtcaaggactcaccgacaaatcccacgcgggaggctctggccacgcggtgcggtcaaggtcgaaatccgacgagaaattgccggcgcgcagctccccaatcgcgccaaccgaggccgagagcacgcaccagaggtcaagtagaagcacccgggccaacaatcccgaccgctccggcgtcgtcgtcgcgaaaccacggcggcggaaatcctcgtctctctctctctccgcttctctctactggggccggtgcctgcgaccagagaacctccgggcggctagggttttgggtgcttcggtctcgcctgccggctgtgcaactaacttatacggngacgagccgcccactgcgcgaatttcgcgggttcggttgagctcgtccgcgagtcttg

SEQ ID NO: 25295 - DNA, 242 bp, Zea mays
  unsure (1)..(242): unsure at all n locations
cgccggcaatttccagagcacgtacgtgcgccccgggaattcctgggacctncgaagctgccgacagcagctgggagagtctctccgggactacatccagcgattctcgaagcggcgcaccgagctgcccaacatcaccgactcggatgtcatcggcgcgttcctcgctggcaccacctgccgcgacctggtgagcaagctgggtcgcaagacccccaccagggcgagcgagctgatggaca

SEQ ID NO: 25296 - DNA, 262 bp, Zea mays
  unsure (1)..(262): unsure at all n locations
catgtgctaattggttatgccacaaccagcccatgctagtcttagcaattaagcatgcatctagaccgacctcttcttttgcaaaatcaactaagtaaagcttgccgtctaatacacccttaaaggctagtgaaccatcacttcttctaaagacagacacatctacatttgtgaaaagacaattatatcccatattgcatagttgacttacagatagcanattatatccaagagactcttctaataacacattagagataga

SEQ ID NO: 25297 - DNA, 491 bp, Zea mays
  unsure (1)..(491): unsure at all n locations
ggacctataaaactaagcttacaatgaggaaatggcgctcgtcatcaagagcttccgccagattctcttcataggagagggaaagattacaagtcccgctccaagaaggtttgctacaagtgtggtaagcccgatcacttcattgctaaatgtccattatcaagtgatagtgacaggggcgacgacaagagagggagaagaaaggagaagaagaggtactacatatagaagggcgacgatgcccatgtntgtcgggagtgggactccgacgaaagctctagcgactcctcctncgacgacgacgccgccaacatcgtcgtcaccaagggacttcttttccccaacgtcggccacaagtgcctcatggcaaaggacggcaaaaggaagaaggaaaatcaagatccttcatagatatgaaacctctagtgatgaanatgctagtgatgacgacgataacttgcgtaccctttttgccaatcttaacatggaac

SEQ ID NO: 25298 - DNA, 321 bp, Zea mays
agaaagacaggatttgtagcgcatgtcaagaagggaagcaagttggtgcccatcatccacacaagaacatcatgacaacggacaggccactggaactgctccacatggatctattcggcccgatagcttacataagcatcggcgggagtaagtactatctagtaattgtggatgactattctcgcttcacttgggtgttctttttgcaggaaaaatctcaaacccaagagaccttatagggattcttgagacgggctcaaaatgagttcggcttataggataaaaagatagatgcgataatgggacggagttcaagaactc

SEQ ID NO: 25299 - DNA, 346 bp, Zea mays
  unsure (1)..(346): unsure at all n locations
acccaggtacattggtccattcctggtacttgagcaatgtggaccagtggcataccgactncaactacccgaaaccttgtctgctgtgcataatgtgttccatgtgtcacaattgaagaagtgtcttccggttcccgatcgaaccattgaagtaacggatgttgtccttgaaccggacttgacatactctgagcaccctattcgagtcttggatcaaaaggacagnggtacccggagaaaaaactctcaagtttataagatacagtggaaccagcattctgaagatgaagctacatgggaaactcaagatttctagaaaagaatttccangctttttacctcatgt

SEQ ID NO: 25300 - DNA, 520 bp, Zea mays
  unsure (1)..(520): unsure at all n locations
tctattaggacctatgaaactaagcttgtggccatacttgtaatttcaagcgaagctgtacctctcccctataaatagatgaacaatatcatgcatatggngacctccttttccaaggaaggaagaagacccccgtttgttcagctttcgaaactatcttcaagctctcatttgtgtaaagccgaaggtatgcatgtaaatgtttatcatatggcaagggatgaaatttgagatgaatatgcagataagttaggtctgttctttattatttgcactntctattctaatcaaagatgtgcaagtcctttgtctgttaccttcttccttcatatgcccttcggataaaggttaaatgaaggaagaagcagacaacgtactagttcatgttggcttatntttggcattctgatgggttcaaaaacaagtagtcatcactacctttgtcctaaggctattatcctgatgagaaatacctcagggacaagatctcaactgttaacatttgtgtgccttgttttgg

SEQ ID NO: 25301 - DNA, 343 bp, Zea mays
  unsure (1)..(343): unsure at all n locations
atgccaaatgggttgagtttatcgaaacatttccatacattgtgaaatataagaaaggtaatgacaatgtggtcgctgatgccttgtctcgaaagaatgtgttgttgaatcaactagaggtaaaagttttgggtcttgaaaatttgaaagaaatgtataatggtgatcctgaattttcagaaccatacaatcattgtaaagatggaaaagggtgngaaaaatatcatatacatgatggagttttgttatagctacaaacttgtgtaccaactcttcggtattgacgagtacatggggcggctacacgcatttggcaaaaaagactataatgctatgtatttca

SEQ ID NO: 25302 - DNA, 490 bp, Zea mays
  unsure (1)..(490): unsure at all n locations
ntgagtggatnttngaaaacaatccattcaaaggtccacatcttatgctttagaaatcagccttctatcaccatcttatgctttagaaatcagcattctgtcttcctcttatgttcttgcgaattcaaacaacgctatctgtccatgccttgttaggtctaaaattaatttgaagggtgacagattggatgtctgtgtcacacccggttttataaggcaaaccgaatgcgaaccatgtacgtgccacgatcaacaattcacgtacacagcagttacataactggacatcatcacacagtgctaaaataatgacataaaagagggtataatagtcgattacatcatgatgtccgagacatccacatagtctttaacaatattcaaagtgcggaaaagatacatagatacacactgcctacatatgcagctgactgggggtttgccgctaaccacacctagaactatcgactcttgaactctgcagtcctct

SEQ ID NO: 25303 - DNA, 469 bp, Zea mays
  unsure (1)..(469): unsure at all n locations
tcacatgtctcgtatgattcacaatcaaatgaagttaaaagcccatcataatgaagcttcttcatgcgattctcacttatatgacccanacgacaatgccacatgtaggtaggacttaaatcattaggccgaggccttttagcactaatattacagataggtgcatcatcaagatttaaaatgaataacccattcataatggatgcaaaagccacaaacatgccattcttagagatcacacaaccattgttttcactcgcaaatgaataaccatccttcatcaaacatgaaggagacataatgtttcgactcatactaggaactagataacaattatntaactccaaaataaatcctgatgggaggtggagttgcatcgtcccgacggtcaacgcagcaactcttgcattattgcctacccggaaatcaacttctcctcttttcacgcttctacttcttatcattccct

SEQ ID NO: 25304 - DNA, 224 bp, Zea mays
tggcagatgtagcgcatatgtcattcctatagaaataccaaagccacgtgagagacgacatattcatcatcataaaattctcaaatggaatgcataaaaattgcagtgatcgacataaaaatatcacggaatgcataaacatggatcagatgaggtcgtccgaggaggatgcgccaaagctaccatatcaaaggagttcatcggcagatgatccacgttttcac

SEQ ID NO: 25305 - DNA, 453 bp, Zea mays
  unsure (1)..(453): unsure at all n locations
tatcaatcaatcanaacaattggatcaggagaagctagaactgaattctaagcttaaagccgaagtccagaccagctcagaattgaagaaagcattaacaagccttcaagacaaatgcttgaacgttggcaataattgtattggacgattaaagaagatattttactctgttggagccagcagtgggaaatttaacccttcggcggaaaatttaccccaggccttcgatcatattgaagctgaaatcgaagagcttgacgaagttatagccgggcacggcgacttctgtgcctgngtagcttctcggggtaccgctgctgcatttctgaaggccggctgcgaacatggaaaggttgtcaacaggcccaacttcaccttatcttcatcaatcctggatgatatgcccgacctcgcccgaagtatctncaatagaattataanaatggtatggac

SEQ ID NO: 25306 - DNA, 273 bp, Zea mays
  unsure (1)..(273): unsure at all n locations
agcttatcaaagataaattacacagaattggtgtatatgtgtttatgctgnattaatggcatccaggaagcttcggcattattttcaagcttaccatataattgctccctcatcacaacctctgaaggatattatgaggaacagagaagctactggaagggttggaaagtgggccgcagagctcaatgaattcaccattgactatgtgcacagatcttcaattcaatcctaagcgctagcagactttatatctgactggacgccaggggctca

SEQ ID NO: 25307 - DNA, 472 bp, Zea mays
  unsure (1)..(472): unsure at all n locations
tctnagggagaacacgtgataggtctaactaatgtaactntctaaaaagatagaccttgtgcagcttgtcaagcaggtaaacaggtgggaagctctcatcatgccaaaaatgtgatgacaacatcaagacccctggagttacttcatatggacctcttcggacccgtcgtctatctaagcatagaaggaagtatggtcttgttatagttgatgatttttcccgcttcacttgggtattctttntgcaggataaatatgaaacccaagggaccctcaagcgcttcctaaggagagcccaaaacgagtttgagctcaaagtgaagaagataaggagcgacaatgggtccgagttcaagaaccttcaagtggaggagtatcttgaggaggaaggaatcaagcacgagttctccgctccctacacaccacagcaaaatggtgtggtagagaggaagaacaggacactattagacat

SEQ ID NO: 25308 - DNA, 361 bp, Zea mays
  unsure (1)..(361): unsure at all n locations
agctntatcaaatggacgtganaagtgcctttcttattggaccaatcaaggaggaggtctatgttgagcaacctcccagctttgaagatagtgagtaccctaaccatgtttataaactctctaaggcgctttatgggctcaaggaagccccaagagcatggtatgaatgcctaagagattttcttatcgctaatggcttcaaagtcggaaaagtcgatcctactctcttcactaaaacacttgcaaatgctttgtttgtttgccaaatttatgttgatgatatcatatttgggtctactaacgaatctacatgtgaagagnttagtaggatcatgactcanaaattcgagatgtctatgat

SEQ ID NO: 25309 - DNA, 497 bp, Zea mays
gggaaaatctggtataaatcggcggtaataaccattcattccaatgaaacttcggacttgatgaacagtggttgggggtttccaatccaaaatgtccttgactttgctgggatccaccgcaatccccctgacagacagtacatgtcccagaaattgaatttcctccaaccaaaatgcgcatttgctgaacttggcatataacttatgttctctcaagcgcgttaacacgatccgtaagtgttgggcatgctcctcttcatttttggaatatatcaaaatatcatcaatgaagaccaccacaaatttatctaactcgggcatgaatatcgagttcatcaaataagtgaaatgggcaggagcatttgtcagtccgaaagacattaccagatactcaaataacccataccgtgtagtgaatgcggtctttggtatatcctcgggccgaatacggatctggtgatagcccgatctgagatcaaccttggagaataccctcg

SEQ ID NO: 25310 - DNA, 335 bp, Zea mays
  unsure (1)..(335): unsure at all n locations
tactacaagcacccncggtgcaagataatataagcctcatccctcctcttgtgttccatcttgcatcaacccatctggacaggggcacgcagcacaaaattcactagtcggtccggttgagggtcccccaggtccgaaacaccgacaaattcaaattcatatttgtcttcgagttattttttaatgtttagagtttagttttaatcattaaccttagtgaaccgtatgcgtcacccgttcgggaatggcgaacgtcacattggcttgtgaagttcgccattccggaattgtccatgtattttggacagcctaagagtgtagactgatgcttgtga

SEQ ID NO: 25311 - DNA, 460 bp, Zea mays
ttgaagagatcctcagtgatcgcggggacatttgtgcctttgccagcgctcgaggggttgcagcaattctagagaaggttggttgtgaccatgttaaagctgcagcctagaccgaagccgccttctccatagacaacacgagagacccctcggccgaagctactttagtgggcggaaaattgtactcctatgtttgggtgaacggtggtcgaaaattggcccacgaaatcataaagaataatgaaaaagaaacccacgatgctcgagaagaagctaaacgagccgaagaagctgccgagcgcgcaaggcgtatatgtattttttttgaatgttagcttcggtgtttattttcaggcttcagactaacggtttgtctactacagctgaactctcaccgctggctgagccatacgacccccaggtcgatcccgtcataaaagagggcgtggatgtaatgagt

SEQ ID NO: 25312 - DNA, 477 bp, Zea mays
  unsure (1)..(477): unsure at all n locations
tgccttagctcangcagaagcccgagtggtcgtggtagaaagtcatcttgatgtggccaaagaggaccttanggagcaggcgaactgccatagtcaacttctcagaggtgtatacctagtggaccgtgcctaacacaaggagcaccaacccatgaccgctgctgagtcaccacccatggagggaatccctttgtaccctttgtcccacccccacaggaggatttatgaatcggtgccacccacaccaccccgcatctcctcgtgaagccgaagtaagagaccccaaagaccgtgccatanggaccagtagccaagttgtttcagccaacccttaaaaggtcgagacacgaaattgtaccctgttgtatcatgaatgtctgcatgtggaatgaatgcttgtgtggtgcttgaatgctttcacttgtgtgcattgtgtaagatgatatatatacacataagtataccccaataatctac

SEQ ID NO: 25313 - DNA, 317 bp, Zea mays
gcttatctttcttttttaaaaacatcgacatgtcgaaaggaaagtaatgtcattacaagtaagtgctctgccagaaaaatgaaaaaaaaagacacgtactaacatggaattgtgatgctttccttccttagagcatgtacgtgtctaagagcttaatgcaaaaaaaaaaacacacgtctcttgtttgtagcctcaagatagaagacgtagttgattaatatattggtgaaataaatgtagtaagatataataggttttagacacaccacttgatctaccttaattgtgtcttgtgcttagaagttaaaaatcaaatc

SEQ ID NO: 25314 - DNA, 436 bp, Zea mays
  unsure (1)..(436): unsure at all n locations
tcttatcgaaggatgatcttgctgacagtctcacgtataatagcataaaggtataaaagttgactttgaagttagaagtgaagtattttattgttatactcaattatttcttcttatttacagggattaattcttagtaatgccttgagggctcagaagagcgccgaagacaaaggttgtacaatggctcttaacaaccttcggtccgaggtgattgaactaagaaacgaaggtctagagaaagataaaattttgatttcattggtaaacaaagtaaaggaagacgaagctaattataaagctcaggccgaggcccaaaaaaccgaaaatgaagatattcggagacagttggccgaagctaaagagaattgcgcgctcgcacaggctaaccgagagatcagcgagtactggaaaaattatctagagaanaatattg

SEQ ID NO: 25315 - DNA, 321 bp, Zea mays
gcttcgtgaactattctccgaagctactcttcatttctattcgtcttgtgccttagcacgattttctcttttccaaaatatgttccgaagattaacattgtatccccttcttgttccacatgcagtatgttgtatgatgcttatgttatgcaaaaatgatgtgatgatgttatgttatgcaaaatgatttttgtgccgcagatacatatccctgtaataaagcacacacactttatatatcagcgctaacttttcgctgtaagccctccttatgagcttcttcgccttttactttcagcggaatcagcgtttatttttcgc

SEQ ID NO: 25316 - DNA, 498 bp, Zea mays
  unsure (1)..(498): unsure at all n locations
ttaggaccttagatactcagcttctaagggagagcacattntatgattaacaaatgttctatttgagaaatacaggatntgtagcgcatgccaagcaggaaagcaagttggtgcccaccatccacacaagaacatcatgacgactgacaggccactggagctcctacacatggatcttttcgacccgattgcttacataagcatcggcgggagtaagtactgtctagtaattgtggatgattattctcgcttcacttgggtgttctttttgcaggagaaatctcatacccaagagaccttaaagggattcttgagacgggctcaaaatgagttcggcttgaggatcaagaaaattagaagtgacaatgggacggagttcaagaactcacaaattgaaggctttcttgaggaggagggcatcaagcatgagttctcttctccctacacaccacaacaaaatggtgtagtggagaggaagaatagaactctattggacat

SEQ ID NO: 25317 - DNA, 390 bp, Zea mays
  unsure (1)..(390): unsure at all n locations
gcttcacctagagagattcacttgaaggtcgcataaataattctaagatatttgaagtatactcccaatattggtctatggtatcccaaaggtgctcaattngaattaattggatattcggactcggactatgcggggtgcaaagttgatagaaaaagcacctncggttgttgtcaatttcttgatagatctcttatttcatggtcttctaaaaaacaaaattcggttgctctctctaccgccgaggcagaatatatatcggacggaaattattgtgctcaactattatggatgaaacaaactctattggatatggngatattntaagaatgtgcctctcatgtgtgataatgagagtngcgataaattggctacaaatctggtcaacac

SEQ ID NO: 25318 - DNA, 499 bp, Zea mays
  unsure (1)..(499): unsure at all n locations
tctaaaggggagaacacatttgggactaaccaatgttcattntgtgaaagacagggtttatagcgcaggtcaagcaggaaagcaagttggtgcccaccatccacacaagaacatcatgacaacggacaggccactagaactactccacatggatctattcagcatgattgcttacataagcatcggcgggagtaagtactgtctagtaattgtggatgattattctcgcttcacttgggtgttcttttgcaggaaaaatcacaaacccaagagactctaaagggattcttgagacgggctcaaaatgagttcggattgagaatcaagaagataagaagcgacaacgagacagagttcaagaactcacaaatagaaggatttcttgaggatgagggcatcaagcatgagttctcttctccctacacacctcaacaaaatggtgtagtggagaggaagaatagaactctactggacatggtgaggaccatgcttgatgagt

SEQ ID NO: 25319 - DNA, 273 bp, Zea mays
  unsure (1)..(273): unsure at all n locations
tagcaatgaatggtgtggtaacttcacacctactcgtctgtntatatagtgctgcaggtaagaaggcgaagcgccagagtttttacaccangcgcacacccgcttgcgctcgctgcgcggtggaccgcanggacaaacagtaaactctgcaaggtgggaccgctacgtgctggaaaaatataatcgttctcggcaacgagctcanggaaggtgttttttggaccttcggctccccgaagcttaagagactnntttcacggatcaagctcgtta

SEQ ID NO: 25320 - DNA, 455 bp, Zea mays
  unsure (1)..(455): unsure at all n locations
cgacaacaccattngacatttcacataanatttctgagatcaagaatatttagttcattcctcaacatgcaaaagcgggtcttatcaagtggcttagtgaaaatatccgctaattgatcttccgacctcactccttctaaaatgatatctcctttagcaacatgatctctaaggaagtgatgacggatatcaatgtgcttggtgcgagagtgttgaacaggattattagcaatnttaacagcactctcattatcacacaacaaaggtactttttctagaactacgccatagtctagaagagtttgcttcatatataaaatctgtgtggaacaagcacctgcggcaatgtattccgcttcggcagttgacaaggcaacactatnnttgcttttggatgtccatgaaaccagtgatctaccaagcagatggcatccnccagaagtactnttcctatc

SEQ ID NO: 25321 - DNA, 359 bp, Zea mays
  unsure (1)..(359): unsure at all n locations
agcttcngaggatagttcacgaagcttggatgtttttatcagagaagtaaacaaattcttgtgatataaaaaagattntcttcacgaagcatgaaaagaagggaaggtgttntttcgccgaaggctcaaaaaatggtatgtacgcaaagtttcatgcatcgtaaagaattaaattataaatagactatatgttacattcaaagttacaatatattacacatcttatgttccaaatgtttctacaataacgatttaattcttcttgagaactatctctgtagcttcgttcaaaagttggttgacaaccttatccataatgtcttcagccattnttctaatttcatcgtcccccttcgggt

SEQ ID NO: 25322 - DNA, 432 bp, Zea mays
cgtgagcagtacaagttcagaagggaaaaagctgcttcggctgatcagtctaaacccatgctcttgtgtgaggatatagcagagcagaaggtgctattgggatctcaattgtccgaagagcaggagaaaaccttgataaggtttttgttcaacaataaagatgtttttgcttggtcagctaatgatctttgcggagttaacagggatgttatcgagcactcgctcaatgttgatccatccttcagacccaggaagcagaggcttcggaagatgtctgatgataaggccgaaggtgctcggaatgaagtgaaacgactcctcagtgccggagttattagagaggtaaaatacccagaatggttggctaacactgttatggtgaagaaagccaatggtaaatggagaatgtgccatcgatttactgatctcaat

SEQ ID NO: 25323 - DNA, 293 bp, Zea mays
  unsure (1)..(293): unsure at all n locations
agtgagttcaccggaggtgggcaccaatgttggggacttgttctctaatactatgaattaagaacaaggccacacaaaagaaggtttaatgattaatgcccttcgtcccttcaaacattatttcccttgggatataacgatcttcggacgaaggtcatgaaagacataccttcatcattatggtatatgattgtgataatgagaaacacatgaaatacaaaagttagcatgaacatttatatatcattattagatcatttctattttattaacaccgganaatagaaatgaca

SEQ ID NO: 25324 - DNA, 401 bp, Zea mays
  unsure (1)..(401): unsure at all n locations
tattaggacctatgaaactcagcttctaagggagaacacgtgataggttngactaacgttcaattcgtaaaagatagaccttgtgcagcttgtcaagcaggtaaacaagcgggaggagcacatcacagcaagaatgtgatgaccacttcaagacctctggagctgctgcatatggacctcttcggacccgtcgcctatctgagcatatgagggagtaagtatggtctagttattattgatgacttttcccgcttcacttgggtgttctttttgcaggataagtctaaaacccaagggaccctcaagcgcttcctcaggagagctcanaatgagtttgagctcaaagtgaagaagataaggagcgacaacgggtccgagttcaagaaccttcaagtggagga

SEQ ID NO: 25325 - DNA, 119 bp, Zea mays
actgaaaaattggatacagtcaatgtgtagcttctttgaagtttctgcaagaatttcaagagcgaaatgactgcaatctgtctaatagggctaaggctccttacctcgaattttttgaa

SEQ ID NO: 25326 - DNA, 432 bp, Zea mays
  unsure (1)..(432): unsure at all n locations
gggtgccaatggagaagcataaatccctgaagacttggctgtcttattgctcgccattgncaactgtgagctcggacgggactctgaaccggcaaacaatgttttgccagaagaatttctaggcagtcttcgatgttatcgtggatactgccctcacctcgatccacttggtaaaatactcgacggcgacgaaggtgaacttgaggttcccttgggccgtgggtagtggcccgacaatgtccaggccccagcgctgaaggggccacgtgtgggcgattagctttgtgaattgcgaagggcttcctgagcgtggagaaaacttctggcaggcttcgcatgaccttgtgacccgatttgcggcgcagatcacggcgggccagtagaaaccttgacggatcacctttgcagctatggccctaagccctgcgtgag

SEQ ID NO: 25327 - DNA, 295 bp, Zea mays
agcttggcgtctaatacacccttaaaagctagtgttccatcacttcttctaaagacagacacatctacatttgtaaatagacagttataccccatgttgcataattgactaacagatagcaaattatatccaagagactctactaaaaacacattagagatagagtgctcattataaattgcaattttacctaacccttttaccttgccttgattcccatcaccgaatataattgaatcttgggaatcattattcttgacgtaggaggtgaacatcttcttcttccccgtcatat

SEQ ID NO: 25328 - DNA, 474 bp, Zea mays
  unsure (1)..(474): unsure at all n locations
tatatggacgtcggtgtcgaactccgttaaattggtctgaacttatagaaagatacttctttagacctgatatggtgaaagaggttgaagaaaaggttcatagaattattcataatatgaagaaagcccaagctcgtcagaagagttatgcagaccgacgacgacaacccttatgctttctggtagacgattatgtctacttaaaggtttcaccaatgaagggtatatcgcgtttcggggttaaaggaaaacttgcacctaggtacattggtccatttttggtgcttgagcaatgtgggccagtggcgtatcgactccaactccccgaaacattgtctgctgtgcataatgtgttccacgtgtcacaactgaagaagtgtcttctggttcctgatcgaacagttgaagtggccgatgttgtcctggaaccagatttaacatactcngaacatcctattcgagttctggatcaaa

SEQ ID NO: 25329 - DNA, 343 bp, Zea mays
agcttccacgtgttcgacgcgagctggcatccggtggcgcgctcaaagcacgcctgtgcgcgaaccctcgcgcgcccgcgggcgcccgtgaccacgcccgcgccacggttattaagcccgccccagtgcttcactgccttcgccgttacccctccgtaactcgccggacttgcccgagccaggcattaactccggcgaccttcccgcgacccgccagtgccggccgagaacaacaccgtggcagccctttccgtcttctccggttaagcaagccctaattacttcctggtgaagcgggagactggttagcttacccgggaccctctaccagaatatccatctc

SEQ ID NO: 25330 - DNA, 318 bp, Zea mays
  unsure (1)..(318): unsure at all n locations
tatctncaactagatcacttgattagtggttagaacaagacactcaattatcggagtataaaatctaagtcctttgcttggtaagagaattgctttcaaataatgtggagatgataaatcaatactacttataagtctatgagaatcaagccagagggcttacgtaagaagagcaataacacacgttctttcttgcaatgtgttgcttcactaaatgagagattaaattataccaacaccaaatagttntagcaaagaatagtgcacgaaaaacttacaaagggaaagaacaaacaaatcacaagcaataagcacacc

SEQ ID NO: 25331 - DNA, 389 bp, Zea mays
  unsure (1)..(389): unsure at all n locations
ctataattatgntatagcaaccatagccgaccacttactggatcatctaagaaaagactaccatagcttattgcatcgtcctgaataccaaaattcagggctatgctgactgtcacggcaatgtttgggacaatgttctccaaaggtttcataacaacaatgtttaattccttaaacaaaggtgctcttcttacatagcttgactaacttgatgtggggacctaaggcaaaatctttataatctgtgaaatattagggctctaaagtcgagccaatgccactgatttcagacttaaagacttggagcacanatgaggctttttgcaatagcccaagattagggttaagttcaaatcacaacttggaacccatgagtaaatgcttaactc

SEQ ID NO: 25332 - DNA, 439 bp, Zea mays
  unsure (1)..(439): unsure at all n locations
cgccgactgctgccatattgacctccaactgtgacacataccaactccatatgttagtttacttcattcttgaccatatttatcatgcctcaagccaaaaaattggtgaccgttgagactgtgaaaagcagttctaagaataatgctcacaacacaatattaaatactcctatcggcctatataataaggctagtaccactgcattgtatcatacagattaaattactgccacgtatgactgtttgatgatatgacacagagttaatgaagaaagagacagaagttgtatcttcaccgagatacaacctggacacgaaatccaatatttgaaaactgaaccaaatcagatgccccacgcttcgtagtcacacaaaacaattaatntatttgtgggacctaatgaacaacaagtgatactttacgttagcgcatgtacag

SEQ ID NO: 25333 - DNA, 368 bp, Zea mays
  unsure (1)..(368): unsure at all n locations
aaaactcagctgagagtgagagctgcgctaagcttggctaagttatctttctcgttacgttgcatgcctccccttttatagctaaggggggcatgtacaagggaactgagccccgacatgtgggcccaggaacacgatggatatagnacttgggctactaatgcttgctgctggaacaattatcctacaccctgatgtctgagatctacgtagcatcgacgtgcagaagaagcttctcgcataagggatgatgagcacagtgcgccgcacagcacggtctcactgtttgacaacggactggacaggtgcgccgtctgcatgatggccctagcacctgctgccagcggagtggacaggacacattaaat

SEQ ID NO: 25334 - DNA, 412 bp, Zea mays
  unsure (1)..(412): unsure at all n locations
tattaatgtatggattgtcatttacgtgatgaattatttgttatgttgatgttagtgggtatgggaaacccgttgggtacccgaaacccgcatgggcatgagtttgggcaaaattttatacccgtcatgggtatgggttttttagcgggcgtattttttcttcgcgggtatgggtttgggcatataatacccagcgggttnttacccattgccatctctacatacgagtgaggtgagaaccacagatgcggctgccagtgaagccggagacgagagagaggcgagtaaaccctaacacatttttatccggcgaacactggccaggctagccagcgaagtaagttatctattgttcgatcgggccaggccacggagtcagttgggcccgtctagccagcttcaaactagacca

SEQ ID NO: 25335 - DNA, 460 bp, Zea mays
  unsure (1)..(460): unsure at all n locations
agcttctaaaaagagaacacattntaagaccaatagtgttcattttgagaaagacaagatttgtagtgcatgtcaagtaaggaagtaagttggagttcatcatcaacacaagaacatcatgacaaccgaggggccacttgagctactccacatggatctattcggtccgatttcttacataagcatcggcgggagtaagtactgtcttgtaattatggatgactattctcgcttcacttgggcgttctttttgtaggaaaaatcacaaacccaagaaaccttaaagaaattcttgagatgggctcaaaatgaagttggattgagaatcaaaaagattagaagcgacaatgaaatggagttcaagaactctcanatngaaagatttcttgaggaggagggcatcaagcatgagttctcttctccctacacacctcaacaaaatggtgttgtggacagaaag

SEQ ID NO: 25336 - DNA, 490 bp, Zea mays
  unsure (1)..(490): unsure at all n locations
ntaagtgatattagagcccttgngtaaagttggtatggtttggacattgtttgatcccaaaaccccaaaaccctagcttcttagaatagaactgcctaaccctactatggtattaacccagaaaaccctagtgacttaggagtaccgtgaaggaaagttatattcttgatataactaactgtgttatattataactgcatattcataacatcacatgagcattcatgtacatatatggttatgtatagaaaacgaagaagaagtaagtgtcgaagaagaagagactgcaccaccaactgagactccacctgccgggaattgtttttattttgatatctatggaacagatctcgaatcccctacaacatatattggcgtgaacccggtctggtcttgagaaaacccgtggcgagtngatatatgcannggttaagtgctacatatgtcngtgtggtggagatccccagctgggtattaatggattcatatc

SEQ ID NO: 25337 - DNA, 432 bp, Zea mays
  unsure (1)..(432): unsure at all n locations
agcttctaaaaggagaacacgtgataggtttgactaacgtacaattctaaaaagatagaccttgtgcagcttgtcaggcaggtaaacaagtgggaggagcacaccacagcaagaatgtgatgaccacttcaagacctctggagctgctgcatatggacctcttcggacctgtcgcctatctgagcataagaggaagtaagtatggtttagttatagttgatgacttttcccgcttcacttgggtgttcttcttgcaggataagtctgaaacccaagggaccctcaagcgcttcctcaagagagctcanaatgagtctgagctcaaattgaagaatataaggagcgacaacgggtccgagttcaagaaccttcaagtggaggagttccttgaggaggaagggatcaagcacgagttctccgttccctacacac

SEQ ID NO: 25338 - DNA, 455 bp, Zea mays
  unsure (1)..(455): unsure at all n locations
ctatgaatactaagcttctaagggagaacacgtgataggtctaactaatgttcaattcttttaatgatagaccttgggcagcttgtcaagcagggaaacaggtgggaggctctcatcacaccaaaaatgtgatgacgacatcaagacccttggagatgctgcatatggacctctttggacccgtcgcctatctgagcataggaggaagtaagtatggtttagttattgttgatgattnttcccgcttcacttgggtgttctttntgcaagataagtctgaaacccaagggaccctcaagcgcttcctcaggagagctcataatgagtttgagctcaaggtgaagaagataatgagcgacaacgggtccgaattcaagaaaccttcagtggaggaatntcttgaggatngaaggatcaagcacgagttcttcggctcctacacaccacaacataat

SEQ ID NO: 25339 - DNA, 310 bp, Zea mays
agccttgatcgtttgtatccaagcacctttcattattagaactccaatacaattggataataccaccagttatgttgtgtcttcacaccaacaccacacgcacttcatttctggcatttatttcacactgcgccagagggttcataatactcttaataataaggtggctttcaacatctctgagaaggtttaccaaaaaatatgtccgatgaatgaataaagaatatcatcagaccggtttattgctaatttcgcttttcttttttagcagaccaccgaatctctttagtagaggcttcttatactgctg

SEQ ID NO: 25340 - DNA, 406 bp, Zea mays
  unsure (1)..(406): unsure at all n locations
ttacgaagaggaaccttcggctatcttatacaaacagcttcatccgaagatcgcttctctatataagaccttcggcgccgaagcgtagacccaacaatatgtttggtagcctttgatctgttgctcgtaaatttgcctaggcaatgccccccgccccaatccaccatcgcgtccatccatgaagcccaacggcgatgagcaggacgtgcaggtgctggtggtgcggtcccaaacccactccgaccagagtagtaggaaccactcgcgccaccagcaggcaccatcctctcccctcatgcgtagcaacccactgcccctccctcaccgtggtgatgccatacccatcctcttgggatgttgcccagtaccttaactttctcgcgcgcgctgccgncgacaggcgctg

SEQ ID NO: 25341 - DNA, 181 bp, Zea mays
ggaacacatgttttaccgcggctgacacccctaatttacacccgttcgcgcaccgcgcctctcaatggacatgcgcgcgcactctccggtgcacgaacagccgtgcaccgcgccgtgcctataaaaacttttcaggcgcgccccacttttgcccgcactcacccttaccgggcagacactt

SEQ ID NO: 25342 - DNA, 443 bp, Zea mays
  unsure (1)..(443): unsure at all n locations
tgagaagatcgcgtgcaggagataaagatangggcgtggtggctgtanaagatgagcacgagcatgactcgcgcaggagataaagaaaggctgaggcggtgggatttttgtttttcagagttgagcggcgcaggataacgactggagatagagttggctgtaaaaatatccgagaagatatttcctctgctacaaaaacttgtatgcatctatgttcccagatttgaatcaaaacaagatgcaaatagaataaacccaaacaatattggttatactaatataaactggatctgtcatagtttaaaattagacactttcatctactgctcgaacacttgatcgatgtgccctagataatttattagagaatcaaatctcaattataaatcctttggacgcgattcgtcgtcaaaacagcgtgcggacggataaatngaatcata

SEQ ID NO: 25343 - DNA, 296 bp, Zea mays
  unsure (1)..(296): unsure at all n locations
agcttcacaggctactagcggagctagccgaagcactggctgggctcgagggtggctggagtgggctggccacagcggccgaagctctggcgggcatggcgggcggaattaagctcgccggagctaanggaanggtgctggccgganaaggtgagtgcggggcgaaaagaagtgcgcccggggaagctttataggcaccggccggcaccaaccaaggccttggccccccgctgacttgacccgacccccgggtgaaccccccccccggttgggccaacttttgcctgcccaccaag

SEQ ID NO: 25344 - DNA, 428 bp, Zea mays
  unsure (1)..(428): unsure at all n locations
tcgtcatctgaaagaaagtaccctgaaagaaagagatgatcttagttctccattcttcactatagacaggggatatgttgaggactgctctttcaagaagctcaaccgaaggtgcttttattgtttccaaaaatacttccgaaggtaacggcagcccatgtgctgctgacttggctaataaatcaacatattcattntctccacgaggaatatttttaacagaaaacccttcaaaggaagcctcaatccttcagaccgtgtctaaatanttttcaagcttcggatctcttactnttataactttgtcaatatgaccagaaataatatgggaatcagttntaagaaccgcccttctgattgccatcgcctttaacttccgaagaccaaagagcatagcttcgtactcagcattgttattcgtgcaactg

SEQ ID NO: 25345 - DNA, 432 bp, Zea mays
tactgaccagtcctaaaagcattgtgctactttataaaatcaaaggccagggtcctaatacattctacacattcataagcgctccatataagttgcaggcgttaatttaaaaggcatgtgtatgtggagtaaactgcattcacagccattcgtgttgaaaatatatggatagcatcagagcattctacctatttcaatttctttatccaatcttccaagacgtctcaatgcaggatccatgctatcacgtcgattcgtagcagcaatcaagataacacggtcactagggccaatctcatccatcagttttaacagagtggctaccattctaatagataacgcctcacttccattctctcttgatggagcaatcgcatccaattcatcgataaatatctaatagcaacaaagatacatgatactggtatgaat

SEQ ID NO: 25346 - DNA, 449 bp, Zea mays
  unsure (1)..(449): unsure at all n locations
ttaccctgtagtctgtactataagttggttacggtaggtgtgccttatgcattntgaccatttccagcatttgcgtaatgaggactctanggagaagcctcgtagtgagaccctggccattcaccttggaagtgaatacgggtctagctaacccgggctagaagggaatcgcgactcatgggtaaagatgtgccacctctgcagagtgtaaaactgatatatcagccgtgctcacggttatgagcagcctggactcctcacatgataattgaacttgaagatggaaataaatcgagatccgttgatctgccaatggttttgcttaagtggtttcaattaagtgtttttgaaatactctcatacttttgcttaatgggaatacttgggaatcacacttattagtangaacaggtgttgtaataaaatgttgaccaactaanatgcttact

SEQ ID NO: 25347 - DNA, 387 bp, Zea mays
caacacaagtgttaaaggtgatgtgtctataagctgagttgattatggttgtggacatcacaacagaaggagaacattacttatgtgagacttggtgtgcatatcttggagtcgactgatcaagccaaggatgaaggcaagaagatcttcgaggtaccgaatgaacgggagaaggtcatggaggccgaggaacccaaagccaaaggtgaaaaagacttgcaatgtcaaggttgatcgagttaagaagagatgtggtgcatcgaggatcatgacttaagaacgtgacttgtagcaaatgagttaacatctatggttatgtggtgtaagtcacaaggctcaagatcaaactcatggcatagagcaaggtcactagaaggaagaggagtg

SEQ ID NO: 25348 - DNA, 389 bp, Zea mays
  unsure (1)..(389): unsure at all n locations
actaagctgcgccacactgaagagatcggggcgccggagaacattgattcntgaccaaaaaacagtgtgacagttgatagacagacaggtttgtggcccacaacagatcattttatgttttttcaanaattgggagctgtaaagattgacacttttcggaattaaatcttaggagctccaatgctcatgattgaataaaatttggaattgtggaagctcttaagcttttagctatatgacattaaatatctactttttaccttaaacaacagtaaactaacttatcatactaacttatcctaataaaaacacatggctatcaccaaacaaccaagtacattcatcaaccaattcattaaaatgcatctatatagatattatatgactaa

SEQ ID NO: 25349 - DNA, 451 bp, Zea mays
  unsure (1)..(451): unsure at all n locations
agcttcttcttcattctgatgaanaccaagccctttgatcacttcatcaaaacgaatgttccaactccgagatgcttgcttcaacccataaatggatttctgaagnttgcatatctttccagcattgatcggatcgacaaaaccctcgggctgtatcatatacacgtcctcatcaaagtttccattaaagaaagctgttttgacatccatctggcacatctcataatcgaaatatgcggcaatagctagaatgatccgaatagatttaagcatcgctactggcgagaatgtctcgtcatagtcaactccttgaacttgtccaaaaccctttgcaacaagtcgagccttatagatgtgaacatttccatccatgtctttcttcttcttatagatccatttgcattctatatgtctaacaccatcatgcgggtcaaccaagttccaaacttga

SEQ ID NO: 25350 - DNA, 484 bp, Zea mays
  unsure (1)..(484): unsure at all n locations
tactcagcttaagctaggcttcgtanacttcagcttcgtcattctttagcttcgtcatcctgcgcatatcaagcagcagaataagagaagtgcaatattcaaggagaacgtaaaagtaacaaacataagtttcttaccggcttaagatgacttcgagcttcgtcacctgccatttttcgcccgccacttacccagatctgcgtcatgaatctatttccaatgcttcgggctatgcttgagatatctatcagatctgatgctgacaagctaaagtttggtctgttcacaatatttccatgcgtgcagccagccttcagaatagcagtggctgtgcctcgagaagctaccagggcgtagaagtctgcgtgcccaccaataacttcgtcaagggcattaacctcgccttcaatatattctaatgtgctgggcagattttcagctgaaagtgaaaatntgcagagctggctccgacagaatgaaacac

SEQ ID NO: 25351 - DNA, 460 bp, Zea mays
agcttatgaagattcttcattccaacatgggctagtcggcggtgccagagccaacccatgttagtcttagcaattaagcaagtgtcgagttcagctctatcaaaatctaccaagtatagctgaccctctaacactctcttaaatgctattgaatcatcacttcttctaaagacagtgacacctacatcagtaaagagacagttgtagcccatttgacataattgtgaaacggaaagcaaattgtagtctaaagaatctacgagaaaaacatttgaaatagtatggtcaggtgaatatagcaatttacccaatcctttgaccaaaccttgatttccatccccgaatgtgatagctcgttggggatcttggtttttctcatatgaagagaacatccttttctcccctgtcatgtggtttgtgcacccgctgtcgagtatccaacttgagcctccggatgcat

SEQ ID NO: 25352 - DNA, 427 bp, Zea mays
  unsure (1)..(427): unsure at all n locations
tactcctatctgggaagggcccttcatcatcgtcaaggttntgaagcccgagacatacaagctggccaacgatcaaggcgaggtctacagcaacgcttggaacatcgaacaactacgtcgcttttacccttaaaatgtttcaagttgttcatgtatctcgctttctttacatgcataaataaagtctaaccatcaaggaaggataagccttgcctcggcaaagcccaaccctccctcgggggctagaaggggggaaccccctctgtgtncaaattttcctcggaaaagtcttttaccagaacgactttcgcgctnttcgactacgtcgataacaaaatcctaaagacgagcgagagagaccttgaacggcaaggccgaccaagccganggactcctancgccttcggatacggatacctcactcatc

SEQ ID NO: 25353 - DNA, 426 bp, Zea mays
  unsure (1)..(426): unsure at all n locations
tcgtcaccagctatgcttcgtccacccttcgtccatattagttttattaacctgtttcctatgcttcgggcaagaatgggaatatcaactagatctgctggtgacaaactaaagttgggcctattaacaatgttcccatgtgtacaactagatttcaggaaggtgacagctgtgccccgagaagctactagggcacagaaatcaccatgtccggctataatttcatcaaggtcatcaatttcaccctcgatatgttcgaaggctcctggcaagtcttcagccgaaggactataatttttgcagctggctccaaccgaaatgaagatctgcttcagccattgtacacatcggttactgaactccagacanttgttttgaagatctgacaatgatntttgcagattcgaacttttctcggcctcagtc

SEQ ID NO: 25354 - DNA, 457 bp, Zea mays
  unsure (1)..(457): unsure at all n locations
agcttgtccttntaaatacaacatccttcaattctctaaccatgtctttctttagaaccttcttgagtgtgctcattccaacatgtggaaaccttctatgccatagccatccaagagatgctttggtaaagaggcaagtccttatgtttgcatcttcagaagagaaatccactaagtataggttgttgtatctaaatcctttgaataccattgattcatcatccattttagacacaacaacctttgtaggagtgaataaacattgaaggccaagatcacaaagttgatccactgatagcaagttgaagcttaatggtgcaaccaagagaacatttgaaattgaaagatcatttgaaattgccaccttgccaagcccttgaacttttccttttgaataatccccaaagtgaatntatcttgttcatcaacattttcatcaagtgatgtgaacattcat

SEQ ID NO: 25355 - DNA, 447 bp, Zea mays
  unsure (1)..(447): unsure at all n locations
tgtggcatagtttaatgatagacacacccatgcagctgtatttatattgagggagagagatgggctccanaacctaagacctttctagataaggcaaagganagagcaaacacacacactgtgtgacaccccaggtgtctatttcgcgttatgtcgggagatttatcctaatttcgaatgctaagtgaaaaattctagttcttgaccgcgtttatctccatttatcaagttacttgagaaggtttcaccgatttccgattttattcgatcgcgagaaacagccagttttggagcctgttaaaacttttatttctcgacacgaatgcaaactcgataatcaatctcgatttataaatcttgtctaaagctcatttgattangagctcgacagttgctagtcgagatgtgtccgaatccaattcctcgaaccttagtctatgtctgact

SEQ ID NO: 25356 - DNA, 467 bp, Zea mays
  unsure (1)..(467): unsure at all n locations
tgcaagctggcagctgcacgaattaattaatttatttatttattttgctcgtgagtatatatgcacttgagttcaaaataataataaaactaccacagatatatacgagctcaagtgtaggagtacacgtacgtagtaatgttttttcttttgggagacacacaatgtcacatggcgtacgagaagattagatgcctcccataataattacgcaccactttaatttcggccattgaattgcaatcggtcggacagttgagacagctggaaaaaatggtgagacgatggttcaataattnttttttaaaaaaaaaatcgttgttgtatgcagcaagtactgccccggtggttcaacaaataatcgttgttgtcgccgtgtcgcgggcttaagaatgcaggagttttttataaaaagataaaaacatcgacaggcaattncaattgttgcgtcagttctgcgagtgggg

SEQ ID NO: 25357 - DNA, 447 bp, Zea mays
  unsure (1)..(447): unsure at all n locations
agctaggtagctagagaaagattaatgtatcgtaagttcagtgcaaaggttacaaccgcggtgcaaacatagtatctcgaatcacatacccagtgatgtagctgcgagtgagaaggtactcatcaagctttttaagccctgcctcggagctgaggtttgcgaaagaaaccgccatcacccctcaacaaagtttaacaagtgatctgaaggcacatatgagagcagtgttagaacttgaaatgtcaactcgtgacaacagttaaacagacgttcaatgaacagagaaaaatgctgctactggtactgtgagcataatccttaaacaactatacagatattacatctaacaagcaccctgaaccaaaatccagaccanatctatgtttctgaaatgtcatagcttaattanaggttgagtacaacttatggcacagcaaaacatatcca

SEQ ID NO: 25358 - DNA, 491 bp, Zea mays
  unsure (1)..(491): unsure at all n locations
tgaggggtgaatttanatgttngattntgattagatggacgctgcttgttctttagagaacaaagcanaattcagatgctatgatttagcagccccttagggctgatttggtgattagggatccctaggggatccatggngaggaatccccttgcaattaaattttgaatagcaagaggatttcttcctctcgggatccccggtcaccaaatcaacccttagggtatgtacatcaatataaatgactcgtattttaaggggtgtcaagaggataagcgcanaanaaagaggtgtaccttgatgaaggaaagtctatagtacggttctctaagtataaacggtttcactcatataatccacataaagccttgttcgattatttctatgtcatgtgaatnggtaaaaaaatatgaatgactnttgatttgtttggatttaaacacactcaatcacacacaatcaacatgtattgagagcaaaatanataagtc

SEQ ID NO: 25359 - DNA, 449 bp, Zea mays
  unsure (1)..(449): unsure at all n locations
agcttctaaagggagaacacgtgataggtttgactaacgttcaattcgaaaaagatagaccttgtgcagcttgtcaggcaggtaaacaggtgggaggagcgcatcacagcaagaatgtgatgaccacatcaaggcctctggagctgctacatatggacctcttcggacccgtcgcctatctgagcataggaggaagtaagtatggtctagttattgttgatgacttttcccgcttcacttgggtgctctttttgcaggataagtctgaaacccaagggaccctcaagcgcttcctcaagagagctcaaaatgagtttgagctcaaggtgaagaagataaggagcgacaacgggtccgagttcaagaatcttcaagtggaggagttccttgaggaggaagggatcaagcacgagttctncgctccctacacacctcagcaaaatggtgtg

SEQ ID NO: 25360 - DNA, 371 bp, Zea mays
  unsure (1)..(371): unsure at all n locations
tctaaagggagaacacgtgataggtctaaccaatgttcaattcttataatatagaccttgtgcagcttgtcaagcagggaaacaggtgggaggagcgcatcacagcaagaatgtgatgaccacttcaagacccctggagctgctgcatatggacctcttcggacccgtcgcctatctaagcataagggggagtaagtatgggttagttattggtgatgattnttcccgcttcacttgggtgttctttntgcacgataagtctgaaacccaagggaccctcaaacgctttctcaagagagctcaaaatgagtttgagctcaaagtgaaaaagataagaagcgacaacgggtccgagttcaaaaccttcaagt

SEQ ID NO: 25361 - DNA, 280 bp, Zea mays
  unsure (1)..(280): unsure at all n locations
agcttcgacactattttcaagcttacaacataattgttccttcttcacaacctctgaaggatatcatgaggaacagagaagctactggaagggatggaaaatgggctgcagagctcaatagaatttgtattgaatatgttcatagatcttcgattcagtcccaggcgttagcagacttcattgttgactggacgccaggggctcangaggaagaaacaaataaagacgccgaagcatggatagntgtttgtgatgggtctaggagaaccttcggagcggg

SEQ ID NO: 25362 - DNA, 479 bp, Zea mays
  unsure (1)..(479): unsure at all n locations
ntcatggtcttgcagaattttacaggcgtnttgttaaagatttcagcatgatcgctgcacccctcaataatttgacaaagaaggatgttccattcaagtggggagatgaacaagatcaagccttcaatgagctaaaaacaaagctttgtgaagcaccgctgctacaacttcctgatttcggtacgacatttgagatcgaatgtgatgcaagtggtattggcataggaggtgtactgctgcaagaaggtaaacatgttgcctactnttctaaaaagctaaatggtccatatctgaattactcagtttatgacaaggagctttatgcgttagttcgtgttttggaagtttggcaacattacttgttccctaaagaatttgaatccattctgatcatgaagctttgaaatatctgaaaagccaaggcaagctgaactgtcgacatgctaaatggatnnngagtcattgaatgtttccctatg

SEQ ID NO: 25363 - DNA, 418 bp, Zea mays
agctagccgtgaccttctgaacaaatctgatcgattttccatgcagatagatcttcaacaaccttacgtggggatatatctgagccatattcgggagcagatcgacagacacatcctgcccatatataatacccgcgccgcagccttgctcaccagcaacaagaatagccagcagcgcgccttaaccaccagcagcagcgcgcgttcatccagtcgagccgcgccttccgtcttcgcctcaactagcagcagcaaagcgccgccttcatccggtaagatctttcgagccgcgtagcggatcgatggctgccgcctcggatctcgtcaacggcggcgtagcggccctgcagaatgaggagcctgaggaatcaaagaacaatgcagcagcgggtgtgggcgtcgccccaatcccctggct

SEQ ID NO: 25364 - DNA, 305 bp, Zea mays
agcttaggggccaagaataaggatgcatgtatagggggaggtttgatagactcctattaatcaaagtcactctcccccaatgctaagaaatctacttttccacattcctaattttttgttcattttttcatcagttaaagcccattttgtattgcttaacttcttacagtcaatgggaattcccaaatatttcattgggaggaaatttacaggacaagtaaaaatatctgaataaagttatttgacctgtaaagcactaccaaaatagaatatttcactttggagaaaatagattttagatcctg

SEQ ID NO: 25365 - DNA, 451 bp, Zea mays
  unsure (1)..(451): unsure at all n locations
agcttctaaagggagagcacantttaagattaacaaatgttcattntgagaaagacaagaattgtagtccatgtcaagcaggaaagcaagttggtgctcaccatccacacaagaacatcatgacgaccgacaggccactggagctcctacatatggatctattcggcccgatcgcttacataagcatcagcgggagtaagtactgtctaattattgtggatgattattctcgcttccttgggtggttcttttgcaggaaaaatctcacacccaagagaccttanagggattcttgagacgggctcaaaacgagttcggcttaaggatcaagaaaaatagaagcgacaacgggacggagttcaagaactctcaanatgaaggcttcntngaggaggagggcatcaagcatgagttctcttctccctacacgcccacacanaatggtgtagtg

SEQ ID NO: 25366 - DNA, 435 bp, Zea mays
  unsure (1)..(435): unsure at all n locations
tgtgaagattcttcatcccaacatgtgctagtcggtgatgccatatctagcccatgttagtcttagcaattaagcaagtgtcgagttcagctctatcaaaatctactaagtatagctgaccctctaacactcccttaaatgctattgaatcatcacttcttctaaagacagtgacacctacatccgtaaaaagacagttgtaacccattttacataattgcgaaactganagcaagttgtaatctaaagaatctacaagaaaaacatttgaaatggaatggtcaggtgatatagcaattntacccaatcctttgaccaaaccttgatttcatccccgaatgtgatagctcgttggggatctntggttttctcataggaggagaacatctttttcttccctgtcatgtggtttgtgcacccgctatcgatgatcca

SEQ ID NO: 25367 - DNA, 425 bp, Zea mays
  unsure (1)..(425): unsure at all n locations
agctntaacccctgcgagaccttctttcttctagttctaaccatggccaatgcaatattgtatgttatactctatgaatatttaatttatttgttctcttgcatggtgtactgtttggttcctaattcaaaaggatggaagtattgatgtttgcgcctttttaaaaaaccaatccggttgaagaccccgaaaacctcgcaggagaagcccctgaccagcagtcggttggtggaggcaagtgtccctagacctatctctgtcctatacatactataattcacctcccgcattacacatttatacctaaagattgactagctcttgttatccatgtccttgtnntacctattgggtnggattattattgcttantcttatgctatggctcaactctaatcaatgaacatgatgagaatgatcaatga

SEQ ID NO: 25368 - DNA, 295 bp, Zea mays
  unsure (1)..(295): unsure at all n locations
tcatcatcgccaagactttgaatctcgtgacatacaagctggccaacgatcaaggcgaggtctacagcaacgcttcaaacatncaacagctacatcgcttttacccttaaaatgtttcaagtcgttcatgtatctcacttttctttacatgcataaataaagtctaaccgtcaaggaaggatcagccttgcctcggcaaagcccgaccctcccttgggggctagaagggggaaccccctctgcgtcaaaattttcctcggaaaagtattctaccagaacagcttttgcgcttttc

SEQ ID NO: 25369 - DNA, 453 bp, Zea mays
  unsure (1)..(453): unsure at all n locations
agctntgtgccaatggagaagcaacttgaagtcttggctgtcaaactgcttgccgttgtcaactgttagttcggacggtactccgaagcggcaaacaatgttttgccaaaagaatttctgtgcagtctttgatgttattgtggaaacagccctcgcctcgatccatttggtaaagtactcgacagcgacgaaggtgaacttgaggttcccctgagccatgggcaggggcccgacgatgtccaggccccagcgctggagaggccatgtgtgggcgatcagttttgtgaattgcgaggggctgcctgatcggagagaaaacttctagcaggcttcgcaagaccttgtgacccgatttgcggcgcagatcattgcgggccagtagaaaccttggcggatcacctttgcngctagggcccttggccctgcgtgagagccgcaagtaccactgtggac

SEQ ID NO: 25370 - DNA, 261 bp, Zea mays
  unsure (1)..(261): unsure at all n locations
ttaactagtaatttaagttggatttatagtacacttatatatgagttatttgacaatgattatttatgatatacttaatgatacttatttatattatgttaattataatgttatcaaatatatatatatgtgtatgtatatctctcttttaaattattatagtgtggtatctccaatattataaattgaagaatgtattgacatgtaagtcattntatttaatctcaataagacggttctcaaaacgttcaatatcaatct

SEQ ID NO: 25371 - DNA, 309 bp, Zea mays
gcatttaaaccggcctctctttttgcaaaatcacctaactaaagtttgccgtctaatacacccttaaaagctagtgaaccttcactctttctaagaacagacccttttactttggtaaataaccaataatatcccatttgacataattgactgacagataccaaattatatccaagactctccactaagaatacatttgatatagaatgctcattagaaattgcaattttacctagcccttttaccttgccttgattcccatcaccgaatatgattgaatctggagaatccttattcttgacgtaggag

SEQ ID NO: 25372 - DNA, 342 bp, Zea mays
  unsure (1)..(342): unsure at all n locations
tctgcaatatacatgaattatcatatgaaacagaaccttggtgttatgaacaatatcacaataattntggctgctacagtttcgtttctcggtccgggtcaagcttgcccgtgccaacctttcggaagagatggcccgacgactggatgacagaatggttttatgtgaagaatgatctgacagtgcgagaagatatcagaggtataattatgcgccctatttggcaaagcttcggccttcggaggccgaaggttgaaatgaacgaagctgncgaagaatgccagagggccttcggcgttatctgttcttttattggaacgagagacttagtacaagagcata

SEQ ID NO: 25373 - DNA, 292 bp, Zea mays
tgaaagccaaagtggtggagatatggctctatttggtaacaaactcaacacattcctgaagaagaagaggggtcaacctataagagacccaacattaagaagaaatgctttcaatgatacaaagcgtgttgagtgtggggaacccaatcacatcgccatgaattgcccttacaagaagaagaacggcaatatggagatgatagaagaagaaaaattctccaccagaagaaagatggcaaacccacctactttaatgggattccgatgcttactcggatgaagatgatgacac

SEQ ID NO: 25374 - DNA, 458 bp, Zea mays
  unsure (1)..(458): unsure at all n locations
gcttcagcagaatgacagccaaagtccttcattcccaaataggcagaaatgtgctaacatatgtcgatgacatcatagtaaaaagcatgaagcaagaaaatcacattgctgatctgcaagaaacatttgctaatttcaggcaagctggcctgaaattaaatccagaaaaatgtgtctttagagtgaagaagggtaagttccttggttgtctagtttcaacgaaggggattgaggctatccaagcaagatcgaagctatccttcggatggagctgccaagtacgaagaaaggggcccaatggctgacaggaagattggcatcattgaatagaattatatccagatcagcagaaagaaacttgcattctttgaaatactaaagtcaaccgaagttnttcaatggggtccagctcaacagaaagcctttacgagctgaacaatacttgattgtctaacaca

SEQ ID NO: 25375 - DNA, 424 bp, Zea mays
  unsure (1)..(424): unsure at all n locations
atccctgctattacggacctatgaaactaagcttgagccaagtcgaaaagctacatctacaaaacccttataagaacttcagaatattggcttaaacttcggcaaccgctgcgtgcaacggctaagataggtcttcaactcagttggagctagctctgaaaaatttgaaccttcggttgaagacttgccaagcaccttcgagcatattgaaagcgaagttgaggcgcttgacgaagtaatagctgggcatggcgacttctatgccctgctggcttctcgtggcacaactgtagctnttatgaaggctggttgcacgcacggaaagatagtaaacagaccgaaattcagtctatctccaacggacctagttgatatccctagcctagcccgaagtattaggaatangtattgtacacaaattgga

SEQ ID NO: 25376 - DNA, 436 bp, Zea mays
  unsure (1)..(436): unsure at all n locations
agcttctaaagggagaacacgtgataagtttgactaacgtacaattcgaaaaagatagaccttgtgcagcttgtcaagcaggtaaacaggtgggaggagcgcatcacagcaagaatgtgatgaccacttcaagacccctggagctgctgcatatggacctcttcggacccgtcgcctatctgagcatagggggaagtaagtatggtctagttatcggtgatgacttttcccgcttcacttgggtgttctttntgcaggataagtctgaaacccaaaggaccctcaagcgcttcctcaagagagctcanaatgagtttgagctcaaggtgaagaagataaggagcgacaatgggtccgcgttcaagaaccttcaagtggaggagttccttgaggaggaagggatcaagcacgagttctccgctccctacacaccaca

SEQ ID NO: 25377 - DNA, 485 bp, Zea mays
  unsure (1)..(485): unsure at all n locations
tatgaagattcttcatcccaacatgggctagtcggcggtgcctgagccaacccatgttagtcttagcaattaagcaagtgtcgagttcagctctatcaaaatctaccaagtatagctgacccttcaacactcccttaaatgctattgaatcatcacttcttctaaagacagtgacacctatatcagtgaaaagacagttgtaacccattntgcataattgagatacagaaagcaaattgtaatctaatgaatctacaagaaaaacatttgaaatagaatggtcagaagatatcagctatttacccaaacctttgaccaaaccttgatttccatccncgaatgtgatagctcgttggggatcttggtttttctcgaaggaggaganacatccttttctccctgtcatgtggtttgtacacccgctattgatgatccaacttgagcccncggatgcataaacctacnaaacaangtttagtcttgac

SEQ ID NO: 25378 - DNA, 443 bp, Zea mays
agcttctaaagggagaacacgtgataggtttaacttatgtgcaattcgaaaaagatagaccttgtgcagcttgtcaagcaggcaaacaggtgggaagctctcatcacaccaaaaatgtgatgaccacatcaagacctttggagatgcttcacatggacctcttcggacccgttgcctatctaagtataggaggaagtaagtatggtcttgttatagttgatgagttttcccgcttcacttgggtattctttttgcagggtaaatctgaaacccaagggaccctcaagcgcttcctaaggagagctcaaaacgagtttgagctcaaggtgaaaaagataaggagcgacaatgggtccgagttcaagaaccttcaagtggaggagtaccttgaggaggaagggatcaagcacgagttctccgctccctacacaccacagcaaaat

SEQ ID NO: 25379 - DNA, 494 bp, Zea mays
  unsure (1)..(494): unsure at all n locations
gaccttaaaactcaactgatggacaatgaaagtcaaggctaggcttggggctaaatgctatactcanaaagaaggagaagacttctttgatacttactcacctgttgctagaatgaccactattcgagtactactttctttggctgcctcgtatggtctccttgttcattagatggatgtaaagacagctnttcttaatggagagctggacgaggaaatctatatggaacagcctgatggatttgtagtaaagggtcaagatagcaaggtgtgcaagttattgaaatctttgtatggtctgaagcaagcaccacagcagtggcatgagaagtttgacactactctaacgtctgcanggcttgccattaatgaggcagacaggtgtgtatattatcgctgtggtgggggcgaatgagttatattgtgcttatatgtcgatgatatatcgatatttggcacaaacattgatgtgatcaatgaagtcaagtcttttc

SEQ ID NO: 25380 - DNA, 442 bp, Zea mays
  unsure (1)..(442): unsure at all n locations
agctagtgaaagtttaactacggataacaactatattttaagatacacagatctctgttcgaatcttatgtacctgctagattattatagatgtagccagataaaataatggttgaagtacgcatccaaaacatcgggcacttttgaccggacggagtactcgacaacttcgatcttcacgtggaactgggctcacttttgtaatataaaacatggccgtggcagtttcattcaaaaacagttggttcaaatggaaatgaagaactnttaaatatccagcacagttgtgcgtttttattgtacacacggctctctccttttctctacttgcctaataattgttgtgagcctcaccttctttctctagaaactaacatagctgttgcagatatcactgtcacctgcaggacacccattntttcatctgagccttaacaaccat

SEQ ID NO: 25381 - DNA, 292 bp, Zea mays
gtcatcaggatgtggcggatactacaagcatttcatcgtttgtctttttataaatgctagacccatgacagcgttactatccaagaaaggtgagttttagtggacccaacactgtcaggaagcatttgaagaactgaagaatagatcgtctaccgctcatgtgctatttttggctgatggtcaccaggcattctcacggtattgcgacgcctcttacaccgcattgggatgtgcgctgatgcaacaacgaagagctgtatcatactcatctcgaccgctgaagatacatgag

SEQ ID NO: 25382 - DNA, 449 bp, Zea mays
agcttcgactgcttgcccatgacctaagccgctgtcgtctacaccctcacattccgcgccctcctctatcgcgccgccaccgaccacccccaaatcctgcttccccaccgctcgcttccgttgggatcgtccgtcctcccagaccgcgtgggcgcttcttcttcggaatctccgtgggccgagtggcgctgggctagggattcgggcccatggcgtggcggcgcgtcctcacccaggtgagagttctgcctgaccttttcttcgttaccgcgctttattgttgtattgagatacggtggtggcctcaaatcttcgatcttgtgtgtctgggcgggattgcgagctgcgttgttaggctctgcgcatacgaacaacgtctgcagatgtctgttcgtatacatggctatcttgggagctgtctgtgaagatgtctctgctgatgaaacatg

SEQ ID NO: 25383 - DNA, 447 bp, Zea mays
  unsure (1)..(447): unsure at all n locations
ngaagccatggtaagtagcataggcaagtaaaatgcgaatggattctatcctagctacgggtgcataggtttcaccgaaatccaaaccttcgacttgtgaatatcccttggccacaagtcgggctttgttccttgtcaccacaccatgctcgtcttgcttggtgcggaagacccacttggttcctacaacattttgattaggacgtggaaccaaatgtcatacctcgttcctagtgaagttgttgagctcctcttgcatcgccactacccaatccgaatttgttgcccaaacacaagtcttggtgcccttgtgtttgtccccaacatacttggcaactaccttgcctgatttgttggttagcacataagatgtatcanaagttntaaatgaaatgttatgatcatttgatgcaacaggagttttctttttatgcaatctagcatggg

SEQ ID NO: 25384 - DNA, 410 bp, Zea mays
  unsure (1)..(410): unsure at all n locations
agcttctcgccctgcgtaccgattgcagaggagaattcacgtctgcgcggttcaccgagtattgcgccgagctctgtgttggccaccagctgacggcgccgtacacgccacagcaaaacggcgtcgtcgagcgacgaaatcaaactgtcatggccatggccaagacgatgctcaaggcaaaggatctccctggcatgttctagggggaggccatcaacgcagttgtctacattctgaatcaaacgacgacgaaagggaccgacggcaagacctcgtatgagctctggaacggngcagcgccctcggtgcatcacatgcgcacgttcgggtgcgtgacgcatgtcaagatcgtcgaaccgtacttgaagaaactcgacgactgtcgcaagcctatggtcttcgtcgggtat

SEQ ID NO: 25385 - DNA, 343 bp, Zea mays
  unsure (1)..(343): unsure at all n locations
ccttaaaactaagcttcgccggaatttccaggcacgtacgtgcgccccgggaatttctgtgacctccgaagctgccgacagcagccgggagagtctctccgggactacatccggcgattctcgaagcagcgcatcgagcttgccaacatcaccgactcggatgtcatcggcgcgttcctcgccggcaccacctgccacgacctggtgagcaagttgggtcgcaagacccccaccagggcgagcgagctgatggacatcgccaccaagttcgcctccgaccaggaggcagtcgaggctatcttncggaaggacaagcagccctagggccgcccatcggaagatg

SEQ ID NO: 25386 - DNA, 464 bp, Zea mays
  unsure (1)..(464): unsure at all n locations
agctagcacacatagctcttttgaatacctttgatcatatctcttttatatgctatgactaatgtggtctcaagtttatttcaaaccaagtcataagtatattgaaaggggaatggagtcttcggcgaaaacaaaggcttccacttcgtaactcataacttcgcaccactccgagcaactctctcttctttgggggagaaatgaacatcaaggaaaaggacttcatccttgggggagagagtaaaagctcaaacgcaaaaagacttcgtctntggtataatcttaactcacttatntatgaccaaaggggaagattgcacttcgagggctctaatgattccgtttttggcgattcatgccaaanagggggagaaatgagcccatagcanaaggaccgcaccaccaccaccaaattcaanaacttagtgctttcaaaagtctttatcatttggtatcctattatg

SEQ ID NO: 25387 - DNA, 370 bp, Zea mays
  unsure (1)..(370): unsure at all n locations
cctatgatactcagcttggtcttggatggntagttttagatcttatgagaaatattgattatgttggatgcctctgaaatgccattttctcatgtggctagagggtccgtgaaaggtgttggacaatcgattntcactaacggttctcaattaactgcatgtgcactgnggccatttttactagcccctagcaccgcgaattttgcacgacaaataacgtgacttgtataattaaaataattnttttggctattntaaaaatccattctatgttnttggaaattaattgtactnagcagtttattacatcgaccgctagtgaaaattgatttccactggtgtgggggacagatatcccccgggtccacta

SEQ ID NO: 25388 - DNA, 434 bp, Zea mays
agcttctttcccataatcttcctcttcaaatagtatgaaacaatctcaacatcagttgggtggaaacgaaatccaggaggcaggctagtttgcgccatcgccctaagacctcttttgcctttagcactgatagaaagatctcaagacaaaagctgaaatgcttcaatggggtgactagttgtgccccagaagagagaagcttgattacacagacaagagaatccaagtgcacaaatcaataaagcagagcagaacagagcagctttcgaaagtgagcacagaatgcagcaagggaagactaagggaggctgcagcgccagcagagagcagggcaatccaacctctagacaagtctttagaagggagtgttgcaagaatgacaggaccaaaagagatgttggtcaagtcacagaaagagttcgtagatcacaact

SEQ ID NO: 25389 - DNA, 445 bp, Zea mays
  unsure (1)..(445): unsure at all n locations
ntatcaaatggacgtgaagagtgccttcctcaatggaccaatcattgaggaggtctatgttgagcaacctcccggctntgaagacaatgagtatcctaaccatgtctataagctctctaaggcgctntatgggctcaagcaagccccaagagcatggtataaatgccttagagattntcttattgctaatggcttcaaagtcggaaaggccgatcctacactctntactaaaactcttgaaaatgacttgtttatatgccaaatttatgttgatgatattatatttgggtctactaacgagtctacatgtgaagagtttagtaggattatgacacagaaattcgagatgtctatgatgggggagttgaagtatttcttaagattccaagtgaagcaactccaagagggcaccttcattagccaaacgaagtacactcaagacatt

SEQ ID NO: 25390 - DNA, 438 bp, Zea mays
caagctgccttcgcctcagtatatcacccacagtctaactgagttgtggaacgcgccaatggaaaaatcttccagctgtcaaaaagatgctcctcgactaaaaaaaggcacgtgggccgacttgttacctgaagcggtctgggcgctcaacacgattgagtgcagggcgactgggttcacccctttccgccttctatatggatcggaggccatgaccccacaagaaataaatcatgggtcctcacgaacagttgcgtcagctgtccccgacgtggacgaacccatttcgaaagatcttatcgacggagaccgcgtcttcgctctacaggctctaaataaataccaagcccagacaaaagcatggcgcgacctcgcagtcatcccgcgggaattcaccgaaagggacctcgtactcgtccgaacagctcgaacagagtc

SEQ ID NO: 25391 - DNA, 119 bp, Zea mays
ccttccaaccagctacacttgactactcgggaaggtctggggtgcaatatacctggctgaaactttcggtagggttggatctgcagattacacttgcctctgggccccccaaaatgttt

SEQ ID NO: 25392 - DNA, 401 bp, Zea mays
  unsure (1)..(401): unsure at all n locations
agcttggcctgcatctcgcggagttgctcgagctgtgtgccctgactccccgcagagactcagaccacagctagctcccgcgggatctcaacgcgagacgcangcgcaggggcatcgtcgttttctggcatgccgaggtggtcgtctttgtcgtgatccccctgatcgatgtgaaaacactcgcgagctgggtcgtaaccctcgtcgtcgaggctgtggccatcgtcagagtagccggagaggcagtagtcacatgcagacatgaagtctcgcatggaaccaggatcacggagtccagagaaatcccaactgaagtcggagtcgtcctctttctcggaacccgcgggtccataagttgagacggcccgtagtcggtcccaggtgaccacatatggtccctg

SEQ ID NO: 25393 - DNA, 431 bp, Zea mays
  unsure (1)..(431): unsure at all n locations
tgtgagcagtacaagtttagaagggagaaagctgcttctgtcttcagctgaagtccatgctnttatgtgaggacatagtagagcagaaggtgctattgggatcccaactgtctgaagaacaggagaaaaccttgataaggtttctgttcaacaacaaagatgtttttgcatggtcagccaatggtctttgtggagtcaacagggatgttattgaacattcgctcaatgttgacccatcctttagacccaganagcagaggcttcggaagatgtctgatgacaaggccgaaggtgctcggaatgaagtaaaaaggctccttagtgccggagttatcagagaggtaaaatatccagaatggctggctaacactgttatggtaaaaaacgccaatggtaaatggagaatgtgtattgattntactgacctcaac

SEQ ID NO: 25394 - DNA, 479 bp, Zea mays
  unsure (1)..(479): unsure at all n locations
tatcaagattcaaagactctnntttgcagaaaagcttactatgagtggatccttaagaattcattntacttgtcagattaagtagttacctgcatctatagttctttctattntagagcaagcacttggcctatactagccatcttttatcaccccttcagttcacttgattgctacgtgtaagtcagtgaccaagtcttcatgtccgagaagtaacggcgatcttaatcgattaatacctagctggngatctccaaccacatgacatatgtagcacttaacccttgcatatgtcaactcgcacccgggtttctcaagaccggaatgggttcacgccaaccgagagcacagatactccactgtctagcctcttgccatatagggtacacactactctcgccatctcttcactcccatggggtggtagcctttctagtattggtctaaccgaggcanagcttacccatgatgaggcatat

SEQ ID NO: 25395 - DNA, 446 bp, Zea mays
agcttgttactttaggcaaagcagtatacctgagtcgcagacagtctttgcgtctgagtgaccgtatgggcataggtgagctgagctgagctgccgcgctccgctgctggggacctcgttcttctataatagaagaagcatgcaaacgaacgaacgaggagtcgaggaacgacggcaacgagttggggcaaataggagcccagcagatggggacatgacatgcatggacaccaccccctgttcactcttcgcttcggtgcggcaggcgcagagcgtgcgctgtagcagatggttcgctgttcgtagccgcaggcaaagcggtcgtgcgcagcgtggctacatgctgtagtctagtgacctccgcggcaaagcaaacaacggtgagttggtgacggtggtgcaggctgctgtatacctggagcagcttgctgacattgctggccccg

SEQ ID NO: 25396 - DNA, 417 bp, Zea mays
  unsure (1)..(417): unsure at all n locations
tcttcttatacctaggatcaagaaagcatgctagtgcatgacttttctagaacaactccaatatttctcanacttgtcactcatagatattgccattgttctaattgtcaaatcttcatccacataccattcatcaagcagttcctttatttcacagaaatctcttgtcggngaccataattaggggtacccccaagactcctaatctcagctggtaacccccatcagcacaaagctgcaaaggcctgatgggtgcgattaagtcaaggctcggtccactcaagggacacgatctcgcctcgcccgagcccagcctcgggcaagggcagccgaccccggaggattcacgtctcgcccgagggccccctcaagcaacggacacaccttcngctcacccgatgcccagtcttcaccgag

SEQ ID NO: 25397 - DNA, 416 bp, Zea mays
agcttaaagccatggtaagtagcatacgcaagttatattctaattgactcaaagctagctaccggtgcatatggttcaccgaaatccaaaccttcgacttgtgaataacccttggccaccagtcgagccttgttccttagcaccacaccatgctcatcttgcttgctgcgaaagacccacttgtgtcctataacatcttggttaggacgtggaactaaatgccatacctcattcctcgtgaagtagtggagttcctcttgcatcgccatcacccaatccgaatcttgaagtgctttctctaccttgtttggctcactagaggaaacaaaagagtaatgttcacaaaagtgagcaacacgagatcgagtggttacccccttatgaatgtcgccgaagatggtgtcacggggtgatct

SEQ ID NO: 25398 - DNA, 482 bp, Zea mays
ctgtgaagaattttcattccaacatgggcaagtcggcgattccttatcctacccatattagtcttagcaataagcaagtgtcaagttcaacattattgtcattaaaatcgactaaatatagctgaccatctaacactccctctaatgctattgattcatcacttcttctaaagatagatacaccaacatcagtaaaaagacaattgtagcctggtggtgacttgttctcagatggtatgagttaagaataatgcaacacaaatgttaatggttaaaagtccttcgtccttcaaagcattatctcttctaagatataatgatcttcagatgacggtcatgaacgatataccttcatcatcgcacaatatgttaaatgatagatgacgcatatgccatataagagacaacatgaattatcatataacattattaatatatcctcttcttattaaactgattaacagaaataatatacaattaca

SEQ ID NO: 25399 - DNA, 441 bp, Zea mays
agcttgtgggacctctaaggtgggtggtaagccataaagggttgaccgacccttgatgatatgtagggccacacccctacacttgagagtgcatttattgacttcacaccaaaattaggctgaatttaccaaaatttaaccatcggttgactaaccaattttggcaaatgaggttcatcttttgcatgtagtttctagaagcattgtccatcatgaagatatattgtgccgaccaaccaccaaagttggtccatcaaacttggtgtttcttccattttatatctacatccaatagaggacatgtacatgtggagccaagttgtttgaaccaaaattcattactacattgcttgtttactcaataaaaagatctgtttgttgacagttttgactatatgaaataattacaaaattatcatcaacaagatccgcacacttaat

SEQ ID NO: 25400 - DNA, 378 bp, Zea mays
tgaagccatggtaagtagcatatgcaagtaaaatgcgaattgactcaagcctagctacgggtgcataggtttcaccgaagtccaaaccttcgacttgtgaatatcccttggccacaagtcgggctttgttccttgtcaccacaccatgctcatcttgtttgttgcggaaaacccacttggttcctacaacattttggttaagacgtggaactaaatgccatacctcattccccgtgaagttgctgagctcctcttgcatcgccaacacccaatccgaatcttgaagtgcttcctctaccctgtgtggctcaatagaggaaacaaaagagtaatgttcacaaaaatgagcaacacgagatcgagtggttacccccttat

SEQ ID NO: 25401 - DNA, 346 bp, Zea mays
  unsure (1)..(346): unsure at all n locations
cccacatgtgcttagcagcgatgccacagccagcccatgctagtcttagctattaagcatgcatctagaccggcctcttcttttgcaaaatcaactaaataaagtttgccggctaatacacccttaaaagctagtgaaccatcacttcttctaaagacagacacatctacatttgtaaatagacagttatatcccatattgcataattgactaaccgatagcaaattatatccaagagactctactaaaaacacattagagatagagtgctcattnagaaatgcaattntacctaacccttttaccttgccttgattcccatcaccgaatatgattgaatcttggg

SEQ ID NO: 25402 - DNA, 484 bp, Zea mays
  unsure (1)..(484): unsure at all n locations
tgtgggagggtccttggtctccgcgtactcaccctcgccttttggaccgagccaactccaccaaattactgtcgtcggccgcctgtgctntggggattccgctgagctgggtgttcctctgttcgccgccgtgagggaggagactggatccgccggcgcgtcaccactcgattctggtgcgtcggttactcgatcggcggctggagtaacccaagggtgctcacctgggcgcgcatctagccgtggagccatcacatgccaagatatcatcgccgtcggctcgtaatcaggttagaagcctccggctacgtttgaatcgtacgcacctacgcattggttagataaatcggagctcggggccggngcctggtggattgtggtcggcttttgcgtcgccgcggttgggcgcggcccgtgtggcttgctggaggtaggagaagctctctgggccgtggatgggccgatgaacggatgagaattgatc

SEQ ID NO: 25403 - DNA, 342 bp, Zea mays
agcttgtgatgggttaacacgtgatacgtctgactattgtacctatgcacgaagatatagcttgagcaacttgtacacttgtaagcatgaggaaagctcttatcttgcctaacttgtgatgatcgctgtcaatagccctgctgttacttgatatggaccttgtgccggatagagatccaactgagtgcactgaagaattaaaacgccttacgatcggacctccgtgcatgcttgctactaagtcatgatcttcttgagcctaaggctacagatgctcgaagcgatacctaggactgctaaaggcactctgctgtcgacgatttgatgaactgttcctgcata

SEQ ID NO: 25404 - DNA, 277 bp, Zea mays
  unsure (1)..(277): unsure at all n locations
accttagaatactcagcttctgatgaactcacatgagaggggacgctacttatcngccgtatatacatgaaccgtgaggcgtttgtcttgctgggcaacaggaggatggaggctgtctttaccagattgtgatgcacacattttgtgctctgaacctgttgcatatggaccattatgtacccttctattatctgaccatacgacgaatagaatttgcgcaatatatcgtccatgactgtagccgtatccataggaagagattgactggatacagact

SEQ ID NO: 25405 - DNA, 407 bp, Zea mays
  unsure (1)..(407): unsure at all n locations
agcttggtgccaatggagaagcagaaatccttgaagtcttggctgtcaaactgcttgccgttgtcaactgtgagttcggacggtactccgaagcggcaaacaatgttttgccagaagaatttatgtgcagtctttgatgttattgtggatacagccctcgccttgatccatttggtaaaatactcgacagcgacgaaggtgaacttgaggttcccctgagccgtgggcaggggcccaacaatgtccaggccccagcgctggagaggccatgtgtgggcgaatagtttcgtgaatggcgaagggctgcctgatcgangagaaaatttctggcaggcttcgtaggaccttgtgacccgatttgcgcgcagatcagtgcaggctagtagaaaccttgacggatcaccttt

SEQ ID NO: 25406 - DNA, 239 bp, Zea mays
tctaatctgttatatcttgacataatgaggtgtccggtcatcccatagtgagacaatgacataaggctttatgacttaaagcatacagcaccactatagcctttcctgggtgataatgaatctctaagtcataatactatgacagctgaggccagcttcattgtctcatcttttactctgactgggagaaaatgcacctgagactctagtgagcagtattcataagacatacatttcct

SEQ ID NO: 25407 - DNA, 357 bp, Zea mays
  unsure (1)..(357): unsure at all n locations
agctgtggagctaaacacaacacattagataagtgcaacattctgcacagcgccatacatatgatggagccgctaccatcaccacctgagttgtgcagcctcacccaatcatccaatatttccttccattggcttcanaaccaaagacaaagacgaatccacattcagattattggaagacagctatgtcctgtgtatcctatggagcaggatacctgattatcaactaacgagcagctgcaccgctgtgtcggacctcataggatgggtatttacgcaggccattcacatggaggtcgatgtccatgtgctgcaaagacacaatcccaaaatttagttaatgctaaataattgaca

SEQ ID NO: 25408 - DNA, 456 bp, Zea mays
  unsure (1)..(456): unsure at all n locations
agcttcaaagctaanaacttagcagatcacagtgctcatgagcttaaaaatgaatgagcccgagtgggtggccagaaagcgtgcgaaataagtttgcggcatggccggatttatacgcttgatgcgttgaaagttgaaagaccccacttgtcattgaatgttgctattctagcaaagggaaggtgttttttcggaccttcggctcaaggccttcgtccatatcgcaatctgaatttattatttacaaattaatattgcgaggggctactgttgggggccttcgtcctccgaaggtcctcaaaaacatgatttgacaatgttttccgagtggattatgtgaacaggtattttcggatccagaattatgaatatggagcacggccaggacgaagcctgaaccatacgaaagtcgagtgtagccgaagctgtgcgcatggaagcttcggcgcgatggca

SEQ ID NO: 25409 - DNA, 471 bp, Zea mays
  unsure (1)..(471): unsure at all n locations
taagtctgcattatcacattcaaaccaacagtagcttcagctgtttagatacatatnatcgattcgatctacactctgcctcgctctccatactgngcccaccaggggtggcttccgcatgcgctctctgccctaatctccgcctcgacgtgccctaatctccgctccaaattccgccggggccgacgtcgccgtcttgaccgcccaaccctatcttcagaagtctgcgcttaattttccgctcaattgtcctttgtgtaccacgcgtgatcgatgtgttatcacaagataagaaattgaattagccccaattaatgagtgcctgcattagcatttcagaatcgttttattgtaagtgcatgccgaacgagtatatattcaaatctaatggtgttaagatgagttggtgtctttctatcccagcatcagttcgtatatatactntgtagtcatgcagcttgtgtagttgag

SEQ ID NO: 25410 - DNA, 424 bp, Zea mays
  unsure (1)..(424): unsure at all n locations
agctngaaggtgactcgccgaagcaacagaaactgcagggtggttgcctacatattctgggatgtaaggcgaatgatacgaagcagtgtgcatgacctgcttcggctgagcctgttgtgccgcagcttcagctatttccttttgcttctggatggtaacatgacacatcctggtggtatggcccttgttctcaccacagaacaaacaaaaaattcttcttggttgatctccaaatcttccgccgaagcccctggcgcctctgcctcttggagctggtggtcggaaggagccttgttgttgccccgaagcctgtgaggagcactgcggcctttgctgctggctccccttatcatcattttgagtagaagtatggattgacctaacgtgtctcggatagaatcttcctccgaagccccttgtcatt

SEQ ID NO: 25411 - DNA, 462 bp, Zea mays
  unsure (1)..(462): unsure at all n locations
tatgaaggttcttcatcccaacatgtgctagacggtgatgccaaagcctgtccatattagtcttagctattaagcatgcatctagaacgacattctctntcgaaaaatcaactaaatagagcttgtcatctagtacacccttaaaagctagtgaaccatcacttcttctaaagacagatacatcaatatttgtgaataaacaattataaaccatgttacataattgactcataggcaataaattatacccgagcgattcaactaanaacacattagagataaaatgctcggatgtgatggctatnttccccaaccctttgaccttaccttggttcacatctccaaagatgatcgtatcctgagaatccttgttcttgacataggaggtgaacatcttctgctcccncgtcatgtggttggtgcatccgctgtcgataatccagcttgagcccccggatgcat

SEQ ID NO: 25412 - DNA, 224 bp, Zea mays
tcagaccataccaataacttggcctttcatatgctggggattggatatgactggacctttcaatacagctctatgatgtatttcccactgctctggaggctatttacaaattctcttaatggatagagttccagcccatcgcttatttaacccctgctaaggccgcggaatatatacaagatataataatcagattctggataccaaacagcatcatcactgac

SEQ ID NO: 25413 - DNA, 412 bp, Zea mays
  unsure (1)..(412): unsure at all n locations
gacacttaatactaagcttcttcagctggtccacgagtcttctcagctggtctaggtacttctgtctgtgnacgcctttgtcctcggggaactgtattctaagtctatgggtaagatatcctctaccccatatactataaagaacggcgagaaccccgtggctcggcttggcgtcgtcctcagaccccagaccaccgagggtagctccttcatccaccacttgccaaacttgttgaggtcgttgtagatcctcggctttagtcccttgcaaatcataccgttggcacgctccacctgcccattcgtcatggtgtgagctacagcggcccagtccacatggatgtggtggtcctcgcagaagtccaggaacttcttcccagtgaactgtgtgccattgtctgtgatgatggag

SEQ ID NO: 25414 - DNA, 324 bp, Zea mays
  unsure (1)..(324): unsure at all n locations
agctngacattgtatgtctgtaggaagcctatgttcnttcttaatgccagagcgtctcccattataaagcatgctacgagcaacattaaatntttcatgtttctagttcatgctcggcaattgtagcatgtgagttacctatatgatcaatttgttgtttaattatagcaatgtgatcatggatagcatcaacattaatatctctacatctcatgcaaatagaaacatgatcaacagtggatgtagagggtttgccagaatctaattcatctatcttagatttaccatggattttcatctctagacaggtaaacagacattgaa

SEQ ID NO: 25415 - DNA, 453 bp, Zea mays
  unsure (1)..(453): unsure at all n locations
tataaatactaagcttctaagggagaacacgtgatatgtctaaccaatgtttatttcttattagatagaccttgtgcagcttgtcaagcagggaaacaggtgggaagctctcatcacaccaaaaatgtgatgacaacatcaagacccctggagctgctacatatggacctcttcggacccgtcgcctatctgagcatangaggaagtaagtatggtctagttatcgttgatgacttttcccgcttcacttgggtgttctttttgcaggataagtctgaaacccaagggaccctcaagcgcttcctaaggagagctcanaatgagtttgagctcaaggtgaagaagacgttccaacggccgcgatacgcaccatggcgatnggagatgtacggcctcaagaacatttggagcaagatcaaccatcttcctcaactatggtgcatnccccaaccc

SEQ ID NO: 25416 - DNA, 150 bp, Zea mays
  unsure (1)..(150): unsure at all n locations
aaccaaagacaaagacaaattccaatcagattatcgtaagacagttatgtcctgtcgatccaatggagcagtcagctgattataccctaacgagcagtttaccaggtgccggacctngttggatgggggcttacgcaggccattcacatg

SEQ ID NO: 25417 - DNA, 436 bp, Zea mays
  unsure (1)..(436): unsure at all n locations
ntaagtgggacatggactcccataggtaagacatccgtttagtatatgcgaccacttgagcccttgaccctttacgaacaacaggcaagacctgtctgaaatctccaccgaagacaatggttttaccaccaaatggcagtgcggtgcgacccattatatcgcgcatgctattgtccagtgcctccacggcttgtctcttagtcatagaagcctcgtcccagataatgagagatgctttccgtagcaactctgttgttccactctgcttcgtgaagctacatacagcgccatcgtcaatagtgagtggtatcttgaagcgtgaatagggcggtcttcctccaggcattatggaagccgcaacgccagatgtagctgttgccactgcaatcttgcccttgttgcgtagcgtcgcgagcagcactctgtatagataagt

SEQ ID NO: 25418 - DNA, 457 bp, Zea mays
agcttgacattgcctccctgttggaaaccaatgtctttcttaatgtcaaggtgtctcccactataaagcatgctacgagcaaatttaaatttttcattttctagttcatgctcggcaattttagcatctagtttagctatatgatcattttgttgtttaatcatagcaatgtgatcatgaatagcatcaacgttaatgtctctacatatagtgcaaatagtaacatgctcaacggtagatgtagaggatttgcaagtatttaatttaacaatcttagcatgtaaaatagcattctcatctctaagattggaaatagaagcattgcaaacatttaaatctttagccttagcaattaatttttcattctcaattgtaaggctagaaagggatgcattcaaattgtcaatcttagcaatcaaattagcattatcatttctaagattaacaattgaatcat

SEQ ID NO: 25419 - DNA, 374 bp, Zea mays
tctcaaatatggccttcgcactcttgctcgcccccttttctttttatcataatttcatacttgaatacaagcttcttccaaatactatcatctaatgcaagattcctcatttccttgcacgtgcactcaacctttgcaagatcaaccccaggtaaaaaatgcaataccttagtcttaagatcagcaggcaaagccatcaagcatggcgtggcaaacgcaaataattcagttggcacagtgataccattagtggcaggcaaatctcatccgtcggcgctctccacagatcatgaactcccttctcatgcacttcactcagataaagtaaaggctcaagcccgtgcacatactacccataaactatcacgaaattt

SEQ ID NO: 25420 - DNA, 454 bp, Zea mays
agcttgaagctgatataagcggctaccgacggcttcatatcgtcgacattctcttttactccaatttcaaagtaaaattcttttgcctagatttgtgttatctttgtgatgaatcaaaattttctgatgtccgcttatttccaaagtatgttgctaagtaaagcattaaggatgcaacaagacctcgaggacaagaaaaatgaaatcataacgagggcttggagagtaagattaagaattacgaagcttctctagagaagaaagacttcctgcttcaagcaacagagggttcgcttgaagaaattcaagctgaaaatgctagattaagcgaggagcttctccaaagtcaaacagccttaaaagaacaattagagagcttcgaacaagggaagaaagaactgcaagcaaaatatgaagtcaaagctgataaaaatacaaagctgcagaaatcttt

SEQ ID NO: 25421 - DNA, 369 bp, Zea mays
  unsure (1)..(369): unsure at all n locations
cgaaggacaaacaaaaaagcaagccctagtgtactntgtctccgaagttctcagtttatcaaagaaaaactatacagaattggagaaggtgatatatgttgtcttaatggcctccaggaagcttcgacactactttcaagcataccatataattgttccttcatcacagcctttgaaggatattatgaggaacagagaagctactggaaggattggaaagtgggctgcggaactcaacgaattcagcattgattatgtgcatagatcttcgattcagtcctaggcgttagcagacttcatcactgattggacgccaggggctcaggaggaagaagcaagtaaagatgccgaagcttggacagtgttctg

SEQ ID NO: 25422 - DNA, 447 bp, Zea mays
  unsure (1)..(447): unsure at all n locations
agcttgtgaagccaatcacaagtttgttgaagaatgacactaagttcaattggtcttctaagtgcaatgaagcctttgagcaactgaagacactattgaccactgctccggtattagctcaaccggacatcactaagcctttcgatgtgtattgtgatgcatctggcagtgggctcggctgtgtactgatgcaaaagggccgagtgattgcgtatgcttcaaggcagttgcgccggcatgaggagcactatccaactcatgatctggagttagctgctgtggttcatgccctanagatttggcgtcactatctgctgagaaatatctgtcacatatatacagatcatagaagtttgaagtacatcttcacccagtcagagttaaatatgaggcatagacgatggcttgagctcattaaagactatgaatnggagatccattatcacc

SEQ ID NO: 25423 - DNA, 385 bp, Zea mays
  unsure (1)..(385): unsure at all n locations
ctggacccacctgcaggctcgcatcctcccctgaagtgggccctgtgccactgtcggtaccctgaaactagggtaccccttactaatgtataaatacgcagtacccacgcggctatttttagtcgcgtggtaaaagagttgtatgtgggaccaggccatgactcgctccaacctcgggcgactactctgggccagcaacagcacctgaccccaccacatgggtgggtctggtgccgccacgtgtccagagaaagtgacatactctgaggtatcaccagtgagtccggacccccatgggaaggtgccggacccctgtatatacggtncgggcctncaagtttggttcangacctccacgtgtgcgaaccgggaccctggaatggga

SEQ ID NO: 25424 - DNA, 415 bp, Zea mays
  unsure (1)..(415): unsure at all n locations
agctnttatagtctcttattgtctctattntcaaaagttggcttcttgtggggagaagtgttgattatgggaaaaagggggagtttttgaaatctttgatcaatctcttttggaatgactctctttatacttcaacatgtgtgtttgacttaaagatagaaatttgagtttgatttgcaaaaacaaaccaagtggtggcaaaggatgatccatatatgcccaaaatgaataaaaccaatttgagtttttatttaaagtgattttgcactttgtctagttgctttatattggtgtggcataaatcaccaaaaaaggggagatngaaagggaaatgtgcccttgggccatttctaagtattttggtgattgagtgcaaacacaagggcctaaatgtgaatttatgtacatggatgaa

SEQ ID NO: 25425 - DNA, 494 bp, Zea mays
  unsure (1)..(494): unsure at all n locations
tattaggacctatgaatactaagctntaacatagctgcagganaaaaatgataaagtagctcatatgaccatgctaacagtaaatgtatataacagtgcagacaataagaaacactaaagaaatttccctttaaaacaaatgccttaccgattgcctgactcattttcatactgatcttctgctctcaaccatgcagcgatctatcaatcatcagtaaggagagatgttacttgtatggcatagtgggaggtagagtaataaatcataagaggtgacgttatgtaagctataaatatctagtatatgttagtaatcaatagttagcaagcagttcatcacaagtacatgtggaagttatgtctgcaaaacagaacaaatgaacaatatgctctaacaacttaacaagtttattacccagtattcctcatcgatcacagcctcacgagcaacatagcagccaaataatcttttgatttgaatcactttatcattg

SEQ ID NO: 25426 - DNA, 443 bp, Zea mays
  unsure (1)..(443): unsure at all n locations
agctagatgtacaaaagttcctcagcaaggtaaattacttatggaggtttatttctaacctagccgggaagattgatgcattcactcctatccttcggcttaaaaatgatgtcgaattcacctgnggggcagaacaggaggaagcgtttgatcccattagaaagtatttgtctttggctcctgtgttaaaagcgccacaggtaggagtaccgttcagattatacattgcagctgaagaaaaagatattggagctgttctgacacaagagaccgaaggaaaggagcatgtggtaacctacctaagtcggaggctggtggatgctgaaacaaggtacactttcatcgagaagttatgcttatgcctgttttatgcatgcaccaagtgtagatgttattgctgtctagtcattgcccgttccggtcaaccgatggatcaatacatg

SEQ ID NO: 25427 - DNA, 401 bp, Zea mays
  unsure (1)..(401): unsure at all n locations
tcgacgtctnntgttatttcttcttcctgagcccctggcgtntattcacgatgaagnctgccaacgcctgcgactgaattgaggatctatgcacatagtaaatggtgaatcattaagtcctgcagcccattttccaatccttccagtagcttctctattcctcataatgtccttcagaggctgtgacgaaagaacaattatgcgatatgcttgaaaataatgccgaagctttctggaggccattaacacagcatacaacacctcctccaatcttgtataattttctttgacagacttacaacttcggagacgaagtacactagagctcgctttttgactttggcatctagcttctcctgtacaagtgctgcactcactgcagaatgtgaagctgccacata

SEQ ID NO: 25428 - DNA, 102 bp, Zea mays
  unsure (1)..(102): unsure at all n locations
cgtaccggatccttaagcacctgagctgcaactgaaagggagatcttataagggtgccaataagcaataagcaagcanggtatctatttaacaaccaatagt

SEQ ID NO: 25429 - DNA, 438 bp, Zea mays
  unsure (1)..(438): unsure at all n locations
aggacctatgaaactcagcttaacctcttgacaaaaaattacttctcctagtgttaacaaaattgcttaaaatgcaggaatgaatgtttgagaagttaaactaggtatgaagcagggctaatgtatgaacatgctttctcttcctttntatacaagatatgtaaagaaagtatggaaaaaggaagattgagatacaagttaaaatgaaaggaagtcgttttacccttttgtaccttcgcatagagatgctctcttcattgtgctntgtccttagtcttagtcgcttaagacctatactcaagacaatatatggaaatattntgcacaagagagagttntacaactagtgatcantttctatgtcattggtagcatatcacaaantgcatagatgtaccatgaattctccttttaacttagtgcataacaagagagata

SEQ ID NO: 25430 - DNA, 202 bp, Zea mays
agcttcatcggcccaggagcaggggacttcccatgccgttgatgtgtagcagcggcggctggaacctggcccggtcgttcaattgcgggaccaacccccgaattcggttggccgaggccttaacccggcttgattcctttggggaacagttgctgaaggtaccgaacggctaattaaaccgtctgcttcggccgggtttctg

SEQ ID NO: 25431 - DNA, 425 bp, Zea mays
  unsure (1)..(425): unsure at all n locations
tggttcctcttcagccgcctccatggatgttcatgtcggatcttcanctgttcaatctgaggaacctatggtgacgtgttcgcctgctactcttggtggtccggtcaccttagaggtaatgacccggatgttgggaatcggccgcctgccatcagagctaaggtctccttgagtgatgctctcaacattgaccgtgtcaacactccatcaacagacagtgcaccaatgccttcggccctgagatttcccttnattctttctaaccaccaggtgagttgatctttgccttgcattggttacgttgacaaatgggttctcttgctaacttttgagcttgaagaatgtcctcaactctatgttggcaccagtgaaaccttgtgatgcccctgtccccgatcaagtcttgtcttgatgcagtggaattc

SEQ ID NO: 25432 - DNA, 449 bp, Zea mays
agcttcgcacctccgaactaactcggctgcatcacttttcgctagtggccaatagaatcccgacctgaagaccttcccgactagggtcttggacactgcgtgtattccacattgtccagcatgaacctcatgtagaagttgcttcccaatagatgatagaatgcatttcatgaagatgcctgatgcgccccttctgtatagtgtctccccaatgagtgtgtagtgagctgactgtctggcgatgcgctcggctgcatttttatcgtctggctcctcttcattctttatatatctgatgatcggccttcttaagtcatcagagcctgactctggttgattcacgatattacactcttctgcctgatccattgagatgcttggctgtggtatttcttgtacaaagactccaggtgggaactgagttcgactggatcctagctaggacaata

SEQ ID NO: 25433 - DNA, 429 bp, Zea mays
  unsure (1)..(429): unsure at all n locations
tactcagcttcttcgaaggatttctgtcaanatatccctcgaggacantatgatcatgctganttgctagctaagtcagcagcacaggggctgcccttaccttcggatgtgttcttcgaaacaataaaagcaccttcggtggaacttcttgaaagagcagtcctcaatatatctcctggttatagcgaagattggagaactgaggtcatctcttaccttcagggtaaattcctttcagatgacgaaacttataacagaaggatagaggcaagagctcgtccatatgtcatgatagaaggggagttgtacaagcatggagtttgtctcccgtactaaagtgttatctagaaccgacgcatagagttgatgaaagaaatcatgcaggcctgtgtggatctcacattggatctaggccgttacttggaaaag

SEQ ID NO: 25434 - DNA, 444 bp, Zea mays
agcttcttttgaaagatgtcaagaatattccaagaggggaaaatgagcatgctgatttgttagccaagtcagcggcacaggggcttccgctaccttcgaaagtattttttgaaacaataaaagcaccttccgttgaacttatggagagagcaatccttgcaatttccccagtacatagtgaagattggaggactgaaattatatctttcctccaaggtaattgtctttcggatgacgaagcttataataagagaatggaagcaaggacaagaccgtatgtgataatagaaggggaattatataaacatggagtctgttctccactcctcaagtgtttatccagagctaaaggtattgaattattgaaggagatacatgcaggtctatgtggatctcatatagggtctacgcccttgctgagaaaagtgttagacaaggatttac

SEQ ID NO: 25435 - DNA, 403 bp, Zea mays
ggctgtccataatgcctgccggtatgtgatgccctctgaatgctgccttgaactctctccattccaccacatggtcaactggctgcatagcgaggaagtggtcccaccatgtccgcgcgggtccacaaagctgctgggtggcgaaccggaccttagccacatctgaacaaactccattaagcagtgagaatttggattccactaccctaagccatacatcagcatcaagtggatcctctgcccgagtgaacaacggtggctgagtgctgaggaactcctgaaaagtggctgctgctgggggacattgatggtgatcaccaccaccatagtgctgaggtggcggctgacgctgagccaactatcgcggaatctcattctgctgagccatcagttcttgcatggt

SEQ ID NO: 25436 - DNA, 450 bp, Zea mays
gagcttcgcaccttcgaactaactcagcggcattacttttttctgctggccaatataatcccgacctgaagaccttgcccactagcgtcttggacgctgcgtgtattccatattgtccagcatgaacctcatccaaaagttgcttcccagtagacgatagaatgcatttcatgaggatgcctgatgcgccccttctgtatagggtctccccaatgagtgtgtagtgagccgactgtctggcgatgcgctcggctgcacttttatcgtctggctcctcttcattctttatatatctgatgatcagccttcttcagtcatcagagcttgactctggttgattcacgatattacactcttctgtctgatccattgagatgcttggttgtggtatttcttgtacaaagactccaggtgggacctgagttcgactggatcctagcttggacaata

SEQ ID NO: 25437 - DNA, 450 bp, Zea mays
  unsure (1)..(450): unsure at all n locations
tcgtgaatatgttctccgaagctacttagcatgattttccgctttcatatcattcttccgaagatcgatgtcatgtccccttcttgtgccatatgcaacatgatgtatgatgcttatgctatgtgaaatgatgtgatgatgttatgctgtgtaagatggtgcttattccgaagatacacacattcctgcgacataacacataattttttgaatcagcattgtctttttactataagcctcccttaggagcttcttcgccttttacttcagcggaatcaacgtttatttttcgctgtaagcctcccttatgagcttcttcgccttttactttcagcggtattcgcgttgactnttcgcgcttcgccttttacttanngcggtatcagcgtgacttttcgctgtatgctctgcattccctttggaacgactntggagcagaaaacttacact

SEQ ID NO: 25438 - DNA, 383 bp, Zea mays
  unsure (1)..(383): unsure at all n locations
agcgtgtgaaggttcttcatcctcacatgtgctatttcggtgatgccacagccagcccatgctagtcgtagctattaagcatgcatctagaccggcctcttggtttganaatcaactaaataaagtgtgccgctaatacaccttagaagctagggaacaatcacttcttctaaggacagacacatttacatttgtaaataaacaggtatatcccatatggcttaattgactcacagatagcagattatttccaagagactcaactataaacacattagatatggagtgctcattggaaattgcaattttacctaaaccttttaccttgccttgattcccatcaccgaatataattgaatcttgggaatctttatttttgacga

SEQ ID NO: 25439 - DNA, 464 bp, Zea mays
  unsure (1)..(464): unsure at all n locations
tgtgtgttgtagaccagtatgatttggtgctagatcatatatgtttatcacatggagcctatcattagatcctgcatatcccttgtgtggtgaattntctcttatgttgtagtgactactttggcaataagcgacactgggtctgcccttttttgtgctaaatacaccaccatgttcattcataccataaatgcctctgctgtttgcaggttcttgatagagagacaataatgaagactttccaggatgtcactgcaagccttgaacaagccttagctggtatctcgtttgatgaacttaatatatctgatgaagtaagagagcaggtagagtactatattccagagtctatcttttcattaatgctttctatagtaatactggttcaatggtttttccttggtctgtataccataatatctgtgatgttatgcaaggtggaattgtgcatactcagttcaaaa

SEQ ID NO: 25440 - DNA, 461 bp, Zea mays
  unsure (1)..(461): unsure at all n locations
agctntaaatgtgttgtcatcaatcaccaaaaggtgtagattgaaagtgcattcatcccttntgtgagttttggtgatttggataacaacacatttaaaggtctaacaagtttgctaagtgttgaacagagaattcagtatgatgaacatacttgaatagtgtataatgatcagtgaacaaagttcaacacaaggtcaaataaccagtgagacaatgcaaatggatataatatggtctctatattggtttgaatatatggacaagtcctgagaaatcactatgcataaatatgatcataatagaggtttaagtgattaagaggattggtcaagccaaagtgaacaagatatgaggaatcgtgaattggcttgaccatattactattagtccatatatgaatatatgagaatcaaactagagcttgatngatcttagcagttatatctagatgacattcaag

SEQ ID NO: 25441 - DNA, 371 bp, Zea mays
  unsure (1)..(371): unsure at all n locations
tctaagggagaacacgtgataggtctaactaatgttcaattcttaaaagatagaccttgngcagcttgtcaagcagggaaacaggtgggaggctctcatcacaccaaaaatgtgatgacgacatcaagacccttggagatgctgcatatggacctcttcggacccgtcgcctatctgagcataggagggagtaagtatggtctagttattgtagatgactnttcccgcttcacttgggtgttctttntgcaggaaaagtccgaaacccaagggactctcaaacgcttcctcaggagagctcanaatgagtttgagctcacagtgaagaagataaggagcgacaacggatccgagttcaagaaccttcaagt

SEQ ID NO: 25442 - DNA, 372 bp, Zea mays
  unsure (1)..(372): unsure at all n locations
agctngtgaagcgcaatccaccccacatgagctcaaacgccatagccctatccaaacatgagcatcttatgatgtcaacggacatctaggcctgaactcctgataacgcaacacactaacattactccgccttacatatcacacatgagcagctactagatatctgacggaatttaaggacaaacacataatacctccgtaagtacctgtacacatgccatagtgcctatttcatctacggacgaggagttctctacgaccttactctactattaaccaccttgaaagctatatctccaatgagctactaatcacttgtgactgatccatcatgccgagatttccatcgcccgtaaacaccgaacctagaag

SEQ ID NO: 25443 - DNA, 123 bp, Zea mays
cttatgcggacgatgttttcccgtccatgagagactgcatttgttgacttgactctcatcgcctatcatgcatcgagttgcgccactgactgtttcgggtgcccactgtctagcgatgctctc

SEQ ID NO: 25444 - DNA, 443 bp, Zea mays
  unsure (1)..(443): unsure at all n locations
agcttgaatnttgaaggctggatttntgaaaacaaggattaacgcggaacataaatagtagtaagatgctctattgaactataaatactttttaaatactcgagtaaactttaatatagagtacacaatatattattttcctcaaaataagtgagaaacaaattgtcaatttttaattaacttttaactgatcacacattaaaaaatgatattttcataaaacaaataacatgttcattattccttattatatgtttttggagcacttatgtaaatgaatataatagtaagtaagtaatcataaatatgtgtgcattcatgctaatctttntttcttgtgcatttatatatgacaaacttaaacacaaatttgaatttagattgaatttggaaattagagaaacaaaattcagaaaagagaagcaaattcgtactcatgggcc

SEQ ID NO: 25445 - DNA, 418 bp, Zea mays
  unsure (1)..(418): unsure at all n locations
tgctttgaagtattganagggcaagccaaactgaaccgtcgtcatgtcatatgggttgagtttatcgaaacatttccatacattgtgaaatataagaaaggtaaggacaatgtggtcgctgatgccttatctcgaaagaatgtgttgttgaatcaactaaaggtaaaagtcttgggtcttgacaatctaatagaaatgtataatgatgatcctgaattttcagaaccatacaatcattgtaaagatggaaaggttgggaaaaatatcatatacatgatggattnttgtttagagctaacaaactttgtgtacacaaatcttcggttagattgcttttattgcaggagtcacatggaggcggtctaacaggtcatctttgacaaaagaagacttatgaaatgctcattgatcatttcta

SEQ ID NO: 25446 - DNA, 281 bp, Zea mays
  unsure (1)..(281): unsure at all n locations
agctngacaatgaggagatggcgctcgtcatcaatagcttccgccaaatcctcaaacaaaggagggggaaagactacaagtcccgctccaagaaagtttgctacaaatgtggtaagcccggtcattttattgctaaatgtcctatgtctagtgacagtgaccgatgcgacgactagaatgggagaagaaaggagaagaagaggttctataggaagaaaggcggcgatgcccatgtntgtcgcgagtgggactccgacgagagctcaagcaactcctccgac

SEQ ID NO: 25447 - DNA, 413 bp, Zea mays
  unsure (1)..(413): unsure at all n locations
tctatgcatatatttcgtattaattacaagatccaactctagcgatctatggttctagatttatcttggtcttgcaggcgggattgccataaggctggtgtccacgctgaggtgagcggtacgggtgctgagtcccgactggagcggaggaaccaccatccagatgacgacgttccgcgcgctcagcccgcagcagggcgatctcagcacgagccctactcagctcgtctaatgcatggtccagctccgttgttagcacggcggctaggttgactgtgctgctcaacctaagattgccctcaccgacaggtgagacaatcacgcctnctgtgctgccaaatggacaggcggggtaatacttcaggtcaagaccgtcagcttgcccaccgaataccgagcagtaatgcgaaagc

SEQ ID NO: 25448 - DNA, 454 bp, Zea mays
  unsure (1)..(454): unsure at all n locations
agcttcggcgtgacagcaaagagtggaaccgtcttatagatgaaaaggctattcagacctcgatagactactatagaattattatcaaatgtaaagggcatgtatgntaatttgtaaaggctgtgtcccgtgcctataaataggtgaacagtatccccgtactgttcgcgctgactgggcattcactttttgcgtcgcgtttgtattgtcatcctctctcgattgaaggtacacttgtaattcaataatatttctgtttatgcctaataataatatataatcgntcatattgtcttttatatcctttacattntcaccttcgtcaccgtttaatgattttatgaaggtacgtccttcataaccttcgtccgtaaatcattatatcctaaaggaaataatgcttctgaggacgaaagactataacgattaacattttctgtgttgccttgttctt

SEQ ID NO: 25449 - DNA, 444 bp, Zea mays
  unsure (1)..(444): unsure at all n locations
tagcctttntgtcagtgaagtatataaccatgtctcttgtggttgtttgcctatagacaggcacanatttatgattatgtgcagttctaatgtagtgttcaaatgcagcattctcacccaaactaataggaatttctagcctagcaagcaatcgaaccaattcattacgtgcaaccataggacaatactcccaattacgcatactaccatcaggattaaaagatatctgagacatgcaggttttttcacgcctcctgcgacatctatctctatgtcgggtcaggtggccagtgccaccactagagagagcagaatattgcttagagcaatgtatgcacttagctgcanaccttaccttcttaccattcacgattttgaagattntctcgaaatctaaccacactgcagaagtagaaggacgacaacgcttggaactgtgttcgt

SEQ ID NO: 25450 - DNA, 317 bp, Zea mays
aaagaataaaccttgtccagcttgtcagccaggtaaccagtgggaagaacgcacttccaccagaaatgtgttacacccttcaaggcccttgaacctgttccttatgaactttttcgaacccttccttattttaatattagggggaagtaagtttggttaagtattggagaataactttcccgtttaattggggtattctttttgcagaataagtttaaacccaaaaaccttaacccttctaggaaactcaacaatttactaggtaaaaataggacaacggtccattaaacttatgagatcctagagaggatacccat

SEQ ID NO: 25451 - DNA, 414 bp, Zea mays
  unsure (1)..(414): unsure at all n locations
ggtgaaggttcttcatccncacatgtgctaagcggcgatgccacagccagcccatgctagtcttagcaattaagcatgcatctagaccggcctcctcttttgcaaaatcaactaaataaagtttgtcgtctaatacacccttaaaagctagtgaaccatcacttcttctaaagacagacacatctacattagtgaataaacagttatatcccatattgcacaattgactaacagatagcaaattatatccaagagactcaactaanaacacattagaaatagagtgctcggatgaaatagcaatttcacctaacccttttaccttgccttgattcccatcaccgaatattattgaatcttgggaatccttgttnttgacgtaggaggtgaacatcttcttcntccccgtcatat

SEQ ID NO: 25452 - DNA, 433 bp, Zea mays
agctttgggcacacatctgaagttcagttcagcttatttattcgtttacagatggccagaccgaaagaaccaaccaaattcttgaagacatgttgagagcctgtgcattgcaagatcggtccggatgggacaagagattgccttatgcagagtttttctataacaacatttaccacgccagtttgaagatgtcgccatttcaggcgctctatggaaagagttgtagaactccgttgcaatgggatcagcctggagaaaagcatgtgtttgggccagacattttgcttgaagctgaatagaacatcaagatggtccgagagaacctgaagatagcgcagtcaagacagcgaagctatgcagacacaagaagaagagagctgagtttgaattcggagactttggctatctgaaagtgtcaccaatcagatgagtc

SEQ ID NO: 25453 - DNA, 394 bp, Zea mays
tgccgcagttgtggcagccgtcgtctcggcacgcttctagttgtttatggcgcctgcttgggcacctacacgtgcaccaccctgagcatgtcctcgcgccccggcctggccgccttcacgcgcctagcgtggcttgccgcggttgcggcctcgtgtcgaggaagactcccccttcttcttgtcaccctggcaggcctcccactgcttccgagtgagatgtagcttcccgccgattgtgatatgcccagatagagcctgtggttcgtcgccagcgaccaccttgaggcgaccaatcgcctcttcgatcgtcatcgtggagaggtctagcagagactcgatcgagcgagctatcctgctgtacttctcggggatgcgacggaagagcttctcaaca

SEQ ID NO: 25454 - DNA, 269 bp, Zea mays
ggatccttaagcacctgggctgcaactggtgtttataaaatacaattctggttaaagattctcacagctgaagaaggaagttttttcgcgaatctaaaaaaggtatgtttcaaggttcatgcgctggaaagaattaactttaattggattatttttccatggtaagttcaaattattacccattttacatttcaaatggttctataataacattcaattctctttatacactatttttggaacttcatttgataagtgggtgacaacct

SEQ ID NO: 25455 - DNA, 395 bp, Zea mays
  unsure (1)..(395): unsure at all n locations
tcttgtcaaggatgtttgtttctaactagttgtgcgcactagtttatttatttcatgcagttatggttgtcttcccattgctagcagattattaatgtctataatgttttcttatcatgatatctatttatactttgttgcttccctgtttatgcaattntcaaaggagatngctgtcgaaatttatatatgaatgttagatgtgtagtttagtagcattctggggtgtttgtggatcccggggtgtctacagtggtatcaaagcttangctttatattctttggcaattgaagaataaattgacacttgtggggactttgtctcaaatgctatgaattaagaacaaggcaacacanaatgttaaatggtaatatcctttcgtcctcgaacatta

SEQ ID NO: 25456 - DNA, 441 bp, Zea mays
agcttcacatgtctcgtatgattcataaacaaactattttaatagcccatcagaatgaaacttcttcatgcgagtctgacttatatgacccaaacgacagtgccacatgtaagtaagacttaaatcattacgccgaggccgttcaccactaatattacagataggtgcatcatcaacatttataatgaataacccagtcataatggatgcaaaagccacaaacatgccattcttagagatcacacaacgattgttttcactcgcaaatgaataaccatccttcatcatacatgaatgatacataaagtttcgactcatactaggaactagataacaattatttaactccaaaataaatcctgatgggaggagcattgcatcgtcccgacggtcaacgcagcaactcttgcattattgccttcccggaaatcaacttctcct

SEQ ID NO: 25457 - DNA, 372 bp, Zea mays
  unsure (1)..(372): unsure at all n locations
nttagagacatgagagatctaaagacaatagcaaaaatccattgtttctaatggatacactgtcgatagataaaatcgataaaacagtgtcatgatccttagagaagagtatgagaacgatcataatgagatattggacagatccacatttgatacatgagatcagggtatagcagataaccagataatagggcaggatcaataggggatccgaagattcggatgataagccacaatatgattcgcanaggaaaagattactagatccaggcgaatagagagatcatcanacaggatcagctacgatgatcgacagaaatgctatgaagttttacgggcaaggatttatggaaagaaacatggccttgatag

SEQ ID NO: 25458 - DNA, 457 bp, Zea mays
  unsure (1)..(457): unsure at all n locations
agcttgtgaagattcttcatcccaacatgggctagtcggcgatgccagagccaacccatattagtcttagcaattaagcaagtatcgagttcagctctattaaaatcaactaagtatagctgaccctctaatactcccttaaatactactgaatcatcacttcttctaaagacagtaacacctatatccgtaaaaagacagttgtaacccattttgcataattgagatacaaaaagcaaattgtaatctaaagaatctacaagaaaaacattggaaatggaatggtcaggtgatatatcaattntaccaagtcctttgaccaaaccttggtttccatacccgaatgtgatagctctttggggatcttcgttttctcgtaagaggagaacatctttntctcccctatcatgtggttcgtgcatccgctatcaataatctaacttgagcccccggatgc

SEQ ID NO: 25459 - DNA, 434 bp, Zea mays
tgtcagacgaaagttgcttcgctcctcttatgttgtaccgaagcttttctgatgatgaagctcctgtaatattcagtagtatgatgaaagcaaatggttagccatatttttgaggaacacttaatttgttttatagtgacacttaaacctgcggaaaatcataactctataaacgtaactccgaattcagtggttctcgaacatgggatctcgtcgcgatgcgtagaccattattatgcagtatgttctcatgtttggtgtgatgttaatatttgcctatgctatgtttgtttgtattgctacgagtagcagcgtggttatgagtcacttgaagaccaagttggtacctaagaatctcgagtctaaggcaagttctgcccttgatcactcttctttacctaataatggtctcttgtaatcactgtgacatgctc

SEQ ID NO: 25460 - DNA, 276 bp, Zea mays
  unsure (1)..(276): unsure at all n locations
tgtgaacagtacaagttcataagggagaaagcagcttcagcatatcattctaatcctatgctcttatgtgaggacatagcagagcagaaggtgctggttggctctcaattatccgaagagcaggagaaaaccttgattaggttttgttcaacaacaaagatggttttgtattgtcagctaatgatctctgcggagtaaatagggatggtattgaacattcgcttaatgttgatccattcttcacagccagaanacagaggcttcggaaaatgtcag

SEQ ID NO: 25461 - DNA, 434 bp, Zea mays
  unsure (1)..(434): unsure at all n locations
agcttctaaaaggagaacacgtgatanggttaacttatgtgcaattcgaaaaagatagaccttgtgcagcttgtcaagcaagcaaacaagtgggaagctctcatcacaccaaaaatgtgatgaccacatcaagacctttggagatgcttcacatggacctcttcggacccgttgcctatctaagtataagaggaagtaagtatggtcttgttatagttgatgagtcttcccgcttcacttgggtattctttgtgcaaggtaaatctgaaacccaagggaccctcaagcgcttcctaaggagagctcaaaacgaagttgagctcaatgtgaaaaagataaggagcgacaatgggtccgagttaagaaccttcaagtggaggagtaccttgaggaggaaaggatcaagcacgagttcttcgctccctacacaccac

SEQ ID NO: 25462 - DNA, 474 bp, Zea mays
  unsure (1)..(474): unsure at all n locations
tgatggtacaattgaatagtacaacgctatgcttgtggtttttgtatactcagaaagaaggagaagacttctgtgatacttactcacctgttgctagaatgaccactattcgagtactactttctttggctgcctcgtatggtctccttgttcattagatggatgtaaagacagcttttcttaatggagagctggacgaggaaatctatatggaacagcctgatggatttgtagtaaagggtcaagaaagcaaggtgtgcaagttattgaaatctttgtatggtctgaagcaagcaccaaagcagtggcatgagaagtttgacactactctaacgtctgcaggctttgtcattaatgaggcagacaggtgtgtatattatcgctgtggtgcgggcgaaagagttatatagtgcttatatgttgatgatatatcgatatntggcacacacattgatgtgatcaatgaagtcagtc

SEQ ID NO: 25463 - DNA, 458 bp, Zea mays
  unsure (1)..(458): unsure at all n locations
agcttgtaccaccacagaagaatcaataaaccataattaccatccttttcaaaaagtaaaacttgttagaaaccaatgttggatagatcggtaaggcaataaggatggacatagagcgtgaagccttaagatactagaggggtagctaggtggctatttgagtgagccctatatgctactataagggatggggatttctctattccctgtggattgatgtgaagtcgtttaggacggcatgcatgcatcattttattcaaactacttggtaagtggtcaagaactctaaaagctatgaggtatgataataagggattatgtatactccaagacctcaacgtaaccttagaaaagccaagcactgattccctttatttttgtaatnctttntctttttcgcttaccctaacccttacacagatgacttctcacgaatccttggaaggagggaacacaca

SEQ ID NO: 25464 - DNA, 451 bp, Zea mays
  unsure (1)..(451): unsure at all n locations
tgttcgccgtattctcaaaggatcgctntgctctagcttcatgacaagagggagcttcggcaaagacaagatatagtcaacttcgtcaaaacgcaaaanattcaacatcaaatggccagggtgcgatcaacagctaggattacacgcgacggagaggatcgaagctgctgaaactgctccaatctccaaagttatgaggctgtcgggactggttgcgacggaaggcgcttctgacgaaggtgcacctgctactgaagccgagcaggcaaatattgaagagggtgatattggtgaagaagagattgattataacaccgttatgccatctaagcctagccatttggatttggaaagtcgactatgtccgagctgacatgcccatgatgacgaactaggctacttcatgaagccgagaagaagtgattcgctttggtggngaagagactatctg

SEQ ID NO: 25465 - DNA, 437 bp, Zea mays
  unsure (1)..(437): unsure at all n locations
tagcttctaaaaggaggacacgtgataagtttgacttacgtgcaattcgaaaaagatagaccttgtgcagcttgtcaagcacggaaacatgtgggaagctctcatcacaccaaaaatgtgatgacaacatcaagacccctggagctgctacatatggacctcttctgacccgtcgcctatctgagtatatgaggaagtaagtatggtctagttatcgttgatgatatttcccgcttcacttgggtgtgtcttttgcaagataagtctgaagcccaaaggaccctcaagcgcttcctcaagagagctcaaaatgagtttgagctcaaggtgaagaagataaagagcgacaacgggtccgagttcaagaacctttcagtggaggggtttcttgaggaggaanggatcaaacacgagttcttcgctccctacacaccaca

SEQ ID NO: 25466 - DNA, 489 bp, Zea mays
  unsure (1)..(489): unsure at all n locations
ntatcaaatggatgtgaaaagtgccttcctcaatggacctatctttgaggaggtctatgttgagcaacctcctggctttgaagatagtgagtaccctaatcatgtatataaactctctaaggcgctntatgggctcaagcaagccccaagagcatggtatgaatgcctaagagattttcttatttctaatgacttcaaagtcggaaaagtcgatcctactctattcactaaaacaattgcgaatgatttatttgtatgccaaatttatgttgatgatatcatatttgggtctactaacaaatctacctgtgaagagtttagtaagatcatgattcanaaattcgagatgtctatgatggnggaagtgaagtattttctaggatttcaagtcaagcaactccaagaggacaccttcattagccaaacgaagtacattcaagacatactcaccaagtttgggatgaaggatgcatagcccatcaagacacc

SEQ ID NO: 25467 - DNA, 381 bp, Zea mays
agcttgtgaagaattttcatcccaacatgggcatgtcggcgatgccagagccagcccatattagtcttagcaattaagaaagtgtctagttcagctttgttatcattaaaatcaactaaatatagctgaccatctaacactcccttaaatgctattgaatcatcacttcttctaaagacagtaacactaatatcagtaaaaaggcagttgtagcccattttacatatttgagaaacgacaagccaattatatttctaggaatctacaagaaaaacatttaaaatgtattgggcaggagatatagcaatcttaccccaaacctttgaccaaacccttgatttccatcccgcgatggtgataacttttttgaagatcttcatt

SEQ ID NO: 25468 - DNA, 444 bp, Zea mays
  unsure (1)..(444): unsure at all n locations
ntaagctctntgacaattaaatcacttcatctagtttcaacaaggatgcattaaagcatgaatgaatttttgagaagttaaactagatatgaagtanggatatgcatggacatgctttctcttccttttaaacaagatatgtaaagagagtatagaaaaggaagatttaggtacaagtttaaatgaaaggagatagttttacctttttgtacctttacatagggacgctctcttcattgtgctttgtcctcagtcttagatgcttaagacctattcttaatgacaatatatggaaatattttgcacaagagagagttctacaactagtgatcttttcaagttattgttagcatatatcaaatggatcacaagttgcataattgtatcatgaattctncttttaacttagtgcatatcaagagagatatcgattgatagaatata

SEQ ID NO: 25469 - DNA, 442 bp, Zea mays
  unsure (1)..(442): unsure at all n locations
agcttgcacctagtgataccagcataccaagtcaaatacctgcggaagtggtagttcgtgtgcggctggtcattaacgtagtttaagttggcctcctgaacccattcatcaatataatctcggtggtgggtctcgaaatcggtgaccttctgcctctatctgtcgaacctgcaaaaggtagactcctcttttaggaattcattgcatatctgaaataatagttagactaataagaggacgaagtcactaacttgtggagttctattgaagtggagaaaggctccatcggaaactcctgtcgcattccgaactgtcgagccactccgtggggcaagtggtactcaacggcatagaagcaaatgaggggacatatcattaagtaaatgtccttgtctatcgcacacatggagctcaactagatgtggcanaagctagctcatga

SEQ ID NO: 25470 - DNA, 373 bp, Zea mays
  unsure (1)..(373): unsure at all n locations
tcatgggctactggcggagctagccgaagcactggcttgcccagaggatggctggagggggctggccacggtggccgatgctctggcggcaatggcgggcggaattaagctcgccggagctaagggaaagtggctggccggtgagggtgagtgcggngcgaantggggcgcgcctgtgaaggctntataggcacgacgcggtgcacgggcggtcgtggaccggcgagtgcgcgcgggcgtgcactgcgaggcgcggtgcgcgaacgggcgtgaaccacgggtgtcagccgcggtcgaacacgtgttcccgttgtctctgcccctgttcaagcgccgatagggagcaaatcttcgcgaatatgggcaagatcac

SEQ ID NO: 25471 - DNA, 432 bp, Zea mays
  unsure (1)..(432): unsure at all n locations
agcttagaccttatgtacctttctttgatgggtgcatacgagccttagatggtacacacattctagctcacgtatgtcatgagtcgaagcttgaacacataaatagaanaggtgtggcctatctacaatgtattaggtatagtggacatggatatgtggatcactattataggtgctgggttggctggtttttgccatgacatggcactgctcacgagttgtatctgaagcgaactatccacacccaccagcaagtatggtggcatgcatgttatgttggcattgcatacaatgtattcatgcattacgatctagtaaatctttttatgaatttatttgtctgtgtatagggaggtattatctagtggatattggttactcaattcgtgaaagctaattncaccatatcggaatcagagacgtcacttataa

SEQ ID NO: 25472 - DNA, 484 bp, Zea mays
  unsure (1)..(484): unsure at all n locations
tcagctcactttaaaacagttttagcgcttccgaagatgtctgatactgctaagaaagctgctgctgagatgaagctgagtcttgatgaagagaagaacctatggtttcttatagcgatgtcgaagtccaacacagaaaagattaccaaggaaattctggaggggctgtctgaagatactggtgacagtgaaagttatgatatggacagcggtggcgaagactccgaagatcgcccctggcgaccaagccattcagtttatggtaagtcaactatcaaagagaatcatcttgttaatatgagaggaaggtatttccgggatctgtctattgtgagggcggacgaaggggaaaaaacttgtccacaccctgaagaaaatgaagttgtggtgtaccgaagctttntgaaagctggattgcgatccccttgagcagcttcgtcgtggaggtgttgaaaatcttcgaagtctatcttcatcaacttac

SEQ ID NO: 25473 - DNA, 321 bp, Zea mays
agctttcatgagaatatgagtacaaagttgaatttcagtacggcttatcaccctcagactgatggacagactgaaaggactaatcaagtattggaggatatgttgagagcatgtgcccttcagcatgggggaagttgggataaaagtctaccttatgctgaattctcatataacaatagctatcaagccagtctgaagatgtcaccttttgaagctttatatgggagaaagtgcaagactcctttatattgggatcagactggagagagacagttctttgggcctgaattgattcaagaagcagaagaacaagtccgtata

SEQ ID NO: 25474 - DNA, 411 bp, Zea mays
  unsure (1)..(411): unsure at all n locations
tggacagtattctgcgatggttcctanggaaccttctgggcatgtgcagctgccgtnttaattgcaccttccaaagtcagaacatgctacgcattgaaacattagttgtacaaataatattgctgaatacgaagctttgctttttggtcttcggaagttgaaggcaatggggataagaagggcggttctcaaaactgattcccaagttttttctggccatgttgacaaaagttgcaaagcaagagatccgaagcttgaaaaatatttggatacagttcgaagacttgaagcttccttcgaagggttttctgtcaagaatattccacgaggagaaaatgaacacgctgatctactagccaagtcagcggcacaggggcttgcattaccttcggaagtattctttgaaacaat

SEQ ID NO: 25475 - DNA, 369 bp, Zea mays
  unsure (1)..(369): unsure at all n locations
agctntaactcccccccccccgcgagaccttttctcgtttctttctaaccataaagaatgtgacatcgaatgtcatacttgatgcatatccactttatttgttcccttgtatgatgtactgtttgcttcccaatttgaatggatgtatgtatgtatgcttgcaatcgcatagagaacgatccggttgaagagcccgaggaactctcaagagaagcccctgagcagcagtcggttggtggaggcaagtgtcccttgacctatctatgtcctattcattatttaattcacctcccgctgtatacatttatgcctaaagatagactagttnntgtatccctgtccttgcttaacctattgggttggataata

SEQ ID NO: 25476 - DNA, 443 bp, Zea mays
  unsure (1)..(443): unsure at all n locations
gacctataaaactaagcttctaagggagaacacgtgataggtttgactaacgtgcaattcgttatatatagaccttgtgcagcttgtcaagcaggtaagcaagtgggaggagcacatcacagcaagaatgtgatgaccacttcaagacctctggagctgctgcatatggacctcttcggacccgtcgcctatctgagcataggagggagtaagtatggtctagttattgttgatgacttttcccgcttcacttgggtgttctttntgcaggataagtctgaaacccaagggaccctcaagcgcttcctcaggagagctcaaaatgagtttgagctcaaggtgaaaaagataagggagcgacacgggtccgagttcaagaaaccttcagtggaggagttccttgagganngaaggatcangcacgagttctccgcttcttatac

SEQ ID NO: 25477 - DNA, 359 bp, Zea mays
  unsure (1)..(359): unsure at all n locations
agcttctanagggagaacacatgttgggactaacaaatgttcattttgagaaagacacgattcgtagcgcatgtcacgcagggaagcaagttgggactcatcatccacacaagaacattatgacgactgacatgccactcgagctcctacgcatggacctattcggcccgatagcttacataagcattggcgggagtaagtactgtctagttattgtggatgaatattctcgcttcactagggtgttctttntgcagganaaatctcatacccaagagactttaaagggattcttgagacgggctcaaaacgagttcggcttaaagatcaagaaaattagaagcgacaacgggacggag

SEQ ID NO: 25478 - DNA, 501 bp, Zea mays
  unsure (1)..(501): unsure at all n locations
ccttagatactcagcttgactcacttatctgctatgtcaaggattagctngcggacagtctctcttacaacagccttgaggggtgtatgttctggttagcgttctataatgaaacatttctatggttgtcttacccttatttcgtgctcattcatcatttttcagggcttgattctgagccaggctttaagggctaaaaaagatgcagaggattagagcttgcaaatagctcttgagaaccttcattcagaagttatatcattgagaaacgaagcccttgagaaggatacgatattactttcgtttgtggaaaagttgaaatctagcgaggctagccttgctgcacaagccgaagctcataaagccaaagtggacaagcttgaaaagaaagttgctgaagctgctgaanaatttgaagtcaagcaatgaacatgatatttggagattgaagatctagacccaaaagacttggatgagctttgtgcttcaaggagaaatgta

SEQ ID NO: 25479 - DNA, 364 bp, Zea mays
agctagcagcagttgcttctggaggcctaaccacggcgcgccctgcgtagcagggttgggaagacggactgggatcgctcctgggcagctagtgcggtgccggtagagcagttgcatgtttgcggctgctcctgtgcgcaagatggtcactaagtccagcactatgggctcgtcaccatagtccacggattcgtaccggaaagtctaaccgtgcgtggaagtccgagcaggtgaactttctgcgagcggtttggcggccgaagatcttggaatttgttgacgaaatgcatgctcctccgcatgtccgatgtgcgccgtggccagaggtattcattctgcgattgccggtaagacacctcccatg

SEQ ID NO: 25480 - DNA, 370 bp, Zea mays
  unsure (1)..(370): unsure at all n locations
ttacggacctataaaactaagcttagcttcgcgaagtttngcgacaaacttggcattatcttaccttcgtcattctacataaatcaagaaccgtgagaaaaatcaagtgcaaagaacaagtaagtcgaagattatctttactggtcaagatggcttctgcttatctcagccttctccgccgcttttgtcatatatttttataaatctgtggagatacttcggcaaggcaggcatatatcaggatgatggagatatgcaagtggcctgtaacactttcatgtcacaccagcttatgaagctgcacagccctcagaactaccagcacaaaatacatgccactatgacttctgagctgtaatttccctaatgg

SEQ ID NO: 25481 - DNA, 404 bp, Zea mays
  unsure (1)..(404): unsure at all n locations
tctgtgatgctactcttcactaattgcaatccaagcggcgaagtcacatgcagacacgtgtcacgctcgcacctggaagatggaaaacagaaggtcggacgttaccgctcgacgctcacctttcggcataaaacaagctgggcaaacaagcgtagctccaccattctagacgggtacccttcgcatataaaatattcgacgggtccgggtatgggtatggaattgtacacgcgcatgagtataggtattggagcgagaagttnttagtctaacagggccggatctgtgtagcaaaacctggtgggtctttcacccattgccatctctaagactgatctagtaacctggtgatctagtaacttggtaaagtactcatacanatttgattatttatcttctcgctc

SEQ ID NO: 25482 - DNA, 439 bp, Zea mays
  unsure (1)..(439): unsure at all n locations
agcttgtcaagtgacatttggtatccatcgcttgatgggtccgctaagggtagtaaacaaagatctaggaacccaaaagtcctttgtgttagcgcttggtaagctcattacctttctagcacaagttgcaattttgggttgcctagttacatgcgaaataattggcaagctagaagtggggttgttatcaatgagacaatccttgcattgatgtccctttttccggcatatgtagcaaagtcgatcctcaagtcttgaagacttcttctttccttgtttcttgcttgctacatggtcagataatattttcttttctaaccctatgcctttttgtttcaaatagggacaagattngattaagtgtcccttctttgagcatttaaagcaaagtctatcatccttgctaataatcaagccatttttaatgtaaggacatgac

SEQ ID NO: 25483 - DNA, 267 bp, Zea mays
agcttgagcagagactggcttcgtctgatttcctttatagctggtgatgagcatgtccttcagctattgccacggtgtgcatgttcctggtcgaagagaagagtaccaggtctgtgcaacatttttgactgccatgacaaaggacttcgtcatgactgcagtattgccaccatatgaagatatggttgctctgtacctcatcagaaatagcttcggatctgactgtccttcatacattgggagctgtggtggtttgtaagacggtgg

SEQ ID NO: 25484 - DNA, 478 bp, Zea mays
  unsure (1)..(478): unsure at all n locations
ttggctntntatccattgtgtatggagcaggaggagcgctatatgattctccatcacgcttcaagtgcaaatattttcgtatgcccatgtcttccatatcaagcctagcattaatactatccttcgacttcccaggaatacctagtaatgtaccaagaattgactcacatatatttttttcgatgtgcatcacatcaaggttatgtcgcagcttcaaacctgtccagtaaggcaaatcccacaaacacgaccttntcttccaacattggccatcatttgcatcccgctttctcttcttgttntgaggatgctttcctggtctaacatccttgacactgtccaactgctgcttcaattcaacctcactaaatgcctctggcttgcacggtntcaactttcccatcnagtctttctttntctccatggatgatcttttcaggaatcgcgatgccaatatacaatctattcgtatctttaa

SEQ ID NO: 25485 - DNA, 463 bp, Zea mays
  unsure (1)..(463): unsure at all n locations
agcttcatgaatgatgccttcggcgtcacgtacgatcagcttcagccgaagctgtatctctctgcaggaccttcggcgacgaagcatggtcccaacagtgaccaagatcaccaagagggaaacgatcgagggggagctcggtcggttcatgctcaaccaaggagaagagccacaagctatgtacaaccggctcaagatcttggtcaaccaagtgcgcaacctcgggagcacaaaatgggatgaccatgaaatggtcaatgttattctaagatcacttgtttttcttaatcttacacaagtacaattaattcgtggtggtcctagatacaagctaatgtctctcgaggaggttataggaaagtttgtgagctttgagttgatgatcaaaggctccaaacaaatcattgagcgaggcgccaccttcacacccgaggtgcaacccatcgcattcanagcgacggag

SEQ ID NO: 25486 - DNA, 432 bp, Zea mays
  unsure (1)..(432): unsure at all n locations
ngcaagaaaaaaaagactaattcataagttgttcatagtttcttctcattaaacttgactctgccatcttaacttgcggactggttgctcagctctaaccatcctctttggtaagccttacacttcacgtgaggtcccacctttggcgagttcatgcacattattccccacaacttgttgagcgatgaacatatgtgagctcactcttgctgtctcacacccncccccacaggtcaagaacaggtaccacaggatgaggcgcttggaggatgctgtgatgagttcgtgagtggtctaggccgtcgtctcccagtcaactttgggttgctggaaccgtgtctccttaatttgtaatattatttattntgtatagaacctctggtatgtagtaaagatgtgacattcgatcctgtgccatgattcatcatatgt

SEQ ID NO: 25487 - DNA, 343 bp, Zea mays
  unsure (1)..(343): unsure at all n locations
agcttattcaaacgtttagatcgaactaatattgacacgatcaatgaattaattgatgctctgaatgagaagaatatattgttagagaagcaagaggatcttctatatgaagagcatgatacatctgttagtgcgcaaaattctcttgatttagaagctaaaagaaatgaaatgctctcatatgaattatctacatgccatgaatctatttctagcttaaagagtattaatgatgatttaaatactaagttagaaatagctaataaatcaagctcttgtgtagaacatgtagtgatttgcaatacgtgtaacgatnttaatgttgatgcttgtagtgaacact

SEQ ID NO: 25488 - DNA, 476 bp, Zea mays
  unsure (1)..(476): unsure at all n locations
cctataaaactcagcttantactcggctgcgtgttagaggctgngaatagcaactggttatcatacttgaggtgttcgcctccaggtgcagtgaagagaatccctgctcctgctccctgcagcttcagcgagccatcaaaatacattcgccatacttctgccgtttctggattgtctggaacttgctgttctgtccactctgatacgaaatcgaccagtgcttgagttttgatggcagtgcgaggtcggaactcgatatcatgggatcccaactcgcaagcccacttggctattcggccaatggcttccttgttgtgaagaatgtcccctattggaaaaccagtaactactatgactntgtggtcgtcaaagtagtgacgcagcttgcgggcagttagaagtactgcatataatagcttctgaacctgaggatactntttcttcgatgggcctagaacctcactgatgaaataaac

SEQ ID NO: 25489 - DNA, 444 bp, Zea mays
agcttagttacttaagcaaagttgttctcttattatagctctagactttagatgtgttgaccctaagcaacttcctaatatttttagaactacagagctccaaagtcagtcttgtgcactgaatttcatacttagccatatgagatgaatggagtggttttttgcaaataagcccatttcacatctattgacttggaaatcctcacatgtgtgaaccatatgctttagggtaccctaattccttggttttttgcacttaggcccaaaagtgtccaccattaacatatatccccttagggtttctatgtgggggtttaagtggtctcttttagggtttcaggcacttctagggttggaatgccactagagttcattaggtgggatatcttatgattatttctcatgagtttagagaattaactcatttaggatttatcgacaccc

SEQ ID NO: 25490 - DNA, 460 bp, Zea mays
  unsure (1)..(460): unsure at all n locations
tcagcttttcttgttcganaccgagaagcttcgtattcatttctgttattntagcttcggcttccgctagtaaaccttcagttgtttggagtttgaactctcttttctcaaaagcagntgtttgatcttttattttggtttctaagttttcaattataacctcgtgctttttgtcttctaaatcctgttgcatcctcaaagctttgctcaatagcatactttgtacatgaacaaccttcgttagaaaacattttttatgaaaataaaaagttagagggagattggttaccttgaaattggaataaaacaaactaccgacgatgtgttgttgtcggtagcggctaatatcggcttcgagctttaggaaaccgatactctntgatagagtaccgataacctttgctcggtctgatctcggatgagcctagctctcatcatcaacacctcgagagagtgccct

SEQ ID NO: 25491 - DNA, 355 bp, Zea mays
  unsure (1)..(355): unsure at all n locations
agctcgtggaggctcttcatccctacatgtgctaagcggcgatgccacaggcagcccatgcaagtcttagccattaagcatgcatctagaccggcctcttcttttgcaaaatcaactaaataaagtttgccgtctaatacacccttaaaagctagtgaaccatcacttcttctaaagacagacacatctacatttgtaaataaacaattatatcccatttgacataattgactgacagatagcanattatatccaagactctccactaagaatacattagatatagaatgctcattagaaattgggcatttacctagcctttttacctggcctttgattccatcaccgaatatga

SEQ ID NO: 25492 - DNA, 127 bp, Zea mays
acactataaaactaagcttaatggtcaatccacggcagtgatgacgttgcaatgtcacttgactgtccggtgtgcaccggactgtccggtgcgccatcgaacagacaacccaaccaacggtcatgtt

SEQ ID NO: 25493 - DNA, 459 bp, Zea mays
  unsure (1)..(459): unsure at all n locations
agctagtagcggatgggtttagcgatgggcctttctacgccgactacactaggaaggaaggcctacgacgagctcttcgaaattgggcaggatgcgtccaaactccaactccaatgtgaagcactgcgagctcttctaggactaacacgggccgcgcacgcagcaatggagacgcaataccacttgttggtagggatgaaagtaggatgggaaatcctgaaccgaccgttatcatataaccgattttgttagttttgccccgatcgatttcgaacccgatgtaaaaaatgaaaacggaacgaaaacgggatatacaaaacggtaaacagaaacgatagagttgttttcccgaccgtttaaccgggatcccatttttaatcgggatgatcccgttttgttaccgtattntgtaattcgggatcacttcaatatggcctgctccaatccagacatcacttt

SEQ ID NO: 25494 - DNA, 488 bp, Zea mays
  unsure (1)..(488): unsure at all n locations
tggagacacccgctttgacagtggacataaaaaatgatttcactactggttctaaccttcatgtttcaatgttgtacttttggaccagaanaagagtgccaaaaatttatgtggcgttgctttagtttagtggtggtcaagttttcgtttttatatgcaaatatggcatatggttcacccctctggtttgttccatgtaagaccttgaaccaccggttagttttcgttaccaagctgggtcaaatattcttttctaagcaaacgagtgtattttgagagttcccaacgactgatactcaattatgtgaatgtttatcagattctaatttaataggtgggttagcagatatctatttggtatgagtgcaaaaattgctaacaaggcagaggccagtgatcttcaggatatcaaggatccncatcttnggtggatgatgggatntatgtntcttgccaacnntttgtggtcttttgctctgatgtctctg

SEQ ID NO: 25495 - DNA, 413 bp, Zea mays
  unsure (1)..(413): unsure at all n locations
tggctccaatccttgagtgctcctaaggtcggtagggttctgtatgctcctancttataggatcctagagtcttggaggcacctagaggccaaaagggctctggacctccggtagccttgagggtatctcgagatttagttgtctaggccaaagggccttgaagaccaggagaactatatgatttgttcccccagcctagagagcatcagaggtgtggaggaccctggaatctagttggaaatgggtatggcctcctaagggcatgagccctagggtacgagggtggcatgaggttggttcactttaggttttcttttgctaatgatatctcatttaagacgtactactagtatatagcggtatggccttctctaacgctgaccactatnatatntaccattatgtaacattc

SEQ ID NO: 25496 - DNA, 93 bp, Zea mays
atgcgtgctcgcctgtgacctataaagaggagaacatgaatgagcctgacatgatcacgtgagatctgctaataagcgcccgctaccatgtgg

SEQ ID NO: 25497 - DNA, 446 bp, Zea mays
agctgataaatatttagatactgtccgaaggattgaagcttcctttgaagggttttctgtcaaaaatatccctcgaggagaaaatgaacatgctgatttgctagccaagtcagcagcataggggctgcccttacctttggaagtattttttgaaacaataaaagcaccttcggttgaacttcttgaaagagcagtcctcaatatttctcctgttcatagtgaagatgggagaactgagatcatttctgtccttcagggtaatttcctttcagatgacaaagcttataacaagagaatagaggcaagggctcgaccatatattataatagaaggggaaatgtacaagcatggagtctgttctccactactcaaatgtttatgcagagccgaaggtatagaattgatgaaggaaatacacctacgtctgtgtggatctcacattggat

SEQ ID NO: 25498 - DNA, 434 bp, Zea mays
  unsure (1)..(434): unsure at all n locations
agcttacctttagtcttatgtaactaagtgtaagaagacttttgaaaagggggagaaataattgacaaaagggggttgaatcataagtgaaacataagatgaatgaaattgatgagtgcataatatgtcatgagcatcacgtttatttatgacacaaagcaccctatgaatagtatgatataagttgtttatactctttgacccaaatatgtggttttggcattntggcatttgagtacaaaattggtattttctgaaatgcacatatttagggggaggaaactatatcataagattcaaaatcttatttatcaaatcttatgtaagctataaatgtgttgtcatcaatcaccatatagggggagattgagagtgcattcatcccttttgtgagttctggtgatatggataacaacacatttaaaggtctaaca

SEQ ID NO: 25499 - DNA, 453 bp, Zea mays
  unsure (1)..(453): unsure at all n locations
agcttgactgtcgattcctcgaagctcggaaaatggatcgcagtctattcgcgatgcgcaacgaatacaaacaggcacaagcaaacatatacttgcataagaacattacaccatacaagataaaatattataaaagcgagcaatataaaatagagagcgcttctatggttatgtgatgaaaagaaccgcgatagttgaagctacggtcgaggagtttgcgtgttcacactaagcaagtattaattagaatatttaatccgacatttctaaaatataaataatatctactacttagttntggctaacttactgttttaattgtggatgattaaataaataactaattaactcacatgaataattataagcgaatggtttaatctcgcgtgcggacaacgcccgatacgcgcgaacggcgcgcgacaacgcgtgcgaacaacacgcgtgacactt

SEQ ID NO: 25500 - DNA, 266 bp, Zea mays
attcttttttattgacatcttcagactggcctgatgactattattataggagaactcaacgtatggtacactcttgtcgcaactatctgcatgctgaaaggcaccagctctcaacatatcttccaatacttgattggtcctttcactctggccatcagtttgaggatgatatgccgaactgaaactcaactctgtattcatattctcatgaaagcttctctataatcttggacgtaaactatgagcctctattcgaaaccaacttc

SEQ ID NO: 25501 - DNA, 404 bp, Zea mays
  unsure (1)..(404): unsure at all n locations
agctcggtagtgtaagcccttaattctgcacctgtttatgaggattcttacttttcaaagggtaacacaaattaacttatttatatcaccaatttggcttgtttttcagatctgttacagggggctgatgttttgaatctggacaagttacatactgaatgtgtggagatagagtgaagtgctatggaaggtggcgcagattgcttgctaaccacaattcagtgaaaagaatgtcatggaccactttaaaactattagaatagtatgaacatgcaaatggtcacaactccaacaaaataaaatacatccatcatccttcggatacnaccgtcgataagtttgacttcgtgaggagcacaccatttccataaggagtgtttacagctgtctgcctatcatattca

SEQ ID NO: 25502 - DNA, 440 bp, Zea mays
  unsure (1)..(440): unsure at all n locations
agcttgtagtagcagctatgctgttgtcgcttcagaagatgaggatgtctgccctacttgcctggaaggtttgtgtccgtatagatctgcatcaacacatggcagttttatcttggtgccttaacatttcttcactgattcattattataaatttcttatgcagaatacacgccagacaatccaaaaataataaccaagtgttgtcaccattttcatcttggttgtatttatgaatggatggagagaagtgatacatgcccaatttgtggtaaggtacgatattgatggttatgcactcttcaagtttttgcttctcgtaatcactaataccctatcatcggttcctaagacatagctgacaatttctactccaacctgattacactgcacgaaatgngagtttgcgagagcccatgatagcctttcggtttacatgatc

SEQ ID NO: 25503 - DNA, 338 bp, Zea mays
agcttatatctatgatcaccacgaattaattgaacttgagtgggattacgaagaacaagtgatctaagaataaccttgaccatctcatggtcatcccatttggtgctcccgaggttgcgcactcggttgaccaacgtcttgagccggttgtacatggcttgtggctcctctccttggttgaggatgaatcgactgagctccccctcgatcgtctcccgcttggtgatcttggtcacttcatctccttcgtgtgcggtctttataacgtcccagatctccttgttgcgctttaacccttgcaccttattatactcctctcaacatagagaggcgaggag

SEQ ID NO: 25504 - DNA, 399 bp, Zea mays
agcttcttgaccacctcaacgttcaccaagttgttgcagctaccaccatcaatgatggtatgtacacggcagtccttgacgatgaggaacatgttgaagaggttgtggcactgtctgttgtcgtcgtcactagctgtggcactcaaagctcgttgcacaatcaaggccttataggtctcggtcactcttgtaccaagaacctcttcattaacatcataagtctctgcaatgttagctccaacagtatcttcatcttccacatcagaagcactaacatacccaccatcaccagtagcaatgcatgcccgtttgctggggcaatctcgctgaatatggccaagtccctggcagcggtggcacttgatgtcggaggagcggcctgtggaagaggtggtcgta

SEQ ID NO: 25505 - DNA, 429 bp, Zea mays
agcttggaggcgtcgatggggagcctacttgatgtagacacttctttcttttcctccgtcgctttgaatgcgacgggttgcacctcgggtgtggaggtgccgccttgctctatgatttgtttggagcctttgattatcaactcaaagctcacaaactttcctatcacttcctcgggagacataagcttatatctaggatcaccatgaattaattaaacttgagtgggaatatgaaaaacaagtgatctaagaataaccttgaccatttcatggtcatcccacttggtgctcctgaggttgcgcacttggttgaccaaggttttgagccggttgtacatcgcttgtggctcctctccttggttgaggatgaatcgaccgagctctccctcgatcgtctcccgtttggtgatcttggtcacctcgtcccct

SEQ ID NO: 25506 - DNA, 435 bp, Zea mays
agcttcgtgaagatattctccgaagctatacttccgaagatcaatagtgtatctgcttgcaaataagcatgatcttccccttccaaaacatttttccgaagatcgatgtcatgtccccttcttgtgccacatgcagcatgatgtatgatgcttatgctatgcaaaatgatgcgatgatgttatgttgtgtaagatggtgtttatttcgaagatacacatacattcctgcgataaaacacagtctcagcgttgtgttataagcctcccttatgagcttcttcgccttttacttcagcggaatcagcgtttatttttcgctgtaagcctcccttatgagtttcttcgccttttactttcagcggtattcgcgttgacttttcgcgcttcgccttttacttaggcggtatcagcgatgacttttcgctgtatgctctg

SEQ ID NO: 25507 - DNA, 433 bp, Zea mays
  unsure (1)..(433): unsure at all n locations
agcttctaaagggagagcacattttaggattaacaaatgttcattttgagaaagacaggatttgtagcgcatgccangcggggaagcaagttggagtccatcatccacacaagaacatcatgacgaccgacaggcaacttgagctactccacatggatctattcggcccgattgcttacataagcatcggcgggagtaagtattgtcttgtaatagtggatgattattctcgcttcacttgggtattctttttacaggaaaaatctcaaacccaagagactntaaagggattcttgagacgggctcaaaatgagttcggcttaaggatcaagaaaataagaagcgacaatgggacggagttcaagaactctcaaattgaaggcttncttganganganggcatcaagcatgagttctcttcttcttacacacc

SEQ ID NO: 25508 - DNA, 444 bp, Zea mays
  unsure (1)..(444): unsure at all n locations
agcttgagaagatatttccacccgactntntcaatccaatgcagcatttgattcttcatctcccctatgaggcacgaatggggggccccgtgcanggacgttggtgctatccaatcgagagatgtctaaagactattcgaaagaaatatagaaataaatgcaaaatcgaggcttccattgcagaggcatacattctagaggaggtctcaaacttcacaacaacttattatggtgacaaactgccgagcgtgcataatccaccccctcattacaatgatggcgacaatgaatcgaaccttagcatatttcgaggccaactcggaagcgcaagtggctcgaccaccaagaccctgaatcatgacgagtggcgacatatcatgctatacgtattgaccaaccttgaagaggtaacgccatacatggaacaatttcttcatgaattct

SEQ ID NO: 25509 - DNA, 450 bp, Zea mays
  unsure (1)..(450): unsure at all n locations
agcttgtcaaaaatataagcacaaaagtgagaaggtcgcttcagcagaccagccgaagcatatgcttctatgtgaagatatagcagatcaaagggtactgctgggatcccagctatctgatgagcaagaaaagactctgataaggtttttgttcaacaacaaagatgtctttgcttggatagtcaatgatctttgtggtgtcaacagagatgtcattgaacattcacttaatgtggatccatctttcagaccaaggaagcaaagacttcggaagatgtctgatgataaagctgaaggtgctcagaacgaagtaaagaggcttctctgtgctggtgttatcagagaagtaatataacatatccagaatggctagctaacaccgttatggtgaagaaggctaatggcaaatggagaatgtgtattgatttcacagatctcaacanagcatgc

SEQ ID NO: 25510 - DNA, 396 bp, Zea mays
  unsure (1)..(396): unsure at all n locations
ttctttctatcgcgccagcgaagcctgtctaggagcttcttgtcgtctccgtcaaacatcgcgggcaccatcctcggtcaaggaggcccccaaccccctcttcaacgctgccctccaggagctctggctagacgcccccctgatccctctcttcgcagttcgacgccgacgtgcgtggaagcgctgcggcgaactgcggtctatgggacgacctttgtgtgtctgcgccgttgctgggtggcgactggccgggcgcggacgaatgagagagtcgggcgacgccacgaggccgctgatgtgctaacatgcgaatgccangcgagtctggaggctggatgtggagcgggggcgatgatgtgccagacgtctcgccgttgctgctccacgccagctact

SEQ ID NO: 25511 - DNA, 430 bp, Zea mays
  unsure (1)..(430): unsure at all n locations
agctttctctcnttttgtgtccaatccgcccgtgactgatagcaatttgggtcttagagtgcgaccctctgctgaagaggtccgtactttggttgcttcgctcggggagatccctgatgatgaacggcagatttattttgaagtgcctctgaaccctagtgatgcagacataaatgacatgcttgatctgctagctgaggattcatctgatgctgctcctgatggtacattggcagtggtgccccttccagaggttgatgcgaccttggatgtcccgaaacctgtcagtactcgcccgaggcgccctagccgaaccagtcagcccgagccttctgctgatgagcagaagaagaagagaagacgcctccggcgagtatccagctttgacgaggatgccagtaccttagcttctgctgctgaagaaatgact

SEQ ID NO: 25512 - DNA, 424 bp, Zea mays
  unsure (1)..(424): unsure at all n locations
agctntgtcaaatatggcgcataattatacctttgatatcttctcgtactgacaggtcattcttcacataaaatcattctgtcatccagtctccgggccatctcttccgaaaggttggcacgggatagcttgacccggaccgagaaacgaaactgtagcagccaaaattattgtgatactgttccttaccccaaggttttgtttcgtatgataattcgtgtatattgcagaagctntttgcatcaggcttcagaccttggcttctcacggcccacacgaagatattcagccttatgattgcctcgggggtaagttggtgaagatagacttcgaagattttcagcacctccacgacgaagctgctcaagggaaatcacagtccagctttcanaaagcttcngtacactacgacttcattctcttc

SEQ ID NO: 25513 - DNA, 442 bp, Zea mays
  unsure (1)..(442): unsure at all n locations
aacttgtaccacatcttgcgttgcatcccgcgccaacccatctgggcagggacacgcagcgacaatttactcgtccgtccaaggacaccccccactccctcgggggtcaaaacaacgactattcttcatcatgcgagaatgggaccatgcagcaactctgtaaatcaaccagtccatggcatgggaggaatctaagcctcctattcaatgcaagaatgctcaatcgataaccataaactcaaatggtgatataaaacctcactaaggagaatgatcgctaacatgcgatcaaggcaagcttgcgaccctgtacaaacgttgcgttgaatagaatagtctcagatatgtaacatcacataattcaccataactgtgcgattacgtacacgtggatgatgacattagcagagtgctgccaancgagtacatgactttatgaatg

SEQ ID NO: 25514 - DNA, 434 bp, Zea mays
agcttgtactgtgcacttaagtgtatgggttgcctgaaaccctagttgcatgaactcaggatttccttttgagataaatactagtatgctaggtcgagtaactgctttgctaattagggatctcggtagaagtcgagtgatttttctagcactcgcttgaggtcaggaattgattgtatccatttttctatatcggaatgatgatggtctgtggacacggatccatggggatgcgtggtctacgagacgaaattggaataaggattaacgtgcggatacctgtgtcaagcgtttgaacgtactaagcacataccgagaaatatggtaaatcggtaagcctagtacctgagtgaacctggcagcagactttgcccctcacttgacctgagacgtagtctcccattccggttatggtgggtacaagtgcggtcact

SEQ ID NO: 25515 - DNA, 431 bp, Zea mays
  unsure (1)..(431): unsure at all n locations
agctntatatgttaatcttcacctaaaagaaagattaggaatgctcaaggcaaaggtatggaacaaattgcttcaattggtagttgatcaatagtagttccttccaagaggcattctttcaattggtaataatatattatatggaaaggaatgccaatatgaaggttaaattccttttggcttaaatttgtaaattagtgcatattgtgaattcactactccatgtgcattaacttaaaaggaatttaatttatgcctttacgcctcataaatgatgatttgtttgccattcatatatatatatatatatcattcattaaatacttccttgtactactaatacctcttttcaaagtgttttatctactagttntaaaaggaaaagagataacaaagaaggaagtctccacaaatgatgaagagaagaatac

SEQ ID NO: 25516 - DNA, 444 bp, Zea mays
  unsure (1)..(444): unsure at all n locations
agcttccttgtgcacttgtgtcaaaaaaaaatgttgttggtgtctatttgcgcaaaccctatcaaggccatgtttctttccataaatccttgctcctaaaacttcatagcatttctgttgatcatcctagctgatcttgcttgatgacgtctcttttcacctagatctagtaatcttttcctttgtgaatcatgtggtggccttgtcatccaaatctctagatcatccaatgattctgccccgtcatctggttatctgctataacccgttctcaagtatcggatgtcgatctcatgctcttcctccaagcctcgtgacaccattntatcaattntatctctaaacggcatatccatgtggattaatggatgttgctgttatcttgggatctctcatgtctctaaaagcttatcaatctcgatnctcatggctgattcctctcgt

SEQ ID NO: 25517 - DNA, 318 bp, Zea mays
tgctggttctgtcgacgagagcatgagctacaggaagatgaacccgtgctctgtgatctcactgacgacgagacaatgaatactgcgtacagtgcgtatctatccgtgagacagaagatgttattactgcatcatcaatttagtgtcggccgtataataccatgagttagagcttaccgtccatgcgctgtgtcaccaccacttgcgtacaccaccgatggatcgaccggatcatggcgccagtcgtagtcagggacatggcgacgaaccatctcctccgcatatagccgctatacatcattgacaggcttacaaatg

SEQ ID NO: 25518 - DNA, 279 bp, Zea mays
agctcatgaagagtgtacatcacaacatgggctaacccgcggagcctgagccaacccatgctagtcgtaccaactaagcatgtgtcgagttcagctctatctaaatgcactaagtatagctgaacctgtagcacaccctttactgctattggatgatggcttcttgtaaagacagtgacacctacatcagttaagagatagctgatgcccattttgcataagtgagatgcacagagtatgatgttctctaatgaatcttcgagacatacattggatata

SEQ ID NO: 25519 - DNA, 362 bp, Zea mays
  unsure (1)..(362): unsure at all n locations
agcttctaaagggagaacatgtgataggtctaaccaatgttcatttcgaaaaagatagaccttgtgcagcttgtcaagcanggaaacaggtgggaggagcgcatcacagcaagaatgtgatgaccacttcaagacccctggagctgctgcatatggatctcttcggacccgtcgcctatctaagcatanggggaagtaagtatggtctagttattggtgatgacttttcccgcttcacttgggtgttctttttgcaggataagtctgaaacccaagggaccctcaagcgcttcctcaggagggctcaaaatgagtttgagctcaaagtgaanaagataagaagcgacaacgggtccgaattc

SEQ ID NO: 25520 - DNA, 260 bp, Zea mays
gcggaggcggtgagctctgatctgctgacggcgaatcgatggagacgcgtgatgtgtgtggggacagaggtgccctacatgtgcggtgtctaggtgtaccttgcgaggatgacaagatctagtccacatgtctggttctcgcagctaatgagagtgcttgatccatgctggtacatcgtgtaacaagaggtgacgatgcggcgatgatataataagctgattggtccgatgcttgcttctacgtatgaagagataataca

SEQ ID NO: 25521 - DNA, 429 bp, Zea mays
tgtcttttcttaacgaaaaggagccttcggcgacagagagtcctcctaagctgaaaaaacagagaattatccaagtggccgatgttattcattagacaccgccgctggcatcggcgtcaaaaatgccaattactgaagacgctggcgctgtcaaggctgaagccaccgaagccgaaggtgccaaagccgaaaccgccgaagattctgatcaagaaaccacacttggtgatattgataacatgcttctaaaaatggctgaggaagaagctgctgcggccgcggcgaacacaacaattgagataggaaaagagccaatcgaagatactctggaagaggaaaacttcaatttctagatatactagggcacgagttatcagaaactgagaaagaagaactgaagaaatatgttgtatcctgtgggtacaaact

SEQ ID NO: 25522 - DNA, 433 bp, Zea mays
  unsure (1)..(433): unsure at all n locations
agcttgtgaagccaatcacaagtttgttgaagaatgacactaagttcaattggtcttctaagtgtaatgaagcctttgggcaactgaagacactattgaccactgctccggtattagctcaaccggacatcactaaaccttttgacgtatattgtgatgcatctagcagtgggctcggctgtgtactgatgcaagagggccgagtgattgcgtatgcttcaaggcagttgcgccgacatgaggagcactatccaactcatgatctggagctagctgctgtggttcatgccctaaagaattggcgtcactatctgctgggaaatatctgtcacatatatacagatcataaaagtttgaagtacatcttcacccagtcagagttaaatatgaggcanagacgatggcttgagctcattanagactatgaactgga

SEQ ID NO: 25523 - DNA, 443 bp, Zea mays
agcttctaaagggagaacacattttatgactaacaaatgatcattttgagaaagacagggtttgtagcacatgtcaagcaggaaagcaagttggcaccaccatccacacaagaacatcatgacgaccgacaggccgcttgagctactccatatggatctattcggcctgatagcttatataagcatcaacgggagtaagtattgtcttgtaattgtggatgattattctcgcttcacttgggtgttctttttgcaggaaaaatctcaaacccaagagaccttaaagggattcttgagatgagctcaaaatgagttcggattaaggatcaagaagataagaagcgacaacgatacagagttcaagaactctcagattgaaggctttcttgtggaggaggagggcatcaagcatgagttctcttctcctacacaccacaacaaaa

SEQ ID NO: 25524 - DNA, 339 bp, Zea mays
atcttgcttgttgactcgatgacgatgcggagcaatgcgagcaacacacgaaggcgaggtcacggcgactgtgacatcgctgctgttcatgacatagagcttcactcgggcatttcatcgaacgcccgtgaagtgccaacgatgcggggctgcgggggaaactcggctgcgaaaagctgcgctgtagggggttggacatgcttcagccgaagtggagggggtggtgatgtccattggactgtgcaaaacagtgagccgacagagcacggagttgccgtggctgctgctgggggaatgcccgcgtgctatggaggtccggtggtttccatgggaggtgga

SEQ ID NO: 25525 - DNA, 435 bp, Zea mays
  unsure (1)..(435): unsure at all n locations
agctttatcaaatggacgtgaaaagtgccttcctcaatggaccaatcaaggaagaggtctatgttgagcaaccttccggctttgaagatagtgagtatcctaaccatgtttataaactctcaaaggcactttatgggctcaagcaagccccaagagcatggtatgaatgcctaagagatttccttatcactaatggcttcaaagtcggcaaagccgatcctacactctttactaaaactattgcaaaagatttgtttgtatgccaaatttatgttgatgatattatatttgggtctactaacaaatcaacttgtgaagagtttagtacgatcatgattcanaaattcaagatgtcgatgatggnggagttaaagtatttcctaggctttcaagtcaagcaactcaaagacngcaccttcatcaaccaaatgaagt

SEQ ID NO: 25526 - DNA, 430 bp, Zea mays
  unsure (1)..(430): unsure at all n locations
agcttcacgggctactggcggagctagccaaagcacaggttgggctggagggcggctggagtgggctggccacngtggccgtagctctggcggcaatggcgggcggaaatacgctcgccggagctaaggaacggtggctggccggtgagggtgagtgcggngcgaaaagaggtgcgctcggngaggctntataggcgcgggcgggcacggccganggcgtgggcgcgcggcggacttgaccggacgccggggcgagcgcgcgcgcgggttgggcgagctctggcgtgccgaccagggtcgaacacgtgtgcccgtgcgttctgcccaagctctggcgcgtgtggtcgctcatccgagcctgctctcgccttggccagtgcacgaaacctcttctccttcctacaagctaccattcttgtgtggaggtcat

SEQ ID NO: 25527 - DNA, 302 bp, Zea mays
agcttcatgtatttgctgcaaaaaatgagaggtaactgggtgcctctatctgatattatcttctttggaataccatgcaagcacacaattcgagacatgtataattctgcccacactgcactgttataagggggatttactggtatgaaatgggccacctttgttaaacggtccactactacccagatggagtcgtaaccggctcgagtgccgggcagaccgactattaagttcattccaatctcatcccatttccactgcggaatctgcaacggctgcaacaaacttgcgggtctctgatg

SEQ ID NO: 25528 - DNA, 422 bp, Zea mays
  unsure (1)..(422): unsure at all n locations
agcttgctcacatatctcatttgaatacctttgatcatatctcctttatatgttatgactaatgtgttttcaagtctatttcaaaccaagtcatatgtatattgaaagggaattggagtcttcggcgaagacaaaggcttccactccgtatcacatacttcgccatcactccgagcaactctctcgtctttgggggagaaatgagcatcaacgaaaaggacttcatccttgggggagagagtaaaagctcaaacgcaaaaggacttcgtctttggtataatcttaactcatttctttatgaccaaaggggaagattgcactccaagggctctaatgattccgtttttggcgattcatgccaaaaagggggagaaatgagcccaaagcaaaaggaccgcaccaccaccaatntcaaaaactta

SEQ ID NO: 25529 - DNA, 380 bp, Zea mays
  unsure (1)..(380): unsure at all n locations
agcttgtcttctcttagtctatcatccacagtccaacggggtcatggaacgcgccaacgggaaaatcttcacagccgtcaagaaaatgctccttaatgaaaagaagggcagatggaccgatttgctacctgaggcagtatgggcactaaacacgactgagtgcanggcaaccgggtttactcccttccgccttctatacgaatcggaggccatgaccccgcaagaaataaagcatgggtccccgcgaacagtcccgtcagccgtccccgacgtggacgagccaacttcaaaggatctcattgacggagaccgagtcttcgccctacaggccctgaacaagtaccaagcccagaccaaagcatggcgcgaccactcagtca

SEQ ID NO: 25530 - DNA, 442 bp, Zea mays
  unsure (1)..(442): unsure at all n locations
agcttgtatcagcaatctattggcctcatgccttcagatgtagccacaaacgcaacaaagttagtggggaatccattcattgtattctcaagaaaggaatggtccaatccagctaatattattggaaagggttattttgcattgattggtgaaaattcaaactcccttttggatgttactgagagtttatcaaagtctctctcaacaaattgtgcttcttttatcatggctctgcagagactcaatgaccttaacagacagattaaggcattntattttttacttgaagatgatgcttgcaaatagataataaagatatatgaaacactcaactattcaaggaatcttgcagcctggaggctactaaatngatgagttttatgatgaattatgtgaagctattatcttcangagaaaatggcccttttgaacactccgaaag

SEQ ID NO: 25531 - DNA, 407 bp, Zea mays
  unsure (1)..(407): unsure at all n locations
ttcttgttctccaccaactacattttggtgagcaaggtgacgtcgctcccctcatgagagatcttgagggtgtcccacatctgcttggcattgtccaagccgctcaccttatggtactcgtccctgcacaaagaggctaacaacacagtagtagctggtgcatttttatgaatntgttcattaataaatataggactatccgagctatcaaatttttcattccattctcaacaatctcccatatgcttggatggagagagaacaagtgactacgcattttgtgactccaaaatccgtagtcctccccatcaaagtgtggaggtttgccaagagggatggaaagcaaatgagcatttgaactctgaggaatacgagagttatctaaagaaaaattcgaattaatcgtc

SEQ ID NO: 25532 - DNA, 444 bp, Zea mays
  unsure (1)..(444): unsure at all n locations
agcttcttcacgccgcaaggggttatcttgcctatgttgagttaaacacttgattgctcattctctagattcaacactaggattgcattctcatgaacaagttatatgctaccactagatcatacaaacatagaagcaatagtggtaccatataagcatcaaaccatttgattttcaatgaatgagcctaatattgccatagatatgcctagatgcactaaacaagtccttatcaaggtttgaatgcacatgccaaataattttacctttgctttagtcgaaggagaggcatgtcataagataagagtgggggtgcatcaactcatgttggagaagtcaagtatgttcaattcattccttagcttgcaaaatctcttctcatcaagtggcttggtgaatatgccgctttgatgatctcttantaaatggtgtctcacatcaatg

SEQ ID NO: 25533 - DNA, 444 bp, Zea mays
  unsure (1)..(444): unsure at all n locations
ttcttctaaagggagaacatgtgataggtctaacaaatgtacatttcgaaaaagatagaccttgtgcagcttgtcaggcaggtaaacaggtgggaggagcgcatcacaacaagaatgtgatgaccacgtcaagacccctggagctactgcatatggacctcttcggacccgtcgcctacctaagcatanggggaagtaagtatggcttagttattgttgatgatttttcccgcttcacttgngtgttctttttgcaggataagtctgaaacccaagggaccctcaagcgcttcctcaggagggctcanaatgagtttgagctcaaagtgaaaaagataaggagcgacaacgggtccgaattcaagaaccttcaagtggaggagttccttgaagaagaanggatcaagcacgagttctccgctccctacacaccacagcanaatg

SEQ ID NO: 25534 - DNA, 373 bp, Zea mays
agcttgcacacatagctcatttaaatacctttgatcatatctcttttatatgctatgactaatgtgttttcaagtttatttcaaaccaagtcataggtatattgaaagggaattggagtcttcggcgaagacaaaggcttccactccgtaactcatgcttcgccatcactccgagcaactccctcttcttcaggggagaaatgagcatcaaggaaaaggacttcatccttgggggagagagtaaaagctcaaacgcaaaaggacttcgtctttgtataatcttaactcacttcattatgaccaaaggggaagaatgacacccagggctctatgattcctttttgggatcatgccaaagggggagaatgaccca

SEQ ID NO: 25535 - DNA, 433 bp, Zea mays
  unsure (1)..(433): unsure at all n locations
agcttatgaagattcttcatcccaacgtgggctagtcggcgatgccagagccaacccatgttagtcttagcaattaagcaagtgtcgagttcagctctattaaaatcaactaagtatagctgaccctctaacactcccttaaatgctattgaatcatcacttcttctaaagacagtaacacctacatccgtaaaaagacaattgtagcccattttgcataattgagaaacagaaagcaaattgtaatctaaagaatctacaagaaaaacattggaaatagaatggtcaggagatatagcaattntaccaagtcctttgaccaaaccgtgatttccatcccgaatgtgatagctctntggggatcatggctnttctcataggaggagaacatncttttcttcccagtcatgtgggttgtgcacccgctattaat

SEQ ID NO: 25536 - DNA, 430 bp, Zea mays
  unsure (1)..(430): unsure at all n locations
agcttctttatggagagcacattttatgactaaccaatgttcattttgagaaagacaggatttgtagcgcatgtcaagcaggaaagcaagttggtgcccatcatccacacaagaacataatgacgtccgacaggccactggagctcctacatatggatctattcggcccgactgcttacataagcatcggcgggagtaagtactgtctagttattgtggatgattattctcgcttcacttgggtattctttttgcaggagaaatctcaaacccaagaaaccttaaagggattcttgagacgggctcaaaatgagttcagcttaaggatcaagaaaattagaagcgacaacgggacggagttcaagaactctcanatcaaaggcttccttgaggaggagggcatcaagcatgagttctcttctccctacac

SEQ ID NO: 25537 - DNA, 390 bp, Zea mays
  unsure (1)..(390): unsure at all n locations
agcttcggatntccgaagttggaagatggcctttcaatattatcaaaggatgaactggctgacagtttatcgtataatagcataaaggtataaaagccaattgtgtattttgaaaacgaaatatttcatttgtttatacttaatcttgtcctcctcttgcagggcttaatccttagcaatgcccttagagcacagaaaaacattgaagatgaagggtatacaatggctctgaacaaccttcgttcagaggtgattgagttaaggaacgaaggccttgaaaacgaataaatattgatttcattggtaaacaaagtgaaagaagatgaagctagttccaatgctcaagcagagattcaaaagaatgagatcgaagaccttcngaaacaattg

SEQ ID NO: 25538 - DNA, 421 bp, Zea mays
  unsure (1)..(421): unsure at all n locations
agcttctaaagggagaacacattttgggactaacaaatgttcattttgagaaagacagggtttgtagcgcatgtcaagcanggaagcaagttggtacccaccatccacacaaaacatcatgacgacagacatgccactggagttactccacatggatctattcggcccgatagcttacataagcatcgggggggagtaagtactgtcttgtaattgtggatgattattctcgcttcacttgggtattctttntacaggaaaaatgagagcacctagaggggggtgaataggtgaatcctgtaaaacttgaaacttaatccgcaaaacttgattangagttagcacgaataagccaagtggctagagaggagaacttgcacaacacgataaccacaaagatatcaacacagagatggcacgg

SEQ ID NO: 25539 - DNA, 372 bp, Zea mays
  unsure (1)..(372): unsure at all n locations
agcttctatctatttaacactctnttttggaattgtgcttgaagacttaattgtctccaagacgtctagtacatttaccattcttttcctttttggggtcactgatggccccttttggttttttgctgtttcaatatttactgcaggactcaaaacttctaatgttttttccttagtcggctctttcgcttcttccattntttctatggatggtgcttcggccatctctgcagtttctggcagcaaggttggctgttcagcttctgtggccgtagaagcttctccggtgaactcatgcaccgaagctggttcaatatatcgtggccggtgtgtgaagacttttatactctttctctntgattctggctcgct

SEQ ID NO: 25540 - DNA, 336 bp, Zea mays
  unsure (1)..(336): unsure at all n locations
agctggccaagccctcggacccggccggacttcaccggaggcccgagatcgacctcaccagacttcggtcttccgccgacgcgcgtggaccgagctatccagtgagtctccgaccaattccttgcgctcatagcttctctggcatcccgtggacctccctgacccatntgattgaactatctcgccgtgaccaggccggtctcctcgccgccgacgagcatccccgcctgcgcgcgtggaccgaccgactccggccatcttcgacggcgttccgcataccgttgtgatccccgagacctcccctttgtcctcgaccacttcaccggagcaatctcg

SEQ ID NO: 25541 - DNA, 443 bp, Zea mays
  unsure (1)..(443): unsure at all n locations
agctntgcaggagatggagatgatatgaagctttggggtgcttaagagagtcaattcttattaactcaagctatcaatcttcaatgattcatatatccaagattgacccaaagttagtttaattgttatgtctaaaactcatatcatctcggggaagatattgatgttgtaggaattaaagaattaatcctatgccaaaaagtcgaggtctacaacatggaggaaagccaaaggatggtaacaattatgcttttaagtgcaagtattttaaattatcatttcttatgtgtcttgtgtagtcacatagaanaagaaagcacttcaaatgtnttttaaattatgtcaccattctttgaagaaattcctctcatatgggagattgtatattcatcatttctataccatggcaatctacatgctntaaatngtngtaagtatctcat

SEQ ID NO: 25542 - DNA, 199 bp, Zea mays
aggctgcgagctcctctctgctggctgcgaatcaatcgagacggatgcttgctagcgtacacactgtccctacatggatcgtggtgaagcttaccttgcagtgcttaaaaactccttattaatccattgcttatcacaaccaacgatactgccttgtccgtgctgctacgtacgagtcacatgtggaattgcgctgcga

SEQ ID NO: 25543 - DNA, 374 bp, Zea mays
  unsure (1)..(374): unsure at all n locations
gctcggtgcatgctatcttgtctgatggctcacaaatgtggcagcgtaacagtgcacctagcaatgaatgctgtggtaacttcacacctactcgtgtgtttatatagtgctgagagtgataaagcgatgcgtcctacattttacaccangcgagcacccgctagcactcactgcatggtggatcgcagagaccgctcactaacatgtgtgaggtggggccgctatacgctgccagatagaatcgcttctcgactacgatctcatggaacgtgtgtttagacctcagcgctccgaatctaaaagactttcttcactgatcaagctcgttgcctagaaggatatgacaccactacacgcgctactgatgtgtctat

SEQ ID NO: 25544 - DNA, 438 bp, Zea mays
agcttcagctccatctatattatggattgcttttgagtcagtccagtttccttcggcccttctggcagcttcctgacttccatgaatagcaatgggtccttgatccgaaggtatcttcatgcaaagataagcaggatgaagaattgcttcgaaagcattgagggtgccacgaccaataattgcattgtaagggtattccatgtcaacaatgtcaaacacaacttgctcagttctggtgttgtttatgaatccgaaggtcactggcatggtgatcttgcccagtgctacaatctgtcttcctccgaagccacagagagggtgtgtagcatcatggatcttatcttctggctcttgcatttgtctgaaggccttagcaaatataatgtcagctgcactgcctgtatcaaccaaaacattgtggaccagaaaccctttgat

SEQ ID NO: 25545 - DNA, 434 bp, Zea mays
  unsure (1)..(434): unsure at all n locations
atgctgtcaattcttatcaaagcaacatcacttacccgtgcagcagctgcagaccattcccgtaacatggtcgttcgcatgctgggggctggacatgatcagacctttcaagaaagctcanggaggctatactcatatactagttgccattgacaaattcaaaaaaatggatagagtacaagccaatcgtttctttgacctcatccaaagcagtggaattcatacaagacataatattcaggtttgggataccaaacaacatcatcactgacctgngatccaacttcaccagctctgaattcttcgatttctgcgagcagcgaagcatctagattaagtatgcatcagtcacacacccaagagccaatggccaagtagaaagagccaacggaatgatactagaagcagtcaggaagacagtatttgaaaagagt

SEQ ID NO: 25546 - DNA, 346 bp, Zea mays
gatgcgagctctgactcgtgatgctatatagtcgagccgcatgcatgctagcttgaaccgatggccctcgttgccggagagaccagatcacgctcgccggagtataagatctctccggtgcgcgtggaccgggtaaacacgtataccgtttgcccatgcttgtgcgcatggtctctgtgtgaccgcgtgaagatcatctgcccattagatggactctaccgccgttggttggcctgagcaggcgtacactctatcccctccgcatgtgttcttggctttggagcatctccatctttggtccgactcgacattgcttgagcgatcgacctcctaacataccgatcat

SEQ ID NO: 25547 - DNA, 380 bp, Zea mays
  unsure (1)..(380): unsure at all n locations
agctntactcaaatggacgtgaagagtgccttcctcaatggaccaatcaaggaagaggtctatgttgagcaacctcccggctttgaagacagtgagtaccctaaccatgtttataggctctctaaggcgctttatgggctcaagcaagccccaagagcatggtatgaatgccttagagatttccttattgctaatggcttcaaagtcggcaaggccgatcctactttatttactaaaattcttgacaatgatttgtttgtatgccaaatttatgttgatgatattatatttgggtctactaacgaatctacatgtgaagaatttagtaggatcatgacacacaaattcgagatgtctatgatgggggagttgaaatattt

SEQ ID NO: 25548 - DNA, 434 bp, Zea mays
  unsure (1)..(434): unsure at all n locations
agcttatgaagattcttcatcccaacatgggctagtcggcgatgccagagccaacccatgttagtcttagcaattaagcatgtgtcgagttcagctctttcaaaatctactaagtatagctgaccctctaacacacccttaaatgctattgaatcatcacttcttctaaagacagtgacacctacattagtaaatagacagttgtagcccatttgacataattgggaaacagaaagcaagttgtaatctaaagaatctacaagaaaaacattggaaatagaatggtcaggagatatagcaattntacccaaacctttgaccaaaccttgatttccatccccgaatgtgatcgctctntgtggaccttggtttttctcatatgaggagaacatctttttctccccagtcatgtggttggtgcacccgctgtcgag

SEQ ID NO: 25549 - DNA, 401 bp, Zea mays
  unsure (1)..(401): unsure at all n locations
agcttcttctggattaatgcttcacttaacgctgagagcgaaactgccacatataataacaaaggagcgcctggcgttcgtggaattaatgttgttcaatctctacaatattgctatcattacttcaaagctgtctgctggactggtccacattgaaaaacttcggctgacttcatcacttcgaaaaatgggagnttactctctgctgatctagatatgaaactgttgagagatgccatccttcctgtcaatctttgagcccccttatttgtactaggtggttccattcgaagtatagcttcgatcttgcttggattagcctcaattccctttgttgaactaggcaaccaagaaatgtccccttcttcactccgaagacacattattccggattcagcttt

SEQ ID NO: 25550 - DNA, 450 bp, Zea mays
  unsure (1)..(450): unsure at all n locations
agcttcttcataatagatggatgagtacattcaggctgataatgagttccgccagagaaaggaagaagcttatatgttttctgagatgactaagggcttccgaggaagaatacaccctatgcgtgtcagatcaatccacaactccagccagagtgatgacagatgaagccagctctcaaggccacagcatagctcacaatccttagggccacaacaaagctctttcatgccaccagcctcaaagggcagaggcagcatgggcttcngaggaacgtatggggataagcccagaaggctatattggttattctatggtgaagacaagggccacactacaagaacatgccacgtcaccattcataagcagaatgagattgccgaagcataggcgcaacagaatcagtcgaagcaggtcttacatactactntcgtgctaacctctcctatata

SEQ ID NO: 25551 - DNA, 135 bp, Zea mays
tgcatgtcaagcgagcaggcttacctcgcaaggagaaagactcgaatcaaactgtatcctgatcgcggctaatgagactgcttgaccattgtctggttgcgaacacgcggatacatgatgcgatgatgtcagacg

SEQ ID NO: 25552 - DNA, 412 bp, Zea mays
  unsure (1)..(412): unsure at all n locations
agcttgtgaagattcttcatcccaacatgggctagtcggcggtgccagagccaacccatgttagtcttagcaattaagcaagtgtcgagttcagctctatcaaaatctaccaagtatagctgaccctctaacactcccttaaatgctattgaatcatcacttcttctaaagacagtgacacctacatcagtgaatagacagttgtagcccatttgacataattgggaaacagaaagcaagttgtaatctaaggaatcaacaagaaaaacattgaaaatagaatggtcaggagatatnagcaatttaccaagtcctttgaccaaaccttgatttccatccccgaatgtgatagctcgttggggatcttggttnttctcatatgaggagaacatcctttttctcccggtcatgt

SEQ ID NO: 25553 - DNA, 375 bp, Zea mays
  unsure (1)..(375): unsure at all n locations
ttctngttattgtcttgagtgcatccagaagcaaagccactgccgaattgctccgcaaaaacaccagccccgttcgggcgtgtgtcgtgtaagcaaccacaagctcccccgatttggttgttgatgggcctaccggggttcctgtaacttgcaagccaagtgccgatcagaacgaaatggctggctgacacgtcggcgcaggcgaacccgtcatgcactgcacgcgttatcgttcccgcggcctttatatgcctcggacgttccatgggcggcggccaaggctaattaactgggcgcgccatcggttacatgcgcgcgccattatcagcagtcgatcaccgatgaggcgaagacgatctggtgcggactggtcta

SEQ ID NO: 25554 - DNA, 440 bp, Zea mays
  unsure (1)..(440): unsure at all n locations
agcttgtggaggttcttcatccccacatgtgctaagcggcgatgccacagccagcccatgcaagtcttagccattaagcatgcatctagaccggcctcttcttttgcaaaatcaactaaataaagtttgccgtctaatacacccttaaaagctagtgaaccatcacttcttctaaagacagacacatctacatttgtaaacagacagttatatcccatattgcacaattgactaacagatagtaaattatatcctagtgactctactaaaaacacattagagatagagtgctcattagaaattgcaattntacctaacccttttaccttgccttgattcccatcaccgaatatgattgaatcttgngaatccttattcttgacgtaggaggtgaacattnntcttctccccgtcatatgggttgtgcatccgctatcaat

SEQ ID NO: 25555 - DNA, 440 bp, Zea mays
  unsure (1)..(440): unsure at all n locations
agcttgctcaagtaacacagttcctttattaatattcttaggcctgtgtgtagaaggacgaagtggatatattgataggagatggggtatatatatagagactcaaccctaaccctaaccctaatgggccggcagcccaacagtggtgccgacccacacactcacacacacagtctaacatcccccgcagtcgcaacgggggcaccaaacacgatgagactgaagtagaggccgaaggtaggagccgacgggctgaaatccctccgcagtcgcagcgtcgtgatggtgcgaatggtgcggctggagcagagaccggtgtgtgctccaagaagacgatagcccctagaagccgaggtagccgaagtcgatgtggtcgcggttggaagacgcgcagcanaaacctgatcttctggaggggtcaacgtcgagcgtcaacgatc

SEQ ID NO: 25556 - DNA, 401 bp, Zea mays
  unsure (1)..(401): unsure at all n locations
agcttaatgcccctaagaaattatctaactntgttaagggcaaagctcccatggttcaagataacgagggctatattttatatcctgctagttatcccgaacataagattaggagaattcattctatgaagtctcactctggctctcatcatgcttntatgtataagagtgaggcatctagttctaggcaatcaactcatgttaaattgcctaaaaagaaatctcctattgcatcaaatgaacctaatgtttcatttaaaacttttgatgcttcttatgtgctcactaacaaatcaggcaaagtagttgccaaatatgttgggggcaaacacaanggttcaaagacttgtgttgggtacccaaagtgcttgttttaatgtcaacgaccaataccgttggta

SEQ ID NO: 25557 - DNA, 299 bp, Zea mays
tcgcacaagtgaacaaaaacggaaacttgccgaatggaattgggattcaggtgggtcagattcaagtgataaaagtcaaggagaccgcggaagaaaggggaaattggaagagcaaggccgcggatgagaaaaggaacgtaaatgacggattcgtgggtgtcttctgtcggaacagtgaccccacggcagatccgccaaaaacagagctccttcggaggaagaactccgatggattcgagatggaggaggtcggattcagagataacagacatgtggttacctgcgaagggaactaactg

SEQ ID NO: 25558 - DNA, 432 bp, Zea mays
  unsure (1)..(432): unsure at all n locations
agctntactccaaattatgcatggggttatgtcaagctcacttaaggaaagtgattcaccaacatatggtcttcaatccctttatggatctctcagcccaaatacttanggattagtcacaaacaagcgcccaaaactgctatcaaacactaacttcaggttctgttactgttgtaagtctgaaaactcagaaatctgtcaatcaatctttggactatcttttctaccagtagcatatagcttcggggctatatcacttaataagaattgttcttctatcatttctctacgagtttggtatagtgttcattaaccacaaccccctggattccaaaatatcaaggcccaaagttggatccaaatactgaaattcagcctctgaaatctactaagtntgaaatccagaaactctgttagctctactttggacta

SEQ ID NO: 25559 - DNA, 417 bp, Zea mays
  unsure (1)..(417): unsure at all n locations
agcttgtgaaggttcttcattcccacatgtgctaagcggcgatgccacagccagcccatgcaagtcttagccattaagcatgcatctagaccggcctcttcttttgcaaaatcaactaagtaaagcttgccgtctagtacacccttaaaagctagtgaaccatcacatcttctaaagacagacacatctacatttgtaaataagcagttatatcccatattacataattgactaacagatagtaaattatacccaagactctccactagaaacacattagagatagaatgctcattggaaattgcaattttacctagcccttttaccttgccttgattcccatcaccgaatattattgaatcctgngaatctttgttttaacgtaggagtgaacatcttcttcntccncgtcatatg

SEQ ID NO: 25560 - DNA, 407 bp, Zea mays
  unsure (1)..(407): unsure at all n locations
agcctatgaagattcttcatcccaacatgtgctagtcggcgatgccagagccagcccatgttagtcttagcaataaagcaagtgtcgagttcagctctatcaaaatctactaagtatagctgaccctctaacactcccttaaatgctattgaatcatcactccttctaaagacaataacacctatatctgtgaaaagacagttgtagcccattttgcataattgagaaactgaaagcaagttgtaatctaaagaatctacaagaaaaacattggaaatggaatgatcaggtgatatagcaattctacccaatcctttgaccaaaccttggtttccatcctcgaatgtgattgctcgttggggatcttgngttttctcgtaggaagagaacatcttctcccctgtcat

SEQ ID NO: 25561 - DNA, 409 bp, Zea mays
  unsure (1)..(409): unsure at all n locations
agcttcttttggatatggctgcagaagagacagctgtggctgcagagaaggtcatggccgcagtggctaaccaaggaaaaagattgttgatgctacttcagaagaaagggactttgaccttccgaacctggtggatcaagaattatctgaggctgagaagaaggagttacacgaatatgggatatcctgtggttaccagccaggagctatgctctttggcgaaattgatgacggagccttangatgcattcgtgatcgcgctggggcaaaaataatcggcactatcgaagagtgtcggttttccgaagcttgaggctgatattatcggctaccggcgacaacatatcgtcngcagtctgttttattccaatttcaaggtaaagatctttttgcctagatttctattatc

SEQ ID NO: 25562 - DNA, 375 bp, Zea mays
  unsure (1)..(375): unsure at all n locations
agcttctaaagggagagcacattntaggactaacaaatgtttattttgagaaagacagggtttgtagcgcatgccaagcangaaaacaagttaatgttcgtcatccacacaagaacatcatgacgactgacaggccgcttgagctactccacatggacctattcggctcgatagcttacataagcatcggcgggagtaagtactgtctagttattgtggatgattattctcgcttcacttggggttatttttgcaggataaatctcaaacccaagagaccttaaagggattcttgagacaggctcaaaatgagttcggcttaaggatcaaaaagattagaagcgataatggaatggagttcaagaactctcaaat

SEQ ID NO: 25563 - DNA, 413 bp, Zea mays
  unsure (1)..(413): unsure at all n locations
agcttgttatatagccagttcaggatgaggagtgtgtgctttcttcacagctgctggagttcaagaatgatgtcactggtccgattaatagtttgctgcctcctcctcgaaccaccaatagaaggaggaggactgtgcctgctaatttcattcccaggcgtagcaggagggtggccaagtttcctccagaattgggttctaattctgctgcccaggtctgtagacaattgggtttttgtgatgagatggagaacatctctcttgaagatgccaacggttatgcaaggttattcaaaaatggactctctggtagccatgttgctgcagttgctgcgctttttggatggcaagtgcctcttgtggcgcagtgttanggcctgttgctaggttatctcattangtggatgtcttta

SEQ ID NO: 25564 - DNA, 385 bp, Zea mays
  unsure (1)..(385): unsure at all n locations
agcttgttatgtttagtgactgttgaagaattcattcattccttgggttgntgtcgcgctcgcagaagcagctggccggcatggtggagaaggcgtcgatcgaggacgtgatgaaggtgctgatggcgtcgcggaagcatgacctgcaccagctgtggaccacgtgctcccacctcgtggccaagtccgggctccccccggaggtgctggacaagcacctccccatcgacgtggtggccaagatcgtggagctccgcctcaagttctcgatgtcccgccgctcgccgttactcgcgcaccaccacccgcaccaccacccggaggtgggcggcatggatgccttntctcgcgccgacatctactagcaccacaagatccgccgcat

SEQ ID NO: 25565 - DNA, 436 bp, Zea mays
  unsure (1)..(436): unsure at all n locations
agctntgttgcatctaactaaaccacttgggccatattaaattgaattccctatgctagagtcaaatatccttaaatgttgctcacactctccattttatagtccaaaggaagagaaaggttacacgaacctcggatcccaccagctaagacacaattatttgttttttatattattcttggagatgtactaaggtccatcccatggtcatggtgttgtatcagagacatccttctcgaggtgattgccatacctaccatagaggtaggtatgatgagttgtgtctctcggtgtcacggcctgtgccgcttgccacaagatagttggtagtcggtgttgtgttttatacttgattatatttcatggtacactctaagtgctcgtgtctgtctatagggtgaatgcacatacaatataatgatcttgagtgccctga

SEQ ID NO: 25566 - DNA, 435 bp, Zea mays
  unsure (1)..(435): unsure at all n locations
agctctgggatgcctaacggttgtttggagaccaaaggtaaacctattcacgattgaagttttgagtttcttgtagtgttggattaaaaaacaagcttgaaacttaaaagggaaaactaaaatgaaagttaagtacctaactccaactaaaaatttggtatgtctgttgcaatgtttgggttcaaatggtaaacctgtcgacatttgacagtcaagttttgagaatgttaaatcaatcgagtagcttgcaaacatagtgtaggagaaggtggaagaaagtacttggctgcagaaccgctgagcttagcaacatcctcttctattttagagaggacttccttccgcttgtcatcggcagcattgagaaactccttcacaagaggattcaagcttggcacaagcccagcctacacagcaacanatgaacagaatgca

SEQ ID NO: 25567 - DNA, 437 bp, Zea mays
  unsure (1)..(437): unsure at all n locations
agcttgagcagtgaccggcttcgtctgaaagccttggaaactggtgatcagcatgtccttcagcttctgccatgatgtgattgttcctggcctaagagaagagtaccaggtttgcgcaacattcttgacttccatgacaaaagatttcgccatgactgcggtattgccaccatatgaagatatagttgcttcgtaactcatcagaaactgcttcggatctgagtgcctgtcatacatggggagctggggcggcttgtaagacggngccaaggtgtagcctgcagttctactgacagaggagaaacatcatcaaaagcaaaatttccatgatggaaatcttcataccattcatcctcgttgaagaagccctcttggtgcagctctctgtgctagggtcttcggtttttctcatcttgagtaagatgacgtacttcttc

SEQ ID NO: 25568 - DNA, 433 bp, Zea mays
  unsure (1)..(433): unsure at all n locations
agcttgcatgacgcgtgggacccagcccccgtgtcgtagcgggaggaccttggagtgtgttggtgaagactcagtccgcgacggctgaggacgcaagtggggagagtcgcatttaaaaagggggcgacccccttggatggcagccatgccttcgcactcccctcatgcattgcgcccttccaccttccaagcccccagatggggagcgcccgcgttgctttcatcttgctgctgttggaggagcacaacttcgcggaagttggtacctttcagccatcgctcggcttcaaggattntcatcaggcagcctggctgcatcccctcgccgatggtcacccaagatggtgaccaccagtttgatggtggggagaagcaagccgggttgcgacctctgccccgccctcagcttcaaggatcttcatcatccgtgctg

SEQ ID NO: 25569 - DNA, 414 bp, Zea mays
agcttcgtattgtgctgcattattggacgctgagaataacaattgaagagcatatttgagttgttcacctctaggtgcaatgaagaggatccctgcgcctgcccctgcagcttcaacgagccatcgaaatacattcgccatacttctgcagtttctgggttatctagcacttgttgctcggtccattctgatacgaagtcaactagtgcttgagtcttgattgcagtatgaggtcgaaactcaatgtcatgagctcccagctcacaggcccacttggctattcttccgatggcttctttattgtggagaatatcccctattggaaatctggtgactactatgactttgtggtcgtcgaagtattgacggagcttttgtgcagttagaagtactgcatacaatagtttctgaact

SEQ ID NO: 25570 - DNA, 436 bp, Zea mays
  unsure (1)..(436): unsure at all n locations
agcttgttacattattacttaatggtcatgtgttgtccgaaggacacacttgaggtcatcatatagatgcaccaaagaaccatataaagccttcaatgtccatacaatctctgtaatggaccacactcgttcctttgaaacaattcanagaacttaaccaattcagatcagattttaagataagagggacttaaaatctcattcccaatgatactcatcaagtatccatcttatgggaaaaacatgaccaatagaattgtccataacttttcatttcatcccaataatggaattaccaattcagtcttacccagcctggtaagtgtcatcacatgaaaagttataacatatgcaacactctgtatgggaggatgtatgtagaatacagtccataagatatgtttctgagaaacatatgcaatatccatcactatca

SEQ ID NO: 25571 - DNA, 442 bp, Zea mays
agcttctggatgccgaagatccaaaaaacaccttccctgagctcgttggcaagaaacgattaaaataatcgtcggacgtgcgacccatcttgcaccgattacactcttgccagcgattcaccttctcgagctatgtggcccaccgttcagtgagcgtgggtgactgtttgttcggtgttggagaccttgccgattcaccttcccacctgcagcactatataaacagacgggtaggtgtgaagttaccacggcattcattgctattgtattgttttgctgccaaatttttagtcatagtcgaagcttgatcattacgttcatacaaaatctgcttcggcgcaagtgtaagagcttcggaaaagacaaaatagccaattcaaaaaatttcaagtaaatcataatcaaatggccagagttcgctctactggcagagtcgatcgcg

SEQ ID NO: 25572 - DNA, 386 bp, Zea mays
  unsure (1)..(386): unsure at all n locations
agctttagtcatcacgcgcatcatctncttcaattccagctgagagatacactcatcgtcgttaagcttatgccccttctccttggccatttggttctttggtcctgtcattggtagcgcaaaacagagacaaaaaggcaacaaacaatgtgaaccctacaattatgtctcanggtggtggtggaatacaaattatgaagcgtcttaccccgctcttacaaagttcttaccagcacttcaggtggcaaacggtgaccggtgtgactgtccaacgagcgtgagtgtgattgcaaaggagtacctgttctgctcgagagaaagctggagctctggaaaggctgactaaatatatatatgtggcacacaagtcagtaacagatagcaat

SEQ ID NO: 25573 - DNA, 362 bp, Zea mays
  unsure (1)..(362): unsure at all n locations
agcttggatgcgtctattggttgtcgagttggngtagcctcctncttcttttcctccgtcgccttgaatgcgacgggttgagctccggatgtggtggggtcatcaagcttcgtgatctttctccagcctttcatcatgcactcaaaactaacaaaatgcccgataacttcctcgggggtcatctttgtatatcgacgattaccacgaattaattgaacttgagttgggttaaggaaaatgagagatcttagaataaccttaaccatttcgtggtcgtcccactttacgctcccgaggttgcgcacttggttcaccaaggtcttgagccgcgtgtacatgtgttgtggctcttcttctttgag

SEQ ID NO: 25574 - DNA, 449 bp, Zea mays
  unsure (1)..(449): unsure at all n locations
tgcaagctgccaatatagtttgtaattntacccccgttctcttgcttcttgtactccttctagtgtggaaatattggaatatgttgcctgagtatgatcccaccctctgatgcaaactttgcggcctgaatagggggttctggccttcgctttccatcataaatttggattggaatcttagtgcctaaccctctgctcaaggattcaagttgtttgcccatacttctttaccttggtaccaattctagttattggattgagtaaaaagcaatttagtgtcaaatctaaaaaataattgtacatatacttacaacttgaattacttatgcaggttcactagtctaggataaactaataaatntattgaataacaatcgaatganaattacatatataaataatcacttgccttcatttgcaatgtggtcgctgatgtcagcttgtatggg

SEQ ID NO: 25575 - DNA, 428 bp, Zea mays
  unsure (1)..(428): unsure at all n locations
agcttgcggatgctcaaaaatcatctattgtgcatgaagttgaggtggtcactaaggatgttggagtcacttgtgacttacttgatagtcttacaagtgaaccactacctactaactctatttgtgataaatgcaaaattcctctcaatgataatattgctcttgatgaatcaaaaattattgttgagaatgaagtgttagtggatagaataagtactctaactcatgacctagaaaaggcatatggtggtaagaagaatttggatttcatattgngaagtcaacgatgctctcttaaccgtgaaggtcttggatatgttcccaagaaaggaaagaatgctnttgtaaagcanaagacattgtttgtgaaagaatgtgacaaagtgtgtcacaagtgtcacanaaagggacatgttaagaaaaaatgt

SEQ ID NO: 25576 - DNA, 419 bp, Zea mays
  unsure (1)..(419): unsure at all n locations
atcttataaaaatctggtatgaatctgcgataatatccagctagtccaagaaaactccggacttggtgaacagtggttgggggtttccactccagaatatctttgaccttgctaggatctaccgcaattcctttagccgataacacgtgccccaaaaattgaatttcttccagccagaacgcgcacttactgaacttggcatatagctgatgttcccttaggcgcgtcaatacaatccgtagatgctgagcatgctcctcttcattnttagagtatatcaaaatgtcgtcgatgaagaccaccacgaacttgtccaactcgggcatgaataccgagttcatcanataggtgaagtgggcaggagcatttgtgagcccgaaagacattaccaagtattcaaacaatccataccgcgtagt

SEQ ID NO: 25577 - DNA, 418 bp, Zea mays
gagctctgatctggtggatgcgaatcaatggagacggatgcttgctgtcgtgacaaaggagatctccatgtacggtgtacaggtgtaccttgcgaggatgacaagatctgtaccaacatgcctgctcttgacagcatattgagagcgcatcgatccctcctgttccttatgacaaccgacgggccggtggagctactacacatgaatctattcggcccaaatgcttgcatcaacgtctgagggaataagtatcgtcttgccataatagaggaacactctatcttgactaaggtattatcttggtatgaaaactcagctactgctgatggcttccaaggattcttgacacgagcttgtatctagttagagtgaagaatacacttctccgacgcgacactggacggagttataaactctc

SEQ ID NO: 25578 - DNA, 194 bp, Zea mays
agcttggctaaggtgaaatggtgctcatcatcatgagctctctcctaatactcccacataagaagatgagcgactacatattcctctcctgaagggagtgctacaaatgtcgtgagcccggtcattttatcgctaaatgttctatgtcgagcgaaagatgacaagtgtgatcacgataccgggactaagaacgc

SEQ ID NO: 25579 - DNA, 299 bp, Zea mays
cgagctctgttctgctgactgcgtaataatcgagacgcgtgcgttctgtcgtgacagagtgcctctgctgcatgtgttacggtaactcgcaggataccacctattctatctttgtcctcctatacgaactgttgtgcatgtctcattgaaaataagcgggagtatcacgatttgagactagatgaccactgcttatgatgcttgctcacacgtctgagtttatagtccgacaataatcttccaagatgcacacttgacttacagataattaataatttgccttagactctcatctagcg

SEQ ID NO: 25580 - DNA, 249 bp, Zea mays
gactgcctctacgtcatgggcgtataggctgaccttacaacgattaaaactcgatgccaatcgtctgcttgtatcagctaatgagactgattgatccatcgtactgcattgtgtcataagtggaaatattatgagctgagataagatgttgactgacaaagatgctagctcccatgtatgaggagatagtgcactgttatccttaagagagtcacacttgactttgattgacttaaaatcttgatatag

SEQ ID NO: 25581 - DNA, 433 bp, Zea mays
  unsure (1)..(433): unsure at all n locations
agcttcttaagggagaacacattttaggattaacaaatgttcattntgagaaagacaggatctgtagcgcatgccangcaggaaagcaagttggagctcatcatccacacaagaacataatgacgaccgacaggccactggagctcctacacatggatctattcggcccgatcgcttacataagcatcggcgggagtaagtactgtctagttattgtggatgattattctcgcttcacttgggtattctttttacaggaaaaatctcaaacccaagagaccttaaagggattcttgagacgggctcaaaataagttcgggttaaggatcaagaaaataagaagcgacaacgggacggagttcaagaactctcaaatngaaagctttcttgaggaagagggcatcaagcatgagttctcttctcctacacacct

SEQ ID NO: 25582 - DNA, 422 bp, Zea mays
  unsure (1)..(422): unsure at all n locations
agcttgtattaaatacatgaaaccttgggaaattcatatcttataatctataactccaaatttaatgattaatgttactataatcttattttaatgtgtaaactattattatgtattttatttacatgtttggtgtgatgttaatttctcctttatattatgtatgtttgtattgatgcgagtagatgagcaagctacagaggatccagggcctcagctggtagagactgctgagcangagctcgtggaaggcaagttgtgcccttgatcacttcctttntacctagtcatgttcttattaatcataatgatctgcataggttaattntgatggcatccaatangttaccccagttntggctatctttataccttngtttaccactgaatatttttgggtagtgtatgctaaagctttatgt

SEQ ID NO: 25583 - DNA, 400 bp, Zea mays
  unsure (1)..(400): unsure at all n locations
tcgcctattcacccccctctagacgactttttatgtgtcaaactagtcactaagggtttctagctaggtattcctttagggttagtattaagtaattaaacctatgaagctagttattgggtttctggtcaaacagtattcaaactatctcaaacttcactcaggggctctaatcatcatattaagcctacccaaaaagntttatgaattttggaattattaaactatttctaaaattctaaaaggcttggcttaagtacctttaaatgctaccatagttccaggtttgggaaaaaatcttggaattattttataaatactacttgattttagaaatctagcaaaattggtctcatgactttaccaattatctactagttcctatgaatttccaagatga

SEQ ID NO: 25584 - DNA, 405 bp, Zea mays
  unsure (1)..(405): unsure at all n locations
tcttcgctgnaaacaggagatatattgagcactgctctttcaagaaggtcaaccgaaggtgcttttattggttcaaggaaaacttccgaaggtaatggcagcccctgtgccgctgacttggctaatagatcagcatgttcattttctcctcgtggaatattcttaacagagaatccttccaaggaggcttcaagtcttcgtactgtatccagatatttttcaagcttcggatctcttgctttgcaactttgtcaacatggccagaaataacttggngaatcagtttgaggaccgcccttcttatccccattgctttcaacttncgaaggcccaaaagcaaagcttcatattcagcaatattatttgtacaactaaaatcaagtttcactgcgtagcatgttctaa

SEQ ID NO: 25585 - DNA, 319 bp, Zea mays
  unsure (1)..(319): unsure at all n locations
tttttggcaaatcaacataagaaaggttgccgtctaatacacccttaaaagctagtgaaccatcacttcttttaaagacagacacctcttcatttggaaatagacagttatatcccatattgcataattgactaacagatagcaaattatatccaagagactctactaaaaacacattagagatagagtgctcatttgagattgcagatttacctaacccttttaccttgccttgattcccatcaccgaatattattgaatcttgggaatctnttgttttgacgtaagaggtgaacatcttcttctcccccgtcatatg

SEQ ID NO: 25586 - DNA, 426 bp, Zea mays
agcttcgtcatctgaaagaaaaatgctctgaataatatacatgatctcagttctccaatcttcgctataaacatgagatatattgagcactgctctttcaaaaaggtcaaccgaaggtgcttttattgattcaaagaatacttccgaaggttagggcagcccctgtaacacccgggctttaaggaacaaagccgggtgcatctcatacatgcgccaaagaagacaacatatataataacagagtgtatagagataaatgtcacaataaagtatttattacatagcggaagacttattacaaaataaaagaataaatataaaacaaactaaggatcgttggcgccaatgtcaactgagaaacaccacctagatcagatcatactccttgctacttggctccacttgaaccacctgttcttctcctgt

SEQ ID NO: 25587 - DNA, 374 bp, Zea mays
  unsure (1)..(374): unsure at all n locations
ttatccatttgatacaccttcagagtcgtctcgtataatgttatcttcgctggaatagacgcncacgttggcgaagctagcctttatcttctccacgcagcccacggatttttcgaagcatctttctttggatgcgcgaagntcttcaactgttttttctaaatagttcttctaatattcactaatatctcgcgtggcctctgcgagaccgcattcttctttggcttcggccagctgttttcgaaggtcttcgatctcattcttttgaatntcagcttgggctttgaaactagcttcatcttctttcactttgtttaccaacgaaatcaagaatttgtctctctcaagaccttcgnttcttagttcaattacct

SEQ ID NO: 25588 - DNA, 367 bp, Zea mays
accgcagcatgaagcttggatacagctgaaatgtcgtacctttttattccctcctaaaagtcctcagctcttgtattctagaattataagaatgcatcaagaacactctataacttgtcgagaagccatgtcacactgttatcagtcatgaataagctgcgcatcttaaacgaatgaatgactggaactataagcccatctggaataaaggtgcttcgatgtcgatgcctatctaagctgaggtacctgcctcaattatttcaaacacactggtcttaactgacaataggcttaattgaggagggggacttgtttacaggacttattcaatgcacatcttttgtcaccttctttcacaaacactggg

SEQ ID NO: 25589 - DNA, 487 bp, Zea mays
  unsure (1)..(487): unsure at all n locations
cttatacgcaatagcttcggcactgctattgagaggatctgctctatgtgtttctctctttaggatcctcggctatgaagcataccgccaacagtagcccttcgcggtgctagatctttnttcgtaacgagcttgatccgtgataaaatcttttacgcttcgggatgccgaagatccgaaaaacaccttccctgagctcgttggcgaganatgattaaaataatccatgcgcgaggtggccccatcttgcagcagttacgcgcaccctggtgattcaccttctcggactctgtggcccaccgttctgtgaatgcaggcggatgtttgtccggtgcggaagaccttgacgattcacctttccacctgtggcactatataaacagacgagtacgtgtgaagcaccacaacattcattgctattgcgctgttttgctggcaaatattgactaaagccgaagcttgcttactgcatcctcatctgaagcta

SEQ ID NO: 25590 - DNA, 341 bp, Zea mays
aactcaaagagtggatattagttcaccggggggtggcaccaattgttgggactcgttctcatatgctatgaattaagaacaaggcaacacaaaatgttaaatgctagtgcccttcgtcctacgaagcattatttcccttatgatataatgatcttcagactaaggttatgaatgacataccttcatgatcgcagtatatgttaataaaagatgacacatattaaatataagggacaatagttacaatcattatcgactcatttctatattattattatggagagatagaaatgatatcaaattacaaatgtaccttccgcttaaaggaaggtaagagttca

SEQ ID NO: 25591 - DNA, 297 bp, Zea mays
gacctgcagcatgctagcttatttggacgccaagaatggtcttatttcttttctgaacactttgacatccttgatgagcgagcaagattgctgttcactacagaaaattatgtgatcaagagtagtatatataagttggcctgtttgtttgggattataatatactcatgatggaagacttgagggtgcgcaagttgctaaatttctgagctgtgagattactctgacccaaccacacaaactacccggacctacgtgtttccttcccatgatattctatcaaactgttttccaaaa

SEQ ID NO: 25592 - DNA, 377 bp, Zea mays
atattaaagaattataacgaaaattcatgtttcaaggaaaagggaagcaccaaggtttattttattaccagcttgagatgaactcgaactttctcaccatctaagcttcgcccacccttcattcatatttgctttataaatctggttcctatgcttctaacaagactggggatataaatcaaatttgctggtgaaaagctataagtttggctattaacaatctttccatgcgtgcaaccagacttcatgaatgcaacaactgtgccctgaaaaactaagtgggcacaaaaatcgccgtgtcaactatactttataagagcataaattccccctaatgtgctcaatgtcctggcggtcttcatcaaagactgaatttt

SEQ ID NO: 25593 - DNA, 184 bp, Zea mays
tggagcacatggcacgccagaaagcaaggtggcacccatcattcacgcacgaacataatgactacggacaggccactggagctattccacatggatctattccgcccgatagcttacataagcatcggcgggagtaagtattggctaagtactgtggatgactattctctcttcacttgggtat

SEQ ID NO: 25594 - DNA, 424 bp, Zea mays
agctcttctcgaagatatttatagactctttctctgtttccatttttgtatcttggaaccggtgcgacaaccaggctgaaactgtgtgcaagtgatagtccatccatcaatgtaacactcatgtgtttctttctgggactgggcattcttgtgatggattctttttggaaaacctggcaattcatcgtctgacagtggatctgctattagtcgttcttgggaagaccattgactttttatatcaaaaaataaaatccgggtattctgttggtagtttcactttcattagtactgatctggcgacagagtatcccatttactcgcaacgacaacatgtttcaagatcatttatactgttgtgtgcatacttctgtgcctgtacatcagctgttctatttctagtgacgtttctgacttgcaacac

SEQ ID NO: 25595 - DNA, 369 bp, Zea mays
  unsure (1)..(369): unsure at all n locations
atataatgaatatttaatacgtatgactcagaactagtaagttgtttacgcgatacttcacggacatttttgcaaaatgtgctttcttctttctttagcaactaaacacagggggagggggatcgaccattacgcatagcacgggccagggggaggagcgagctcaccatggtggcaagctggccagcctaagcgctgtanggagggggaaggcgcagcggngagccatggccagggccgcatggtctcttgctaaccaccgcacgagagttaggcatgcaatgcaaggggcatgcttgccatgggctagtgcatggaatcgcgaactatggcggtggagatggcgtnggggacttgtgcatctcacac

SEQ ID NO: 25596 - DNA, 386 bp, Zea mays
agcttgagaagatatttccacccggcttctttttccaatgcagcatttgattcttcgtctcccctatgaggcacgattggggggcccgtgcaaggactttggtgctatccaatcgagagatgtctaatgactactcgaaagaaatgtagaaataaatgcaaaatcgaggcattcattgcagaggcatacattctagaggaggtgtcaaacttcacaacaacttattatggtgataaactgccgagcgtgcataatccaacccctcgttacaatgatggcgacaatgaatcgaaccttagcatatttcgaggccaactcggaagcgcaagtggctcgaccacccagacccttacacatgaagagtggtggcatattatgctatatgt

SEQ ID NO: 25597 - DNA, 177 bp, Zea mays
acctggggcatgcaagcttcttaatgctctttctatatgaaacatctcacctatactgaacaggaccaccgaccgtgtagcctcatatggaagatgtgtaaagagatgctacataggattgaagaaacccggtggaaatatttttccaatttgcacaaaagcaccggggcctctttc

SEQ ID NO: 25598 - DNA, 323 bp, Zea mays
  unsure (1)..(323): unsure at all n locations
gctatatgaacattttggttgttaattaaagcaatgtgatcatttatagcatcaacattaacatctctacatctagtacaaatagacacatgatcaacagtagatgtagaggggttgcatacttttaattcttctatcttagcatgtaatatggcattctcatttctagacagganatagaatcattgcaacatctaatcctagccttggaataaactagcatttcagcctaagctaaaatggatcattcattataatcttacaattactacatttattttaagatggaatgagcatggaatgctattttagcaagttcatct

SEQ ID NO: 25599 - DNA, 430 bp, Zea mays
agcttgtgaagattcttcatcccaacatgggctattttgtgtgccagagccaacccatgttagttttagcaattaagcatgtgtcgagttcatctctatcaaaatctactaagtatagctgaccctctaacacacccttaaaggctattgaatcatcacttcttctaaagacagtgacacctacatcagtaaatagacagttgtagcccatttggcataatcgaaaaacggacagcacaatgtaacctaatgaatcaacaagaaaaacattggaaatggaatggtcaagagatatagctattttacccaaacctttgaccaaaccttggtttccatccctgaatgtgatagctcgctggggatctaggtgtctctcgcaggaggagaacatcctcttctcccctatcatgtggtttgtgcacccgctgtc

SEQ ID NO: 25600 - DNA, 354 bp, Zea mays
  unsure (1)..(354): unsure at all n locations
ctcataaagctctgaagaagctgctgcatctacaggagagtctattcttggtaatgggaactcgtcctttggacagaccttgttaagatatgtgaaatcaatgcacattctccatttaccattggccttcttcaccataacaatgttggctagccattctgggtatttcacctctttgatgacaccggcactaagaagtctctttacttcattccgagcacctttagctttatctntagacatcttctgaagcctttggtttcttggcctgaagatggatccacattgagtgaatgtncaataacatctcntgtgacaccacagagatcattggctaaccaagcaaagacatct

SEQ ID NO: 25601 - DNA, 225 bp, Zea mays
  unsure (1)..(225): unsure at all n locations
tgaacaccaaagactgccatttgtgttcccggactgnccggtggtgcaccggacgagtgtcggcgcgccagggtggcttttgcgaacttggttgctatcgggactttcaccgccgagtaaggctataattcaactgactggtcgggggtgcacaccgactggtcctgtgagccaacattctgccaggccaactgtcggccgcgtaatccgcgcgcgacccgtggc

SEQ ID NO: 25602 - DNA, 437 bp, Zea mays
  unsure (1)..(437): unsure at all n locations
tgccagcttctaaagggagaacacattttgggactaacttatgttcattttgagaaagacagggtttgtagcgcatgtcaagcagggaagcaagttggtacacatcatccacacaagaacatcatgacgaccgacaggccgcttgagctactccacatggatttattcggcctgatcgcttacataagcatcggcgggagtaagtattgtcttgtaattgtggatgattattctcacttcacttgggtgttctttttgcaggaaaaatctcaaacccaagagaccttaaagggattcttgagacaagctcaaaatgagttcggataaaggatcaagaaaataagaagcgacaacgggacanagttcaagaactcacaaatagaaggatttcttgaggacaagggcgtcaagcatgagttctcttctccctacacacc

SEQ ID NO: 25603 - DNA, 526 bp, Zea mays
  unsure (1)..(526): unsure at all n locations
tactaagcttgtcacaatacaagcacanaagagagaaggctgctttggtggatcaaccgaagcctatgctcctatgtgaagatatagcagatcaaagggtactgctgggttctcagctatctgatgagcaagagaaaactctgataagatctttgttcaaaaacaaagatgtttttgcttggacagccaatgatctttgtggggtcaatagagatgtcatcgaacattcacttaatgtggatccatctttcagaccaaggaagcatagacttcggaagatgtctgatgacaaagctgaaggtgcccgaaacgaagtaaagaggcttctcagtgctggtgttatcagagaagtaacatatccagaatggctagctaacactgttatggtgaagaaggctaaatgcaaatggagaatgtgtatggacttcacagatctcaacanagcatgcctaaaggatgaattcctattaccgagaatagactcctttgtagatgcaacagcttcatcggagctcatgagtctact

SEQ ID NO: 25604 - DNA, 425 bp, Zea mays
agcttggtgaagttcttcattcctacaagtgctttttcttgtttccacaagcaccccatgctaggcttagcaattaagcatgcatctaaaccgaccatctctttgcaaaatctacctaataaagtttggcggctatgcacccttaaaaggctatgaaccatcactttttctaaagacatacacatttacattcgtgaatatacagtttctttccatattacagagttgactcacagacaacaatattatccaagcgactcaactaataacactttacaaatagagtgctcggatgatacagcatcttttcctacccctttcaccttgccttgattcccgcacccgatatgattgagtcatgcgaatctctgttcttgacgtaggaagagaacatccttcttctccccacgcatgtggcttgtgca

SEQ ID NO: 25605 - DNA, 478 bp, Zea mays
  unsure (1)..(478): unsure at all n locations
tctaaagggagaacacattntaggattaacagatgttcatcttgagttagacaggatttgtagcgcatgccaagcaggaaagcatgttggtgcccatcatccacacaagaacatcatgacgaccgacaggccgcttgagctactccacatggatctattccgcccgattgcttatataagcatcggcgggagtaagtatggtcttggtatagtggatgattattctcgcttcacttgggtgttctttttgcatgaaaaatctcaaacccaagagaccttatagggattcttgagacgagctcaaaacgagttcggcttaaggatcaagagaattagaagcgacaacgggacggagttcaagaactctcacattgaaggctttcttgaggaggagggcatcaagcatgaagttctcttctcctacactccacaacanaatggtgtagtggagaggaagaatagaactctattggacatg

SEQ ID NO: 25606 - DNA, 433 bp, Zea mays
  unsure (1)..(433): unsure at all n locations
agcttaaatacgtcattagcacaactctctctttttctagtcgctttcctgttcattataaaaaacaaattactcaattgcatcacaatctattatcaaaatgacgatgtcattcgtaaatgaaaattaaactcagatttgagtaacagctcttacatatttttcaaatcttgtgtcgtaataggaacattttctgggccatcatgcatgtctgaaatcatatccacaatacagtattgtggtaccctactgtcatgcattgctccaacaaagtctataaattccagatcancgtgtcttgtacagcggaggtgttgcttcttagtttcttgggctacaaaataatgattatgctcaagggttactagttcaatcctgacagatacgacactcttttgcatcatcataagtttttctaaactttatccctgcg

SEQ ID NO: 25607 - DNA, 278 bp, Zea mays
acattaagaggtgtagtgaatgctttgaaatggggcacttgaataggtcatgtccctatattaatggctttgattattaacaaggatgatagactttgttttaaatgctctaagaaaggacacttgcttagatcttgtccccatttaaaacaaaaaggcatagggttagaaaagacagtttttactaaccatgtagcacgcaacaagcaaggaaagaagaaaacttccaaacttgataaacgcctatgctacacatgccgaagaaagggacatcaatg

SEQ ID NO: 25608 - DNA, 427 bp, Zea mays
agcttcggatcacctgtcaagcttcggctcattgtttctcaacttcgtcatcctgtacatatcaaagcggtatgaaaaaagtgcaagtttcaaagagaaggtaaagcaacaggcacaaatttcttaccagcttaagatggcttcgagcttcgtcgcaagccatgtttcgcccgcccttcgtccagatttgcgttatgaatctatttcctatgcttcgagccatgctggggatatcagttaaatctaccggtgataagctgaagtttggtctattaacaattttcccatgcgtgcaaccagatttcatgaaggcaacagctgtgccccaagaagctagcagggcacagaaatcgctgtgtccagctatgacttcgtcaagagcatcaacttcgccctcaatgtgttcgaaggtccctggcaagtattc

SEQ ID NO: 25609 - DNA, 347 bp, Zea mays
  unsure (1)..(347): unsure at all n locations
gttttggagcttcgacttttcggtctattcaacgctgagatggccgaagggaagaaaagtgtggaccccgccctagctggttntttcgaagctatggaatggaccaacattgaaaacattactgatgaaattttagctagactatctggagattcaagtgacaacgagagttttgatatcgagagtgacaacgatgatgccgaagatcggccatggaggccaagtcatgttgtatttggtaaatccactattaagagaggacaaattgaagcaatgaagggtaatatttctgtgacacaacgatagtgagagctggaggagagaatattgttcctctttctgaggtc

SEQ ID NO: 25610 - DNA, 424 bp, Zea mays
  unsure (1)..(424): unsure at all n locations
agcttcagtcttagctatagttgcggtcttattttttcttagttagacagggaagtttgctatatcctgtgcatctatgtttgtcatgatgaactatgtttggtttggatctttgtaatgattgtcaccagagtgtgggtatcccctgcattttggtttatctattatgttaatggagttagttatatagttgggaaaccccttttattccactntcctttctatctgagaagctgtgtggtctgtgttggagatcagtgaagatgctcatctgttcagtgctgttgaagaattctattctcttttcttatgctgcaagatttgccagatcatgtctgatgtgtggttgcattctgcagatgtcagagaacaggcgcataggaggaaggcgtgctcancatgatcgagccgctcaacaggagga

SEQ ID NO: 25611 - DNA, 245 bp, Zea mays
  unsure (1)..(245): unsure at all n locations
tacaccaggcggacacccgctcgcactcgctgcgaggtggaccgcagagaccaaacagttactctgcaaggtgggaacgctacccgctgggaaactgaaatcgttctcgacaacgagctcacggaacggtgtttttagaccttcggcgcccgaagcttaagagactttntttacggatcaagctcgtcacgagnaacgatctagcaccgcgaaaggggctactgttgcgtctatgcttcgtcgcc

SEQ ID NO: 25612 - DNA, 426 bp, Zea mays
agcttacttattaactagaaagaacactgattatgcttgatatttaacattataacataggctacataacaatgtcaaccaagccaatcctaataactagatttttcatataacttcatttaccaaatccacaaattcttgaaatgaaataagtaaaaattcaaaactcatataactcttctaatttctgcatgggtttgccaggacttgtgacttcatgtgttattgcaaggcaagtgaatctttaaattttatttggcaaggaccttatcatacttttcaccacctttgagcagaacggaacaaaatgtcttctcagatgcttcatttctggttagaccttcgaactcctcaatgaaagcaactccgaatgatgggctcctgtgtaatttacaaggtagttgggttggagcaagcttactatgt

SEQ ID NO: 25613 - DNA, 431 bp, Zea mays
  unsure (1)..(431): unsure at all n locations
tctaagggagaatacgtgatatgtgtgactaacgtgcatttctaataagatagaccttgtgcagcttgtcaagcaggtaaacaagtgggaggagcgcatcacagcaagaatgtgatgaccacttcaagacccctggagctgctacatatggacctcttcggacctgtcgcctatctgagcataggagggagtaaagatgggttagttattgttgatgacttttcccgcttcacttgggtattctttttgcaggataagtctganacccaagggaccctcaagcgctctctcaggagagctcataatgagtttgagctcaaggtgaagaagataatgagcgacaacgggtccgaattcaagaaccttcaagtggaggaatttcttgaggaggaanggatcaagcacgagttctccgctccctacacaccaca

SEQ ID NO: 25614 - DNA, 421 bp, Zea mays
  unsure (1)..(421): unsure at all n locations
agctttaccaaatggacgtgaaaagtgttttcctctacggaccaatcaaggaagaggtctatgttgagcaacctcccggctttgaaaatagtgagtaccctaatcatgtttataaactctctaaggcgctttatgggctcaagcaagccccaagagcatggtatgaatgcctaagagattttcttatcactaatggcttcaaagtcggaaaggccgatcctactttatttactaagactcttgacaatgatttgtttgtatgccaaatntatgttgatgatattatatttaggtctactaacgaatctacttgtgaggaatttagtaggatcatgacacagaaattcgagatgtctatgatgggggagttgaaatacttcttatgatttcaagtgaagcaactccaagagggcaccttcat

SEQ ID NO: 25615 - DNA, 244 bp, Zea mays
  unsure (1)..(244): unsure at all n locations
tgataccaatttgtagaatatgagtggtgtacctgtagcatttcaacatattaattgatgtatcatntactatggagtgataaagacgctatgtgccgtgcttaaatacacattttataccatgtagggttgcttaagtgtatgaattgaanacaagcagtcctaccatgtgatttacctagtatgcatgcgtntaagaaaaagtaagtacanattgaatactacgcatgagaggtaaactaga

SEQ ID NO: 25616 - DNA, 436 bp, Zea mays
agcttatgaaattatccacaacttattttaccttcccacagtttaattctattgataaaattgcctatctcttaagagaacagattctacacagaattatgagactgaaaaactgctacaatcaaactgcaataactttctgttcttatgtccgattgaggtgttcttcgcggccaccgaaaggtctagacacatatatagacattttagtttttgaggccactaagaccacggaaaactggcttgaacagaaactatcgaatctaccattctgtagaaattaaattcgagatcaaaacctaaccccacacataatccaacctctaatccttcaatctacatgatccacaacctccaaaagcacataattatagggaggataaaggaacccattctcacctatgggtttccccaagataaatctgcaagagatggg

SEQ ID NO: 25617 - DNA, 479 bp, Zea mays
  unsure (1)..(479): unsure at all n locations
tcatgtgtngatgctactggtgaagtttctgatagtcatctagagagagataaataagtgatgcttgaaaaanaacaacacaaacaaaatgtgatccaaattaagtattgtacagaactaaatcaagttagagtgagaaggagaatangttctttcacttgatagctctcacaagattgtgggttaacttaagcaatatcacaagtgaagaactaggaagaatcaatcgcaaagaatcaagcacacaagacacgacgatntttttctcgtggtttggtcaagcctcaaatgcttgcatattccacgttgtggtgtcccgaccgacaaggattgcactcaacccctcttaagtgatccaatgatcaacttgagtgccacgatcttccttatcttaatatcagtctcctcgcaaggatctccatanngtggagtctcttgcagccgtacacatattgatgtngagtataactctagagtga

SEQ ID NO: 25618 - DNA, 432 bp, Zea mays
  unsure (1)..(432): unsure at all n locations
agcttgttaaccaggtacctcatcactactcttattgttatcatcctcccatctctgttgcccgccggccggcaacatcaatgtgcgtggcacgcatgaatgcatgatcaaacaccatgcatgcattgtatagattaaccagagagaggaaggataatagaatgtaataattatagctaacacacggaggaattaatggtagtatgtggatggtgagggagccaggcaggtactgacctaaccctcaagtagctcctggggatgtgtggcaacaacggatccctcctccacggaagaagacgatcgagagcgtgcggcaacaacagcgtgagctacccacccacattgaccagacagaaaagaacagaacaacatagtaggtggcaggacaccgacacgtccgtcctactcactggttcggngccgcccgga

SEQ ID NO: 25619 - DNA, 508 bp, Zea mays
tgcaaattgtgctaccgctcaacttaatgattataatgtcactcatttattgatattaatgttccaaaattgaagttgacaattatgacattaacccgatggttaagataacattatttcaaattaattgaaacatggagtgaccacccaggataacagtgcaaccacgagtgctatcatggctctggctttggtaattagctttatatgcttagtgcctggcaaccttacctgaaatatgggcaagagggggagcggtaggtgctggcagcccacgttaacatggggacgtattcttgtctaaggtacctcacccaggaggccaccaccatcgtctttagaaactttagcaggttgcttcgtattaaggtattttgtgaaagcctcataatggatccctagccattcacctcggcagtgtttaagggtccgatcaacccgggctagatgggatacatggctagtgggtaaagttgtaccacctctgcagagtgtaaaactgatatat

SEQ ID NO: 25620 - DNA, 277 bp, Zea mays
atgcaagcttgtttcctccgcttgagtttgaaatcttttattctggctgttcgcagagctcgagtccgcccttgatgagtccgccaaggcgcttgccgaggcgcttgccggggcggccgaacagaaggagaccgaccaagcggccatgtccgatgccgtcttggacttctgcccggtattctgctttggcgacgtaccctcagggagctcccctcaaagtcacctgcacgccttgagcgaccatgtgcgcggcagactccgcgaggcgctacaccac

SEQ ID NO: 25621 - DNA, 278 bp, Zea mays
  unsure (1)..(278): unsure at all n locations
cgcccatcatccacacaataacataatgacaacggacaggacactggaactacttcacatggatctattcggctcaatagcttacataaacatcggcgggagtaagtactgtctagtaattgtggatgactattctcgcttcacttgggtattctttntgcanggaaaatcacanacccaagagactttgaagggattctcgagacgagctcaaaatgagttcgaatcgatgatcaaaaagataagaagcgacaacgggaacggagtcaagaactcac

SEQ ID NO: 25622 - DNA, 289 bp, Zea mays
  unsure (1)..(289): unsure at all n locations
agcttgtgcgncagcctgaacagtacatttttttattagctggagcctaatgcaagacttgtggctcgttctcaacaaaagtctgatttgataaatctattgacaagcctctaagtaaaatggccggtatttatcatcctatgcatgcgacgcttaagaaatatcttttactcacggtgagccctgcgtgaaaaattcacccgctgtaccgaataccgaccgaaaaccttcccgcatattgagggggacattgacgagctacatgaaatacttgctgagcatagcgact

SEQ ID NO: 25623 - DNA, 424 bp, Zea mays
  unsure (1)..(424): unsure at all n locations
agctntcgccggcaactttcaggcacgncgttttctctgngaactcctgggatctccgaagctgccgccagcagccgggagagtctctcccggactacatctggcgattctcgaagcagcgcaccgaggtgcccaacgtcaccgactcggatgtcatcggcgcgttcctcgccggcaccacctgtcacgacctggtgagcaagctgggtcgcaagacccccaccagggcgagcgagctgatggacatcgccaccaagttcgcctctggccaggaggcggttgaggccatcttccggaaggacaagcagccccagggccgccagccggaagatgtccccgaggcgttcactcagcgcggcaccaagaagaatggcaagaagaagtcgcaagcgaaatgcgacgccgccgacgcggaccttgtcgc

SEQ ID NO: 25624 - DNA, 380 bp, Zea mays
  unsure (1)..(380): unsure at all n locations
actcagcttctaagggagagcacatcttatgactaaccaatggtcattttgagaaagacatgatttgtagcgcatgccangcaggaaagcaagttggagcccatcattcacacaagaacatcatgacgaccgacaagccgcttgagctactccacatggatctattctgcccgattgcttacataagcatcggcgggagtaagtattggcttgtaatagtggatgattattctcgcttcacttgggtattctttttacaggaaaaatctcaaacccaagagaccttaaagggattcttgagacgagctcanaatgagttcggcttaaggatcaagaaaataagaagcgacaacgggacggagttcaagaactctcaattt

SEQ ID NO: 25625 - DNA, 151 bp, Zea mays
agcttgtcttctggagtattgaacctattttttgcaaatgttcatggatgaagatgacattgtacaaatctttatgtggctgatatctagggccgagcatcttcgagaatagagttcgcgactacacaattcattgggggggggggacata

SEQ ID NO: 25626 - DNA, 383 bp, Zea mays
  unsure (1)..(383): unsure at all n locations
ctcagcttacgggctactggcggagctagccgaagcactggcttgtgttgtgatggctggagtgggctggccacggtggccgaagctctggcggcaatggcgggcaagattgagctcgccggagctaatgaaaagtggctggccggtgagggtgagtgccgcgcgaanggaggtgcgcccggcgaggctttatangcgcgggcgggcatggccgatggcgtgggcgcgcggcggacttgaccggacgccggggtgagcgcgcgcggnnggtgggcgagctctggcgtgccgaccagggtcgaacacgtgtgcccgtgcgttctgcccaagttctggcacgtgtggtcgctcatccgagcctgctctcgccttggtcagtgcac

SEQ ID NO: 25627 - DNA, 429 bp, Zea mays
  unsure (1)..(429): unsure at all n locations
agcttgttntaagttgtgcttagtaatctgggtttttgcttgtcgaaggtgatgctttggggacttagatgtgacagtaactaactacctttgcccctccccctctgttttttccagtggaattgacctggacactgtgaatataatacagcgtgatgcactattgctctttcgaactctctgcaaggttggttgcttgagtaatgttactttagtgggagctatgagaaagtagcaattatatacttcctgcgttttgtcatccttttagatgagcatgaaagaagaaagtgatgaggttgctaccaagacaaggctgctatcacttgaactgctccaggttagcttacttctttggggttgctaatggtcatntttggttgttttgatgttatctggagtcattctctttacggattgctagaggga

SEQ ID NO: 25628 - DNA, 193 bp, Zea mays
  unsure (1)..(193): unsure at all n locations
atccgagcgcgagttacttatcgcagaaggtgatgagtgaggtatccgtatcccggaggcgtaggaagtcctcggctcggtcagccttggctgcttacgtgtactccgtcngttccaggatccgctttccgaagtagtcaagaggcacgaaagaaatcctgctaaaaagagatcctttttcgagggaaaattc

SEQ ID NO: 25629 - DNA, 391 bp, Zea mays
agctttaatatgtttcttgtcattttatgttgtctcaagatgcacaaaataaaatcccaacatgatgcactttattttattttagtatcatttgttttgattaatccctcttaattacatgtatgctcttttcatgatgtaaatatgacacataaaataaggagacctctctatattcttggtaatcaaatttgagtattacagcttcgcatctggaaccaccttggagaggttctccaggtcggcgatgagggtcttggattcggcgagggctcttggcgacttgaaagtctcctagagggggggtgaatatggcgaaactgatatttacaaaggtaatcacaactacaaaccgggttagagttagaaatataatcaagtccgcgagaga

SEQ ID NO: 25630 - DNA, 394 bp, Zea mays
  unsure (1)..(394): unsure at all n locations
gaacttcaagtgcaacttgataatttcaagaacatcaatgcctcatctttagtgattgaatctaagtctagctcctcaaataatactttttgcaaacattgtgccaaatatcatgcttcttgttgtctaactaaccatgcaaggaagaatagcccacaggtgaaggtcaaagaaatattgaaaagatgctctagcaatgatgggttaaagaaagttgaacccaagtacaagtccctaaagcccaacaatggaagaagggggcttgggttcaactcatccaaagaaaaccctagcacagtgcataaggggtggagatcccccaagttcatagagggaaccaccctatatgatgccttggngaggattcactcctcanatgacaagtcaactcaag

SEQ ID NO: 25631 - DNA, 425 bp, Zea mays
agcttttactctagcgagacctttttttatttttttttaaccatgggaagatcattatcgtatgtgacattctatgcatatttacttcatttgctctcttggatggagtactgtttgatctctaatttgaatggatggatgtatgtatgcttgcaatcgcatagaaaatgatccggttgaagagcccgaagaactcgtatgagaagccccttgacatcaatcggttggtggaagcaagtgtcctttgacctatctctgtcctattcattctttaattcacctcccgcattacaacattatacctatagattgactagcttttgttatccatgtccctgtttacctatttgcgctggattatatttgttaagcttatgctactgctcaactataatcaatgaacatgatgagattatctatgatcc

SEQ ID NO: 25632 - DNA, 425 bp, Zea mays
  unsure (1)..(425): unsure at all n locations
agcttctccaccatgtcgctgctagccaagttgttgcatctacctccatcaatgatcaaacgacatgaacgctccttaatgacacactntgtttgaaacaacgtatgtcgctgattctgctctgccttctccatttgtgcactaagcacacgctgtacaatgaggctctcataatgctctgcatcatctgcaccaatctgttcttcgggtggttccttagtgcctacatcatcagccgcaagcaaagcaagtgtagcttcatccaaatcactagcagaggaatacccaccatcgtcttttaccaccaaaacacgctgattaggacaataacgctgcacgtgtccatagcccttgcatcgataacacagaacatctcttgttctacctgtggaagctactgaagaggcactacctgcgggtttctg

SEQ ID NO: 25633 - DNA, 396 bp, Zea mays
  unsure (1)..(396): unsure at all n locations
gctatcaagtctactttcatatggatccggaattatagtcatatctgttctgatgccgccgttatcattcgtttcttaccgagacattatctgccttttctgcccatggtgctgtgtcaccctatattggcccaatgggtcgtgtatcaagttacgtccattacggacgcatcctagggttgcagcacgaccccaatacccttgtggtcgtcctcccatgtttataaaccccctatcctgcaccaagaacagcgggttttgtttagatcacagttagctctcgctactcgcttgcaagcgcgcgtgctagttcagccgcccgtcttcttgtcttcggaaccccaccatattgtagttngatctttacacctacatttagatctggtaattcagtac

SEQ ID NO: 25634 - DNA, 431 bp, Zea mays
agcttgtgcacgcctacggtactctcttaatgtagttttatagactaagtgtgtgcccgtgcgttgcgacggaagttaaaaattagtataaaatatagatacaaaacgacaaacatcaatatgatagttaggtgcccgtgcgtcgctacgatttcattgagatcgtcaagtcacccgcaacaagatgatcatgtattcctagatatggttgcttcatatcacttcgtttaccaatgcaatgaaatttctagccatcctcatcaacatacccattcatatgaactccataaagtaaataaattaagagcaggaaagggcaacttaagcaagtgtcaacttttgtgctaaacttttgatgatttatgtgtaatagccaacaattggtgtggcctttaattatgaaattatgcgtaatgggaaaacacttcatg

SEQ ID NO: 25635 - DNA, 297 bp, Zea mays
  unsure (1)..(297): unsure at all n locations
gaagatagtgagtatccacaccatgtctataaactctctaaggcactttatgggctcaagcaagccccaagagcatggtatgaatgccttagagatttccttatcgctaatggcttcaaagttggaaaggccgatcctactttattcaccaaaactcttgaaaatgacctggttgtatgccaaatttatgttgatgatattatatttgggtctactaacgagtctacatgtgaaagaattagtaggatcatgacacanaagttcgagatgtctatgatgggggagttgaagtatttc

SEQ ID NO: 25636 - DNA, 437 bp, Zea mays
tgcagcatgcaagctggtgaaaagaatacaacggacttatgtttttcgatcacgaagctatgtgcagaaaagcttcggcgtgacaacgtaaagggaaccgacttaaagatgtaaagccaaattataccttggagaattaccacagagttattgatgaaaacaataggcattaatgtaattttacatgggctgcgtcccgtgcctataaatagatgaacagtactcccgtactgttcacgctgacttgacattggcatcacgcttgtacccttactttccttcaagccgaaggtacatttgtaatttgctgtcgttatataagtgaaataaataaaaatgagctaatgctcatagtaatcatattatgttatgtatgtaccttgcttacctttcattacgattatgaaggtgcgaccttcataaccttcgtccgaaat

SEQ ID NO: 25637 - DNA, 436 bp, Zea mays
agcttctaagtgtcgaactcttacccggcccgtatcgtacgtcgtagtcgtactactacgtcactacatgcgcacctgatcgacctgctcactatacatgtccattcgtgcgcgctaggccggcacggcacgagcacggcaaagcacgacacgatcttgaacgtgccgggcacggcccgaatcaattccgtgccgtgccgtgctagcccgcgggctgaaaggctggcccaagcacggcacgaaagggacacaaacgggccgtgtcgtgcctgtagcccggtcagcccatagggccgggctggcccgaagcatgattcaaataaaatcacagaaattcacacagatattcacagaaattcagagacaatcacagatattcacagaaattcacaattcacatacaacccagagacaatcacagatcacagatattcac

SEQ ID NO: 25638 - DNA, 350 bp, Zea mays
  unsure (1)..(350): unsure at all n locations
tttctgtcaagaatattccaagaggtgaaaatgagcatgcagatctgctagccaaatcagcagctcaggggctccctctaccttcggaattattntttgaaacaacaaaggcaccttcggttgaactcatggagagagcagttcttgctatttctccagtacgtaatgaagaatggaggactganattatatctttccttcagggaattgtctttcggatgacgaagcttantataagagtatggaagcaaggacangatcgtatgtgataatagaanggggaatatataaacatggagtatgttctccactcctcaagtgtttatcaagagctgaaagtattgaataat

SEQ ID NO: 25639 - DNA, 289 bp, Zea mays
cctcctccaaattgaaatggaatgaccctaaaaaaaaatgaaagctgcgccaatggcacacgcatcctcgggcaatcttttctcgttttaatccaaatggttttccttttttaaccgaagttattcataaatatttaacttactttattaaatttaatattcacaaaattatataactttaaaatattttttacaattcttattgtttataaacaaatcactctccacaattaatcaagattggattaaaatcaacccacccaatttattgtcgttgaatgctaacact

SEQ ID NO: 25640 - DNA, 462 bp, Zea mays
  unsure (1)..(462): unsure at all n locations
atgtgtctcttcngggatgtagctgtacaccttgttgtactggtcacaatcataagtggcagaagattcatcttgagtaccatcgatctcgatatcctcatcggtatcctcatctgatatttttttgaaaacaatgagtaagacatgaatatttacataagccttgctaggataataaaaagtgaaaagagtacattgcgcagcgaataggtatccctcgttctcatcatcatcgtcttcgaatatgacaccctcatcgtcatcacctatatggttccaagatgatgtaagcacatgtttagtcagactacatactatcgatgtcttgcaagatccatataaacttggatagtaattaccattgttggtgatcttcataggcgtatggcgttgtgccaatcgtccccttaacaacgcaccgtagtatcctaatcgaagacccaccttcttgatatgctgatc

SEQ ID NO: 25641 - DNA, 426 bp, Zea mays
agctttgggttagcttgtcgctaaagctttttttatcataagccacccgtgcctatataatcatgagtcatgtgggcttcaaaaggagcgaaaaggaatcaaaagtcgctgatgaagccatcaaaaggaacgaaaaggaagcacatgatgctttagaagaggccaaaatggctgaataagcttgcgagcgggctaagcttataagtacatctattggttttagcttcgtaatctgtttagcttcggaactaacaaacatactttggtgcagttaaactatctccacctccggagccatatgatccaaaggtcgacccgttcctaaaggaagcactcgagactattagatatgctaatgaagttgttgacgaagtttgcaacaagctgttaaccgaagctgacgagaaggtcctgaatgaagactga

SEQ ID NO: 25642 - DNA, 442 bp, Zea mays
  unsure (1)..(442): unsure at all n locations
ctacatgagcttacaaagaaagatgtgccggttgcttggagtgattcgcacgaggaagcgttcagcactttgaaagataagttaacccaagcttccctattgcaattgcctgattttaataaagtgtttgagcttgaatgcgatgctagcggtattgggctaggtgctgttttgttacaagaaggaaaaccagttgcttattttagtgaaaaattaagcggtgctagtctgaaatattctacttatgataaggagctntacgctntagtgcgcactttgcatacatggcagcactatctntggcatcgtgagttcataattcattctaatcatgaggctnntaaacatattcgtacccaaacaaatctgaaccgtcgcatgctaatgggagaatcattgagtggttccttacttatttacacaagaacgggatgacaatgta

SEQ ID NO: 25643 - DNA, 230 bp, Zea mays
atgttttttcccccgtccattacgaccttggtgagcctgacattccccacaacggggtcgaccaccaacgggtattttccccggctccgcacatggtccgggtggtcggcctggtccaaaagtatgggcttgtccgaccaatctaagtaaactggtgcccgccacttcaccgagcagacctcccggcgctcttgcttgcggtgcccaaccgatgtattccccgcatgccc

SEQ ID NO: 25644 - DNA, 409 bp, Zea mays
  unsure (1)..(409): unsure at all n locations
tcatgtgagatcctgagggtgtcctagatctgcttggcattgtccaagccgctcaccttatgatactcgtccctgcacaaagaggctaacaacacagtagtagcttgtgcatttctatgaatctgttcattaataaacataggactatccgagctatcaaatttcattccactttccacaatctcccatatgctcggatggagagagaacaagtgactacgcattntgtgactccaaaatccgtagtcctccccatcaaagtgtggaggtttgccaagagggatggaaagcaaatgtgcatttgagctatgtggaatacgagagtaatcgaaagaaaagttcgaattaaccgtctttctttttgtgtagtcgttgtcattgtttgccttttgggaggaagtggactcat

SEQ ID NO: 25645 - DNA, 418 bp, Zea mays
  unsure (1)..(418): unsure at all n locations
ttgtataattgtgtaataaagaagtgaccttcacatcacccctgccttgtaccagaaataaggaaattaaaatgtgacacatttccttttccgttacttaccctaagacttttaatctcgggacgagattcttttatggggggaaggatgtaacacccctggtgttactgtaactaatacttgagcatggcatcataagcattggcattgcatatggttgatacacctagagtgcattcactangcaaaaattcaaacaagttgtattgttaagtgttttgcaaatagaaccctggataggaaacttaaccctaaatagggattaaaggggtaagacctaacccaagttgagaaaacctaaagactttatggaaatagttataatatatccccaaaataaagttgaatcacatttgta

SEQ ID NO: 25646 - DNA, 424 bp, Zea mays
  unsure (1)..(424): unsure at all n locations
aactgcaacaagcttctcaagtgatggttcaatatggatntctgaaattcagatttctgaatttcagcccttgagccaaagaccgagcgcgttcaccttgatccctggctcaaatcctaatgacccttgttgggggccttcgccttccgaaggtcctcaaaaacatgatttaacaatgcttttggagtataatacatgaacaagtaccttcggactcggatcagaaccacagtgtatgaagcacaaagaatacgaaggttgacacagcgccaaagctacgcgcaaaggagcttcggcatgacaacagaaaagggaaccgacttataagggaaaaggccatttagacctcgatggatcactatagagtcattatgaaatgtaaagggcatgggtgtattgtacatgggctgcgtcacgtgcctat

SEQ ID NO: 25647 - DNA, 164 bp, Zea mays
accccttttttataatggttctaaaacgggggtccaataggcttatcctgaaaaaagaaaaagatcagtgacagtcggatctctcccactccgacacatttatatacttttatttatacgctcctggaaacaagtatgtcccagtctttttgctattatcagcg

SEQ ID NO: 25648 - DNA, 506 bp, Zea mays
  unsure (1)..(506): unsure at all n locations
actcagcttaatgcnaaattctccccctttgtcataaatctccaaaattgtattaaataatataaagggtagaaattatgattaatcaagatttgaacacactatcatgaaaagggtccttatatggcacaaaggtaatggagaagtgccataagtgatgtacctttgtgttttaccttttcaaaggggtgttccacacttgtgttgtatttaaagatcattttgcaatctcttgttggcataattgtgacatangtccaagatatcagctgaatgttgtcatactaattgaaaaataaatcttgatacctagagtctagatgtcacctagcattntcttatcataacaagaggcatcatgaaaattgcacaagtatggattatacaactagtgatcatgtatgaaaaatatcaatttgagaacaccaacttgatacaattgatagataagcagatcactaatagcatattacactacagtcttctcaagtttaatgacacatata

SEQ ID NO: 25649 - DNA, 382 bp, Zea mays
  unsure (1)..(382): unsure at all n locations
agcttaatgcccctaagaaattgtctaatttttttaagggtaaagctcccatggttcaagataacgagggttacattttataccctaccggttatcccgaacacaaaattaagagaattcattctaggaagtctcactctggctcttatcatgcttttatgtataaagagtggaggcattctagttcttaggcanatccaccttcatatctaaattggcctaaaacagaaaatctctctaattgcaattcaaatgaagcctaacattatcatattaagaccttttgatgcttcatatgttttaactaataaatcaggcaaagtagttaccaaatatgttggggccaaacacaagggctcaaagacttgtgtttgggtaccca

SEQ ID NO: 25650 - DNA, 354 bp, Zea mays
  unsure (1)..(354): unsure at all n locations
cactatagaacatgcttctagcacanttaaatctattcattttcgagggcatgcctcatgaatttatcagctaatgtagctatgtgatccgtttgttggttaattaaagcaaggtgatcatgaatagcatctatattaacatctctacatatagtgcagatagaaacatgatcaaccgtagatgtagagggtttgcaatcatttaattcaacaatcctagcatgtaaaatagcattctcatctctaagaatggtaatagcatcattgccaacatttaaatctttagccttagcaattaatatttcattctcaatcttaaggctagcaagagattcattcaacatgtcaatctta

SEQ ID NO: 25651 - DNA, 421 bp, Zea mays
  unsure (1)..(421): unsure at all n locations
agcttgaagccatggtaagtagcatatgcatgtataatgcgaattgactcaagcctagctacgggtgcatatgtttcaccgaaatccaaaccttcgacttgggaatatcccttggccacaagtcaagctttgtttcttgtcaccacaccatgctcatcttgcttgttgcggaagacccacttggttcctacaacattttggttaggacgtggaactaaatgccatacctcattcctcgtgaagttgttgagctcctcttgcatcgccatcacccaatccgaatcttgaagtgcttcctctaccctgtgtggctcaatagaggaaacaaaagagtaatgctcacaaaaatgtgcaacacgagatctagtggttacccccttatgaatgtcgccgaggatggtgttcacggngtgatctcgtt

SEQ ID NO: 25652 - DNA, 392 bp, Zea mays
  unsure (1)..(392): unsure at all n locations
gtgagcgggagcagatggcaagaaagcgtgccaaatgagtttgcggtatgatcttatttatacgcccagtgcgttgaaagtggaaagaccccgcttgtcagtgaatgttgctattctagcaaagggaaggtgttttttcggaccttcggcgtaaagccttcgtccatgtcgcaatctaaatntattattntaaacaaattaatattgcgaggngctactngtgggggccttcggcttacgaaggtcctcaaaaacaggatntaacagtatttctggagtataatgtgtgagcaggtatcttcggactcaagtcggtatcgcgacagaagaagaccagaataatacgaaggtcgatacagcgccgaagatgtgagcangaaagcttcggcgtg

SEQ ID NO: 25653 - DNA, 447 bp, Zea mays
  unsure (1)..(447): unsure at all n locations
tcgtcataatctaaaccttcgacttattaataaccttggccacaagttttgccttggtctttgtcaccacaccatgttcatattggttgttgtgaaacacatatttggtgcatacaacattattgctttaaacgtttatgtaaattccatacctcattactctntaagntattcaattcatcttgcatggctatcacccaatccaaatctctcaaagcatcttatatcctgaaagtcccaacagaagacacacaagattattttttataaaaaatagcaatacangaatgagtggttacccccttttgatatctccaagtatcatgtcgatggggtgattnntgttatatgaattggtggactcttgggtgtgacacttcagttcttgagatgtcttattctttgggtattgcttcatcatccttctcttcttgattatcttcatat

SEQ ID NO: 25654 - DNA, 428 bp, Zea mays
  unsure (1)..(428): unsure at all n locations
agcttctaagtgtcgaactcttacccggcccgtattttacgtcttagtcgtactactacgtcactacatgcgcacctgatcgacctgctcactatacatgttcattcgtgcgcgctaggccggcacggcacgagcacggcaaagcacgacacgatcttgaacgtgccgggcacggcccgattcaattccgtgccgtgccgtgctagcccgcgggctgaaaggctggcccaagcacggcacgaaagggacacaaacgggccgtgtcgtgcctgtagcccggtcagcccatacggccgggctggcccgaagcatgattcanataaaatcacagaaattcacacagatattcacagaaattcagagacaatcacagatattcacagaaattcacaattcacatacaacccagagacaatcacagatcacag

SEQ ID NO: 25655 - DNA, 358 bp, Zea mays
  unsure (1)..(358): unsure at all n locations
tgagcatgcagatctgctagcccaatcagcagctcatgggctccctctaccttccgaattattttttgaaacaacanaggcaccttctgttgaactcatggagagagcagttcttgctaattcttcagtacgtactgaagattggaggactgaaattatatctttcctccaaggtaattgtctttcngatgacgaagcttcatataagagtatggaagcaaggacaagatcgtatgtgataatagaaggggaattatataaacactgagtatgttctccactcctcaagtgtctatcaagagctganagtattgaattaatgaaggagatacatgcangtctgtgtggatctcatatt

SEQ ID NO: 25656 - DNA, 408 bp, Zea mays
  unsure (1)..(408): unsure at all n locations
agcttctcgcacaatggatggtgagcacagtgctcttgttggtacgggcgcactgtttgacaacagactggacaggtgcgccgtctgctggatgaccctgacgccgtctgccatcggagaggactggacgcattaaatgctgagagggcaaatcgcctgtcagcatggtggcaagcggtgcgtcttctctgcaattaatgcagagacctcttggctttagaggcattacgtcacgctccgcccgttggcttacgtcacgggccacaagtcacgcggcagcggcgagcctccatctccgcgggtagcgcgagcacgcatggtaaggccttgacacgtgccatcaccggacccttactcactccgaggtctcccctgccccggntccttgctatggtccggacctcactc

SEQ ID NO: 25657 - DNA, 425 bp, Zea mays
agcttgcacatcattcccaagtgcagtgtgttgttctctaatgccgaagcgagaccatatagggcgttgaataatccctttcacatcctccctctaactcatggtcattttcacgtaaaaccattcctacattcaagagcctggccacctcttccgaaacgtgggcacaagataactcgccttaaatcaaggcacgaagctataataaccacaattattgtgatactggttctttccagttgcctttgtctcgtaagacaactcatgaatattgcaaaagcatcttgcatctagttccagtccttggctcctcatggcctagaataaaaccccactttaataagagcgttgtgggtaatctgatgaaggtatatctcaaatgtcttcaaaacatcgactagcatcttatgaagcgggaaacgaag

SEQ ID NO: 25658 - DNA, 474 bp, Zea mays
  unsure (1)..(474): unsure at all n locations
ctaagcttcgaattacaaccgacttaaagtagaatgaccttctagtccataattgtttgagtcgttggtggaaacctttatgaggggcatgattgtaattcctcacaggctgtgtcctgtgcctataaatagtgaacaatattcctttactgttcacgcattcctggtattgcaattgcatcactcgggaattaatctttgtcaaggcagaggtataaatgtatctaatacttgaatgcattatgttgatataaaatgaacagtgatattgttcatttatanattatttgtctctaatgcttcatatttcgtattattttatgtaatctattagaagtcaattacgaagaatcaaccttcgtaattgattgtcttaaccttcgtccgaagtcattaaatccttaaaggaataatgcttcagcggacgaagggcattnaacattaacacttttatgtgccntgttcttaattcat

SEQ ID NO: 25659 - DNA, 308 bp, Zea mays
  unsure (1)..(308): unsure at all n locations
agcttattgacaacttcgncgataatggagtcttcttttgcttataatttccagngcttccttcattgtcttgatcaactaaggtatccgatggctcccgatgcggggatagttcagctgaagtagaaaaacatattatttcgaagccacatagcaagtacccaagcttaattattaacaaacaggacctatacgcctttcgggttctgcaacttctttagctcgctttgttttgcccgggcgttgtcgatgtcttttacactcttctttatatcctcgtggccatctttttgcacttttcaccccga

SEQ ID NO: 25660 - DNA, 378 bp, Zea mays
  unsure (1)..(378): unsure at all n locations
taagcttgggatttatccaatttaataataagcaccatctcttaatatatattttctatggataaactcaacacaagagatggcattagtagcacaagcactagtttcttatttagcaatcctttatatgtggaaggcaagtgagttgctaaaatatagaaaccttataatatggactaaatttcccttgagccctcatgcacaatatattttgaatgacatggataatatgcatggttattcaatgaagtctaaaagggctgacttaatccatattatggtaagtgtctaataaagaagaatcanatctcaaataactagatagagaatacgccacataatcttggatatgtcaccatatgataatattcattcatc

SEQ ID NO: 25661 - DNA, 408 bp, Zea mays
agcttaagagattttttttcacggatcaatctcgtttcgaaaaacgatctaacaccggaaaggggctactgttgggtctatgcttccccgccgaaagtcttctaggaagaagcggctttcggctgaagctacttgtgtgagatggccgaaggttcctcttcatgaagcttcggtattacaaaccgacttaaggatagaatgaccttttagtccataaaggtctgggtcaatggtgtaaactcttatgaagggcataattgtaattcctcacaggctgtgtcctgtgcctataaatagtgaacagtattcctttactgttcacggattctagcgatggtaatcgcatctttcgggaaccaatctttgtcaaagcagaacatttgataacaagtcccaacaggatcatac

SEQ ID NO: 25662 - DNA, 364 bp, Zea mays
ttcgtcatcctgcacatattatttatcagaataagaaaggtgccaatttcaaggagaaggtgaaagtaacaaatataagtttcttaccggcttaaggtgacttcgagcttcgtcaccatccatttttcgcccgccatttacccaaatctgggtcataaatctatttccgatgcttcgggctacgcttgggatatcaatcaaatctgatgctgataaactgaagcttggtctatttacacattttccatgtgtacagccagccttcagaaaagccgtagctgtgcctcgagaagctaccaacgcgcaaaaagcagcatgcccagagataacttcgtcaagtgcgtcaacctcgccctcaatatat

SEQ ID NO: 25663 - DNA, 305 bp, Zea mays
cttaagcaccccgctgcactaaaacttttacgataactttttaaaacactacccacaagggctctgtggtctatctttcccaagtttaaggaaactaaagaacaaagtgaccacccaactgcaacagaaactcgctgtccaaaaggaacacttaaataaagccattaacctcgatgatctataaatatcaccaatgtaaggcatgtttatttgtatgggtcgaccccgccttaatggaacgaccccgcgtcacgtactgggtgcttgcgaactgatttattcttcaccaagacttatatcaatgt

SEQ ID NO: 25664 - DNA, 449 bp, Zea mays
  unsure (1)..(449): unsure at all n locations
catgggcaagtcgacgatgccatagccaacccatattagtcttagcaattaagcaagtgtcaagttcagcttggttatcattaaaatcaactaaatatagctgaccctctaacactcctttaaatgctattgaatcatcacttcttctaaagacagtaacacctatatctgtaaatagatagttgtagcccattttgcataattgagaaacagaaagcaaatggtaatctaaggaatccataagaaaaaacatggaaatagaatggtcaggtgatatagcaattttacccaatcctttgaccaaccctttgattccatccccgaatgtgatagctcattgnggatcttcatttttctcataggaggagaacattctcttatcctctgtcatgtgggttgtgcaccctctatcgattantccaacttgaccaccagatgcataaacctac

SEQ ID NO: 25665 - DNA, 425 bp, Zea mays
  unsure (1)..(425): unsure at all n locations
cagcttatgaagattctttatcccattatgtgtcttntctgcggngccagagccaacccatgttagtcttaaccagtaagcaagtgtccaattcaactttatcaaaatctaccaagtatagctgaccctttaacactcccttaaatgctactgaatcatcacttcttctaaagacagtgacacctatattccgtaaaagacagtgtagcccatcttgcataattgagaaacagcaagcgaattgtaatctatagaatctacaagaaaaacattggaaatagaatgatcaggagatatagcaattctacccaatcctttgaccaaaccttgattctcaatcacgaatgtgatggctctttggggatctngatctttctcataggaagagaacatcttcttcttccctgtcatgtggtgtggcaccc

SEQ ID NO: 25666 - DNA, 305 bp, Zea mays
accgtacgcgtctccggcttgttccaggtcacccacgtacgtgtgttatctctggaaaattaccacccttcactgtccttatcgcttacgttctcagcctcatcctaccggttcacaggaatcggacatcttctccataccaattctcagccgccgctcgcccagtcccctagacatcaccggccccagccgattccccagctcctccaccatgccgctgccatggaactcactggctcggcgcgccctgggcatgctccctgcgcttgccagccgtgcacatctccctctatgcgcgcgcgcct

SEQ ID NO: 25667 - DNA, 366 bp, Zea mays
ggaaaatgttatctagtcctcatagatttttctataagccaatagtcaatgtaaagggcatgactgtgatttctcacaggttgtgtcctgtgcctataaatagatgaacagtacccttgtactgttcacgctcacttgtacttgctcgtgccgtacgcttgtacttttaccttctggcaaaccgaaagtacacttgtaattcaatatcatttctatttttccataataataaaataggaatgagtcgataatgttatataattgctcatgttatctcttacatttcatatgcctctcctttattaacatatattgcgatgatgaaggtatgaacttcatgaccttcgtctgagaatcattatatcc

SEQ ID NO: 25668 - DNA, 432 bp, Zea mays
  unsure (1)..(432): unsure at all n locations
acttgagaggagagggagaaccaatggcacctacttnctcgaagacttgggttccttctgccagtgttctaaatgtcaaacggagagatctgagacccatttgcggaggtccggacgactcgtagaggtctgggacccatccatgggggtttagattgcatacgtggtgggtccatgacttgcccggacggtacacatggaggtctatgacctgcccatggggtttcggaaagcatacgcgagggtctgggcccacccgtgagagtcccaacccgttggtgtagtccctgagtattctcccttatacgaaacgtgggagctcctgacctcctcttgagttgggatcaggccctgaggccagcgatcctgtcagacgggtccggtcccatggtaccgactactcaattcntagcgtgaggttgagcttaacac

SEQ ID NO: 25669 - DNA, 272 bp, Zea mays
  unsure (1)..(272): unsure at all n locations
tattccccctccaatcttacggagggaagtgttatgctaagctgaaaattattttgaatttgatattgttattaatgcggtagatatcgcctgtcatttgtgagaatgaagctgttattatgcttgtgatatacaagtatgcctatgttggtttcactatgtctttcatggttgaagtttattacaataatattgttatatatgcttgactgangatgtttctaagaggagtgtgaaatgcgtgttttgggtacaaggtaatcatcaaattg

SEQ ID NO: 25670 - DNA, 368 bp, Zea mays
  unsure (1)..(368): unsure at all n locations
ataatggatgccacatcgaatgtcatacctgatgcatattcactctaattgttcccttgtatgatgtactgcttgcttcccaatttgaatgaatgaatgtatgtatgcttgcaatcgcatatagaacgatccggtcgaagagcccgacgaactcgcatgagaagcccctgagcaagaatcgcgtggtggaggcaaatgtcccttgacctatctctgacctattcattacttaattcacctcccgctttacacacttatgcctaaggattgactacctttgtgttatccatgccctctgttacctatttgggtcggattattaatggttagctatatgctattgctnaactctaaataacgaacatgat

SEQ ID NO: 25671 - DNA, 415 bp, Zea mays
  unsure (1)..(415): unsure at all n locations
agcttctctgaagaaactggaaacgattgtttttatcatgacggagttcgncattctgctgggtggatgcaagcagatgcacagaagaccatacgacacctacatctacatcgacaatttcatgttcagtcgccttgtggagaagcaagaactgatcaatgcgctgttgcaagacgattctcctgtaggtgctccagctgtggtaccaagaactggtgcatacagagccgggaagaaaagcctagtcgggtatgtttgcaatgacaatatggttcgctctcacttctcctcggttttgcacctgaaaagcaacagctntctgaaagtaagccgtaaaatgttcatgccttgtaggacgctagttgtggtcgaagttatctcagatgtgggtgacagtgaatgggtgaagtcttat

SEQ ID NO: 25672 - DNA, 280 bp, Zea mays
  unsure (1)..(280): unsure at all n locations
aacctaaccatctcaggaacccatttgatagactactagataccactagtggtccccctccaaaaggtccttagccacccaaaaaacaaaatcccacaaacagactccacctaatagagagagatgagatttcattgtgattattgtgagaagggagggtcaatggctgccttttgctttaagaagaagagagatgagcggcggngttctaagttgagcagagggaacatgaaccacccctctcatgngtgtcatgatcctnctattcagagacatcatg

SEQ ID NO: 25673 - DNA, 429 bp, Zea mays
agcttgaatgtttcataactaattctaaattgtgatctttgaccaatcattctaacacttgttgactacataggacctcgagctgtgctaagtctggtctgatcccctatgcccctgtaggtatacaatcaatggatgatgactcaacatcaatttaagtttcttgtatatagcaatttgtagatatattatgaacagtagtatttaccatgtctcacaccattcatctagttgtacgaatgtatccatttcccctaaaggtatgctttccacaattgtttgtataccttcttttcttgatttgcttctcctcaaattctttacaagtctttaaatgacaaatggtacgataaacatttagatgctcttccaaccacaaaagttggacttgcatatatgttaatgtatcaaaataataacaatatctta

SEQ ID NO: 25674 - DNA, 397 bp, Zea mays
  unsure (1)..(397): unsure at all n locations
tcttctcctctatgtaacatccttgtctgtcccttcggccttcatgtcttggatttcctgatgatgcatatccaagtgctggttggcttcctcaagttgntgctgagtgttcaggagctgatcctcgagaacctcgatggtgttctccctggctcctacttgctcctcaagcgcttggatctgggtggccatctgctccagctggaggtctttctccaccagctcagtggacaggtctaccacaaggtcctccatattatccanggtgatcttggtnagcctcaccaagcccatcagctgggacattgcctcacctcgcactgcttgcagacggtacagggcattcatgcatcgcaccgtcaggtgagcagtcttgcctgngtaaagagcccacaca

SEQ ID NO: 25675 - DNA, 430 bp, Zea mays
  unsure (1)..(430): unsure at all n locations
agcttctaaaggaagagcacatgttgggactatttcttgttcattntgagaaagacagggtttgtagcgcatgtcaagcatggaagcaagttggtgttcatcatccacataagaacatcatgacgactgacagaccgcttgagctgctccacattgacctattcgccccgatagcttacataagcatcggcgggagtaagtattgtctaattattgtggatgattattctcgcttcacttgggtgttctttttgcaggataaatctcaaacccaagagaccttaaagggattcttaagacgggctcaaaacaagttcggtttaaggatcaaaaagattagaagcgataacgggatggatntcaagaactcacaaatagaaggctntcttgaggatgagggcatcaagcatgagttctcttctccctacac

SEQ ID NO: 25676 - DNA, 461 bp, Zea mays
  unsure (1)..(461): unsure at all n locations
tggttcttcgagttctacaaagatgaatacctctagcatctatttggcgaaggcaagtgtcctatgacccattatgtcctacttacttataattcattgttccgcatgacttaattgaaacctaaaggatgactaactttcgatttacctgtccttgattaccttntgggttactatggttagtgtcatgctattgtggtactttaatctatgaacatgatgtgaatatttatgatacgataatgatatnctcgatatgatgatgaactgtgatacttaaggggggctcgggtgtttcctgagtacctctctgttaggacctgttcgttgacagaccacccgagaaaacagtgcaaccatgaaggtggtatgggactcccttnagctgataattagaggaacctgacgtgtagtcgtcttcgtcgtcgtgtcgtcaatgaggtccgggcacaatacttgct

SEQ ID NO: 25677 - DNA, 309 bp, Zea mays
atgcaagcttatgaagattcttcatcccaacatgggtctatttctgttatgtcagagccaacccatgttagtcttagcaattaagcatgtgtcgagttcagctctttcaaaatctactaagtatagctgaccctttaacacacccttaaatgctattgaatcatcacttcttctaaagacagtgacacctacattagtaaatagacagttgtacccatttgcataattgggaaacagaaagcagttgaatctaaagaatctcaaaaaaacttggaaattaatggtcagagatatacatattacccaacc

SEQ ID NO: 25678 - DNA, 277 bp, Zea mays
agcttttctgaatagctgactgtgggtagaatttgttttgtatgagaagctgactgagaacaatttgagtggttggttcagctgtagtgaaaacgagttggtggatagaaactgggtgtttggatagatagattctgaaaatcatagaaaaaagccagattctccctgaattgatgtccatgttggccaatagtttattaagttccgaaatccctttcaagacaattaaaatttcattaagacccttttaaccgattaaaatctttattaacaccgt

SEQ ID NO: 25679 - DNA, 267 bp, Zea mays
  unsure (1)..(267): unsure at all n locations
atactctcatagttatatatttgatgaccatatcatgcttaatgttgctcatgaggttggaatattcaacctaaattcatgtgaacctcattctcgcacgtgtgcgcatttagaatgtatatcatcatgtgctaacccctgttgctcaaaagaaaagccatcattgattgagcaacaagttctanggtcacaaaagaaattctgtgggaataagaagcaacgacaactgacgagaagacgcttagctcaactctctcaagatatcca

SEQ ID NO: 25680 - DNA, 245 bp, Zea mays
tgcaagcttgctactcggctgaaggtgtgaaacttttgtttattcggtatcaacgaggattgaaattctaacggatgaggagctgcatcctcagcttatggagttgattctggacacagaaactatcagcaagcccgacgtgatcagggagtttccttcgcatcttctgtagcctatcacgcatctctgctgaaattaaataatgcattgaaatgtgtaccatctaatacctgtgcggcgagagg

SEQ ID NO: 25681 - DNA, 420 bp, Zea mays
  unsure (1)..(420): unsure at all n locations
actaagcttgggaaggttcttcatncccacatgtgctaagcggcgatgccttagtctgcccatgctagncttagctattaagcatgcatctagaccggcctcttcttttgcaaaaataactaaataaagtttggcgtctaatacacccttaaaagctagtgaaccatcacttcttctaaagacagacacatctacatttggaaatagacagttataccccatgttgcataattgactaacagatagtaagttatatcccagagactcaacttaaaacacattagaaatngagtgctcatttgaaattgcaattntacctaacccttttaccttgccttgattcccatcaccgaatacaattgaatcttgggaatccttatttttgacgtaggaggtgaacatcttctttctccccgcata

SEQ ID NO: 25682 - DNA, 308 bp, Zea mays
atctactaaagggagagctcagttcatgtctttctcttgttcattttgagaaagacaggagttgtagcgcatgccaagccaaaaagcaagttggcgcccatcatccacactagaacatcaagacgaccgacaggccggttgagctactctcacaaggatctattcggtccgattgcttacataagcatctgcggaagtaagtaatcgcctgtaatagtggatgattattctcgcctgactagggtatgctctttgcaggagaaatcacaaacccatgagaccttaatgggatttttgagacgggctca

SEQ ID NO: 25683 - DNA, 286 bp, Zea mays
gcaggaacatatgatgattgctacggacagccaggtggttaaagagggacaaccaccttcataactcccccctacttatttgacatatgcactatcccgtaagtaagatcatatatcctaagataatcttcttttgtccttaccatgtgagtgacttccacttgaaaatattaatcttcgagagcttctgcaactgagctgatcttctcctacttttcttgtgctagacccaacttagacaagtcaagattggcacaaagaacttcattaatgttataaagagtca

SEQ ID NO: 25684 - DNA, 401 bp, Zea mays
  unsure (1)..(401): unsure at all n locations
agcttcctccacgccgaggctagcgaccttcttttttcaccttcgctgcgcgtgtgtatagacaaagcttctttacacactactttggccaaaaggttaccttcgtccatcctttgttgtttgcctaaaacacatttgatcatatcgaagtaaagacgttttgaggaccttcagcaaggcaggcccccaactactgataagtaaaaaaactaaaagtcatctggtggaaggtgcctaaagttcttatatatatctgcatagntctaaaaacagcgcaaaaatgctatcagtcttacactacgagaaaactggcttttgtaaaaaagctgctcgctaaattagcccctttggtttaactttttaacggacaaatgtcaatgtaaaagctgtcaaacaaactt

SEQ ID NO: 25685 - DNA, 443 bp, Zea mays
  unsure (1)..(443): unsure at all n locations
actttctaagactagcatgggctgtctttgacaccgccgtctagcacatgttgggatgaagaaccttcataagcttctaaatggagaacatgtgttaggactaaccgatgtatgttttgagaaagatagaccttgtgcagtgtgttaagcaggaaacaagtcatccgagctaaaatataatgacgatgccaagaccactggagcttatacatatggatctctttggacccgttgcttatcttagacatcacgggaagttggtctcgttattggtgatgactattctcgcttcacttgggtattctttttgaggataaatctgaaacccaaggaaccctcaagcgcttcttaaggcgggctcaaaatgagtntgagctaaaagtgaatangaataggagcgacaacgaatcagaattcaagaacctttaagtgganaaatacct

SEQ ID NO: 25686 - DNA, 398 bp, Zea mays
  unsure (1)..(398): unsure at all n locations
gtctatctggcgccaaacactangggtgtatcgtctgtcggtgctccctactgacgcgaagacagttcgtggcataaggtcggactgtccgcgacctttgcgcacgagcggatcctcctctgcatgctttcggatggtccgcgcctgatgacggaccgtacgtggtggcgcagagggtcttcttctccttcaagaaccctataactcgcccacgggagagataccctcgagggggagagttccgatgcattgctcctggtcgcaagccgaacggagcttctctaatcgacgtatatcgaatagagatcgttgtggaagactaaactagatctacacctaaggctacaatactcctactcctatgagttggaagaacgatgcaaatcatgaacaattat

SEQ ID NO: 25687 - DNA, 305 bp, Zea mays
  unsure (1)..(305): unsure at all n locations
aatgaaattgtcattgaggccatgattaaaggacttcggccgggaccttcagcgcaatactttgccaggaagccttctcaaactttggagaagctgctccagaagatggacgagtatattcgagctgacaatgactttcgccaaagaagggaggaagcattcaggttctctgaaatgactatgggctttggaggaagatttcatccgaggcacgtcaggtcaattcacaactctactcanagtgatgatagagggagccaacagcaaaggccacaatactcctcgcaagcttcgggacagcagca

SEQ ID NO: 25688 - DNA, 367 bp, Zea mays
  unsure (1)..(367): unsure at all n locations
atggacgtgaagagtgccttcctaatggttcaatctaggaagaggtctatgttgagcaacctnccggctttgaagatagtgagtatgctaaccatgtctacaaactctctaaggcgctttatgggctcaagcaagccccaagagcatggtatgaatgcctaagagattttcttatcactaatggattcaaagtcgataaagccaatcctactctattcactaaaaccattgaaaatgatttgtttgtatgccacacttatgttgatggtatcatatttgggtctactaacaaatctatttgtgaagagtttagtacgatcatgatacaaaaattcgagatgtctatgatgggggagttgaagtattt

SEQ ID NO: 25689 - DNA, 383 bp, Zea mays
agctttaccaaatggacgtgaaaagtgtcttttcaatggaccaattcaagatgaggtctatgttgagcaacctcccagctttgaagatagtgagtatcctaatcacgtatataaactctctaaggcgctttatgggctcaagcaagccccaagagcatggtatgaatgcctaagagatttccttatcactaatggcttcaaagtcggaaaggcctgtcggggaccaataattaggggtacccttaagacacctagattttagctggtaacctccatcagcataaagctgcagaggcctgatgggtgcgattaagttaaggatcagtccgtacgagtgactcgatcacgcttcactcgagcctagcctcggactcgggcagtcg

SEQ ID NO: 25690 - DNA, 263 bp, Zea mays
tgcacacattggtcatattatacctttgatcatgtcatatctctttcatttgggacaaatgcatatttcttattctacttgtgccaaagcttagactaatgtgtttccaagaatatttctatgcttagtcttagaatgaaagggaaatggagtttcaggcaaaagcaagccttccactatgactcttgctgtattatatatcctttgccctactcatgtacttactttcatatatttattgtaaaggccgctagaattctcta

SEQ ID NO: 25691 - DNA, 273 bp, Zea mays
agcttcagcttatcctactgaagtactgttctttatagactcctatgggtttccatctttttattggaaacgaagtaccatactattgtactgtacagtgacttacaggtatggagggatagggctcatcgcaccttctagcttcgtgagtcaaatgattctataattatctcctttctatgcttctgttcttatatagagctaagctgaacggtgcttggttgttgtgagcacaaagggatctgtctagcttactagaagtagcaagcatct

SEQ ID NO: 25692 - DNA, 430 bp, Zea mays
agcttaccaatgatttccttgatcgatctttttgtatatttatgattgtcaccactaatagtaacatgatgggtaccgattacagtatatggccttaacatgaggcgcatgacggcatgatccatccattttgtgcttccatagctacgaatcttgttcacgcgagtattaagcctatagtacgttctagttggcctctgtaccatatgcatggcgaatatccgcaatttgcctttcatcaactccatcttggcgttatcgtatactattaccctcatgagagatcttgagggtgtctcatgtgtgcttggtgttgtccataccagtaaccttgttgtattcatccctgcatagagatggtaacagaacagcagtagcttgggcatatttatgaattaggtcattaatcaatatgttactatcactacta

SEQ ID NO: 25693 - DNA, 268 bp, Zea mays
gctagctggatgttaccctcatacccgagactatttttctttatttcccgacgtgactatatcgccgctcatcgaccaagaggtaccgaccgaatcccattctatgttatttggattcagcctcaacccgcctatcaacctcgctttggcgggcgctctcgtagaggcgagtccaaaccctctgaggtttccatgcgtgcgcctttggacctgctgactgacgtctagacctacggtccctccgggtacgaggaaaagatgagttcta

SEQ ID NO: 25694 - DNA, 276 bp, Zea mays
  unsure (1)..(276): unsure at all n locations
actttggttcccccttaatgacataaaggggagggttaaagaactttgagatataccttcaacaattgacacccaatgctattgttacgctcagtgcttttatttgggctctncgaagccagggtatgagcgcaaatgccaaacctttttgcgtgtgcatgaactgcactattataccaantgccagagcatatggtcttcataagaaattcggatgctacaactttgcatatagaaaagatacaatggctccagtaattggctatcatactaaat

SEQ ID NO: 25695 - DNA, 336 bp, Zea mays
agctttaaaattattttgaagccttgggttatttttgtcttgatttggacaatgtttggtacctaaaccccaaaaccctaatcttctagtgatgcctgccctaggaacttcagttctgactccaaaaaccttagtttcctggagccccatgaagaaaaattgtattcaatacctaagatagtataattttattttctttgcattttcataaccattacatgagcattcatggttatatatgtgatatatagataacgaataagttaagttgaataatctaaatctgctcactatctccttatactatttttcagtaatggaattatatgtattcat

SEQ ID NO: 25696 - DNA, 419 bp, Zea mays
  unsure (1)..(419): unsure at all n locations
gccataccttggaatataatcttaccttttcatccgtatgtgaaatggtttgatgtggacgaaacatgtaatctttgagccgaaggcgaaaaacacctttccttcttttcgtacacaatgaagcatatctttgcttcattatactcatcgaagccttgtcatgaaagctgaagcatctgctttgccctctatgttcatgatgatgatgatcctacgaatgtctaaatgaatgtgtatgaatgcaatgaatgatgtaatgtaatgtgcaaatgaatgttcaaacacacgcatacgaagccacacncagactctgcatccncttagaaacgtcttttgagtcttaagctctgcatcctcttangaacgtcttttgagcctcttcaccttctatttcngtggtatatgttctgcatcccatt

SEQ ID NO: 25697 - DNA, 241 bp, Zea mays
agcttatctcaacctgagaggaaagcgtatccttttgtttgatgtgttaccttgagctttgctagtgtgttattcatatgcttcttgcagtattatatgtgttgcatcatatggactagtgcttccgttgctatgaattaattggcatctactgtgttcattctgaaatagacagacatgtggatcataatgcatgtcggttatggtgcttaagactgctttaaattagtatctgagatta

SEQ ID NO: 25698 - DNA, 333 bp, Zea mays
caattaagcaagtgtcgagttcagctctatcaaaatctaccaagtatagctgaccctctaacactcccttaaatgctattgaatcatcacttcttctaaagacagtgacacctaaatcagtgaatagacagttgtagcccatttgacataattgagagaacggaagcaaattgtaatctaaagaatctacaagaaaaacattggaaatagaatggtcaggagatatagccaatttaccaagtcctttgaccaaaccttgatttcatccccgaattgatagctcggtggggatcttggttttctatatgaggagaacatcgttctcccggcatg

SEQ ID NO: 25699 - DNA, 371 bp, Zea mays
agcattatcaaatggacgtgaagagtgcattcctttattgaccaatcaaggaagaggtctatgttgagcaacctcctggctttgaagatagtgagtaccctaaccatgtttataaactctctaaggcgctttatgggctcaagcaagccccaagagcatggtatgaatgccttaaagatttccttatcactaacggattcaaaagtcgaaaggctgatcctacactctttactaaaactctcgaaaatgacttggttgtatgccaaatatatgatgatgatattatatttgggtctactaacgagtctacatgtgaagaatttactatgatcatgacacaaatagtctagatgtctatgatgggggagttg

SEQ ID NO: 25700 - DNA, 462 bp, Zea mays
  unsure (1)..(462): unsure at all n locations
tctaagctgattcatccatnatagactttcttaagtggcatcatatattttcttttgctcttatgacacaatccttatgttgtgccatataaacattttctagtagctcatgaattgtcgcgctcaatgactcaacatttgtggtaggcatttgattgatagctggaggaagtgatggtgaaacccctacaggtatcgagaaatatagttcttgcaccattagaattgggacatggacttttcctcgatgtctatttcttaagataccatgcccctttgatcacttcattgtaaaaaaaaattatctcttgttctataaacttagtatggtgttctcggtagtaaaatctanacccttttcaccttgttaaggtagccaataaaatggtaacttatggttctttcatctaatttccacacctaggattaaagattcttgcttcagctgaacaaccccaaata

SEQ ID NO: 25701 - DNA, 287 bp, Zea mays
  unsure (1)..(287): unsure at all n locations
tcacccgccgcatgcaagcttgtgaacagtataagttctgaatagtattttctgtttcagctgatcagccgaagcccatgcttctatgtgaagacatagctaaacataaagtattgctagggtcccaattatctgaagagcacgagaaaaccttgataaagttnttattcaacaacaaagatgtatttgcatcttcatacaacgatctctgtggcgtcaacagggacgtcattgaacattcactcaatgtctaaccatccttcagacccaggaagaataagcttcag

SEQ ID NO: 25702 - DNA, 425 bp, Zea mays
  unsure (1)..(425): unsure at all n locations
agcttatgaaggtctctttctttataaccttcttcttgaattcattatatctgaagggatataacgtactgaaggacgaagaatcttaacatttaatactttntatgttgccttgttcttaacttttagcatttgagaacaagtccccaacattggcgcccacctccggtgaactcacgtccattttttgagtttntgaataccttcggcaagcatcaccttcgtcatgccgccgaagaaagcttcagccacaggggctgccactctacagccgctggatcccaatcaggatgtcctttctcttaggaagcccaaagccagaagaggaaggccaccagtccaacgcctccggaggatgacttggatcaggaaatccaaaacttggagatgctccatcaacaggttcaacgaaagaaggaaaagat

SEQ ID NO: 25703 - DNA, 401 bp, Zea mays
  unsure (1)..(401): unsure at all n locations
gtctttagcctaactacgggngcataagtttcaccgaaatccaaaccttctacttgtgaataaccctnggccacaagtcgggctttggtacttgtcaccacaccatgctcatcttgcttgttgcggaatacccatttggtacctacaacattttgattaggacgtggaactaaatgccatacctcattcctcgtgaagttgttgagctcctcntgcattgccagcacccaatccgaatctcttagtgcatgctctaccctatatggctcaatagaggacataaaagagtaatggtcacaaaaatgaacaactcgagatctagtagttacttccttatgtatgtcaccgagaatcgagttcacggtgtgatctctntgaaatgcttgatggactcttgggtg

SEQ ID NO: 25704 - DNA, 295 bp, Zea mays
agctttatcaaatggacgtgaagagtgtctttctttatggaccaatcaaagaggaggtctatgttgagcaacctcccggctttgaagatagtgagtaccctaaccatgtctataggctctctaaggcgctttatgggctcaagcaagccccaagagcatggtatgaatgccttagagatcttcttaatgctaatggcttcaaagtcggcacagccgatcctactttattcacttagactcttgacaatgaattgattgtatgccaaatttatgttgatgatatcatatttggtct

SEQ ID NO: 25705 - DNA, 455 bp, Zea mays
  unsure (1)..(455): unsure at all n locations
ctcttccatctctcggcagacagagatcttcttgctgtctgttagacaatataagaagtcttcttctccactgccattgaaaatcaatgccccttcggatatttcaatttttgggcatagaactgagcttcttgtntttctttttcagtcaactgtttccccgaagcatgtcgtaaagtataattgagagcttcgaaaaatgcttcgggggtggcagtgccagtttcttcaaccaaannattgtctgatgcttctgcttctatttatatggttcccaaggatttcactgtggcggactctgagggcccagcntttagtttagcttggtgctttgtaccatcggcttcagaggccgtcgtctcaatttgcgctattggagtttcggcacatttttcggagtagagcttgaagaacttatcatctctaacacatctaggacattaaccattctcttc

SEQ ID NO: 25706 - DNA, 297 bp, Zea mays
agcttgtgcaaagtccactcgaactaatcttttgttaaacccgacctcggtgcaacatgacaccagaaagtccaacacaacaagcattgaatgaattcagaattattgcagagcatatcagtacaagaaacctggttcaggaatttttggctttcaaagttttttctaatttaaaagaatgggaaatgcccaaacttaagggggagaacaaagaacgtgaacttgtgcatttacattactatttcaaggtcaagacatacttttaaatcacctgcgcagaatgggtggttcaaatta

SEQ ID NO: 25707 - DNA, 391 bp, Zea mays
  unsure (1)..(391): unsure at all n locations
cacgactatcaagaaaatgctcctcgacaacaagggcaaatgggccgacctgctacctgaagcagtctatgcgctgaacacgaccgagtgccgggcgactgggttcactcctttctgcctgctatatggatcggaggccatgaccccgcaagaaataaaacatgggtcaccacgtacaagcacttcagccgtcctccacgtagacgaaccaactttgaaggacctcatcgacggagaccatgtcttcgccctacangccctcaacaaataccaagctcatacanaagcatggcgcgaccacacagtcgtcccgagagaattcaacgaatgagacctcgtactcgttctgacaactcggacagaatcactgtgcaagctggagccgaagtgg

SEQ ID NO: 25708 - DNA, 335 bp, Zea mays
  unsure (1)..(335): unsure at all n locations
agcttaacttcctctcccaaatanggctttatatctgttatgntaaatgtggggctaaccccaaagtctgcaagcagatctaacctatatgcattgtcggtaattntctctagcactttaaacggtccatcggctcgaggcaacaacttagattttcgcaattcaggaaacctttcctttctcagatgcaaccaaactaaatctccaggttcaaaatttatttcctttctacctttatcactagcaaacttatatttaacattcatacgctctatgttgtctttataagtacatgcagttttaacataattcaccacgcctaataacatcaaaat

SEQ ID NO: 25709 - DNA, 357 bp, Zea mays
tataaaactaagctttccacctgtcactgctaccaattgtgttctaccttattaagagcaacgacatgaatgctcttatgacacactttgttgaaacaacgatgtcctgattctgctctgcttctcattgtcactaagacacgctgacaatgagctctcataatgctctgatcatctgcaccaatctgtcttcggtggtccttatgcctgcatcatcaccgcaagcaagcagtgtagcttatccaatcactacgaggaaacccacatcgctttaccacaaaacctgatagacaatacctccatgtcatagccttcatcatacacagacattttgttaccgggagtatgaaagactac

SEQ ID NO: 25710 - DNA, 427 bp, Zea mays
  unsure (1)..(427): unsure at all n locations
agcttatcggtgatctcagcagcgtttatttttttttgtagatcttgcttggttgcgaaaacgagcaagacagcatccctcaattcatcctgccagtgtcatgtggatgaatgatcaacaggttgtactaaaacagtggtccccccccccccctccaaaaaaaaactgaagacatgtatttgctgccttcatacatacttccagtataactagccatttcaggttgagtgtacctactaacctacagctgcccatgacggccataactcaagctcaagataacccaggtgcctaaatattgcagaggtaccaacaagtccatatgtatactcatgttatatgtcattgcaaacttagatattaaccagccaactgtgacaaactttnttttataataaaacttcagatgtaattctggcatcaaaat

SEQ ID NO: 25711 - DNA, 302 bp, Zea mays
  unsure (1)..(302): unsure at all n locations
tatgttgagcaaccttccggctttgaagacagtgagcaccctaactatgtntataaactctctaaggcgctttatgggctcaagcaagccccaagagcatggtatgaatgcctaagagattatcttatcactaatggcttcaaagttggaaaaggcgatcctactttatttactaanactcttgacaatgatttgtttgtatgccaaatttatgttgatgacattatattngggtctactaacgagtctacatgtgaggaatttagtangatcatgacacagaaattcgagatgtcgatgat

SEQ ID NO: 25712 - DNA, 269 bp, Zea mays
agcttgagcttcatcagtcatcataatctatggcctctttataccaaagcgagacaccacgggtctatgaatgattctcctaatgtcttctctcttctccaaggcattcttcacgtaaaaccattcattcatccaagcaactggccacttgcttcggtactcaagggaaggatattgggcatctttctggtacgtgaatgtataacaagcaaaggtattatgaagttgtccttttcctattgtctctgtctactagtgcatctcatgaa

SEQ ID NO: 25713 - DNA, 401 bp, Zea mays
  unsure (1)..(401): unsure at all n locations
aagaacatgagaagctatagtgctctcatgtngatnntggccaaaggtatgaaactatttcaattgagcaagataactctttattatgtgtcgctcaattagtaaataggaataccttgcttaaggaccaagtagaaaggctaaaaattgaaaatctagcttttcaaaataaacatgatatgtttctatgttctcataaaaatctgatggatgatcatatcatgttaaatattgctcatgaggttgtgataacaaacttaaaatctcaacaacctcactcatgcacatgtgttcaaattgaaactatgttgccatgtgctaatgcttgttgctcgccagcaagcaaatccttctttgagcttgaatttctaggaataaataatggtacatatcaagagctc

SEQ ID NO: 25714 - DNA, 265 bp, Zea mays
  unsure (1)..(265): unsure at all n locations
catgcaagcttctccaagcttgagccgaggcagtgcctttcttttttgtgcggaccacccncgccggactttggtcgcccgccgacgcgcgttgataagcaatccagtgagccattctacgattccttgcaccactgtccttcttgacctgtaacgaagctctctgacctgattacttggacaattgtgcttggagcaggcacggatcctcgttgtcgatgagcatcttcgctatgtcacgcgaacagtctacttcattcatccc

SEQ ID NO: 25715 - DNA, 405 bp, Zea mays
  unsure (1)..(405): unsure at all n locations
tgagctcctggcgtgcagttatctatgaagtctgctatcgcctgngactgaatcgaatatctatgcacataatcaatgctgaactcgttgagtttcgcagcccactttccaatacttccaggagcttctctgtttctcataatatccttcacaggctgtgatgaacgaacaattatatggtatgcttgaaaataatatcgaagctttctggaaggccattaagacgggatacaacaccttctcaattctgaataattttctattgataaactgagaacttcgagacgaatatactggagcctgctttttcaattgcctttaagcttctcctggacaagcgccgcacttactggagagtgcgaagctaccacatacagcagcagaagagcccctggcgctggtgga

SEQ ID NO: 25716 - DNA, 431 bp, Zea mays
tgctttatcttattgattttacaacaagtattgttttttctgagacttgtatagtggcaaagtccaacaagggttggctatggcatcaccggctagcccatgtccgtatgaggaattcggccaaactccaaaaggataatcacatcattggactaacaaatgttgtatttgaaacagatatggtttgtggcgcatgccaagcagtgaagcaacatggagtcccacatcaatcaaagaatgtggtcaccacaaagaggcctttggagcttcttcacatggacctcttcggacctgtggcttacattatcattggtggtagtaagtatggtctagtcattgttgatgatatttctcgatccacctgagtcttcttcttgagtgataaatgtgatactcataaaatattgaacaaattcatgagaagagctcat

SEQ ID NO: 25717 - DNA, 292 bp, Zea mays
agcttcatgcataacaccaaaattaaacaaggtgatattattcatgattatttaattaagtttacatggcaagtttaattcatagcatggtgagtgattaatgtagaagacccaaaaccaatttaaatgagaatgaatacatcacatagtattggttcgatcttctttgaatgttgaatgtcacactccattatagaaacacattctcatgttctgagactacataaacacttaaatagaaatattagtctcacaacttctagacatatatagaattcctctttcgataagt

SEQ ID NO: 25718 - DNA, 248 bp, Zea mays
tgatgaggaggttcagaattggctggactcgcactagctgaattggaaaattggccgctaagatcaattaatttgctattgactttgtgcatcggtcattcaatcagtcctaagcattggcagatttgattatcgattggacaccaggcccacaagaggaagtagtcacttctgacatagctatatggacagtttctttgtgatgactcttgtggttctttccgagcaggagttacactataatatct

SEQ ID NO: 25719 - DNA, 411 bp, Zea mays
agcttggctccaatccttgagtgctcctaatgtcttttgtgtcctggaggctcctagcttataggatcctagagtcttggaggcacctagaggccaaaagggctctggaccttcggtagccttgagggtatctcgagaattaattgtctaggccaaagggccttgaagaccatgagaactatatgatttgttctcccagcctatagagcatcagatgtgtggaggaccctggaattaattggaaatgggtatggcctcctaacggcttgagccctattgtacgacggtagcaataagtagttcatattaagattatttctgctatgatatctcatttaagacggtctactagcatataccggcatggacttctctaacgctgacaactatattatttaccaatatgtgaca

SEQ ID NO: 25720 - DNA, 477 bp, Zea mays
  unsure (1)..(477): unsure at all n locations
tggacgtgaagagtgccttcctcaatggaccaatttttgtatatgtctatgttgagcaacctcccggctttgaagatagtgagtaccctaaccatgtctataaactctctaagggcgcttatgggctcaagcaagccccaagagcatggtatgaatgcctaagagattttcttatagctaatggcttcaaagtcggaaaagccgatcctactctattcacttataactattgcaaagaattgtntgtatgccanattatgttgatgatatcatatttgggtctactaacaaatccactttgtgaacaattagtaggatcatgattcaaaaattcgagatgtctatgatgggggagtggaagtattttctaggatttcaagtaaagcaactccaagaaggcaccttcattagccaaacgaagtacattcaagacatactcaccaagtntgggatgaatggatgctgaagggaaatgtg

SEQ ID NO: 25721 - DNA, 231 bp, Zea mays
agcttaaagccatggttagtagcatattgttttttatatgcgaactgattcaagcctagcttcgggtgcataagattcaccgaaatctaaacctttgacttgtgaatatcccttgggcacaagttgggctttgttccttggcaccacaccatgctcatcttgcttgttgcggaagacccacttggttcctacaacatattgattaggacgtggaaccaaatgtcatacctc

SEQ ID NO: 25722 - DNA, 432 bp, Zea mays
  unsure (1)..(432): unsure at all n locations
actcaagctgcttggttggagcaacttgtgatggtgactaacacggaatgtttctcggatgcgcgtgagtgatgacaaagtatgcacaaaaaaccccgtgtggtctataaggacaatatatgatcctagaaagttaacaagagtaaatatcaccgaacccggagtggacggggtgttacagacttcatgtgaatgtgccatagtatctcttccacttcctcattatatgagttaaggtcctcctcgatgtcatcagcgacaacaacatcctaactagtggtttgtgcgcgcccatgcgcgcgtagtggcacgtgtttttttataattntgcaatgtctttgatcagttcataattcacatgaaatacacataagaggtgcattgcatttcttaacgatatgtcgcagcttatatcatttacgtgtcataaaa

SEQ ID NO: 25723 - DNA, 297 bp, Zea mays
  unsure (1)..(297): unsure at all n locations
agcttatgaagattcttcatgccaacatggttctattctgcggngccagagccaacccatgttagtcttagcaattaagcatgtgtcgagttcagctctttcaaagtctactaagtatagctgaccctctaacacacccttaaatgctattgaatcatcactccttctaaagacagtgacacctatatcagtgaagagacagttgtagcccatttgacataagtgggaaacagaaagcaagttgtaatctaatgaatcaacaagaaaaacattagatatataatggtcaggagatat

SEQ ID NO: 25724 - DNA, 302 bp, Zea mays
  unsure (1)..(302): unsure at all n locations
gtccacgctgataccgcctaagtaaaaggcgaagaagctcccaagacgttcctaagggaatgcagagcttataccgcctaagtaaaaggtgaagaagctccaaagtcgtttctaagggaatgcagagcttacaacgaanagtcagcgctgatacaaacatatcgtgtggngatattgtgtgtatctttcggaacaaatgtcatctacataacatatcatcacnatcatttgcatagcatacgcatcatacatcatgttgcatatggcataagaaggggacacactattgatcttcggaagta

SEQ ID NO: 25725 - DNA, 294 bp, Zea mays
ttaatcacctgcagcatgcagccttttaccatattatacgggtatcttgatattgtgagcatgacactttcccttcaaaagagttgagctcctttttagccttccaacttcttccttgagctctttattttcttgtgtgatagaaatatcactaattcctgaaatttctagctcaatggaagattggctttcttgagagcaacatttggtagcacatgataatatagtttctacttgagtacatgtgcatatgtgaggttggtatgatttccaattagttcacacaacctcatg

SEQ ID NO: 25726 - DNA, 382 bp, Zea mays
  unsure (1)..(382): unsure at all n locations
gcaaaatgaaaggagtgtaaactactgactccggggtatcttctgttgggacagtagtcccgtggcaagcccgccaagaacaaagttcccgcggaggaagaacccccatggagacaatgcggagaagctcagcttcagaaattacagacatgtggttacctgcgaanggtaactggctgttgcggtcgattgcggggatcactgcagcagacgagttcgcagcttttctcttgggcgccatctcgcttctcactggcgaaacagagtangaggcgagcggcagagaagaatcatatgcgtgaatgcaagaactatggcacgganagcataggccgctaatagcgcgactcttaaaggatattcttgagccacataccctttc

SEQ ID NO: 25727 - DNA, 314 bp, Zea mays
  unsure (1)..(314): unsure at all n locations
agcttggtaaaagcactacataactnttatatttatctagaagtgattccaggtttaatcaatcaaacattacagttntcgaaatctgttctgacagaggacagaacacagcaaccagtttgtaaaatccataactcataaactatcaggcctgtgtttatgaaattgtaacacaagcaagatcagaagagcatttacaactttcttataataaccatgaacagattgtaacattatattacgcgcacaatacagtatctgaaacttgttcacaatttgtacaaattcatttacgcaatcgttcaatccaactt

SEQ ID NO: 25728 - DNA, 415 bp, Zea mays
  unsure (1)..(415): unsure at all n locations
ctaagcttgccagccctcggacccgggcggacttcaccggatgtctgatatcgacctcaccggacttcagtctttcaccgccgcgcgtggaccgagctatccagtgagtctccgcccaattcctcgcgctcatatcttctctggcatctcgtggacctctctgacccatttgattgaactatctcgccgtgaccaggccggtctcctcgccgccgacgagcatccccgcctgcgtgcgtggaccgaccgactccgggcatctctgacggcgttccgcacaccgttgtgatccccgcgacctccccttcgtcctcgaccacttcaccggagcaatctcgccgccggtaagcccctccgcccttntctccgccgcggctactgtttaaggtagaagaanggacctcggttacgattt

SEQ ID NO: 25729 - DNA, 286 bp, Zea mays
agcttgtgaatgacttgccgaagcaacagaatttgtttgttgattacccacgtattctggtatatagggagagtagcacgaagcagtatgtaagacctgcttcggctgattctgccgcgcctctgcttcggcaatctccttttgcttctgaatggtgacctggcatgttcttgtagtgtggcccttgtcttcaccacagaataaacaatagagctttctgggctgatccctataccttcctccgaagcccctaccgcctctggccctcggggctggtgggctaaaa

SEQ ID NO: 25730 - DNA, 497 bp, Zea mays
  unsure (1)..(497): unsure at all n locations
tggacgtanagagtgccttcctcaatggacctatctatgaagaggtctatgttgagcaacctcccggctttgaagatagtgagtatcctcaccatgtctataaactctctaaggcactttatgggctcaagcaagccccaagagcatggtatgaatgccttagagatttccttatcgctaatggcttcaaagtcggaaaggccgatcctactctattcactaaaactcttgaaaatgacttcgttgtatgccaaatttatgttgatgatattatatttgggtctactcaacgagtctacttngtgaagaatttagtaggatcatgacacacaagttcgagatgtctatgatgggggagttgaagtacttcttgggatttcaagtgaagcaacttcaagagggcaccttcattagccaaacgaagtatactcaagacattctaaacangtttggaatgaaggatgccagcccatcagacacccatggaactaatggca

SEQ ID NO: 25731 - DNA, 426 bp, Zea mays
  unsure (1)..(426): unsure at all n locations
agcttcaaatgataatctacaagaaagtatgtgtttttcttaatgccacaagcctcaaagggttgatcttcacccaaaggaagaaaggtgaaaagcaaaggtatgggaactcatcttcttaatcaatatagttcccatcaatggntgtttactttaatatatcatattctacctatgtaatggatggattctttattggaccaaaatcggataaatgtgcattcaatctcattctaataatatgcactccttcattataaactatttcatgcccttgctatatttgttctcatattgaattgctttccaggtatgcataataaattcaatatgaagaagtaaatttcctgtgaatgatcaaaatgtttaaagagtgtatatttcttttaatgtgcactaatgttaagaagtttacttcatgtatat

SEQ ID NO: 25732 - DNA, 393 bp, Zea mays
  unsure (1)..(393): unsure at all n locations
ctcagcttctaaggggagaacacgtgataggtttgacttacgtgcatttctaataagatagaccttgtgcagcttggcaagcaggtaaacaagtgggaggagcacatcacaacaagaatgtgatgaccacttcaagacctctggagctgctgcatatggacctcttcggacccgtcacctatctgagcataggaggaagtaagtatggtctagttattgttgatgacttttcccgcttcacttcggtgttcttnttgcaggataagtctganacccaagggaccctcaagcgcttcctaaggagagctcaaaatgagtntgagctcaaggtgaagaagataagaagcgacaatgggtccgagttcaagaaccttcaagtggaggaagtccttg

SEQ ID NO: 25733 - DNA, 394 bp, Zea mays
gaacgtgtatcatgacaacaacctttttgctttatattacctgtcattgccctgagctttgcatatatttggtctgataaaagatgcgacttgtctgaagctataaagaaatgaactttgttcttgatctgaatccagctgcatccaacttctttcctaacctttttagtgtccattagcttcctcacttcatccttctctttccacttccctgcagccgaataaatgttggagagaagtacgtacgtagctgaatcaagaggttcaagtgacagcagcttctccgcagccaactttccaagctcaacattcttgtgaactctacaagcttctaacaatgcgcgccatattgttggacctgctgtgaatggcatgccttcaatgaggctcattg

SEQ ID NO: 25734 - DNA, 269 bp, Zea mays
  unsure (1)..(269): unsure at all n locations
acttccacgcctctgggatacggatacctcaactcgtccttccgcgagaagcaactctcgctcacacaaacattcctgttaccgacagagagtccagatgctcgaaacaagaggaaaaaagacgcagcttttgcagcacagcgagggtgtgttnttctggcctcggcggccgcagaaggcacacgctacaagacgatctgatcctgcaggctcgggtcttcacgctgaaggaagccgaagcaccctcggcatcgacgacgccttcagcg

SEQ ID NO: 25735 - DNA, 318 bp, Zea mays
  unsure (1)..(318): unsure at all n locations
agcttgtgtaagttcttcatccccacatgttctatagcggcgatgccacaaccagcctatgcgagtattagcaattaagcatgcatctanaccggcctcctcttttgcaaaatcaactaaataaagtttgccgtctaatacaccctttaaaagctagggaaccatcactttcttttaaagacagactacattttatattgtaatatagacaattattacccattttacataatatgactaacaattgcacattatttccagacattcaactaatactcattttagataaatgctctttcaaatatatatcttcttaac

SEQ ID NO: 25736 - DNA, 367 bp, Zea mays
  unsure (1)..(367): unsure at all n locations
ccttttcaaagcattttccgaagatcgataacatgcccccttcttgtgccacatgcagcatgatgtatgatgattatgctatgcaaaatgatgtgatgatgttatgttatgcaaaatgatattttgtgccgaagatacacacattcctgcaatggtgcacaatctttngtatcaatactgactntttcattataagcctcccttangagcttcttcgccttttacttcagcggaatcagcgtttatttctcgctgtaagttctgcatccncttatgaacgtctttggaacttcttcgccttttacttangcggtataagctctgcattctcttatgaacgtctttggagcttcttcgtcttttactt

SEQ ID NO: 25737 - DNA, 157 bp, Zea mays
  unsure (1)..(157): unsure at all n locations
tatctcttctatatgctatgaccaatgtgttttcaagtctatttcaaaccaagttcatatgtatattgaagggaattggagtcttccgcgaagaanaaggcttccactccgtaactcatacttcgccaccactccgagcaactctctcttctttggg

SEQ ID NO: 25738 - DNA, 158 bp, Zea mays
  unsure (1)..(158): unsure at all n locations
cacaaaaacatcatgacgaccgacatgccactggagcttctacacatggatctattcagcccgaatgcttacataagcatcggcgggaagtagtacttgctaagtattgtggatgaatattctcgcttcacttgggtattctttntacaggaaaaatc

SEQ ID NO: 25739 - DNA, 315 bp, Zea mays
ttttcttaggacgtgcttggattacagggtctgtgtcgaattttctcaagagaaaatatctaatttcttacttttacttacattacctggtggttgaaatggaggaaggggagtttttccgcccgaaagtggatgatggagaaaatgaaacatgtaagttaaactgctggaaaaaattcctttatacgaatgaaatgcacgatggagaatatgatacatgtacgtctaagttataaacacctatctttaagagatttcatcttataaaaaaataggttattcttttaatagaaatcatttgaaaatagagttggc

SEQ ID NO: 25740 - DNA, 208 bp, Zea mays
ctgttgagtcatcatccacagacatatgactccgaagcctttgagctctcacatggatctattcgtccgatgttactatcttatatgatattttttttttatggatattatttataatttttattaaatttatatttttctattatttttctttttttgatattctttaaattgtaaatatttattatcaattttttatattttttct

SEQ ID NO: 25741 - DNA, 419 bp, Zea mays
  unsure (1)..(419): unsure at all n locations
atagatgcaccaaagaaccatattaagccttcgatgtccataccatctttgctatggaccacactcgttcctttgaaacaattcaaagaacttaaccaattcagatcagatttttagataagagggaattaaaatctcattcccaatgatattcatcaagtatctatcttatgggaaaaacatgaccaatagaattgtccataacttttcatttcaacccaacaatgggatgaccaattcaatcttacccagcgtggtaagtatcatcacttgaaaagttataacatatgcaacactttgtataggaggatgtatgtagaatacagtccataagaaatggtntctaaagacatatgcaatatccatcactatcaccttgtgtttccacatgatagaaatatatggatatctctatatat

SEQ ID NO: 25742 - DNA, 176 bp, Zea mays
  unsure (1)..(176): unsure at all n locations
ggactaacaaatgttcattntgagaaagacagaggttgtagtgcatgtcaagcaggaaagcaagttggtgcccaatcatccacacatgaacataatgaccactgacaggccgctcgagctactccacatggaattgatcgggcccatctcttacataagccatggggggagtaaat

SEQ ID NO: 25743 - DNA, 476 bp, Zea mays
  unsure (1)..(476): unsure at all n locations
cttgaacactcatttactcncaatgggcttacacccatatggacgctcaacgaccttccaagtttcattagacataataaaatccatctcactccttattgcttccttccaaaagtcagcatcagaagaggattaagtatatgggattcctcttcaatggtacttggtgtgtcatccacaagatatacaatgtaatcatcaccaaaggactttgcaatccttggtctcttactctttcaagttgatacattgtcatcttccataggattaagtatatgtgattcctcagtgtgttctaccagaataaaatgctcatggngtatncgtggttcatcattagacgtatcatgtgtagctttcatgggaaattcgtcctaaaaaacgtagcatctctggacttcataatagtaccaactgaaanggaaatgtgcccttgggcaanttctatattgtttggtgaataagtgcccacacat

SEQ ID NO: 25744 - DNA, 291 bp, Zea mays
  unsure (1)..(291): unsure at all n locations
cttcatccccacatgtgcttagcggcgatgccacagccagcccatgctagtcttagcaattaagcatgcatctagaccggcctcttcttttgcaaaatcaactaagtaaagtttgccgtctagtacacccttaaaagctagtgaaccatcacaccttctaaagacggacacatttacattattgaantaaatatttacttatatatctgcgtaaatcctgaattattatacaatatgttatcgtaaatgataataaatattattatatatcgactacatatttattcatca

SEQ ID NO: 25745 - DNA, 327 bp, Zea mays
tcagcggtgggacacatttgaacttcagctcagcttatctattcttttatttaccgtcagaccgaaagaactggtcagattctataggatatgttgagagcctgtgcgttgcaagacaagtcaagatgggacaaaagattaccttatgcagaatttccctacaacaatatgttccaggccaacttgtagatgtcgcccgttcaggcactctatggacggagttgtaggactccgctgcattgggaccagcctggagagagacaagtgtttggccctgacattttgcttgaagccgaagaaaatatccagatggttcgggagaatctg

SEQ ID NO: 25746 - DNA, 187 bp, Zea mays
  unsure (1)..(187): unsure at all n locations
tgccagctttcattaaaatntaaatggatactgaattaatactcataaaggcgagatgacatatctgtcacccccgaataagtaagatggaactttcacttaggatattccaactattcagaaattataaagcccacagaanagaacatgatgctttcattgacctacttttaccatataaaacagc

SEQ ID NO: 25747 - DNA, 402 bp, Zea mays
tctagatatgtcgaggtgacaaatgatgagggtgaattggttgttactaatgtcgcagctaagcaacttcgtcgggtgcccatcattcctcggctttcaagggtgttcctcaacaaggaaatagctctgcatatgacatggccaaagaatggtgtatgtctcgtcactgatccagacataatggtccatccgtccgacggtgatgcgtggaaggcaattgacgagtttgatcccgaatttgcaacgaccctatgagtgtacggcttggtctatcgacggacggattcacacctttcaataccagtgcaagcccttactcgtgttggcctgtcttcattgtgccatataatcttccttcttgagtggtcaataaagaagaagtcatgttccttgcactagtca

SEQ ID NO: 25748 - DNA, 173 bp, Zea mays
cttcatccccacatgtgcttagcggcgatgccacagcccgcccatgctagtcttatcaattaagcatgcctctagaccggccttctcttttgcaaaatcaactaaatagaggttgtcgtctaatacacccttaaaagctaatgaaccatcacttctttttaagacagacacat

SEQ ID NO: 25749 - DNA, 476 bp, Zea mays
  unsure (1)..(476): unsure at all n locations
tcagctccatctatgttatggattgcttttgagtcagtccattttccttcggcccttctggcagcttcctgacttccatgaatagcgatgggtccttgatccgaaggtatcttcatgcaaagataagcaggatgaagaattgcttcgaaagcattgagggtgccacgaccaataattgcattgtaagggtattccatgtcaacaatgtcaaacacaacttgctcagttctagtgttgttgatgaacccgaaggtcactgacatggtgatcttgcccagtgctacaatctgtcttcctccgaagccacagagagggtgtgtagcatcatgaatcttatcttctggctcttgcatttgcctgaaggccttagcaaatatgatatcagctgcacttcctgtatcaaccaagacattgtggaccaganatcctttgtaacacaagagataccatggcatcgttgtgtgggtaatctttga

SEQ ID NO: 25750 - DNA, 134 bp, Zea mays
agagagatggtgtgttcttttgagctcttgcgcctggattggctcctttctttctcatttggtgctgggaacaaaactcaattgtgagtggggttaagttgttaaaattcagaatccccctattcaccccctct

SEQ ID NO: 25751 - DNA, 420 bp, Zea mays
tacaagagctctagacttcactcttttacacatacaagagatcaaatcctcttccaagtccggaatcactccaaacacttagtggctagtcagagagagatttttgtgttcatttgagttcttgtcgcttggatcgcttttcttcttccccattcttgttctcaacacctttgtaatcaaggcaagagacaccaagttgtggtggtccttgtggggtctaagtgacccaattgattgaggagaaaagctcactcggtctatgtgaccgtttgagagagggaaagggttgaaagagacccggtctttgtgaccacctcaacggggagtaggtttgcaagaaccaaacctcggtaaaacaaatcatcgtgtcatccgcttgtagtgtgcttaaagttataaattcagatttcctatcacccc

SEQ ID NO: 25752 - DNA, 163 bp, Zea mays
gatatgcttagccgtcatcattatatattcttaacttcttgttattattatacttcttatgtttctagtattatcttaaccgcattttcttacttttacttttttcttttactctactattttatttatattattttctaatcttcaactaaaattagttttt

SEQ ID NO: 25753 - DNA, 188 bp, Zea mays
cagcttcatacttattatgatgttgttgagagaattgcacataaacttgggttggatgatccatcaaagattcggcttacatctcacaattgttattctcagcaacctaaaccacaacctattagatataggggagtagaacatctactggatatgcttgtgcattataaccaagtcaaattctcttt

SEQ ID NO: 25754 - DNA, 471 bp, Zea mays
  unsure (1)..(471): unsure at all n locations
tctactgtagtgattaccgaaagatacctattgaagcacactaccaaggctaccaattgaaagatcatcactgtcatagctccatgatatttaaagataagcatctaggatcaccaactattatagagcatgagcaatctttaaatacgcaattactcacaactttatataccaattactcgacttgtggaggtacccaagtcctgattgctccatttcttgctcattgtcccttttccaccttgagactatataggatcactcaagaaccagttagtcccaaaagacacaagttgtgtgtgctccccctagttgtgcatcaagtatttgagtgacttacaccttgcacattctagcgtgcttagaactagaggggatcacaccataccttggtctaggcaatatatcaatcgcatcacagaagataccaatngaatagatgacataatacaacttatgactagtggaaac

SEQ ID NO: 25755 - DNA, 174 bp, Zea mays
atgcagcttctaagggagaccacatgatatgtttgacttacgtgcacattcgaaaaagatagaccttgtgcagcttgtcaagcaggttaacaagtgggaggagtgcatcacaacaagaatgtgatgaccacatcaagacccctggagctgctgcatatggacctcttctgaccc

SEQ ID NO: 25756 - DNA, 331 bp, Zea mays
  unsure (1)..(331): unsure at all n locations
tgcccgagcttgagccgaggaccagccccaccggaacagtgcgctcacgctcgtcggagttcgtaaccccgctggagcgcgtggaccgggtaacccactgcaacatttcttaattccttgcgcgcatagnctctacaccaccctgtggagctccccgtgcactttgattgaaccctaccgtcgtggtttggccggagcaggagccgccgacgacctccgccgccagcgctcgtggccagagcagctccagcgacctccaacgccgacccgcacaccgacatgaccgccgtgacctccccaacgtcgctgaccaacccactggagctctact

SEQ ID NO: 25757 - DNA, 207 bp, Zea mays
  unsure (1)..(207): unsure at all n locations
accccacatcactctcgcattctaagaaatagtctggtgtcctacgaataattacatctggcctctccccttcttggggctggctcaaactgtagaatcacatcaccagaacccataatatgccacagtagtaggacctgttatctgataaatgtaacaacanattagttttaaattaaatacatgaatgtattatgttattttatt

SEQ ID NO: 25758 - DNA, 216 bp, Zea mays
  unsure (1)..(216): unsure at all n locations
aaggtcattttacctcttttaactatctttttttcaaaaaaaatattctctttcaactataaaattaggcatgcatagcttcttcatcgcctcataaaactgcgcatatgaacctcctaggttctagatgcctaaaatcatgatatctgataagaaattcatgacacggtaaccatantttttgcaaaaagaggagttcatcagaaatacccaagc

SEQ ID NO: 25759 - DNA, 276 bp, Zea mays
cttcacaagttgttactttgccaaagaacattatggttttgctctaaaaaaatagggtccatgatgatgaacgaaagatgccttcgtgttaatgacctttcattttcaaacaatctgtatgtttttttttcttatcttttcacattattcattctctcttttattatcttttatattatctcactactctaatttctttttttcattatctttatactacttttatctttactttgacctcttacttatattattttctttttatatttacctttt

SEQ ID NO: 25760 - DNA, 394 bp, Zea mays
  unsure (1)..(394): unsure at all n locations
acatgtgctaagcggcgatgccacagccagtccatgccagtcttagccattaagcatgcatctagaccggcctcttcttttgcaaaatcaactaaataaagtttgccgtctaatacacccttaaaagctagtgaaccatcacttcttctaaagacagacacatctatatttggtaacagacagttatatcccatatggcacaattgactaacagatagtaaattatatcctagtgactctactaaaaacacattagagatagagtgctcattagaaaatgcaattttacctaacccttttaccttgccttgattcccatcaccgaatatgattgaatcttgggaatccttattcttgacgtaagaggtgaacatcttcttctnccccgtcatat

SEQ ID NO: 25761 - DNA, 394 bp, Zea mays
  unsure (1)..(394): unsure at all n locations
gcttggactaagtcgtctcagttggagatcttccttctatgcaggtgctccaaccangcgcgagcggtgtcngataggaacatggggaggttgcggatgatgaggttgtcgtcgtcccgttccacccagttggcaagccagacggtagtccgcgagccacaatttccggtctcgtctcccccgaattcttttgctattgtntatcttcgctgctatctcatctattgcctatctgctacttatttatcttcagtctttctgtttcgttatncatttatgttttctgttagctcctattatttcatctattctctctgatgacatctttttgcttctattcctcatcatcatatgtctttatactttgatttttttcgatgcttttatctcttct

SEQ ID NO: 25762 - DNA, 147 bp, Zea mays
gctgcacttcagtttaagactatgactgtcactggtcggcccagactgagagcttgcagctacttaaagttgcactgaaccagcctagggctatgaaatctatcagcctgacaggcttttacaccagtaccttatttgcatgtactt

SEQ ID NO: 25763 - DNA, 140 bp, Zea mays
gaggagcacatcacagcaagaatgtgatgaccacatcaagaaccctggagctgctacatatggacctcttctgacctgtcgactatctaagataataaatatttattcatcttataagcaagtatttataaccttcgtaa

SEQ ID NO: 25764 - DNA, 392 bp, Zea mays
  unsure (1)..(392): unsure at all n locations
ttgggttaaccaattcatacccaaaattacatctatatcctggcctttcagaacaatcatgttagcaggaaagttccgcccggccattggtactggcacttcataggccacttctccagtaaaaatgtgtcccccaggtgaatgaattttaaattcctcttttgattcatggtatgcaatgtgatngttctncacaaatntcttgctaatgaatgtatgcgaagcaccagaatcanagagaataattgcagggtgactggccacgggaaacgtacccatcatcactggcttctcttctgtgtagtgccacttgagtgaatatacacgtccgtcttcttgtattttcccacagatttcttgggtgactgatctcagatctgcgacattgatga

SEQ ID NO: 25765 - DNA, 345 bp, Zea mays
  unsure (1)..(345): unsure at all n locations
tctatgggtctagagttattttggtctttcagtcgggattgccataaaactggtgtccacgcttgatgtgagcggttcgggtgcttaatcccaacgggagctgtggaaccaccatccatgtgatgacttatttctcctcttaatttaatgaagtttttatctaatcatatatcttttattatatttttctctcttttttatctanttgtttttttatttttttatttatcataatttatttttatattctatctttatttttttatcttttcatttttttttcttcttatatttgtttctattatttgattttctatttcttcttttttatttttttttattttt

SEQ ID NO: 25766 - DNA, 510 bp, Zea mays
  unsure (1)..(510): unsure at all n locations
atagagatgtatgacaacaatacaaaaacttatgctgatttttttgcatcacccaanacctaatcaggccattagtttatcctgaatcaccacacacatgatgatttatgcatcaatctgaccattggtggaatgcagctgcaagcagatgaggggagatcacacatattggatggatcaattgctagttcataaatgtaagagagatatgatgcaagttgcatccggtactagcttcattgctagctcaataaaagaactttgtaggcctgaatgtcccactaacccagattataggcgaggtaggaggcacaagggccattaagcaacacccaagtccataacaatcntgtacccggagggagcaatagagaaacaacatttaaataanaaagcatatggaccataaatacacagggcacgtccaatagaaggtcgaccataccttaccacgcgcattctatgccaccacaggaagatgtagaaagaaattcaggtacacacaacagt

SEQ ID NO: 25767 - DNA, 200 bp, Zea mays
cttacagtcacctgcagcatgcagcttctaagggagagcacattttgggactataccaatggtcattttgagaaagaccaggtttgtagcgcatgtcaagcaggaaagcaaggtgacacccaccatccacacaagaacataatgacaacggacaggccactataactactccacatggatatattccgccgatagcttac

SEQ ID NO: 25768 - DNA, 327 bp, Zea mays
actaagcttgcagaatcggttgaagaactcaagaaaaggctaactactgcaccaatattggtaatgccagacatccacaagggatatgatgtgtattgtgatgcatcacaccttagacttggatgtgtgctaatgcaagaaggaaaagtgatagcttatgcctcaaggcagttgaggaaacatgagaagaattatcttacacatgatttggaactagctgccgtagtgcatgctttgaagaattggaggcactatatgattggaaacaagtgcaaaatcttcacggatcacaaaagcttggaatatatattcactcagaaagaactc

SEQ ID NO: 25769 - DNA, 432 bp, Zea mays
ctcagcttgggaagcttacggctcctcggagaagttgtcctatggctctgttgaagctgcaggtctctggaaatggctagccacggtggccggtgctctggtggctctggcgggtggcgcaatgctctccggaaccaaagatggtgtctggccaaccaatgtgaatgcggagtgaggtaaggcgcatctgggggtggtcttaaaggcacgggcgaacacagccgaggggtggctcttacacgcgctcaaagtgtgcgcgggcgagcgccagtgcacgctctggcgcctatgcaccacatcgagcatgaggcagcgcatataaaggtcaagttcaagcgaggattggcttcaaatcttcgcgattattgtcatgatcccgttgagagatctcttttcctgacattccttttgtcgttctggatggaggcttat

SEQ ID NO: 25770 - DNA, 397 bp, Zea mays
  unsure (1)..(397): unsure at all n locations
agcttctaaagggagaacacattttaggattaacaaatgttcattntgagaaagacatggtttgtagcgcatgccangccggaaagcaagttggagcccatcatccacacaagaacatcatgacgaccgacaggccgcttgagctactccacatggatctattctgcccgattgcctacataagcattnggcgggaggatatattttccatactttctcattatccatgttcattatattcttttattnttctatcattctatgttacctcattaatatattttcagtctttatgctaatcttaaactcttgttatatttttcatttttaaacctattcgatactccacttgatttctacttctactatgttttaaagtatctatattctttttcta

SEQ ID NO: 25771 - DNA, 267 bp, Zea mays
  unsure (1)..(267): unsure at all n locations
catatgatggttgacaccattgaatggtgtacacttcatattgcagtggtttgtgctatatgtggaatcaaatgacacaatatcaccacagagtgaataatnttttctgcttgtagcgtcagcccagaatatgtagagcaacttttccttctcgttgacaacataactataaaatatgcagagttagccttcttctttctctctagatgtgcaacanagaactgtgcatctgcattctttattttctctctaagccccgatagtaat

SEQ ID NO: 25772 - DNA, 298 bp, Zea mays
tggtcttttattgtactgtccatatgatgtgcccgaaaaggaacagaggaaaaaaaaacttacaagaagccaaggcgagcgcatctagcagagtggactcgattgctcttctcaactcacaataagatgccccacgctttaaaataaacttttaaaatttctctcttcattttccgtctctacttctattctttattttctatacttttgcaattatatcatttctctatattcttctttttcttactacttttttatttttatctttttactttcttatctatattttcatacttta

SEQ ID NO: 25773 - DNA, 342 bp, Zea mays
  unsure (1)..(342): unsure at all n locations
tcacaggagaagcagtttcaccctcttcggacattggtcttccgccgccgcgcgtggaccgagctaaccagtgagtcttcgtctaattccttgcacccacatcttcactagcatcccgtgaagctctctgacccattcaattgaactatcgcgccgtgagtaggccggactcctcgccgccgatgagcatcttcgcctacgcacgtggaccgaccaactccgaccattcccgacggcgggccgcacatcgctgtgatccccgagacctcccctacgtnctcgaccacctcaccggagcaatctcgccgctggaagcccctcacccttttcttcgcgcggtac

SEQ ID NO: 25774 - DNA, 204 bp, Zea mays
agaacacgtgataggtctaacttatgttcatattcgaaaaagatagaccttgtgcagcttgtcaagcaagaaaacaggtgggaggctctcatcacaccaaaaatgtgatgacgacatcaagacccttgaagatgctgcatatggaccttttttgacccgtcgcctatctgagcattagaggatattatcatttgttcatcttta

SEQ ID NO: 25775 - DNA, 239 bp, Zea mays
ctcgggtggaccaaactggaactattaactctaattattccttcaggaggagaatgccaactggtggtttgtctcgggcaggaaaaaaatctcattcgctgatgtgggtaggcgcccgccattgactggtgcgaatgccgtcccagttcgtcgacatcttcgttcttcctattcagctggaaaaatgattgctccgaggacttctggtttcaatagaatgggtttcccttttggagctc

SEQ ID NO: 25776 - DNA, 118 bp, Zea mays
gcccatgccagtcttagcaattaagcatgcatctagaccggcctcctcttttgcaaaaacaactaaataaagtttgccgtctaatacacccttgaaagctagtgaaccatcacttctt

SEQ ID NO: 25777 - DNA, 385 bp, Zea mays
  unsure (1)..(385): unsure at all n locations
catgtgctagtcggcgatgccagagccatcccatgttagtcttagcaaataagcaagtgtcgagttcaactctatcaaaatctactaagtatagctgaccctctaacactcccttaaatgctattgaatcatcacttcttctaaagacagtaacacctatattcgtaaaaagacagttgtaacccattttacataattgcgaaactgaaagcaaggtgtaatctaaagaatctacaagaaaaacattggaaataaaatggtcaggtgatatagaatatttacccaatcctttgaccaaaccttgattcccatccccgaatgtgatagctcgntggggatctttggttttctcgtaggaagagaacatcttcttcttccctgtcat

SEQ ID NO: 25778 - DNA, 178 bp, Zea mays
caagcttacccatgatgatgcatgtgaccagatttaatgttctttatcagcaagcctacatcgacacggggcttaatagactcagatggagacactacacagagactattttctcgtgcaagtcacccgcccggtctcagctttatcatttaaagacccaaagtcctgcttcctggct

SEQ ID NO: 25779 - DNA, 183 bp, Zea mays
ctaagcttgccagccctcggacccgaccggacttcaccggaggcccgagatcgacctcaccggacttcggtcttccgccggcgcgcgtggaccgagctatccagtgagtctccacccgattcctttcgctcatagcttctctggcatcccgtccgacctcctgacctatttgattgaactatc

SEQ ID NO: 25780 - DNA, 103 bp, Zea mays
aacgcgccaatggaaaaatctttacagccgtcaaaaagatgcttcttgacgaaaaaaaggccagtgggcccgatttgtaccccaggcgggctgggcacttaac

SEQ ID NO: 25781 - DNA, 164 bp, Zea mays
ttcgacattattttcaagcatattatattattgttccttcgtcgcaacctttgaaatacataatgaggaatagagaagctactgggaggatcggaaaatgggctgccgagcttaatgaattttctattgactatgtacacaagtcctcaattcaatcccaggcg

SEQ ID NO: 25782 - DNA, 449 bp, Zea mays
  unsure (1)..(449): unsure at all n locations
gcttaatgtctttcaatcgaacctttctatcgcgccattntattggttcggcttgatattttgtgatattttccacagcctgaagtctgatccctcctatagtgtcttttgccacagaataattagcttcgtcttctgccgaagctagtgttcttatcgaccccgctttggcctcttcgggggttatagcttcgtcaccaaacagtaacttgaatggtgtaaaacctgttgaccttgatatagatgtattgtggctccacaccactntaaccaactgatctggccactttcctctgggcttgatgaagataacttcattatcccgccattataataccatttgcctttcgactagtccatttgatacnggtgcctgactgatgcanaatgaattttgtgccgatctgatcacagaaatctttgaaagtttagcatcanactacgttcca

SEQ ID NO: 25783 - DNA, 161 bp, Zea mays
agaacatgtgatatgtttgactatacgtgcaattcgaaaaagatagaccttgtgcagcttgtccagcaggtaaacaagtgggaggagcgcatcacagcaagaatgtgatgaccacttcaagacccctggagctgctgcatatggacctcttcggacccgtc

SEQ ID NO: 25784 - DNA, 461 bp, Zea mays
  unsure (1)..(461): unsure at all n locations
actcagctttaggttcttaactggtaagtttacccctttaattcctgtttatggttaaagcttcctatccagggtcctagttgtaaaacatcaaaacaatacaacttggttgaaatttttgcctagtgaatgcactctaggtgtgtcaaacatatgcaatgcccatgctcatgatgccatgctcaagttttaattatagtaacaccagggggtgtacaatatgatatttctcttttcccttctttctcttttttctattttcaatctcgtgaatttcaaatctaaatttaaatgttgggttgagtctcaccatggatcagaatgtaccanattcaaatattagtgtanagagatatattctcattttatatatttatttacctcattggttangattttcttctcttttctcaatctacattgaccttggggtaaaatcatctctacatactatatccata

SEQ ID NO: 25785 - DNA, 208 bp, Zea mays
tgagtatgaaccacctgcgttttgttgtcgtggtgggaaagttgagctatcttcagtggagacccctccccaacttcaagaggttgtgggatagtgcagactctgatgctaggcactttcgtgaatacattatgtgttttaatgtttctttttcttcattttgctaattgtatcgcttctcattgattaatatgttttttatattatt

SEQ ID NO: 25786 - DNA, 107 bp, Zea mays
  unsure (1)..(107): unsure at all n locations
cagcacttcacctatgagaatggtctgcttattctgtgaggaggataanggacacacaacaaggacatgccaagtcacgattccaaagcagaaggagatagctgaag

SEQ ID NO: 25787 - DNA, 126 bp, Zea mays
gagtgggagaggatatgaactctttggtgtgtcctgtatttaatgggataactcttgtaaggtgtagaagtgtataaacttggatgccattgaatgtggggtggttggggtatttataacccccac

SEQ ID NO: 25788 - DNA, 247 bp, Zea mays
  unsure (1)..(247): unsure at all n locations
agctttgctgaagtcatgcatgatggtgtactcttacctttctgaanaacgcactacgtactttaattgcaatgacgacaccgtaaatgaataaaatagcatgtaaaaaattgtactggtaatccggcctgtagttgaagtgtgttaatcaaagaaccgcgccgacagtgtgtgtacatctattttggtnttttctggtaattattgttagcanggcatgctgggtgctatattttttgtaatcttc

SEQ ID NO: 25789 - DNA, 324 bp, Zea mays
  unsure (1)..(324): unsure at all n locations
ctctacctacacaccataaggcaagaaacatatcgcacaacatttccctcacaccctgttcggatcattggaaatgaattccattttaataatagcaattatgacatatgtcaattaagctcatttagctttatgcgaaatatatttgtatactattattagcaagataacagagatatttgtgctacatttttactataaaggagtgagacgaagagtgtcatgtaagttacagagtagaaaccaaatttactaatgcataagaatcattttccatcctccatctcatngaattgagataagcttatatctaaactttggaaa

SEQ ID NO: 25790 - DNA, 130 bp, Zea mays
cccatattagtcttagcaattaagcaagtatcgagttcagctctattaaaatcaactaagtatagctgaccctctaatactcccttaaatgctactaaatcatcactctttctaaagacagggacaccta

SEQ ID NO: 25791 - DNA, 280 bp, Zea mays
  unsure (1)..(280): unsure at all n locations
agggaactaacaataaatgagtgctgcagattttgggacagcaacacagcagctcttgtttaatataactttcaaatttaacccaaaatgcaactagatttttgaaagcttaaaagtgactacactttggattttacctcacagattcagctattacaggtaaaaagtgcaattaccgaacactgtcagattggacagattgactgaacttcaaaattacactgagattaagcatcaacagggatctaacttttganagtataaatgttactatattata

SEQ ID NO: 25792 - DNA, 76 bp, Zea mays
tgcttttgagtcaagccaattaccttccgcccttcttgcggcttcctgacttccatggataaccatgggtccctgt

SEQ ID NO: 25793 - DNA, 134 bp, Zea mays
aaaaccggactgcgcgtacaggagaccatcacagatggaacctaaacctgcttgtatgactttgacgcctatgctaagagaatgtatatggaatttcctatgggcttgcgaaacaacagactacctctagagta

SEQ ID NO: 25794 - DNA, 372 bp, Zea mays
  unsure (1)..(372): unsure at all n locations
agcctggtatgcactttagaaaatggtggatccttgggacataagggtttgtgccaaactatacagtgcatatgccaccatagccatttttctatggctggtatcccaagacctttcaaatctgtctctaatttgtcgnggtgcttgttgtgtcccacatgcccataagaatatccctaatgcctcacatgaccttcccctcttttttnctcttcncctctttcttctttccttttcttctctttcctcttcttctnttttcctcttcttctccctcctttctctttctctccttttccccctcctcttttcttcctcttttcctctcttctctctcctctttcttcctcctttctccttctcttcctcttt

SEQ ID NO: 25795 - DNA, 269 bp, Zea mays
  unsure (1)..(269): unsure at all n locations
agcttctaaaggggagaacacatttgggactaacaaatgttcattttgagaaatacaggattngtagcgcatgtcacgcagggaagcaagtcggtgttcatcaaccacacaagaacatcatgacgactgacaggccactcgagcttctaacatggacctattcggcccgatagcttacataagcatcggcgggagtaagtactatctaantattggggatgattattctcgcttcacttgggagttctttttgcaggaaaaatctcata

SEQ ID NO: 25796 - DNA, 387 bp, Zea mays
cagcttatccccgacatctaatgcccgtcggcttatggcccacgggaattaaccatataccgacgggaattactaaatcccgtccgtttaaagcttattcccgtcggttcttatccggaaggaattaaatggattccttgtatgttgagattgaatcatggcacatggctaacttcttataacaaatttcacattttgttatctccttaacacattcattttttatgtcctttctcttattacgtaattctcacttttttcttttatttttcattctattaacttttatcttttccatcatcatttatatcacatactattatttctacatattctccatactctgttatttaccattctcttttattctccttcttttcttgtcta

SEQ ID NO: 25797 - DNA, 312 bp, Zea mays
  unsure (1)..(312): unsure at all n locations
tcaccgaaatccaaaccttcgacttgtgaatatcctttggccacaaatcgggctttgttccttgtcaccacaccatgctcatcttgcttggtgcggaagacccacttggttcctacaacattttggttaggacgtggaaccaaatgccatacctcgttcctagtgaagttgttgagctcctcttgcatcgccaccacccaatccgaatcttgaagtgcttcctctactttgtgtggctcaatagaggaaacaaaagagtaatgctcacaaaaatgtgcaacacgagatctaagtggtacccncttatgaatg

SEQ ID NO: 25798 - DNA, 424 bp, Zea mays
  unsure (1)..(424): unsure at all n locations
tatctcagctctacccccccccccccccgcgagaccctttcccgtttctttcttaccataatgaatgcgatatcgaatgtcatacttgatgcatatttactttatttgttcccttgtgtgatgtactgtttgtttcccaatttgaatggatgaatgtatgtatgcttgcaatcgcatagagaacgatccggtcgaagagcccgaggaactcgcaggagaagcccctgagcagcagtcggttggtggaggcaagtgtcccttgacctatctctgtcctattcattatttaattcaccttccgctctacacatttatgcctaaggatngactagcttttgttacccatgtcctttgctacctatctggggtggatttatatnngttagctttatgctattgcttaactctaatcaatgaacatgat

SEQ ID NO: 25799 - DNA, 234 bp, Zea mays
  unsure (1)..(234): unsure at all n locations
agcttgctataaatttacaacatatatttgctcgtgtttcacgttttctcgcgacaagatggtttttttcatacgtttttttttcgtgtttcatgttttttacggtacaacggttttgactgacaccggcactctggcctgccgtgcctgagtacctctcttgtggcacgcatgggcatgggcatgggcttatatgttgtgctngtggtcttcattcctctacttccttctctt

SEQ ID NO: 25800 - DNA, 418 bp, Zea mays
  unsure (1)..(418): unsure at all n locations
cagcttagtacatggtntatgactaatatcttgtctaagtgtttaaacagaaagaagaagaaaagagaagagttggctgtgtatatacaagaggctgnttcggtcttgggcaccggactgtccggtggtgcaccggacagtgtccggtgcgccaggctgcctcgagcgaagtggccgctctcgggaattcgccgatgacgtacggctaaaattcaccggaccgtccggtgtgcaccggactggtccgtgagccaacggtcggccgggcgatctgcgcatgacacgtggccgagccaacgatcggaaggtggcaccggacatgtncggtgcgccaacggcttccagatctacaacggtcgactgcgcttgttaaggaaggaaatcgggcaccggacagtgtccggtgtgcaccggactg

SEQ ID NO: 25801 - DNA, 243 bp, Zea mays
  unsure (1)..(243): unsure at all n locations
ctgcagcttctaagggagagcacattttaggattatacaatgttcattttgagaaagacaggatttgtagcgcatgccaagcaaggaagccagttggtgctcaccatccacacaagaacatcatgacgaccgacaggccactggagctcctacacatggatctattcngcccgatcgcttacattaacatccgcggggagaannntttttctcttctctggtctcttccttattcatctttta

SEQ ID NO: 25802 - DNA, 481 bp, Zea mays
  unsure (1)..(481): unsure at all n locations
actcagcttacacctctggactaactcggcggcatcactcttcgctattggccaatagaaaccagacctaanaactttcccaaccagagttctggatgctgcgtgtactccgcactgtctggcgtggatttcatccaatagctacttcctagtagtcgaggaaatgcacttcatgaggactcccatcacaccccttctatacagtgcgccccctatgagggtgtagtgggccgactgtcttgcgatgcgttctactgcagccttatcatccggttcttcttcattctttatgtacctgatgataggctctcttcagtcattggggtccaactctggctgactcaaggtgttgcattcttctgcctganttgagaagaatactcggcgtgacactttctggacgaagatcccnggtgggacatgggcccgactggatccagcttcgacaacgcgtctgctggctgcgtgcagctctttcatg

SEQ ID NO: 25803 - DNA, 188 bp, Zea mays
gcatgcagcttgggtagcatgcaccatcttcaaacttgattcttagatatgggctggattcacattttccttcggaaaacacttgggctccaaacattggccatgtggaaggtgccattgatgcagttcatgataaccaaacttggacccaacaaagagatgctatatcaactcaaatgtggcagcat

SEQ ID NO: 25804 - DNA, 494 bp, Zea mays
  unsure (1)..(494): unsure at all n locations
tcgggaaccccatacttctagccatctnccggtatatatattattctttgttgctgggaggcagtataagaagtcatcttcatttgtgcccgtgaacactaaggcccccttcggatacttcagttctcgggcatagtgattagcttcaaaaatctcttcttcagataatctcttccccgaagcatgtcgtacaatataatcacgtattttggaagatgcttcgggggtagcagtgccagtttcttcattcaaaattttgtctgccatttctgttttttcagtttccaagcatttcaccttggcgggctctgaaggcccggcttcagtttcagactgtggctntgaagcttcggcgtcaaagggttcagtgtgcacttcggaagtttagcaatttctttggagtgtgcttgaagattaattgtctctaaacatctacacataaccatctttttctttanggtcactgtgaccctatgcttnttgtgctcagtttg

SEQ ID NO: 25805 - DNA, 131 bp, Zea mays
attttgagcccctcagttttctattttacaatatgaccactgggggtgattaagctggtttttggctcatcttccttcttcatccagatttgatgatagcctgaataacaatctagtagactcatgaactc

SEQ ID NO: 25806 - DNA, 415 bp, Zea mays
  unsure (1)..(415): unsure at all n locations
tatcacgacttcattttcctcgggagtcggacaagtcttctcttcttcgtcagccctcacaacagacatgtcccgaaaatatctgccccttatattgacaagatgactttctttaatactggatttaccaaaaaccgcatggcttggtcgccaaggtcgatcttcggagtcttcaccaccactatccacatcataactgtcactgtcaccagtatcttcagataaaccctccaaaatctccctagtaatcttctctgtattagtctttgatattgattgaagaaagcccagatgcatctcctcagaaaggctcagcttcgaatcaccaacagctttcttatcttcagacatcttcacaaacgctgagaaagtgctctcgaaaccgaagcttanannnaataaaaagtcaagctag

SEQ ID NO: 25807 - DNA, 176 bp, Zea mays
aagattcttcattccaacatgtgctagtcggcaatgccagagctagcccatggtagtcttagcaattaagcaagtggcgagttctgctctatcaaaatctactaagtatagctgaccctttaacactcccttaaatgctactgaatcatcacttcttctaaagacaataacaccta

SEQ ID NO: 25808 - DNA, 364 bp, Zea mays
  unsure (1)..(364): unsure at all n locations
ttaggcactattaaactcagcttttcaacgacggattcctatgcttcctacttcctgaatcccgtagcgggttttctcgaactagaaccctgcctcgctttcttcatagaggtgtatggggtccgtacaaccccatggcaaatgggtaacatgacttgtgggtaaagatgtgcaacctctgcagagtgcaaaactggtatatcaaccgtgctcacggtcatgagcggctcggtcactcacatgattaacttatggaattaaacttaatttgtcatatgcattgcattgtgggtggtggtattaatcttgatatcttatttaattggngtggtatctacttatatttagtaactgctaaaaaaat

SEQ ID NO: 25809 - DNA, 188 bp, Zea mays
cagcttaagaatgagctaaacatctttgattggaacattgcagacattgctcatttatatacctttgatcatgtctctttcatttggtacaaatgcatatttttattcttcttgtgccacaagctaagactaatgtgcttccaagtatatttctatccttagtcttagattgaaagggaaatggagta

SEQ ID NO: 25810 - DNA, 389 bp, Zea mays
  unsure (1)..(389): unsure at all n locations
tgctgaaccaactcagagaatccaggttggtggatccaatggttttcaaaacggaagatttgggcctttggaatagaagtgccaatctgaattctgcacggtgtgtgatcagaagttggtcttgagagcagaaacatcagagtgttcgggaaagcactaatccagtgagttgaagtaaagcaccagttgatttgttcgagaggatcttcttgcatattggaccaagtgntaatttttcctttgaggggaatntcctgcaggcctaccgaactaataatttcattgaatgtgaacacatctgtcatataccacccttcctgttctattttctggtgaacggtacatngtgaagcacctactatcatccaatcttgatcatctgcgatatg

SEQ ID NO: 25811 - DNA, 214 bp, Zea mays
  unsure (1)..(214): unsure at all n locations
aatggtcattttgagaaagacaagatttgtagcgcatgccangcggggaagcaagttggagtccattattcacacaagaacattatgacgaccgataggccgcttgagctactccacatggatctattctggccgattgcttacataaaccataatgggtgtaaatgtttgtgatgcagtnattacttgtcgtgttctttctttctctttcctg

SEQ ID NO: 25812 - DNA, 381 bp, Zea mays
aaggggaacaaaagggagaagaagcactacaagaaagccaacggcgaggcgcatatatgcaaggagtgggattcggattgctcctcctccgactccgacaatgagggactcgccgccaccgcctttaacaaatcggccctcttccccaacgagcgtcacacgtgtctcatggctaaggagaagaaagtaagtactcgaaactctacttatgcttcttctagtgatgatgattctagtgacgatgatgaaatagactattctagtttatttaaaggtctagatagaattacgattggcaaaattaataaattaattgatgcattgaatgagaaggataaactcttagagaaacaagaagaattattgtatgaagaacatgat

SEQ ID NO: 25813 - DNA, 352 bp, Zea mays
tcacagtgcacaagagctaaaaactgagtgagcgggagtggttggccacaaagcgtgccaaatgagttcgcggtatggccgtatttatacgctcggtgcgttgaaagttgaaaagaccccacttgtcattgaatgttgctattctagcaaagggaaggggttttttccgaccttctcgcgttaattcttttctctcatttcaattacatgctatattctttgcacttttcattccctcttttcttatatcattgtttgtcatctgtctttgtacacttttcttcacctcacttattttatccattttatctatctacttcctatctccgttttttatctttatttttctctc

SEQ ID NO: 25814 - DNA, 414 bp, Zea mays
tagaaaaatctgatatgaatctgcggtaatacccagctagtctaataaaactccggacttggtgaacagttgttgggggtttccattccagaatatctttgaccttgctaggatctaccgcaattcctttagctgataatacgtgccccaaaaattgaatttcttccagccagaatgcgcacttactgaacttggcataaagctgatgttccctgaggcgcgtcaatacaatccgtaaatgttgagcatggtcctcttcattcttagaatatattaagatatcgtcgatgaagactaccacgaatttgtccaactcgggcatgaacaccgagttcattaaataagtgaaatgggcaggagcatttgtgagcccgaaagacatcaccaagtattcaaacaatccataccgcgtag

SEQ ID NO: 25815 - DNA, 281 bp, Zea mays
  unsure (1)..(281): unsure at all n locations
tgaattttatggctatcgtttaatttattaaattccaaaagtctaggtttaggccctcctaaatgctacataaatcatggctgaagcttaaaattttggaactatttttattaaatactaagggattntaaagaatncagtaaaaatggtctcaatgatttaacatttttctataaaatcccaaacaacccactctgccttccttttgcgtttacaaatacctacgtttctgtcttactatcataattcgtatcataattttgtatctctataacttgtat

SEQ ID NO: 25816 - DNA, 450 bp, Zea mays
  unsure (1)..(450): unsure at all n locations
tctatggtatgatgatgatgatcctacaaatggctaaatgaatgtgtatgaatgcaatgaatgttgtgatgtaatgtgcaaatgaatgtccatacacacgcatacgaagccacacccagactcttgatcaccttatgaacgtcttttgagtcttaagctctacatccccttaggaacgtcttttaagcttcttcaccttgtatttcggtggtataaggtctgcatcccttaggaacgtcttttgaacttcttcgccttctattttgggcagataagttctgcatcccttaggaacgacttttgaacttcttctgcttatatttcggcggtattggctctgcttcccttaggacgacttttggcagaaacttacgctggctccttatgacgacttnttgagcttgtcggcttgcatccctgggacactttgagctccctgtttnttttttc

SEQ ID NO: 25817 - DNA, 398 bp, Zea mays
  unsure (1)..(398): unsure at all n locations
ctaagctngccatacctgtcaagcaacagcacatgccagcacagcagctacatgtcataccggtaacttggcctttcgcatgctggggattggatatgaatggacctttcaagaaagctcaaggaggatacacccacgtattggtggcgattgacaaattcactaaatggatagagttcaagcccattgcttctttaacctctgctaaggccgtggaattcatacaggatataatattcagattcaggataccaaacagcatcatcactgacttgggatccaacttcaccagttcagaattctttgacttctgcgagcaaaanagcattcagatcaagtatgcatctgtagcccatccgagagccaacgggcaggttgagcgagccaacagaatgata

SEQ ID NO: 25818 - DNA, 259 bp, Zea mays
  unsure (1)..(259): unsure at all n locations
tctatcatcactctgagtagagntgngaattgacatgacgtgccttgggtagaatcttccttcgaagcccctggtcatttcagagaacctgtatgcttccttccgtctttggcagaagtcattgtcagctcgaatatactcgtccatcttctggagcagcttctccaaagtttgaggaggccttctggcaaagtattgggctgaagggtccggccgacgccccttaatcatgggctcaatgacaatttcattgggcact

SEQ ID NO: 25819 - DNA, 447 bp, Zea mays
  unsure (1)..(447): unsure at all n locations
tttcgcatcaggttccagaccttggcttctcactgtccactctaatatattcagccttatgattgcttcgggggtaagttggtgaagatagacttcaaatattctcagcaccttcacgacanagctgctcangggaaactgtaatccagctttcaaaaagcttcggaacaccacgacttcattntcctcangagtcgggcatgtcttctctccttcgtcggacctcacaatggacaagtcccggaaatatcttcccctcatgttgacaagatgattctctttgatacttgatttgccgaaaaccgcatggctcggtcgccatggccgatcttcggagtcttcaccaccgctatccacatcataactgtcgctgtcatcagtgtcttcagataaaccttctaaaatctctttggtgatntttctgtattggtcttcgaccatgctata

SEQ ID NO: 25820 - DNA, 166 bp, Zea mays
tccatctaggagaacttgcacaagggatattgtacgtcattactttgaagagaaagccaagctcaagaagttgttcaaagattcttgtcagagagtgtgcctgacaacagatgcttggacttctcaggttcaagatggatatatgactgttacagccactttcatt

SEQ ID NO: 25821 - DNA, 452 bp, Zea mays
  unsure (1)..(452): unsure at all n locations
tattcaccgtattctcaatcaaaggatcactctgctctagcttcgtgaaaagagggagcttcgtcaaaaatactcaacttcgttaaaacgcaagaaattcaacatcaaatggccagagtgcgctcaacagctatggttacccatgacggagaggaagccgaagctactgaaactgctccaatctccgaagttatgaggcggtcgggactagttgtaactgaaggctctcctgacgaaggtgcccctgctactgaaacggagcangcagacattgaagaaggtgatattggtgaagaagagaatgattataacaccgctatgccatcgaagcccagccatttggatnttggaaagtcaactgtgtctgaagctgatatggctatgatgacgaagctaggctacttcagagaagccgacatggggtngattcactttggtggggaagaaactat

SEQ ID NO: 25822 - DNA, 169 bp, Zea mays
  unsure (1)..(169): unsure at all n locations
ttgaagatagtgagtaccctaaccatgtttataggctctctaaggtgctntatgggctcaagcaaaccccaagagcgttgtatgaatgccctaaagatttcctattgcaaaggcttaaaataccgatgatcactatctttctttatcctcatctcttaatgatttatgt

SEQ ID NO: 25823 - DNA, 519 bp, Zea mays
  unsure (1)..(519): unsure at all n locations
attagcgacctattaaactcagcttgccgatagntctgatggtggtgcgttctgtaatgttatataacangcgtaaaggaagaaggcgtgctcagcaggagcgagccgctccgcaggatgaggtgccccagcagcagcacctgccgccctcgcccccgatgtcgattgagcagatgtttctgatgcagactcangcagttcaagccatcggtcagactctggccgccattcagcagcagcagcagcagcaacagcagcaagcaccaccccagcctcagatgcctcagatgcctagagacaagcgtgctgaattcatgagaggtcatccaccaacgttcgctcactcttctgaccccatggatgctgaagaatggctgcgcactgtggagcgggagttgcataccgctcagtgcgatgacagggagaaagttctgtatggtccccgtctggtgagaggagcagcccagtcatggtgggagtcttaccttcgcacccatgccaaccncgacgccatcacct

SEQ ID NO: 25824 - DNA, 88 bp, Zea mays
  unsure (1)..(88): unsure at all n locations
cccattcttattatagccttcggagtgagtngatgaatgtagatttggaatgttttcagtacctcaataacaaaattgctcatgggga

SEQ ID NO: 25825 - DNA, 292 bp, Zea mays
  unsure (1)..(292): unsure at all n locations
tgattgaaatagtgtgtaagcaaagtaaaccctataccaagtatactttggacatgagctctatataccacaggtggatttaaaggtaaagagtagcttggctttatgaggatagagaagtttgttttcaatatgagcattataagtggtgaagcacttatggtggttgagtatctctaaaccctaaacctgagccccaaaagtggaattggagatntagccatactttttgaaaaagtgcatatatcaaagtgattgggtttggagagcctaacattntttccatttggag

SEQ ID NO: 25826 - DNA, 310 bp, Zea mays
  unsure (1)..(310): unsure at all n locations
agcttaccacatttgaagcatgagcgcttcctctttgtcttggtcttgcttggctgccccttgcggccttttagcgccgtcttgaatctcttgatgatgagagccatctcttcatcattaagatcggccgcctcaatttgtgccaccttgctaggtagcatctccttgcttcttgttggctngagaagcaaaaggtgaagctcattgattgactcctctatactactctttactattactccgtctctagtgacgagctccttgtatgttctcaatgaacgtaaaaataatcattgacttattctaattt

SEQ ID NO: 25827 - DNA, 155 bp, Zea mays
  unsure (1)..(155): unsure at all n locations
tggacgaactcngcgggcgaagaaagcgtgtgccgatggcgactcttcggcgacgagctgngggaacctagctttcaacttcgggtgcggtgggcgcgactcgtccgttgcaagaacagtcacctctacagcgccagacccgcccgcgcaagccc

SEQ ID NO: 25828 - DNA, 314 bp, Zea mays
  unsure (1)..(314): unsure at all n locations
aaggaaattttgggccagacttggtacttgaggcacaagcaaaggtcaaggttattaccaagaacttataagctgctcatgccaggcaaaggagctatcatgataagaggcggaagcctctacagtttgaagtgggagatcatgtttaatctaaggtatcaccaaccaagggtgtccagagattccggatcaagggcaagttagcttctcgttacattggaccctatgagatcaangccagttgtggacctgtagcatatcaattggaactgccacctcacatgtcagtagttcacaatgtgttccacgtatct

SEQ ID NO: 25829 - DNA, 396 bp, Zea mays
  unsure (1)..(396): unsure at all n locations
gcttctaagggagaacacgtgataggtttgacttacgtgcaattcgaaaaagatagaccttgtgcagcttgtcaagcaggtaaacaaagtgggaggagcgcatcacagcaagaatgtgatgaccacttcaagacccctggagctgctgcatatggacctcttcngacctgtcgcctatcttagcatatgagggagntnacgttttctctcttctttctacgtctttatatattactttcttcttatttctcgcttattctatacttttttctcttgacctatattattattcgtcattaatgttaattctaatgacccactctctttctctcatgatatatctagtctcttactagtcattgtgaattgtcattatgacatcaactattatattat

SEQ ID NO: 25830 - DNA, 173 bp, Zea mays
ttctttggctctcttgtggaaccacatgtattctaatgtcggatgtctccattataaagcatgctcgagcaaataaattttcgtctctaactcagcctcgacaattttacattaatttaactatgggacctttggtcttaatcataccatggaccttcctgcgccacattatc

SEQ ID NO: 25831 - DNA, 505 bp, Zea mays
  unsure (1)..(505): unsure at all n locations
ngaaatcctttntgtgctttcccacattcaacttatgcatactgtgatactcagntcagtgattagntgatatcagatttcagatggcgactctgagattgattatctttctgttatctcttattaaactcgtaaaattactgcagaacacaagggagacagcttttgcgcttcgcaagctgnctttgaccaaggctaagcgataccttgaggatgttattgctcacaagcaggcaattcccttccggagatactgtggagggtgtggtcgcaccgcacaagcaaagtctcgccactccaatgggcagggtcgctggccttgtaagtcagccaggttcatattggaattgctgaagaatgctgagagtaacgctgatgtatgccctcttgtctcttccttttcattttaagcgtgcactcacatntcctactgtctggntngacttaacatgtcctgtatttccaggtgaaggcttggacgtggacacctctatgttcacacatc

SEQ ID NO: 25832 - DNA, 413 bp, Zea mays
  unsure (1)..(413): unsure at all n locations
ctaagctttaggttctctcaacttgggntaagtttacccctttaatccctgtttatggttaagntccctatccagggtcctttttgcgaaacacttaaacaatacaacttgtttgaaatttttgcctagtgaatgcactctangtgtgtcaaacatatgcaatgctaatgcttatgatgccatgctcaagttttagttatagtaacaccaggggtgttacatccttccccccataaaagaatctcgtcccgagattaanaatcctagggtaggtaatggtaaaggaaacacatcacatttttatttccttatttctggacaaggcangggtgatgtgggggtcacttctctattacacagctatacaggctttacaaattacaagaagctaaaaagcctgggaaattcttatt

SEQ ID NO: 25833 - DNA, 227 bp, Zea mays
  unsure (1)..(227): unsure at all n locations
ngaagctggcctctgcgcaatgacgaaggacgagcttgcagatagcctctcatataatagcctgaaggtatgaaaattgtatatttggaagcttataaatgttgaattatccatttattcttatactaattcttttcatataaggcttaattgttaacaacgctttgagagcgcagaagaatgccgaagacgagagctataatatcgcttttaacaacctacgaaca

SEQ ID NO: 25834 - DNA, 111 bp, Zea mays
  unsure (1)..(111): unsure at all n locations
ccatgtatttacaataacaaggcagttcactctattaaatcactaattagctgaccttaacactccttaaagtactgaactcactntttaaaaagaacacctaatctttaa

SEQ ID NO: 25835 - DNA, 469 bp, Zea mays
  unsure (1)..(469): unsure at all n locations
agaacacgtgataggttngactaacgttcaattctaanaagatagaccttgtgcagcttgtcaagcacggaaacaggtgggaggagcacatcacagcaagaatgtgatgaccacttcaaggcccctggagctgctgcatatggacctcttcggacccgtcgcctacctaagcatagggggaaagaagtatggtttagttattgttgatgatttttcccgcttcacttgggtgttctttttgcaggataagtctgaaacccaagggaccctcaagcgcttcctcaggagagctcanaatgagtttgagctcaaagtgaaaaagataaggagcgacaacgggtccgagttcaagaaccttcaagtggaggagttccttgaagaggaagggatcaagcacgagttctncgcttcctacacaccacagcanaatggtgtggtagagaggaagaacaggacgctcattgacatg

SEQ ID NO: 25836 - DNA, 503 bp, Zea mays
  unsure (1)..(503): unsure at all n locations
tctaaaggggagaacacatttgggactaactaatgttcattttgagaaagatagggnttgtagcgcatgtcaggcagggaagcaagttggtgttcatcatccacacaagaacatcatgacgaccgataggccgcttgagctactccacatggacctattcggcccgatcacttacataagcatcgacgggagtaagtattgtattataattgtggatgattattcacgcttcacttgggtgttctttntgcaggaaaaatctcaaacccaagagaccttanaggtattcttgagacatgctcaaaatgagttcggcttgaggataaaaaagattagaagcgacaacgggacagagttcaagaactctcanatagaaagttttcttgaggacgagggcatcaagcatgagttctcttcttcccacacgccacaacanaatggtgtagtggagaggaagaatagaactctacttgacatggcgaggaccatgctngatgagtaca

SEQ ID NO: 25837 - DNA, 177 bp, Zea mays
  unsure (1)..(177): unsure at all n locations
attatcatccgatctgtcatccgaatcccattcaactaggtaggctttgccatctttcttcttggtggaaaaattcttcttcttatcatctccatctttgcccttcttcttcttgttagggcaaatcatggcgatgtgcttgggttccccacactaanaacactntctatcattgaa

SEQ ID NO: 25838 - DNA, 482 bp, Zea mays
  unsure (1)..(482): unsure at all n locations
tcaatggaccaattcttgaggaggtctatgttgagcaacctcccgactttgaagatagtgagtatcctaatcacgtatatgaactctctaaggcgctttatgggctcaagcaagccccaagagcatggtatgaatgcctaagagatttccttatcactaatggcttcaaagtcagaaaggccgatcctactttatttactaaaactcttgacaatgatttgtttgtatggccaaattatgttgatgatattatatttgggtctactaacgaatctacatgtgaggaatntagtaggatcatgacacanaaattcgagatgtctatgatggnnggagtgaagtacttcttaggatntcaagtgaagcaactccaagaaggcactttcattagccaaacgaagtatattcaagacattctaaacaagtttgggatgaaggatgccaagcccatcaagacacccatgggaacaaatgggcatctc

SEQ ID NO: 25839 - DNA, 505 bp, Zea mays
  unsure (1)..(505): unsure at all n locations
tcatatttggtactcaatttgaattgggtcctttgagattattagtaagagccttgggtaccaacacattccatattgtggtctttctctttatgtaggcactcacatatactggacaaccatcttaccatggctccaatttaatatgtaaactcacagataagagccagagttaagaataggagcctttcctccttttggtacatttatcttatcttgctcttcaaacaacccatcttgatcctgttatgagcttggatgggttgctgccatgtgcccttcttccatggttgtttcttatggggcttatacttnggcgttaaatttgttgatacatcatcgttgatgaacatcttcttgataatgtacctaacttgacctttagtgcacctagcttatcanggtagtcgcacaagaattcatatcatatcttaactaaatganggataagtatgcacggaaatttacacatagtgatccgatctagtgntgngcatatggatat

SEQ ID NO: 25840 - DNA, 188 bp, Zea mays
cgcttcagtctatcatccgcagttcaacgtgtcgtggagcgcgccaatgggaaaatattcacagctgtcaaaaagatgctcctcgatgaaagaaaaggcagatggaccgatttattatccgaggcagtctgggcgctaaacacaaccgagtgcatggcaaccgggttcactccttttcgcctttatac

SEQ ID NO: 25841 - DNA, 226 bp, Zea mays
tttttactaatatctgggaaaatggcggtcgagggatggcccataaaataatgaagaagagccgaaaagatattcatgacgctcgagaagcaacgaaagcagctgaaaaagctgcagaacttgaaagacggataggtattacttaatggtttttatctttgtggtcatctgggactcctaacattatcttctcctcttatcttctacatttctatcacacttcatt

SEQ ID NO: 25842 - DNA, 417 bp, Zea mays
  unsure (1)..(417): unsure at all n locations
actcagcttaagacattgaaatcttgtaaagatatggaattatgaatcaaacattactctgtgaatatgtccataccttgtaatatatttatacctttccatccgtgtgtgaattgctatgatgtggacgaaacttctatcttttgagctgaaggcgaanaacaccttcccttctttttgtacacaacgaagcgtatctttgcttctttatgctgaccgaagcattgtcatcaaagctgaagtagttgtatgtgttttatgttatgatgatgatgatgatcctatggatgtctacatgaatgtgtatgaatgcaatgaatgatgtaatgtaacgtgcacatgaatgtccaaacacaaacacgaagccacacccagactctgcatacccttangaacgtctattgagtcttaagctct

SEQ ID NO: 25843 - DNA, 141 bp, Zea mays
atagaataccgccctcttaatgctgtaactatcaaaaacaaatatcctttgccctcgattgatgttctctttgaccaagtggtcggggcccaagtgttttccaagatagaccttcgcttctggctaccattagatcaaaat

SEQ ID NO: 25844 - DNA, 315 bp, Zea mays
  unsure (1)..(315): unsure at all n locations
cttgacatagaaccactccgacttccagcctgctgcccatttgcttcgatagctgattaccggaaactttgtggttttccgataggcgaaggtatagcaaccaaaattgtcatgcaatccatcctttctagccttcgtctgataatgcaactcgtgaacccggcaaaagctgtccgcaaatggttccactgcttggcttctgagtgcccagatataaacgctaagcctaacgatagcgttaggggttagctggtgaaaatagataccgaacctcttcagtacctctgcaataatcccatgtanggggaatcttaa

SEQ ID NO: 25845 - DNA, 391 bp, Zea mays
  unsure (1)..(391): unsure at all n locations
aaaaggaatcgacttaaagaggaaaatgttatctagtcctcgatagattgtccttaagtcaatagtaaacatgaagggcgtgaatgtaattttacacaggctgcgtcctgtgcctataaatagatgaacaatacccccgtactattcacgctgacttgtattcactcgtgcgtcatgcttggacttttgccttctatcaagccgaaggtacaaatgtaatacaatattggtcatgttcatttatgattatataaaaaagatatattaaggatgtcatatgattattcatattatttctcatgtttcatatgcttcttctttcattaatttatactgcgatgatgaaggtacgtncttcatgaccttcgtctgaagatcattatatnctatg

SEQ ID NO: 25846 - DNA, 109 bp, Zea mays
tctttgtacatcaatgcacattgcccccggtgactgaccatggccatgttggggttcattggcaccatcggcgcctatgcgctgttcatttaaaatttcaacgcggttc

SEQ ID NO: 25847 - DNA, 405 bp, Zea mays
actcagcttaagcatggtgggcataggcaagagtgaatgatgtttttggaacaattaaactaaaggaggtagcatacatcacaagttgttactctgcagaagaacataatgtatttgctcgaaagaaaaggtaccatgatgatgaacgagagatgcctccgtgtagtgatctttcgatttttcagacaaacggcaaagccgttggtccacccaaggcatatcacctaagtatggaagaatggaagtctgctttactgtacatgttcacgaatatgcctgaggtggagaaatactttgtgtaagacttgttttcttaaactgttcatatgtgaattagtttatgttatcaaatatctcatgtcatacaataatatttgacagcgagtttgatgaacaaaacatgag

SEQ ID NO: 25848 - DNA, 497 bp, Zea mays
  unsure (1)..(497): unsure at all n locations
tcggcctcgccaccagccaaatcccgcccacccttcgcccaaatctgagttataaatctatttccaatactctgggcttcgctggggatatcaaccaagtctgttggagacagactgaaggttggtttgtttactgtttttccgtgtgtgcaaccagccttcatgaatgctacagccgtgccgcgagaagccagcagggcacagaagtcaccgtgcccggctatcacttcatcaagcgcctcaacttcgccttcaatgtgttcaaaggtgtttggaatatctttagctgaaggggtaaactcttcagagctggctccaaccgagttgaagacccttttcaatcgttgtacacagcggttgccaaagttcaaacatatgttccgaagctctntcaaagtttngtgtagctttgtatttttgtcagcttcagcttcttaatttgctgcanatctttatcttgtcaaagtctctgatttttggagaagtctcgttaatct

SEQ ID NO: 25849 - DNA, 445 bp, Zea mays
  unsure (1)..(445): unsure at all n locations
ttatcagaacactatgggtattggtgtgatatatgaaaattcttcttcaccaagcatgaaaagagaggaaggtggtttttcgtcaaagacttcaaaaccgcacctatgtaaaatatcatgcatcgtaaagaattgaaccataaaaaacaagtatattacattcacggttacaagatattacacatattacatttcagaagtttttacaatagcacttagtcnttcctaagtacaacttccgcagcttcgttcaggagttgattaacaactcgatccatgatagcttcagccatctttttaatttcgtcgtcttctttcgggtgagggcccggagacgctntagtatgatctgaaggaggacaggatatggctacattgctattacaaactgcgaacgaagttanaatcagaaatacaacataataaanaccattagtaataccta

SEQ ID NO: 25850 - DNA, 501 bp, Zea mays
  unsure (1)..(501): unsure at all n locations
ntctaaagctctctatgggcttaagcaagctccacgcgcttggtatgaaaggcttatggatttcttgctttccaaagacttcaaaattgggaaggttgacattactctattcactaaaagaattgacaaagacttatttgtttgtcaaatctatgttgatgatattatttttggatctactaatgaattattttgtgaggaattcggaaaaatgatgtcaaaagaatttgaaatgtctatgataggagaattgaacttctttcttggccttcaaatcaaacaattgaacgatggaatttttataagtcaatcaaaatatttgaaggacatgctcaagaagnttggtttagaaaatgcaaagcctatcaagactnncaatgacacaaatggtcatctagacttagatgaaagangtactatggttgatcaaaacttatcngtcaataatnggtagtttgcttatataccgcatcangcccgatgtatgttagtgatgcatgt

SEQ ID NO: 25851 - DNA, 459 bp, Zea mays
  unsure (1)..(459): unsure at all n locations
gcttgtacttgagagctgaagcgatcttctaacttagttagttgtcgggtaactgccacattaaactcatctactttataatgataaagagttatgatacgatgacagtcgaagtcgataattttggacacaaaccaaaggagaagttatcaaacaacgaaggtcgaaacccgcacagccaaggatggaaaaatatgatattgtcataatatgattngtaaacagtgtgtaaaactttgataaacattattggaattatgtacaaagacgattcatctcccctataaatagatgaatagtgccctacataaagtatacttgtaaactcatctaaacttggtgccaccttgtattgaggagccgaaggtatacttgtaaacttatctaacataatggaagatagaanaaaatgctgagccaaaaaagatgagttntcgtactccanaatgtaatggtatc

SEQ ID NO: 25852 - DNA, 480 bp, Zea mays
  unsure (1)..(480): unsure at all n locations
ctctctttacttgtgatttgcactttggtcatccatgggcatagattcacatttaagcacttgtgnttgcactcaatcaccaaaatacttagaaatggcccaagggcacatttccctttcaaggaggagcagcactagaactacccgcctcgtgattatgtgagagaggtggcacangaggcggtggcgggatgccaaggtcgtcatcatcctctgaagaggtgtcagcaactgtaccctgggtctcaaactatctgaacacctcatcctcagcctgaacatctgtcactggatatggcactgggactgggtcctctggggctagacgatacaaaccaaactagaggagagaggcctcgagggtgccttggaactgaggaggcctgatcagctgcgcgaagatgtgaaagagataatgcgcatatggtagctgacggcgagcatggngaccatncaatattgtatcctcgatctcacaaa

SEQ ID NO: 25853 - DNA, 235 bp, Zea mays
atctcaggggtcgcattaaaagctttgtaaaaatcgagagcacttgactactgctcagactcagttcagctaggattgtgttttcatctggccgatcctaagcataatgcatttcggatatttctcctacccgctattttattcttttcgataaataatgttcttctcaacatcctctctctgacatatctattatctttccctaccatcccttgcattctccttccatacatct

SEQ ID NO: 25854 - DNA, 151 bp, Zea mays
aagggagaacacgtgataaggttgactaacgtttcaattcaaaaggataaaccttgtgcagcttgtcaagcaggtaaacaagtgggaggagcacatcacagcaagaatgtgatgaccacttcaagacccctggagctgcttgatatggacc

SEQ ID NO: 25855 - DNA, 478 bp, Zea mays
  unsure (1)..(478): unsure at all n locations
gaaactaagcttgcagctcgtgccacggtggagtctgcgcgtccgcgagagatagcgatcagcaaaccgtggtctggcatagagctcgagctgcgactcgctcacctgagcccaggcggcagccgccagcaaatcccgtgctcgttgcttgcgtgcgtgacggctcttgttgcttcttcatattctaaggcgatgtgagggcacgatcctgctatgtggtcattcaagtgatttgacacggtcaaatgcagcgcatgcaccgtcttggaagtggctgcatggtcattccatggttcagtacttggagatctcgattgactctttcttccgcgcatagtacanggaaagcatgcagcatctgcttgatgtgcagcatatgtgagtgcggatgagaaaaaaacaaataanattcttagtgatgcagtacagataagataaagtgctgtacttgcacgatctcgtgtccgtattcgaggaa

SEQ ID NO: 25856 - DNA, 205 bp, Zea mays
cgcccgcatgcaagcttgcgacaactgagcagggggcccaagaaatgccttcagatactaatatagctttggcaaaaagtgcgggcaaagaagccgaatctcttattcacgaagcgccctccgaagttcttgattatatcgttcgacatgcttcgggaaaaaaactttctaaagaagaaaatattgaggcgtaacactatgcccg

SEQ ID NO: 25857 - DNA, 350 bp, Zea mays
  unsure (1)..(350): unsure at all n locations
tctaaagtcagagagcacattntaggactaacacatgttcatttttgagaagacacggtttgtagcgcatgccaagcacgaaagcaagttggcactcatcatccacacaaaaacataatgacgatggacatgctgctcgagctactccacatggatctattcgggccgatcgcttacataagcatcgacgggagtaagtactgtctagttattatggatgattattctcgcttgacttgggtgttctttctgcaggaaaaatcaaaaacccaagatacattaaagggattcttgagacgagctcaaaatgagttctgattaaggataaaaaaatataagaagcgataatg

SEQ ID NO: 25858 - DNA, 221 bp, Zea mays
gaaacattaatgagagtgcccttcagtgtcttgcaaaacatagttgctcgagaaagacctgacataacaaatgctcggagattcattttaaaacgaacttactaacctttatttctactttctttccttcttactcatttattttaacctttaattctttcttttaatttgttttcatcatttattttgtatctctaattttatcctttacttcctttttt

SEQ ID NO: 25859 - DNA, 497 bp, Zea mays
  unsure (1)..(497): unsure at all n locations
tctccaanatcttgaggtaaactacgaacctcgatcaaacactatcttctttggtactccatgtaaacacacaatccaagccatatataactctgctagctcagaacctttataagtagtcttgacaggaataaagtgagccactttggtcagtctatccataataacaatatcaaatcatatcctttcgaggtgcgaggtgatccagtaatgaaatccataccaatatcttcccacttccattcgagtatctntaatgggtacaatagtccagctggcctctggtgttcagccttaattctttgacacacatcgcacatagccacatgtgcagccacatctctcttcaatccataccaccaatatttccgcttcaaatcctgatacatcttggtattaccaggatgaatagaataatccgaatcatgggcctccttcaatatagtctcacaaaggctatcaatatcaggaacacatatcctatccttgaaccatac

SEQ ID NO: 25860 - DNA, 466 bp, Zea mays
  unsure (1)..(466): unsure at all n locations
tncactgcatattcgntcggtatcaaacactcttttcccaactcatgtacttacattcaaatctttcttggtgaaggcctctgattttattcgntttttgtgcttaatgtcaaaggggagaaatcactangcccaagcaaaaggaccgcaccgccactcttgtttataaaaacgttttatcttcccaaatgatactattgaactatttataccaaaggggaagaattttttcaggtggagcttttatttggccaaaggaaaagcatttgaaaagggggagaatctttcaaacttgaaaatgctttngaaaaattctattattataccttangtcaattgcaaatgaaattgaaaagatttaccaaaagattgcaaaaacaagcctatgcggtgcaaatgtggtccaaattttaactacgtaaaaacattgatatgtacttnagaactgtctcactttagtaacgta

SEQ ID NO: 25861 - DNA, 461 bp, Zea mays
  unsure (1)..(461): unsure at all n locations
tcacatgtctcgtatgattcanaatcaaacaaagtttanagcccatcagaatgaagcttcttcatgcgattctcacttatatgacccaaacgacagtgccacatgtaggtaggacttaaatcattatgccgaggccttttagcactaatattacagataggtgcatcatcaagatttaaaatgaataacacattcataatggatgcaaaagccacaaacatgtcattcttagagatcacacaaccattgttttcactcgcaaatgaataaccatccttcatcaaacatgaaggagacataatgtttcgactcatactatgaactagataacaattatttaactccaaaataaatcctgatgggaggtggagttgcatcgtcccgacggtcaatgcagcaactcttgcattattgctacccggaaataacttctctctttcacgntctagttctatcattcc

SEQ ID NO: 25862 - DNA, 480 bp, Zea mays
  unsure (1)..(480): unsure at all n locations
ctataaaactcaagcttttacatttagtccctacgcttgagtaaaaataattccaaaatatccaatttagaaactattaaaaagagacccctgatgtatacgtttaattgtgaatcaccctggcaacaataatttggatgtggacattatgtttatatnttgaaataaataatgttatggttcattaactctgtactagaagtgtttacgattaacttctcattttagcacataaaataattatgttagtaactggttaagtatagctctaaatgatataagaaattgaaataggtactangccacatcttttggtcagggtaaaatctacggtttttctaatcatgatatttgtgttcatgcgcctatcgcttattcactaaggactagtgaaatacttatttatgtcaaaataaccatgattatgttactaaagtccgaaattagtaatttacgttaattcttagaatataatggtat

SEQ ID NO: 25863 - DNA, 293 bp, Zea mays
  unsure (1)..(293): unsure at all n locations
tatacttcaacttttgccatgaagttatagttcttggacgaagcgacgagtaccaagtatgagccacatttctgactgccatgataaaagactttgccatggttgttgaattaccaccatacgaagatatggtagcttcgtaactcacaaagaattgctttggatcagttaaggcatcatacattggcaatgtgggggcatgtattgcggtggctatggtgtcgcctgtaactctggtgttagtggggaagcttcgtcatagagtaaatcttggaagttgactggntcatgat

SEQ ID NO: 25864 - DNA, 161 bp, Zea mays
acagctgacaaatactacaacataacaaccctgtagctacgcatgtctaacaacgcatggttttatatgtttgccaggaagcatataacaacacttattatgtgttgcaagtgttatatgtggtgcttacgagcacaaagcaacacatattatgtgttgca

SEQ ID NO: 25865 - DNA, 186 bp, Zea mays
gcgcatgcccagtaggaaaacaagttgggtcccaacatccacacaagaacattatgacgaccgacaggccacttgagctactccacatggatctattcggcccgattgcttacataagcatcggcgggagtaagtattggcttggaatagtggatgattattctcgcttcacttgggtgttctttt

SEQ ID NO: 25866 - DNA, 412 bp, Zea mays
  unsure (1)..(412): unsure at all n locations
agcttaaacatgtttaaatatctaaggttctccttttatttattttattaaataaataaaactacatctatattagttcatactcaatcctaaaaattagagtgtgcagacagtaagtgaaaccattttatttaaacattgaataattctatgaacattttgcaatttgaatcactaaatttcgagttcatatgcaaaagttatgaaataaacaagtttgggaattcaaaatatgaaattagggctaattctgtgattatttaaaagtctagggctaaatctgcatggtcacagggacctgcgcacganaaccggggacggcgggttgatttccagtaaaccgagggtctctntaagaaaactatcgcgcgaaggggtatcaggtgaatctaaccgttaaatcagaaaccga

SEQ ID NO: 25867 - DNA, 410 bp, Zea mays
  unsure (1)..(410): unsure at all n locations
agcttgctacaggccttcttctttntcttcacagcaggaaccttattggaacactaccccacttaaaatgaatgagggtagaactcttggatcttggggatttgaactccttgaagtacctcataacaagggtgttacggggccttcttctgctgttgctgcttgagcgggctgcgaagaaatgactgacacagggttgattctaggacaaccttcttctcatcttctcttcactatcttcttttcactgaccctttctttctctttgctcttcccactggaggattctatcaaagagtattactatcacacattggaggaaaccaaagattatgaaccatgtacaacagtctccaacccaagaatcaccaagcattgtgatcttatgggcgagggagtggaaaatggag

SEQ ID NO: 25868 - DNA, 440 bp, Zea mays
  unsure (1)..(440): unsure at all n locations
agcttcggcttttgaaaatagttntttagtgtttccgaagatgtctgaaggtaagaagactgttgctgagatgaagctgagccttgacgaagagaaaaacttgggttttcttatagcgatgtcaaagaccaatacagaaaaaattaccaaggagattctggaaggtttgtctgaagatactggtgacagtgatagctatgatgtggacagtggtggtgaggactccgaagatcgtccctggcgaccaagccattcagtttatggtaaatcaactatcaaagagaatcatcttgtcaacatgagaggaaggtatttccgggatttgtccattgtgagggccgacgaatgggaaaaaacttgcccacactctatagagaatgaagtcgtagtgtaccgaagcttcttgaaagctggactgcgatntnccttgagtagcttcg

SEQ ID NO: 25869 - DNA, 433 bp, Zea mays
  unsure (1)..(433): unsure at all n locations
agcttacccatgatgaggcatgtgactagttaaaaggtcctcgatcatcaagcctacatcggtacggtccttaattgactcggacggagacactacaccgagacttccttctcgtgcaagtcacccgccaggtctcagctttattatttaaacccaaagtttggtacatggcagaggtacatcttttctgatattgaacccatcaaggccctgatggatccaccatcacaagtttttctttgtaaaaattcccatccaatttgaagcatcactttttgttttaaaataaaacattttgtttttctaaagcacgactaagcatcataaaaatccttttcataaaagggaatcaaggaagggtaagcacatttccatggaaggaaatgcatcaattgtntagcacacaactcctatcacctaatgcatcaaacag

SEQ ID NO: 25870 - DNA, 429 bp, Zea mays
  unsure (1)..(429): unsure at all n locations
agctngcacgcgtggaaggggataagcaccgcgagaaaatatccagggaatgggggcggnggcagattttccttttttttgctgtgcgcgacgatgaggatcgactgcagagataagaatggctgagacataggaaatatcgcgtggctggacggatgaaggagagaagataagcacgacatcaggaaatatcccatgaagaggataaggattggagataaaacaaaaatcagcagaggagacctttcacagtttttctttaacaaaagaatacaaatctgagctctaaagttaggatttgaacagggtataagtgaatcagatcacaacgatacgagtcgacggtgcttgtgacacggtttgatttgattcgaaacccgacaaatttatctggggttgacaccagattcatggcacgagaaattgcgt

SEQ ID NO: 25871 - DNA, 396 bp, Zea mays
  unsure (1)..(396): unsure at all n locations
agcttctatatatggagaacacgtgatacgtctagctaatgttactttcnaaaaggatagaccttgtgcagcttgtcaagcatggaaacacgtgggaagctctcatcatgccaaaaatgtgatgacaacatcaagacccctggagttacttcatatggacctcttcggacccgtcgcctatctaagcatangaggaagtaagtatggacttgttatagttgatgatntttcccgcttcacttgggtattctttttgcaggataaatctgaaacccaatggaccctcaagcgcttcctaaggagagctcaaaacgaatctgagctcaatgtgaagaacataagaagcgacaatgggtccaagttcaagaaccttctagtggaggagtatcttgagga

SEQ ID NO: 25872 - DNA, 394 bp, Zea mays
  unsure (1)..(394): unsure at all n locations
agctttactcaatggacgtgaagagtgccttcctcaacggaccaatcaaggaagaggtctatgttgagcaacctcccggctttgaagatagtgagtaccctaaccatgtctataaactctccaaggcgctttatgggctcaagcaagccccaagagcatggtatgaatgcctaagagatttccttatcactaatggattcaaagtcggaaaggccgatcctacactctttaccaaaacacttgaaaaagatttgtttgtatgccaaatctatgttgatgatattatatttgggtctactaacgaatctacatgtgaggagtntagtaggatcatgacacanaaattcgagatgtccatgatgggggagttgaagtacttcttgggatntcaagt

SEQ ID NO: 25873 - DNA, 406 bp, Zea mays
  unsure (1)..(406): unsure at all n locations
agtctttatagggagaacatgtgttacgtctaataaatgtaaccttcgaaaaagatagaccttgtgcagcttgtcaagcacgtaaacaggtggaaagctctcatcatatcaaaaatgtgatgaccacgtcaagacctttggagttacttcatatggacctcttcggacccgtcgcctacctaagcttatgacgaagtaagtatggtcttgctattgctgatgatttttcccgcttcacttgtgtattctttttgcaggataaaacagaaacccaacggtccctcaagcgcttcctaagaagagctcataatgagtttgagctcaaggtgaaaaagataacgagcgacaaccggtnccagttcaagaatcttcaagtggaggagtctcttgacgaggaaggaatcaa

SEQ ID NO: 25874 - DNA, 426 bp, Zea mays
agctttgtctatttgcctttgcaactcagctaggcgggccaccttctccttcttcctctgcacctgttgatgtagcatctccatctctctgatttcttgatctagctcttcttcctcaagcgtcgggctaacagcttttctcttctggcttctggcctcccgaagagagacggtctcctggttgtggtccagcggttgtagtgctgcagccccagccgctgaagctttcttcggcgccatagcgaaggtctatagcttccgaaggtgttcacgaagactcgaagtggaagtgagttcaccggaggtgggcgccaatgttggggacttgttctcaagtgctaagagttaagaacaaggcaacatacaaagtgttaagtgttaaaatccttcgtccttcgaagcattatgttccttcgggaaataatg

SEQ ID NO: 25875 - DNA, 417 bp, Zea mays
  unsure (1)..(417): unsure at all n locations
atcttgtttagttcctaacactcgtgtaaaaaataatgacacaataatgggagttcgttcccatttatattgntaccttaggttgtatgcttatacctttcctagcttagttatacgatacttgcgtcgactagaacttaagttgcgtaacaccattttgcgttctagatagccatacttagacaaatacttacgtgcacatatgaacatttggttatctgcataggtttatttaagagaaaaatataggtctagatcagacggaaaatagttgtcctaattcatggactcttaagcatcaccattgcttttaatgatcatttggggtcctcaaagattgcttctatattctcgctatgctaagctgttcttttctagcaagtactcagtgtgatcatacgtgtgtctatatatata

SEQ ID NO: 25876 - DNA, 432 bp, Zea mays
  unsure (1)..(432): unsure at all n locations
agcttcttctgccaccgaagctgaacagccaaccttgctgccagaaactgcagagatggccgaagcaccatccacagaaaaaatggaagaagcgaaaaagccgactaaggaaaaaacattagaagttttgagtcctgcagtaaatattgaaacagcaaaaaaccaaaaggggccatcagtgaccccaaaaaggaaaagaatggtaaatgtactagacgtcttggagacaattaagtcttcaagcacaattccaaaaaagagtgttgaagttgctgaagcttctactgaagcttcggctcaacaagctgaagctgaagctgggccttcagagccctacaaggagcaaccttttgaagccgaagcaataaanattccagaaccagtattagttgaagaaactgacaccgccattcccgaagcacctgccagcat

SEQ ID NO: 25877 - DNA, 432 bp, Zea mays
  unsure (1)..(432): unsure at all n locations
agcttctgatttttaactttagaagacggactttcggtgctgtcaaagaacgatctggctgacagcctatcttacaacagtttaaaggtgcgacaaatggaattcttatatttttgttgaattcaaaatttttcgtttgtttaaaactattgacacagacatattcctgtctgcagggcctgatactcagcaatgccctcagagcacagaaagatgctgaggacgaaggatgtactatagccctgagcaaccttcgttccgaagtaattgaactgaggaacgaaggtctcgaaaaagacaaaatattatactcattgatagataaaataaaggaggacgaagctgctttcanaagtcaagctgaagctcagaaacgcgaaattgaagaccttcggaaacaactggccagagccaaagaagaacgtatacttg

SEQ ID NO: 25878 - DNA, 58 bp, Zea mays
aagttgctgcctttattaatcattctagccagatgggaacaattaacaacaggatgat

SEQ ID NO: 25879 - DNA, 435 bp, Zea mays
agcttgaatgacaaattaaaaagcaagccccagtatactttgtctccaaagttctaagtttatcaaagaataattatacagaattggagaagttgttgtatgctgtgttaatggcctccagaaagcttcgacattattttcaagcataccacataattgttccttcatcacaacctctgaaggatattatgaggaatagagaagctactggaaggattggaaagtgggctgtggagcttaacgaattcagtattgactatgtgcatagatcctcaattcagtcccaggcgttagcagacttcattgctgattggacgccaggggctcaggaaaaagaagcaaataaagatgccgaagcttggacagtgttttgcgacggttcctgtggaaccttcgatgcaggtgcggctgctgtcctagttgcaccttccaaag

SEQ ID NO: 25880 - DNA, 371 bp, Zea mays
  unsure (1)..(371): unsure at all n locations
atcttaatttcttngtcgtgcccgggcctcagttttaggtccgtgcgccatgggcgaacccctcattttcggcccagacacaaggccgaacagccatgccggccgtctccttgcgcctacgagccgatttccctccgctccgccatgcccttcacccatgacatacatattaccttccgtgtctttgcacaggctcggacttancttatctccggggccatgcccgaacctcggttttacgcccatgcgccatgggcgaaccccttgtttttggcccaaacgcaagggcgaacagtcatgccgcccngtcgncattctgcccttcactcaaggcatacctcgcaggttccgagtccttgcacacgcttgga

SEQ ID NO: 25881 - DNA, 422 bp, Zea mays
agcttagtataatctggtatgaatcggcggtaatatccagccagtccaaggaaacttcggacctgatgaaccgtggtcgggggtttccactccaaaatgtccttgactttgctgggatctaccgcaatccccctggcagacagtacatgtcccagaaactgaatttcctccagccaaaacgcgcatttgctgaacttggcatataactgatgttctctcaagcacgttgacacgatccgtaaatgttgggcgtgctcctcttcattcttggaatatattaaaatatcgtcaatgaagaccaccacaaacttgtccaactcgggcatgaataccgagttcatcaaatacgtgaagtggacaggagcatttgtcaatctgaaagacattactaggtattcaaataatcatatcgcgtagtgaat

SEQ ID NO: 25882 - DNA, 400 bp, Zea mays
agtttgttattggctagccgaagcaacagacgatgcagggtgattgcccacatattctggtatgtacggagagtggcacgaagcagtgtgcaagacctgcttctgctgattcttctgagcttcagcttctgcgatctcctttttcttcagaatagtgatttagcacattcttgtagtatggcccttgtcctcaccacagaatacgcaataaatttttctgggctgatccccatatcttcctccgaagcccctggtgcctctgtctcttggagctagcggcctgaaggagcttcgctgctgccctgaagactgtgaggtgtatcgtggccactgaagctggctctctttgtcgtcattctgactggagctgtggatatatctgacatgccgagggtggatt

SEQ ID NO: 25883 - DNA, 358 bp, Zea mays
agcttgctgtggtaccggctttcatgagctccctcgtacacccttaatcagattgtccatcagatgctgccatcatgtggaccctcatgtactacgagaggagtaccatgaccatgctacctcatggactgccatgacgctagatgcagacattactgccaattcttcttcttacgcagacctggagtgctcaccgctcatgatagactgctgcagatatcctccatcctcatacatttataaccctggtagcgcgcatgacgcaggccatggcgtacccaggaaatacactgacgaatgataagcttaattcaaagacagattgactcgagcacatactactatccaatcatcctca

SEQ ID NO: 25884 - DNA, 416 bp, Zea mays
  unsure (1)..(416): unsure at all n locations
agcttatgaagattcttcatcccaacatgggctagtcagcggtgccagagccaacccatgttagtcttagcaattaagcatgtgtcgagttcagctctatcaaaatctactaagtatagttgaccctctaacacacccttaaatgctattgaatcatcacttcttctaaagacagtgacacctacatcagtaaagagacagttgtagcccattttgcataattgagatacagaaagcaagttgtaatataatgaatcaacaagagaaacattggaaatggaatggtcaggggatatagctattttacccaaacctttgaccaaaccttgatttccatccccgaatgtgatagcttggtggggatcctggttttnctcgtaagaggagaacatcttcttctcccctgtatgtggttt

SEQ ID NO: 25885 - DNA, 437 bp, Zea mays
agcttggtctgatagtgccgtacatgccgggcctagctagacctacgcgtgcgtgtgaatgcatgcgggattatactcaccgacaataactaatatacaaccagatcttacagcatatatagcggagagatctctaaactgtttgttaagcatacgacgctactaatagtctctatgatatcataggtcgagatgtctatgaatataatttattgatatatacggaagtcaatgcgcgtgtacatcatcggatccataacacagataatgaattcgtatggtgggacatgaggcgtctattattgctcggtttacgagccagatacgctattcactgacagacagttgtatgatcttttatgaatactcattttatacaccgcagaagcctctacattaaacattattgtgcatgtccttatgtgcaagcataccca

SEQ ID NO: 25886 - DNA, 440 bp, Zea mays
agcttaatgagtttctggcacttactcagggaaatcctacattgctgcagtacgctcaggctttcaatgacctgtgtcagtacgcaggctatcatgttgacaccgatgagaagaaaagggacaggttcaggagaggcctcagtactaagctccgcaaccgtctcaacgcagttagggccaacagctacaatgagttagtcaacctggccatttctcaggaagattgcatcacagcccgccaggcagagaagaagaggaagacccctatggcaggaccttcagctcagcctcagcgcttcaggattgtgtttgacactcagaacaggggacatcaacagcagcaaggatgttgggtgatccgaccacagcagcagcaggcacccaaccgctctcagcccctagttcagaggaacaacaaccagccacagcagcagtaccat

SEQ ID NO: 25887 - DNA, 436 bp, Zea mays
gcattgacgccaggcggtgagctctgatctgctgactgcgaatcgatggagacggttgatgtgtgtggtgactgagtgcccttacatgtcgcgcgtctaggattatcttgcaaggataaaaacatcattcgaatcgtccgcttctcgcagctaatgagactgcttgatccattgtactgcattgagtaacaagtggagatctgatgagttgaggtaagatgctgagtagcaataatgcttgctaccatgtatgagtagataattcactctcagccttaagagagtcacacttaactgtgactaagttaagatcttgatttagaaactcagctagtgcttttggcaaccacaccccacagcctaacagttgcatgtctagaggtagaggagtacactcctcacaccgggtaagtctagctgagtattagtatactca

SEQ ID NO: 25888 - DNA, 384 bp, Zea mays
agcttgagatatggctatatgctgaacctctctgtaagactgctcctatcttgtttgagcttagccaagacaaagttggtgctgtagcacaggttaaaagtagggaaaactgctattctaaaagtggagaaaatctgggatgatgtagacaccttttctttggtggatgaaccttgttgagttttgtgatccaaattctaaatctgtaatctcctgcgatctgtaactacccgaaaatagtgagaagttgctggccggcgcccgtggtttttttccccttcgctatacaggggttttccacgttaaattcgtgtcatctctgtgattgatcctctttgagcgggattcatttataacaaacctgatatacttagctggaaactc

SEQ ID NO: 25889 - DNA, 356 bp, Zea mays
ggctgggtggctcaccgggattgcatctgcataacttatggctccggtccgctgcatatgaaactgcttgatccatttgtcgctatagagttgcgaggtgtatcgcgactagttgatctcgcgagatcattgcatatatctcgtgcgacattgtatgaactaataatcctcttgtgtccggcaaacagtccaactctgtggccatattatagaactaccgatccatatactgagcttctgcatttggcagcgagtcccgctctctcaacactttgatgtataaagctcataggagtatctccgggcgcctagtgatgattactcagtggcgatgtacttgtgataggatctcgtca

SEQ ID NO: 25890 - DNA, 432 bp, Zea mays
  unsure (1)..(432): unsure at all n locations
agtctgtatttgtctcccttttggaagccaataccatccttaatgccagggtgtctcccactataaagcatactacgagcaaatttaaatttctcattttctaattcatgctcggcaattntagcatttaattttgctatatgatcattttgttgtttaatcatagcaatgtgaccatggatagcatcaacattaacatctctacatctagtgcaaatagagacatgactaacggtagatgtagagggtttgcaaacatttaattcatcaatcttagcatgtaacatgacgttttcatttctaagattggaaacaatatcattgcaaacatttaaatttttagccttaataatcaaattttcattttctatcttaatgctagcaattgattcattcaacttgtcaatcttagcaattaaattagcattatca

SEQ ID NO: 25891 - DNA, 265 bp, Zea mays
  unsure (1)..(265): unsure at all n locations
agcttgaatgactgcttctgcaggagagcttccgaacgtgaagacttgttcggtccacggagtcgctttatccgagcgcaagttacttatcgcagaaggtgatgagtgaagtatccgtatcccggaggcgtatgagtccctcggctcggtcagccttggctgcttacgtgtactccgtcgtttccaggatccgctttccgaagtagtcaagaagtgcgaaagaaatcctgctaaaaagagatcctttntcgaggaaaaattcgac

SEQ ID NO: 25892 - DNA, 370 bp, Zea mays
agcttgttcttatcccgctggaattaatcttcggagaaacccgacctcgctgcaatatgacacccgaaggtccaacacaacaagcaatgagtgaattcagaattattgcatagcatatcagcacaagggacctggttcaagagtttttagcattcaaagtttttcccagtttgagagaatgggaaatgccgaagctacagggggaaaagaaagaaggtgaactcgtgcgtttaccttactatttcaagtttaaaaagtactttaaagcaccttgccaagagtggctagatacgattgaagcaatgtgtaatgaaatacttggcaattattccatacaagaagatcaattgatgaccgcagccttcggcac

SEQ ID NO: 25893 - DNA, 357 bp, Zea mays
agcttgttaattgagagtctaagttgggcctatccgttcgtctctcccagcctatcttgtaacgttgcatgcctccccttttatagccaaggggggcatgcacaagaatactgagccctgacatgtgggcccagaaacataacagatgtagcatctggcgctgctcatgtttgctgctggagcaatcttcttgcgccctgacacccgagatctgcgtagcctcgtcgtgcagggggaagcttctcgtataagggatgatgagcacagtgcaccgcgcagcacgggcgcactgtttcgactacggactggacaggtgcgccgtctacagggtggccctggcgccgcctgccagcggag

SEQ ID NO: 25894 - DNA, 370 bp, Zea mays
agcttgctagagcttgaaccaaggacccccgccaccggaaaggcgcaatcacgctcgccggagttcggaaccccgccggcgcacgtggaccgggtgagtctctgcgccattttccgattcactgctcacatagcctctacgtcatcctgtggagctcattgtgccgtttaattaaactagatcgctgaaagggaaatgtgcccttgggccatttctaagtattttggtgattaagtgtccaacacaaatggttatgtacttaaactatgacaaatggtggacaaagtgaaaatcaatacaaaggtatgattctagacttagtacattggtttgtgtgtactaacatatttgtctaagtgctagaatcaga

SEQ ID NO: 25895 - DNA, 408 bp, Zea mays
atcttctacgctgagcgggagattttactctgatgtatggatgaagggcagtcgtgagatggctgatgaagcgattagaaaaatgagaaagaatctcacgacgctcaagaagaagctaagcaagctgaagaagctgctgagcgcgcaaggcttataggtacttttactgaggtttagcttcggagtttgttttcagcttcggaattaaacaacatgtttttattgtagctgaactttcacctgcaccggagccatataaccatgaagctgacctagcaatgaaggaaacgttagacataataagaatcgctaatgaagctgttgatgaagacgtcgatagactgctaaatgaagctgctgaaaaagtgctgaaggaagactaaatttttgtatacttgaaagtgtaat

SEQ ID NO: 25896 - DNA, 316 bp, Zea mays
tgcttcctactgcaccaggatcgtggacttgtaaccgacatcggaaattgtttgcatggagcaatctgagaccagatataatgctgatctcgatgattctgaatcacctgtcctgtctaggcttctcagagatcacattgataggtgtgtacatggaatctctcgacaccgctctgaatctacgcgaggtggcatcacctgatctatgtcccgcgcagattgaccataccatccgtatgctgtagaagagggcgctaccttgcctgactcagatggtgctgccccaccatcacatgactcttgggagtacatgtac

SEQ ID NO: 25897 - DNA, 430 bp, Zea mays
agcttgcacaacagcaaacaacttcattcccacgagccgtaatagcgtttgtgacggcggtaaaaaataacagtatgtccgacggctccgactcaagcggtcatgaataaataaatctaggtaacaacttccagacgcaatgtgcgactcactacgcgcacaaaaaatcatctgctcgctgtaaaataattgtattggcgaatcacatgaggatacacatatatgcagtaaagaaccctagtcaaacacattctatgttaaacttgtacatatttgatctgcaggctccagaactggttgggctccaaacacgttggaatgatctacatattctattttctattgagtaaagtgtgctagcggtccacgaacttgtgacttagcccccgaacccaagaaaccgggcaaactgaaagggaaatgtgccctt

SEQ ID NO: 25898 - DNA, 437 bp, Zea mays
  unsure (1)..(437): unsure at all n locations
agcttgatatgtgttttcctccatcattttttgatatgcaagtacacctaatcatacatctcgtggatcagataaaaatattagggccactatatttacatcatatgtttcagttggagcgatacctgngagtattaaaaggttatgtgcgaaatcgcgctcacccagagggttcaatcatggagggatacactacagaagaagtgattgagagctgtatagattacatcagtgacggaacaatgataggtgtgcctgtacctaaacatgagggtaaattatgtgggagagggagaatgggcaagaaaacttttcgcgttgaggattacaagctagtacattgtgctcatggtagtgtactacaacatctcatgatagccgagccttacatagaggaacacctgaatgagcttctaaagaatatcataaccgcacag

SEQ ID NO: 25899 - DNA, 410 bp, Zea mays
  unsure (1)..(410): unsure at all n locations
agcttattcttgtaaccatgataagctagccttgttcaagacgtggatggtacttaagcctccttgagatccttaagggtgaatgcttgagatatttataacatgctttcaaaagtgcatcaattgtcatgagcatttgagcatcacacctatactatgacacaatgcacttctatagatatgatctcattaacctaagtatgtgcacttggcatttaagaccaaaaatttgttgtcctctctatgcacatatttagggggagcaatctatattgtatagaattgattgagcttaattgacatatctntttaatcatgtctctttcctttggtacatttgcatatntcttatctttcattgcgtgccaaggctaagactaatatgtattcatgagcatctcatgtattaa

SEQ ID NO: 25900 - DNA, 439 bp, Zea mays
  unsure (1)..(439): unsure at all n locations
agcttatctgtctatcaaaacagtttgaacaagaaaagctagagcttaattctaaacttgaagccgaagtccaagccaactcaaatttgaagaaatcattaacaagccttcaggataaatgtttgaattttagcaacaattgtatccaacaactaaagaagatcttttactcagttggagccagcagcgggaaatttaccccttcggatgaagatttaccaaaagccttcgatcatatcgaagctgaaattgaagaacttgacgaagttatagctgggcacggtgacttctgtgcctgngtagcttctcggggtactgctgcagcattcctgaaggctggctgcgagcatggaaagatcgtcaacaggcccaacttcaccctgtctccatcaatcctggacgatatacctgacctcgcccgaagtatctcaaatagatt

SEQ ID NO: 25901 - DNA, 416 bp, Zea mays
agcttcaataacttaagcctgtggaaaaaatatattatccttgtggcaaacaacgaaactatttcatgaaatttaaaaaatgtcctttattacacaaaaaataaaactgaatggaaacgactactatcaaggtaggatatctgtcaatagatgtgcttcgactctggcacagtgctattgactgtgcgagcttcggacttttctctgaagtccctttggtgttgatcatattggcccccttctggctgctggccttgttgcagcggtggtggaggcggaggctattgccaggaagcttgaggttgactcgccgaagcaacagaaactgcagggtggttgcctacatattctgggatgtaaggcgaatggtacgaagtagtgtgcatgatttgcttctgctgagcctgttgtgctgc

SEQ ID NO: 25902 - DNA, 431 bp, Zea mays
  unsure (1)..(431): unsure at all n locations
agtttatcgcatttgaagcatgagcgcttccccttggctttggtcttgcttggctgtcccttgcggcctttaagcaccgtcttgaatcttttgatgatgagagccatctcttcatcattaagtctggccgcctcaatctgtgccaccttgctaggtagcgcctccttgcttcgtgttgccttgagagcaaggggttgcggctcgttgatcggaccattcaaggcgtcgtccacgtacctcgcctccttgatcatcattcgcccgctaacgaatttcccaagaacttcttcgggcgacatcttggtgtacctgggattttcacgaatattgntcaccaaatgaggatcaagaacgggtaatgaccttagcattaggcggacgacgtcgtggtccgtccatcgcgtgctcccgtagctccttatctttgtgat

SEQ ID NO: 25903 - DNA, 374 bp, Zea mays
catcactcgtccgggatcttagagcaccgcggctgcatctttggattgaagtctgtgaatcattccagttcaactttctttctggctaggaatgcgaagcttatcgtaagacaggtcggaacctgcgacttatgcatctgccactacattacttgcctggtgataggaatctcatcataatctaatcactcagccattcttgctatattcacttgacgggaaagatgtcttaagcttatgatctgataattgacaaattcccgagatatgagccttttcaggctgaccacacactatctagtatgagtggatatgtctatgccaccaatgctgaacgatgctcactcgctctgctcagagcactagcactgctg

SEQ ID NO: 25904 - DNA, 318 bp, Zea mays
  unsure (1)..(318): unsure at all n locations
agcttgtgacaatatagtctattggatgaatgacaagcggtatttattgcctcggcccaataagaatccgatatactatattccgctaacatagacctagccatatcaatgagagttctattctttctttcaacaatatcgttttgttccggggtatatttggaagagaattcatgtttaatacccttgtcatcacaatattcatcaattctcgcatttttgaattccgacccattatcacttctaaccttnttgatgtcgaaatcaaattgattntgagccaatatagcaaatgacttgaatgtttcacacacatta

SEQ ID NO: 25905 - DNA, 389 bp, Zea mays
agctttaatctctggactaactcggctgcgtcactctttactgttggccagtagaaaccagacctgaagaccttcccaactagggtcctagatgctgcgtgtatcccacattgcccagcgtggacctcatctagcagttgcttcccagtagccgaaagaatgcatttcatgaggactcctgtcgcgccccttctttatagtgtttccccaatgagagtatagtgagctgactgccttgcaatgcgctctgctgcatttttgtcatccggctcctcctcattatttatatatctgatgattggttccctccagtcatcggaatctgactctggttggttcagaatattgcactcttctgcccgatccaatgaaatgctcgggcgtagtac

SEQ ID NO: 25906 - DNA, 406 bp, Zea mays
  unsure (1)..(406): unsure at all n locations
agcttcatcaacttcaacactcttttttggaattgtgcttgaagacttaattgtctccaagacgtctagtacatttaccattcttttcctttttggggtcactgatggccccttttggttttttgctgtcccaatgattgctgtaggactcaaaacttctgatgttttggagccctcagttgcttctcttacctcctcaattttttctgtgagcggcgcttcggttttctcttttgtttctgacaacaaaatgtttgattgttctgattctatctttggtggcacttcggccgtttctgcgatctctggcaacaaggctggctcgattagtttttcagcttcngtggctgaagaaagtttcccggtaaactccgacacccgaagctggttcaatataacgcgggcg

SEQ ID NO: 25907 - DNA, 437 bp, Zea mays
agcttattatccttcatagcaaaagaattatactcatttaagactaggcaatgtttttcctcacggacattggatgtgccgtcatggagctcatgcagttttagccaaatctcattaacaatttttaatgtgctaagagattcatacaagcaatttttggctctagtatttaaatgaatttctttttcttcactcgtggtgggtttcttaggattcttgggtagtttcatcccttcatgagtgactctccaaacacctagattgatggcctctaggcaacaagccattctagcactataatatgggaagttagtgccatcgaagtgtggtggcctatgggtatccatcccctttctctaaaaggtgtcatctcttttagcggtaaagctaaagcgtttcaaatgagccaaaccaggctctgataccaattgtatgaa

SEQ ID NO: 25908 - DNA, 416 bp, Zea mays
  unsure (1)..(416): unsure at all n locations
agctntgttcaatatgacgcataattatacctttgatgtcttctcgtgctgataagtcattcttcacataaaaccattctgtcatccaatccccgggccatctcttccgaaaggttggtacgggacagcttgccccggaccgagaaacgaagctgtagcagccaaagttgttatggtactgttctttgccccaaggctttgtttcatataataattcatgaacattacagaagcttcttgcgtcaggcttcagaccttggctcctcgcggcccacacgaagatatttagccttataattgcctcgggagtaagttgatgaagatagacttcgaagattntaacacctctacgacgaagctgctcaaggggaatcgcaatccagctttcaaaaagcttcggtacaccacaacttcat

SEQ ID NO: 25909 - DNA, 433 bp, Zea mays
  unsure (1)..(433): unsure at all n locations
agcttcgacacagtgacatgcctcaagacgaaggggtgaaccgacttaaagatgaaatgacctaaaagacccatgatgttctgtgttattattgtagtcgattgtaaagggtataaatgtaattatacacaggctgcgccctgtgcctataaataagtgaacagtacccctgtactgttcacgcaatctggtaatcgctgacacgttacgctggaattattgctttctgtcaaggcgaaggtataaatatacctaaattttatgttntaatatttaagtttgcataacagaatatgtgaataatattatgtgcttttgatatatagntatctaatgttttgtattttatatatntcattttacattgttntataactctaatcacgaaagtatgaccttcgtgatatcttgctcatggccttcgtccgaagct

SEQ ID NO: 25910 - DNA, 417 bp, Zea mays
  unsure (1)..(417): unsure at all n locations
agcttattcttttattntgagataacagtcttaagctctcccatggtctccagttcatctcaaggtacctgcatggtctagttagcacagtttggtacccaccttggtatgggtccataatcatctaaatgtgcctttggtacccaaatagcctttatgctagttctaggtgatcttgttatagatctagcacaggtgtatgatttgggtctcctaagcgaatgagattgagacaaatttacttgcttagagacctcacctttattacataccttcgatagatgaccctgctcaccacacagtagaggacaagaagtgatcgtgtggttcttgtcattgcatccaaagcatctncttatcccttcacccttgttggtgtatggacatgatgcgataaggtgtcctgacttgttgcac

SEQ ID NO: 25911 - DNA, 422 bp, Zea mays
  unsure (1)..(422): unsure at all n locations
agcttacctttattcttatgtaactaagtgttagaagacttaggaaggggagaaataattaacaaaaagggggaaccataagaaaaacataagatgtagaaagttgatgagtgcatactatgtcatgagcatcacgtttattttatgacgcactgcaccctatgaatagtatgatataagttgtctccatactttgacccanatatgtgcttttggcatttgagtacaaaattggtattttctgaaatgcacatatttagggggaggaaactatatcataggattcaaaatcttatttatcaaatcttatgtaagctttaaatgtgttgtcatcaatcaccaaaaagggggagattgaaagtgcattcatcccttttgtgagntttggtgatttggataacaacacatttaaaggtctaaca

SEQ ID NO: 25912 - DNA, 421 bp, Zea mays
  unsure (1)..(421): unsure at all n locations
agctntgttctgattgaagaagtagtctttcatgttttgctatgtaaaagcttcggcagaaggaagaagtagtcttttatgttttgctatgtaaaagcttcggcagaaggaagaagtagtcttttatgttttgctatgtaaaagcttcggcagaaggaagaagtagtcttttatgttttgctatgtaaaagcttccgcagaaggaagaagtagtcttttatgttttgctatgtaaaagcttccgcagaaagaagtagttctttatgttttgctatgtgaagaaaagctttggcaaaaagaggaagcggcagtttaggcttcgttgtgtacgaaaagaagggaaggtgtttnttcgccttcggctcaaaatactgagttcgtccacatcaaagcgactcaatcgaagggtaagaatatatta

SEQ ID NO: 25913 - DNA, 433 bp, Zea mays
agcttggtttttgtatcaccttacgtgttaccatggctagggcacacctatgcactcatgactatgatcacatgtgaaagaaacttaatgagccaagggttagagccttggaggctacgttttaaccaacagatgtgaatgaccaacagcattaccctaggtgtgtgcaattatcactttggacaacgggggagtgaaccctacacctctcttgaagcctatctcctaagcaccttggttaaagggaagaatttaagcgaacgtgcaagtcatgaccaaatctttggcacagagttaagtaacttattaacctacaattatagagaggaaacattgctaaaagaccccttaagaaaccccagatacattctctaagtagagaaagagctagagctctctaattctctctaagtcaaagattacacctaatcta

SEQ ID NO: 25914 - DNA, 418 bp, Zea mays
agcttgctattggctaacgaagtgaccattttctaatcaccaacatacaccaactttcaccatttttggatactcgtacgacacgcagttattctaagacatcacaagtacattcaccccatccgtaaaacactagcacatttccgaaaattccccgagactatgacgacaaggcattgatccgccatacaacaaaaatcatgacgatgtcgataggtgctatcaactaatcgtttaaaaatattgaacttacttctcgcttgccactacatcacactttagtcacatgaccatcaggagcattcttcacacggttatacgacaacaacctaaacgttgtgttaacaagacatacatatttctttgttgcgagtataaccatattacagcatatacccgcacacctcaatcaaatacc

SEQ ID NO: 25915 - DNA, 432 bp, Zea mays
agcttcttcttgtacctttcaatagtatcatcaggcctaagctttttctttaacacccatttactcccaatgggcttacacccataaggatgctcaacgacctcccaagttgcattatgcataatagaattcatctcactccttattgcttccttccaaaagtcaacatcaagagaggaatatgcctcttcaatggtacttgggtgtcatccacaagatatacaatgtaatcatcaccaaaggactttgcaatccttggtctcttactctttcgagttgatatattgtcatcttccataggattatgtatatgggattcctcagtgtgttctaccggaataaaatgctcatggggtattgctggttcatcactagatgtattatgtgtagctctcatgggaaattcgtcctcaaagaacgtagcatctctgg

SEQ ID NO: 25916 - DNA, 398 bp, Zea mays
  unsure (1)..(398): unsure at all n locations
agcttcctggaggccattaagacagcatatagcaccttctccaattctgtataatttttctttgataaactgaggacttcggagacaaagtatactggggcttgcttcttagtttgtccttcaagtttctcctggacaagtgccgcactcactgcagagtgcgaagctgccacatacaacagcagaggagcccctggcgcgggtggagttagcatcgttaggtctatcangtactgcttcagctcttcgaaggctntctgctgagctcatccccattgaaagacttcggctgacatcagcacttcaaagaatggtaaatntctctctgctgatctagatatgaatcggntcaaagatgccagccttcctgtcagccgttgagctcccttctttgtgct

SEQ ID NO: 25917 - DNA, 414 bp, Zea mays
agcttaaaggatactattcaactaaagtaagatgaagttgataagaggccaaggtatgaaaacttcctctccttcagttgttttagtattttatccttagtgggatgtaccatagtataggttaaattccttgcaatataaaatgttcgatagtgcatagaactttgacatcaattatatgtgtgcactcatttaaaggaatttagtctatccttttgggtttcaagaatgatggttcattttcatccacatataaggatcatcatttgtaaaatcttcccatgtgtttttaatgctctcttttctaagtatttcaacaaggtccttccaagtgctttcaagatggattcaaaatctacaaatataagagtcttgggttgttcaatcatttgagttcaattgatatcatatcaa

SEQ ID NO: 25918 - DNA, 426 bp, Zea mays
agcttgatgtctttcttttcgatgacaactgattgctcttttatcttgttctctaagttctcaattataacttcgtgctttttatcctctaagtcctgctgcatttttaaagccttgctcaacagcatactctacggacaaataaccttcgttagaaaacatttatgttattacaaataataaaggttagacaaaagttgtttaccttaaaattggaataaaacaaactaccgacaatgtgttgtcgtcggtagcggctgatatctgcttcgagcttcgggaaaccgatactctttgatagagtaccgataattttcgcgccggtctgatctcgtatgcagcctaacctttcgtcattaatgccaccaaagagaagcgctcccggccgatacccacaagatatagcatattcttttagttcttctt

SEQ ID NO: 25919 - DNA, 423 bp, Zea mays
  unsure (1)..(423): unsure at all n locations
agcttgtctgtgttcacacgctngcgttaccgggtgacaatgggtacccaaaacttaaatagcccgttgtttctttttattttaaggaattagaatcttactaatagaatagactattttttagaatgtgacattccaccactttccaaagttatcatataagcctatctcaaattcatgaggtaagagatgaaaatcgattctatagatttacataatatttttctgatgtataatttatagcaaactcttctacttgcttcgctataacataaatatagtatataattatctctctcatatgattcaggataatatacaaatatattacatatataaatatatgaacttaattagttgtctaaattataattattaaaatggaattcaattccaacgaaacanacgtggcctaagtaaaaa

SEQ ID NO: 25920 - DNA, 377 bp, Zea mays
  unsure (1)..(377): unsure at all n locations
agcttgcatgcatggtannaatttagggtccaaaccatagtacacgttttagtccccggcggaccgtaatgctattttggccttccgtgacacatgtttttgtcgtccaacagcgattcttgccttccgaccgccacccattatttgaccatagagactggtaaggttgttttggccttcccgtgagctatagcacacgttttcatggccgagcgaccattttatgtctgtgttcctccacacgttgttttctccccggagcaccttaaagcggttcttggccttccgcgagctatatcacacatttccgtggccaaacaggcaattttatgtatccgacctgccacctctcgtttataccggagaggccgtatggc

SEQ ID NO: 25921 - DNA, 431 bp, Zea mays
  unsure (1)..(431): unsure at all n locations
agcttcgaagggcgccatcttaatgctttcttgatagctattattatatgagaactccgctaatggtaaacaatcatcccatttcggtgggaattccagaacacatgctcgcaacatatcttcaagtatctgatttaccctctcagtctgcccactggtttgaggatgataggccgaactatggagcaatttagtacatgaggatttgtgaagttcttcccagaatttgaatacaaattgaggtccacgatccgacactatagtcttcggaataccgtgcaaactgagaatgcgagcaatatacagtttcgcatatgcgattactggatactttactttgacgggaagaaaatgggcgatctttgtaagttgatcaatgataacccanatagagtcgaatccttttgttgtcctgngcaatcccacaataa

SEQ ID NO: 25922 - DNA, 416 bp, Zea mays
  unsure (1)..(416): unsure at all n locations
agctnttttagattaccacttcatcactttgtgacagcggaacggtttcttatcctctagccctcactatagatacatcatggaagtacttgtctttcattgcttcaatttgaccttgtttgattgtgaatttcccgaaaacaacatggctaggtctccatggccgatcttcgacattctcattctcactctcaatatcgaagctttcactatcgctcgaatcacgagatagcccagctaatatttcattggtgatcttctctacattggtccgttccatggcttcgtagaagccagcgattgcgggatcaacacttttcttgtcttcaaccatttcagtgatggtcatgacagataaccgaagcttgcaaacaattgaacttagagagtatgaaaactaaataacaacagcagca

SEQ ID NO: 25923 - DNA, 423 bp, Zea mays
  unsure (1)..(423): unsure at all n locations
atcttgttctgtgttctgcgatggttcttggggaaccttcagtgcaggagcagctgcggttctagtggcaccttcaagaatcaaaatatgttttgcagtcaaactggatttcagttgcacaaataatattgctgagtacaaagcacttctattggggcttcagaaactcaaggcaatgggaataagaagggccatcctaaagattgactctcaagttattgctggccatgtggataagagcagcaaggcacgagatccgaagcttgaaaaatatctagatgcagtccaaaggttggaagcttccatcgaaggttttttcgtcaagaatattccaagaggtgaaaatgagcatgcagatttgctagccaaatcagcggctcaggggctccctctaccctctgaattatnttttgaagcaataaa

SEQ ID NO: 25924 - DNA, 201 bp, Zea mays
  unsure (1)..(201): unsure at all n locations
agcttgtattgttgcacatgataangggccaggagccggcacaaacatactatcggctcgagacccttataaactggatacagagctacgggagcacgcgacggactgatcactacgtaatccgcctgatgctaagacattaaccattcttgcacctgctttggaaacgctatacgagaaacatcccgggctccaatatgt

SEQ ID NO: 25925 - DNA, 405 bp, Zea mays
agcttctggtgacatggacatggcattgcccattgtgaatgccacagcggcggtgctcgcccgtgtctcggctgcctttaatggcccccttgcccgcgcagtcgtctttggcgtccatattgatggtagtccctctttcttcgtgtgttcataagatgggtcggcagaattagtgtctcacacgcagtggccacgggatttttaggtcacttggtcgtggaagggcttcttattgcagtcatagtgttccagctctccaggaagagctacaaaccaccaaagaagccactcactgaaaaggtcagatgttcttatcgtttgtaactactagaaccagataattcttgatagtggaaggtatcgttcttgtcgtctcttcatgaagcatgttactgaatgccaaca

SEQ ID NO: 25926 - DNA, 373 bp, Zea mays
gatcctctacaacacctgcatgcatgcatttctcgctgatgataccaatgtgcatgagcacactcatgaacttatgaatttccatgaactgtctaagtggatcagaattaaccctcatgctatagttgcctatatatccatctttgtttgatgaccaaagtgctaaagcgtgacctcctattgactatttatcttactgcatgatgcttctgattattgtacccaagacgactctgacatgattatttactaaatggtacctggcacgactgattctatcatgatgggtgataaccgcaaacgactccaagccgttttgcacaagaatgaatacatttcatagggtacgttccatcttctatgtatgatggat

SEQ ID NO: 25927 - DNA, 430 bp, Zea mays
agcttctaaagggagaacacatgataggtctaactaatgcgactttcgaaaaagatagaccttgtgcatcttgtcaagcaggtaaacaggtgggaagctctcatcataccaaaaatgtgatgaccacatcaagacctttggagatgcttcatatggacctcttcggacccgtcgcctacctaagcatcgggggaagtaagtatggtcttgttatagttgatgatttttcccgcttcacttgggtattctttttgcaggataaatctgaaacccaagggaccctcaagcgcttcctaaggagagctcaaaatgagtttgagctcaaggtgaagaagataaggagcaacaacgggtccaagttcaagaaccttcaagtggaggagtaccttgaggaggaagggatcaagcacgagttctcccgctcctacac

SEQ ID NO: 25928 - DNA, 413 bp, Zea mays
  unsure (1)..(413): unsure at all n locations
atcttaatgcccctcctaaaagaatgtctaactttgttaagggcaaggctcccatggttcaagataacgagggttacattttataccctcccggttatcctgaacacaaaattaggagaattcactttagaaagtctcactctggctctcatcatgcttttatatataagagtgaggcatctagttctaggcaatcaacccatgctaaattgtctaagaagaaaactcttataacatcaaatgaacgtaatatttcatttaagacttttgatgcttcttatgtgctcactaacaaatcaggcaaagtagttgccaaatatgttgggggcaaacacaanggctcanagacttgtgtttgggtacccaaggtgcttgtttctaatgtaaaagaacccaaaacccgttgggcacct

SEQ ID NO: 25929 - DNA, 373 bp, Zea mays
  unsure (1)..(373): unsure at all n locations
agctntatatggacgacgatgtcgtacttcgctgaattggtctgaacctggagaaaggtgcttctttatgcccgatatggtgaaagaggctgaggataaggttcacaagattattcataatatgaagaaagcacaagctcgtcagaagagttatgcagacaaacgacgaatgcccttgtatttccttgaaggggactatgtctacttgaaggtctcaccaatgaaaggagtatcgcgttttggggttaaagggaagcttgcacccaggtacattggtccattcctggtacttgagcaatgtggaccagtggcataccgactccaactgcccgaaaccttgtctgctgtgcataatgtgttccatgtgtcacaa

SEQ ID NO: 25930 - DNA, 426 bp, Zea mays
  unsure (1)..(426): unsure at all n locations
agcttgcccgagctgggcctcgggcaagtcggaggtgcgcccgttgcttgaggaggccctcgggcgaggcgtgaatctgcctgngtctgctgttcctgcccgaggctgggctcgggcgaggcgagatcgtgtcccttgaacggacagggctttgtcctgtgttgcgcccatcaggcctttgcagctttgtgctgatggtgtttaccagccgagtttaagagtcttgggggtacccctaattatggtccccgacagctgccaattccaaatcgtgtgttggataattctgctcatgcggcttgagtaggcgtgaggcatangcaatgactttctcattntgcataagtacacatcctanaccttgccttgaagcatcacagaagatgacaaaattctggtggatatctggcagtgtcaagactggtg

SEQ ID NO: 25931 - DNA, 432 bp, Zea mays
  unsure (1)..(432): unsure at all n locations
agcttgactcatgtatccacacattaatccttaattccttttcccgtctcatggtcaaggcatcctccctggatccaagtccatagactaacatagatcccgttatcaagatgaatacaatcaattcctgacctcgcgcgagtgctagaaaaatcactcgacttctaccgagatcctgattagcaagcagctactcgacctagcatactagtattcatctcaaaaggaatcctaagttcatgcaactagaggtttcaagcaactcctacacttaagtgcacattacaatcctacaagcattaagtgtagtaaaatagcatatcataatacggttatgcataaaaccgggggttgccttcaattgctggggctgcanggagatcctcaatagcagcctctgaagcctgctcctggtcctcctcttggacatgt

SEQ ID NO: 25932 - DNA, 398 bp, Zea mays
  unsure (1)..(398): unsure at all n locations
agctntccatattgtattttaacttccaaatcggatatgatatgtatctgtggtggcaaaaacgaaccacagatgtttttggtgatggtggatctcgtggtgaccaaaacgtggtagaactcaaaactctaaaggaataaactaagaccagcaactcgacacaaccgatgcaaccaaaaactcaacaagccctaactaagtagtactagtaaatgctcaatagtttataggattgcggtaaaactaatctactattttttggctttttctggactataggagataagacaacagcgaagaanagtaaatctctcaccgataaaccttgctctgattaccaactgatgtgcacccgttgggtgattgcccgatctttcgatgagagggtgtggaataac

SEQ ID NO: 25933 - DNA, 426 bp, Zea mays
  unsure (1)..(426): unsure at all n locations
agcttgtgaatgttcttcatccctacatgtgctaagcagcgatgccatagccagcccatgctagtcttagcaattaagcatgcatctagaccggcctcttcttttgcaaaatcaactaagtaaagtttgccgtctaatacacccttaaaagctagtgaaccatcacttctcctaaagacagacacatctatgtttgtgaataaacaattgtatcccatattgcataattgactaacagatagtaaattatatcccagagactcaactaaaaacacattagaaatagagtgctcatttgagattgcaattntacctaacccttttaccttgccttggttcccatcaccgaagaatattgaatcttgggaatccttattcttgacgtaggaggtgaacatcttcttctcccccgtcatatggtttgtg

SEQ ID NO: 25934 - DNA, 433 bp, Zea mays
agcttataaaggtataacacctttcgggactaaccaatgttcattttgagaaagacagggtttgtagcgcatgtcaagcaggaaagcaagttggtacccaccatccacacaagaacatcatgacgatcgataggccgcttgagctactccacatggatttattcggcccgatcgcttacataagcatcgacgagagtaagtattgtcttgtaattgtggacgattattctcacttcacttgggtgttctttttgaaggaaaatcacaaacccaagagactctaaagggattcttgagatgagctcaaaatgagttcggattgagaataaaaaagataagaagcgacaacgggacggagttcaagaactctcatatggaaggctttcttgagaaggagggaatcaagcatgagttctattctccctacacacct

SEQ ID NO: 25935 - DNA, 432 bp, Zea mays
  unsure (1)..(432): unsure at all n locations
agcttgttatagaagctgatggtggggtaactgtgttgcaatcccattatgtggaaaaggtattgagtcgctctggttttagtgactgtgatcctgctccaacaccttatgaccctagcgtgctattgagaaagaatcggagaatagcaagggatcaattgacatactcccagatcattggctcgctcatgtaccttgcaagtgcaacaaggccatacatctcttatgctgtgagtaagctaagtcggtttgtgtcgaaaccaggagatgatcactggcgtgctcttgagagagtgttgcggtatttgaaaggtactttgacatacggtattcattataccggaaacccgaaagtgctggaaggctattgtgatgccaactggcattctgatgctgatgagctntatgccacaagcggatatgtgtttctat

SEQ ID NO: 25936 - DNA, 428 bp, Zea mays
  unsure (1)..(428): unsure at all n locations
agcttggtcaactaagtggtaagtccattctggttttccactgaattctttttaatgtcttagtgagaatttttcaagatttctagttgaacttattggggcgaggtttatctttcatttctttccctctatttcctttatgtttttaaagtgggtgtgaactacaagttgtcttaataaatttccaaaaattctgtaaaaattatagtggctttttactggtgcataattctctgtcctaaaattttggggcttaaagagtgaatagttctctctagataaaattatcaaacattagggcggaaggggtgttttgaactacaactacaatttaacagtaggttattctctaaaacttatntttgctggcattttgatgttatgacatgactntgtacaaactnttagccactaatattctttagtta

SEQ ID NO: 25937 - DNA, 428 bp, Zea mays
  unsure (1)..(428): unsure at all n locations
agcttatggaattgagtgagcacactatgatgaggacaatttcatgatattacttgaacatgagcactaacaatggccatgtgaaggtgtgtgacatangaaccctatttttacattcaagcatgatctagtgtccttgagtaggggcactaaacaatgatttaaaccctaaaccatgttagagcaccctaacatggtgaaggaataattattcatacattttttgttcgtggccttcaaacttgatgcttgttaagcacattgtaaggatgcagagtatctggacaagcacattgagaactatgagcaaatggtgactgtatttgagtgggagatcaaaccaaaacacctccatcccaacttatatgatagtttcatgtacattcctggtttcatagaggaggccttcattnttctttctctcacat

SEQ ID NO: 25938 - DNA, 408 bp, Zea mays
  unsure (1)..(408): unsure at all n locations
agcttcgtgtaaaaattctccgaggctatacttcgaagatgaagattgtgtctccttgtganccacgatttcactctttcaaatcatacttccgaagatcaatattgtgtccccttcttgtgaccacgattttcactctttcaaatcatacttccgaagatcaatattgtgtccccttcttgtgccatatgcaacatgatgtatgatgcttatgctatgcaaaatgatgtgatgatgttatgttacgtagatgacatttgttccgaaagatacacacatatccccacacaatatttntgtatcagcactgattcttcgctgtaagctctgcattcccttaggaacgtctntggagcttcttcgccttttacttangctgtataagctctgcattcccttangaacgtc

SEQ ID NO: 25939 - DNA, 416 bp, Zea mays
  unsure (1)..(416): unsure at all n locations
agcttgttggccaagttaagaagcaggccccaatatattttgtatccgaggttcttagtttatcaaagaaaaattatacagagttggagaaggtactgtatgctgtcttgatgtcctccaggaagcttcggcactattttcaagcttacaacataattgtttcttcttcgcaacctctgaaggatattatgaggaactgagaagctactggaaggattggaaaatgggctgcagagctcaatgaattttgtattgaatatgttcatagatcttcgattcagtcccaggcgttagcagacttcattgctgactggacgccaggggctcaggaggaagaaacaaataaagacgccgaagcatggacaatgttttgcgatgggtcttggggaaccttcngagcangagcgggtgctgtg

SEQ ID NO: 25940 - DNA, 428 bp, Zea mays
  unsure (1)..(428): unsure at all n locations
agcttgaatgactcagatcggttgagcgtagatctgtcggcatatcgatgacctccctttgacctccaccccgcagccgacgtgccggcggacagagaggagcggcggtggcgtcttcgcacggatcgcccgggtcgccggtccgcgaatccagacggtggattcgcgtggaggacccncgctgctgctaggtggccggacgaagacaaacgattcgcgggcgaggacggatcgaggggtaccttctccggcggcggttcggtcgcccgtggttcgcgtggagctccgtcgttggagtatttcgagtgcgcgcacttgtgtgcgaaggaagcggctgcgggtacggtctccgccgtagcgtgcccatccatttaacgggagagagaagaaattgggaggggagaggaggaggaagaggatgcctgtga

SEQ ID NO: 25941 - DNA, 436 bp, Zea mays
  unsure (1)..(436): unsure at all n locations
agcttagcaactagatgtaatatcttcaaagctcatcagcattccatgatcttggaatgtcgtttccttccatgtcttttaatctatatgagcttggtttgttcgaagctgagaccaggaaggggccttcccacttcatttgcaattntctcgttgtatctgggttagctacccttctgagaccaggaaggtgctatgttcttgagtttcacctttctatctctccatctcactgtttcttcctgatacttcattatgtgcttgatttcttcgagtctctattgcatcttttgaaattttttcatctacctgatcttgagtcgacgctacgactcttgttgaacccaacttgacttcttcgggagtgacgacttcgtctctgaagagaagcttcaacggtgtgaaactagtagaccttgatatagatgtgttatga

SEQ ID NO: 25942 - DNA, 434 bp, Zea mays
agcttatgaatgttcttcatcccaacatgtgctagacggtgatgccacatccagcccatattagtcttagctattaagcatgcatctagaccgacattctctttcgaaaagtcaactaaatagagcttgccatctaatacacccttaaacgctaatgaaccatcacttcttctaaagacagatacatcaacatttgtaaacagacaattgtaacccatgtggcacaattgacttacacacagaagattatacccgagcgactatactaaaaatacatttgatattgagtgctcgttagtgatggctatcttgcccaagcctttcaccttgccttggttcccatcttcaaagatgatcgtatcctacgaatccttgttcttgatgtaggaggtgaacatcttcttctccccagtcatgtggttcgtgcatccgct

SEQ ID NO: 25943 - DNA, 430 bp, Zea mays
agcttgagcggtttatattccaaaattggtagaaaaagaaatgaacaataaaataaagaaatatctatatatttatgatagtatgtctagattttttttaaaaagcctttagagaatttactaggacctttcctattcataatcaattaataatgttaatttagttaagtagccattaaataagtaatagggtgatgcatttcttgcttatagtttgtggtgacacatcctattaaaatgaagtatcataaattaaattcgacctcaaaattttaaatggaagcataaaatagaaaatgagaaaggaaatgtttatgaacccatttattcctcccataaataaataacaaggaaaataataaataataatattggacatagtagatgttatatctttgtatacgggtatgttggatatttggaaaggtgg

SEQ ID NO: 25944 - DNA, 424 bp, Zea mays
agcttctgcttggcggcggaaaatgaaaccgacttaaaggggaaaaggttgtctacctctcgatagattatcccttcatcaatagtaaatgtcaagggcatggatgtaactttacacatgctgtgttctgtgcctagtaataaatgaacagtagcaccgtactgttcacgctgacttgtattcactcgcacgtcacacttggattattaccttctatcaagccgaaggaacaaatgcaattcaattaaattgcaccgcactgcaatttaatgtttattcatggttacttaataagggtacaaataatataatgatttaagaggattatctcgattctttatatgtaatctatgttccttgtgtctattacatgctgagatgatgaacgtatacccttcatgaccttcgtctgaagatcattata

SEQ ID NO: 25945 - DNA, 417 bp, Zea mays
agcttgctcgtttctagggatggcaataggtcatgttcgggtcgggtgtagcaaaaacccacccgtgatcatacccctgaagtctaactaaacccgcccacgatcgcactcgtgagtgcaatttataacctgaacccgtcgggtttcgggtcacccacggcgttttacttactgtgcacttttaaataacaattagctataagcaattaagtatcaacaataattgagttacatcaacatattttaagccttcatatattgagtagcaacaaaatgtttcaggaatcagtagccacattacttattcaaaaataattaccattgcatcctaattttttgcgcacaataaagaataaactaatttttgggtcgggtgtgggtcacccagtgtagaaatagaaacccgcacccacaccc

SEQ ID NO: 25946 - DNA, 430 bp, Zea mays
  unsure (1)..(430): unsure at all n locations
agcttatatccatggtaagtagcatacgcaagtaaaatgcgaattgactcaagcctagctacnggtgcataggtttcaccaaaatccaaaccttcgacttgtgagtaacccttggccacaagtcgggctttgttccttgtcaccacaccatgctcatcttgcttgttacggaagacccacttggttcctacaacattttggttatgacgtggaactaaatgccatacctcattccttgtgaaattgttgagctcctcttgcatcgccaccacccaatccgaatcttgaagtgcttcctctaccctgtgtggctcaatagaggaaacaaaagagtaatgttcacaaaaatgagcaacacgagatcgagtagttacccccttttgaatatcgccgaggatggtgttcacggagtgatctcgctggattgctt

SEQ ID NO: 25947 - DNA, 412 bp, Zea mays
  unsure (1)..(412): unsure at all n locations
agctntgttgtataatttggtatgatttggaccttgtttgatacctanaccccaaaaccctgccctgccctttgaattcctttactaactccagaaaccctagtttctcagagaaccgtgaaggaaaattgtattcaagaccttagataataaactcttattatctttgcactctcatgagcattacatgggcattcattattatgtatggctatatttagaaaacgaggaagaagttgaagtagaagaagagaagacttcgccaccaccacctgaggaacgtcaggcaggcagctatttctattttgacatctgcgggaccgagcctgattcacttgtaaaccaaggcaagccccagtgcatttgccgcctccttgattcttttaaatctttctcacttgcttgatgcatt

SEQ ID NO: 25948 - DNA, 399 bp, Zea mays
agcttggtctatttatcaaggagcttaaagtggaggcttggctcggttcgtgagctgcaccttgataaatataatattgcattatatagtgttttaatagtatataaatatgaaaaatataattattatttaatattataagtaatctaaattataaattgtcatgtatccatcatcagatgctaagacacgagtcggatatctaaaaaattaaccaatatccatcatcattctaatggatcaacaagctcgaaaagcaggctcggctccctcgatgctcgcgcgccgctccgagtcgagccgagctgttcccaactcgagctggctcgcgagccttgagctttatttccagccctagctatagcgctatatgtattggataaaaacttcgtcttcata

SEQ ID NO: 25949 - DNA, 401 bp, Zea mays
atctttatcaaatggacgtgaagagtgccttccgcaatggaccaatcaaggaagaggtctatgttgagcaacctcccgactttgaagacagtgagtatcctaaccatgcctataggctctctaaggcgctttatgggctcaagcaagccccaagagcatggtatgaatgccaaagagatttccttattgctaatggcttcaaagtcggaaaagctgatcctttatttactaaaactcttgacaatgatttgtttgtatgccaaatatatgttgatgatatcatatttgggtctactaacgaatctacatgtgaagaatatagtaggatcatgacatagaaattcgagatttaatgatgggggagttgaagtattattaggagttcaagtaagcaactccag

SEQ ID NO: 25950 - DNA, 423 bp, Zea mays
  unsure (1)..(423): unsure at all n locations
agcttaaagccatggtaagtagcataggctaataatatgcgaattgactcaatcctagctacgggtgcataggtttcaccgaaatccaaaccttcgacttgggagtatcccttggccacaagtcgagctttgttccttgtcaccacaccatgctcgtcttgcttgttgcggaagacccatttggttcctacaacattttgattaggacgtggaactaaatgccatacctcatttctagtgaagttgttgagctcctcttgcattgccaccacccaatccgaatcttggagtgcttcctctatcctgtgtggctcaatagaggaaacaaacgagtaatgttcacaaaaatgtgcaacccgagatcttgtagttacccncttatgaatgtcgccgaggatggtgtcgacggggtgatctcgttgg

SEQ ID NO: 25951 - DNA, 420 bp, Zea mays
  unsure (1)..(420): unsure at all n locations
agcttgtaacccctacttcaagcaccccggtgcaagataatataagcctcatcccccctcttatgttccatcttgcatcaatccatctaggtaggggcacgcggcacaaaattcactagtctgtctggttgagggtcccccgggtctgaaacaccgacagtttcatgtaaagtgtagcgaacaccctcacatttaagttactcctctcttgtcttgatgagtaatatgagactaaagcctcacataccatctctacaccacgatattgaatttcttatttgaaatagcangaccgttcctggagggggcgagaggtgcggccgcccttgccctcggtttagcgacacctcacctctggtaggtcatatcaacaacgtattaatatatatatntagtatntagttctaattccacatgatt

SEQ ID NO: 25952 - DNA, 181 bp, Zea mays
  unsure (1)..(181): unsure at all n locations
attgtaagacaatggcaagaagccttgcgacttagtgcatctgccaccacgttggcctcgcctgngtgataatgaatttctaattcataatccttaatcagctcaagccatctcctctgcctcatatttaattctgactgtgtgaaaatatacttcaagcttttatgatctgtatatatat

SEQ ID NO: 25953 - DNA, 213 bp, Zea mays
aatagagcttctacatatagtagacgactgttcaagatatacttaatatgtgggtcttgctttaatacaagactgaagttgcaacaacctacaagaagtttgccaagaaatcacaaaatgagtttgatatatagatcacgataataagtgacgacagaaatgttttaacaacacacacatatagcgatattgtgatgaaagttggatataaaa

SEQ ID NO: 25954 - DNA, 265 bp, Zea mays
  unsure (1)..(265): unsure at all n locations
ctcagcttctaagggagacacatttatgattacanatgctcatnttgagaaagacaagatgtgtagtgcatgccacgcacggaaagcaagtggcactcatcatccgcataagaacataatgacgaacgacaggccactggagctcctgcacatggatctattccgcccgatcgcttacataagcatcggcgggagtaagtactggctagttattgtggatgattattctcggttcacttgggtattctttttacaggagaaatct

SEQ ID NO: 25955 - DNA, 291 bp, Zea mays
  unsure (1)..(291): unsure at all n locations
gcttgtgatagagagagagttngtgtgttcattngagctcatgcgcttggattgcttcttttctttctcattcttctagtgatcaactcaattgtaaccaaggcaagagacaccaattgtgtggtggtccttgcgggaacttcgtgttccgcttgattgagaagagaagctcactcggtctaagtggtcgtttgagagagagaaagggttgaaagaaacccggtctttgtgaccacctcaacggngagtaggtttgcaagaaccgaacctcggtaaaacacatcatcgtgt

SEQ ID NO: 25956 - DNA, 265 bp, Zea mays
  unsure (1)..(265): unsure at all n locations
ctcagcttcgatatcccatgtngtccatcatttctcgacanacatttatctatatggtgtctggtagacaataaaggaagacatcttcatcatttcctccataaattanggaccctcgagggtatntcaggtcctttgtgtaatgttgcgttttggccatttgctcttctaacattgtgtttcctgaagcacgacgaacaatatattccaaactgtctcgagacgatgcttcangcatatgtgatgtcngcttgtctggatgatc

SEQ ID NO: 25957 - DNA, 224 bp, Zea mays
  unsure (1)..(224): unsure at all n locations
aaccctttcccgcccaccttcgcttgatccgagccttcngatagacttcccatgaggccgngaagcttgcccgagcttgagccgaggaccagccccaccggaatagtgcaatcgcgctcgccggagttcgtgaacccgccggagcacgtggaccgggtaaccctctgcaccatttctcaattcgttgcgcgcatggnctctacatcaccccgtggagctcctcg

SEQ ID NO: 25958 - DNA, 432 bp, Zea mays
  unsure (1)..(432): unsure at all n locations
gttaccgctctgcattgggtgccatctgatcccatatccaatcaccttcctcactagccaaccaaacaaaacacggtaactaatctgcagttgatagcgttgcaagctgctttcatttccgttcccgctaccctacccaaaccaaacagcacctacatggtaacgtaagcttcttttntntattctatttcaatacaatntacaatttcaaacttgtttaatatgcacaaccaagaaacactcggcatagatgcaaattcatgaatttatttatcaattatttattaaattaatctttcatgatggcttataaatggtaaatgagcaagaaaaatcacagttgaaaaggattccttatttcttattggttntaatagaaaaataattataatgtacaatctctatcctaagatactttttanaaaaaatact

SEQ ID NO: 25959 - DNA, 271 bp, Zea mays
acttcgatactaagcttcgcagcgtgctgcacactgagatggttcatttgtcgagccgctctgtttattacaccttcagctataaatctgcctggcacattataatatattgaaggcgagggtcatgcccttgacgaagttattggtgggcacaccgacttctgcgccctggtagcttcttcgggcacaactattgcttttctgaaagctggctgcacgcatgggaatattgtgaacagaccaaactttagcttgtcagcatcagatctga

SEQ ID NO: 25960 - DNA, 164 bp, Zea mays
gctgtagctggtctctggcggtagtagcatgggcaacttttctctttctttctcgccaacgaacaggagggaataatttctccacgacctctcggatagctaactttacaaacccagtttgagacaactcctagttcgattcacaaaaaaaactcagaccaaaa

SEQ ID NO: 25961 - DNA, 402 bp, Zea mays
  unsure (1)..(402): unsure at all n locations
aaatttcattttctaagtcatgctcattaattttagcaataaggtgagctatgtgatcattntggtggttaattaaagctaggtgatcatgaatagcatcaacattaatgtctctacatctagtacaaatagtaacatgctcaatggtagatgtagagggtttgaaacatctaattcatcagtcttagcatgtaacatgacattttcatttctaagaatggaaacaatatcattgcaaacattttaaatcggtacctttagcattaaattatcattctcagttgtaaggctagaaatgttcattaaaattgtcatcttacaagtaactagcttatcattttaagaatggcaaagatcatacaacattaactttctaccttacatcaattagcatttcaaatc

SEQ ID NO: 25962 - DNA, 492 bp, Zea mays
  unsure (1)..(492): unsure at all n locations
catactacgagcaaaagattagattttttattttctagttcatgctcgcgcaatttagcatttaattgagctatgtgatcattntgtttcttaatcatgggcaggtgatcatctatagcatcaacattaatatctctacatctagtgcaaatggaaacatgctcaacagtagatgtagatgggttgcanacatttaattcttctatcttagcatttaatataacatttttatttctaagacaggaaatgaaatcattgcaaacattcaattctttaaccttataactaaactagcattttcatttctaagactataaattgaatataacanatgctaagctcctttagttaagtttcacaattttgtacttcttgagcataagcattntttaagtgtaacaaattttttgtttctttaatgagaaagtcctctagctatccaagagttcatctttctcataatggnntcaataattcatttaaatttttctt

SEQ ID NO: 25963 - DNA, 250 bp, Zea mays
  unsure (1)..(250): unsure at all n locations
agtttgtgtctttggaacttcggcagctatcttcgaagtagagcttgaagattttatctgttccagtacatctagcacgttaaccattcttttcctctttggggttgttgaaggggcttttgtgccctcngcattggcattgacacctcaactcttgctgaaaggactaagaattccgatgtcttttgctcttcacgcctcgggtcttctattttttccatctccggcattgttggccggctcttcaata

SEQ ID NO: 25964 - DNA, 288 bp, Zea mays
  unsure (1)..(288): unsure at all n locations
ctatgaactcgctgcttacacttcgaacanatggttcatcgttaatgttaacttcgtctgtcanagacttgaaactaaatggctagagtgacatctactgctatagtggcgcgcgaaggagaagatgccggaacttctgagacagcccccaatctagagacgatgaagcgttctatgttggttgtgcaagaagagaaagaactaattccaacagaagatgttggtgatgtcaaaactgaaccgaccatcgccgaagctgatagtgaaaacgaanatgagaatgatgat

SEQ ID NO: 25965 - DNA, 241 bp, Zea mays
  unsure (1)..(241): unsure at all n locations
agttggatactcgtaatatgataattatagcaatggatgcttttaagatctgntctgatttgccaacaagagttgtggtcaaagatgatttatttattccaaaatatgtttatttcattaaaaaaaggttccagtataaatgtataaagccatacagtagatggtagctgacagatccattttctttttcctcanaactgtgctgcccttngtggntntaatactataataatggtatcat

SEQ ID NO: 25966 - DNA, 241 bp, Zea mays
  unsure (1)..(241): unsure at all n locations
tatttcttcaatattttcttgagtgtgctcattccaacatgagcatggattctaattcataaccacctaagtgaagttttggcgcatagccgtgttttcaagttagcatctncagaagtgaagtgcactaaatatatattattctatctaaatcccttgaacataacttgggtatcatctacttcatacacaataatctcctccatgaataggaattgatagtcaatatcacataatttac

SEQ ID NO: 25967 - DNA, 241 bp, Zea mays
  unsure (1)..(241): unsure at all n locations
tctcagcttagtgatagtgagagagattgtgtgttatttgagctcttgcgcttggattacttctttctctcattctttcttgcgatcatctcatttgtaatcaaggcaagagacaccaattgtgtggtggtccttgccggaactttgtgttccgattgattgagaagagaagctcactcngtctaagtgaccgtttgagagagggaaaagggttgaaagagacccggtctttgtgaccacc

SEQ ID NO: 25968 - DNA, 344 bp, Zea mays
  unsure (1)..(344): unsure at all n locations
taatcataatagtttcacctatggccacttgctctttntgtgttgtcttactgcaagaatctaaaaagcattgaatctgcttcctcacaacttgcatctgttcatgcacatgcttgatcttcctgagcttatccaaaggttgccattntcgaacatcataccctctgtaggcagactgaatacgaactgcaacatctgattctgacaaattaactccatatgttctggcatcatctntcgcagtttcactttcaatcactgtcccatcttcattttttcttttgtcacattcattcaagcttcctgcaccaagcatttcttgcacatgatcttcctctatgctc

SEQ ID NO: 25969 - DNA, 378 bp, Zea mays
  unsure (1)..(378): unsure at all n locations
atcaagatttctagttgaaattattggagcgaggtttatctttcaattcttcccttctatttctcttatgcttttgaggtgggtttgaactacaagttaacttaattatatttcaaaacagctgcacaaattacagaggcttcttactggtgtattattctctgtcttaaatattggggcttaaaaagtgaatagttttctctggataataatatcacacattatggcagaaggcgtgttttgaactacaacatcttcttaaacagtgggtattctctaagacatatntntgcttgcagttaaatgttataacatgactntgtacaaattccagccatttaataatatntgttattttctatgtatttccaaagttct

SEQ ID NO: 25970 - DNA, 290 bp, Zea mays
  unsure (1)..(290): unsure at all n locations
cagctttccttgacttcacannaactcccctataagagatccacctcttagtgttcaagagaggtttgatataccacttttgaaatactactttctctcccctttgaacacaataagataccaaatgataaatacttttggaaagcactaagtttttgaatntggtggtggtggtggtgcggtccttttgctttgggctcatttctccccctctttggcatatatcgccaaaaacggaatcattagagcccttgaagtgctatcttccnctctgggcataaataaatgag

SEQ ID NO: 25971 - DNA, 173 bp, Zea mays
tagctattaagcatgcatctagaccggcctcttcttttgcagaatcaactaaataaagattgccgtctaatacacccttaaaggctagtgaaccatcacttcttctaaagacagacacatctacatttggtaatagacaagtataccccatatgacataattgactaacagat

SEQ ID NO: 25972 - DNA, 100 bp, Zea mays
catgtagtcatcggcctctcctaacattctaacaagatcatcatatgaataggcatcatcatcaacatcatcgatatcatcatcatcttctatatcattt

SEQ ID NO: 25973 - DNA, 399 bp, Zea mays
  unsure (1)..(399): unsure at all n locations
ctaagcttacacacctgaaaaaatgtatattataccttgaatacaacgataggaaatgatgcttggctgcttgcagcttgagcagggtcctataatgtttaatacacagtaatcaatatcctataaatgtcttccccttgtcagcattttgtgcacaggcacctcataccaacctcttccaaaatcttggaccacagtgatttctttttcatacttttaacatgcttactcttgaccttcactggctgcgtcagtatatccagactgtctcctgcagaggaatcacaggtagaccctaantcattaaaagttcaaagtaactctattcacagaatgggatgagatgtagaagtaaatgtcaatgtatcattcagaaaagtgcagaatttatatcctact

SEQ ID NO: 25974 - DNA, 179 bp, Zea mays
tcaacattgttgaccgctctgttgccatctgttggggtggttgacagctgagttccatcggttccagactggtcccggctaagatatgtcacaagaaaccatggacttgtcacttgacaaaacacttggcacaaactgacaggtagatgtgataaggataattggctactggtaactat

SEQ ID NO: 25975 - DNA, 408 bp, Zea mays
  unsure (1)..(408): unsure at all n locations
tcttgtagctgctgccacaaatgagatgtgaactgcgttcctcgatctgacactatcttcttcggcacaccatgaaggcagactatccgtgacaggtataactcagctaacgctgctccggtgtatgtcgtcttcacaggtatgaaatgggccacctttgttaagcggtccacaaccacccagatggaatcgtagccggcccgggtatgatgtatgccaactatgatatccatcccgatctcatcccacttccactgaggaatncgcaatggctgcaacaatccggcaggcctctgatgctctgcttttggtctctngacagcttcacagatggcgacatattctgcgatctctctttcatgcctaccaccaaaacctccttnttanatcctgtacatcttctcactt

SEQ ID NO: 25976 - DNA, 239 bp, Zea mays
gaccccggcacggcgccgaggaaaggttggtgtcggcctgagggacacaccccatgctaccggcctgacgaagaggaaaccttgcggacggggctcgggcctttggcacgaactcgcggaccgacaccgccgggccgcgcccgcccgtgaagaaccggcccgacggcgagcaatggcgaccccccaatgccggcgcgagaccagggatgacccgagccacacaaaagtggcgatcagcc

SEQ ID NO: 25977 - DNA, 428 bp, Zea mays
  unsure (1)..(428): unsure at all n locations
tactcagcttctnctcntctctttctntatntctttagcacacagatgtctataaaagtagcttatccccgctattggctttcacaccatcatgtttttacaaaccacgaaacataacaggaaggagtctttccattattatgtggtagtcatgactcttcaacctcggaaacttgtccgccttcaaattcacagaccttctatagcccgcggcataaccatctgagaacttntaaattttcaaccatttcatcaattgtntattccttttatgttaagactgaaaaagcatgtggcttcttctcgtctcttctatctcagaggtggcgactacaattaagccaagctttctaccttagggtgccttgtttgcactctattaagcagtgtgatatgcttaccctattcgtcctgtgatactcatgtat

SEQ ID NO: 25978 - DNA, 160 bp, Zea mays
  unsure (1)..(160): unsure at all n locations
acaagtcgagctttgntccttgtcaccacaccatgctcatcttgcttggtgaggaanaacccattggttcctacaacattttgattaggacatggaactaaatgccatacctcattcctagtgaagttgttgagctcctcttgcatttgcaccacccaat

SEQ ID NO: 25979 - DNA, 338 bp, Zea mays
  unsure (1)..(338): unsure at all n locations
gtagcatatgctaataatatacgaattgactcaagcctatctacnggtgcataggtttcaccgaaatccaaaccttcgacttgggagtatactttggcacaagtcgagctttgtttcttgtcaccacaccatgctcgtcttgcttggtgccgaacacccatttggttcctacaacattttgattaggatgtggaaccaaatgccatacctcattcctcgtgaaggtggtgagctcctcttgcattggcaccacccaatccgaatcttgtagtgctttctctaccctgtgtgggctcatatgaggaaacaaagagtaatgctcacaaaaatgtgcaaca

SEQ ID NO: 25980 - DNA, 168 bp, Zea mays
  unsure (1)..(168): unsure at all n locations
tagtgagtaccctaaccatgtttacatactcttaaaagcgccttattggctcaagcaagccccaagagcatggtatgaatacctaagagaatttcttatcactaatggcttctaattcagtgtcacacccgggctttaatgaacatagccnggtgcatctcatacatg

SEQ ID NO: 25981 - DNA, 93 bp, Zea mays
  unsure (1)..(93): unsure at all n locations
atatatatatatatatatatatatatatatatatatatatatatanaacnaagaataccttcaccagtaccctctataactcctctatatccc

SEQ ID NO: 25982 - DNA, 223 bp, Zea mays
  unsure (1)..(223): unsure at all n locations
tctcctggtacagtgccgcactcactgcagagtgcgaagctgccacatacaatagcttatgatcccctggcgtgggtggagttagcgtcggtaggtctattatgtactgcttcagctcttcaaagctttctgctgagctgatccccatttgaagacttctgnccgacttcacacttcgaagaatggtaaatttctctctgctgatctagatatgaatcgattc

SEQ ID NO: 25983 - DNA, 235 bp, Zea mays
  unsure (1)..(235): unsure at all n locations
ctcataagttctaaagaagctgctgcatctacaagggaatctattcttaatagcgggaattcatcctttggacatgccttgctgagatatgtgaaatcaatgcacattctccattttccattagcttttttcaccatgacagtgttggccagccacattgggtatgttacttctctgatnacaccggcacttagaagtctcttcactttatttcatgcacctctggctttatcat

SEQ ID NO: 25984 - DNA, 298 bp, Zea mays
  unsure (1)..(298): unsure at all n locations
tcagtcttagcgttagtctcgttcttagttagtcttagttagacacggtagtnttctatatcctgtgcatntatgattgtcatgatgaactatngttgggttggatctttgtaatgactatcaccagagtgtgggtattccctgcatcttggtttacctattatgntaatggagttaggtatataattgggaaaccctttattccactttcctctttatctgagaagctgtgtggtctgtgttgagatcagtgaagatgctcatctgttcagtgctggtgaagaattctatactcttt

SEQ ID NO: 25985 - DNA, 199 bp, Zea mays
atcatcgaagcttataagttctggatgagaagttgtcaccgtatttccgttgatgaagcactagaagagcgatcaatgaatggacccatggataagttcgcaagaagaaaggttgcgtgttggcattgttgcttcttcaataagctagctgccaagcgaaacctatgagcctgaagatgatctctgagtagccagaatc

SEQ ID NO: 25986 - DNA, 208 bp, Zea mays
  unsure (1)..(208): unsure at all n locations
gatggcactgagttggtgcctgctggttcgttacaagctgcttcnggtagcggccttacacccggtcatcaattgatctctcatgatttgggggtgccttcgttcttttccaacctccaggtactgtggtatactttagctcgatttttacaccgcacgaactgctgtcattacactcatctgctctccttatcangctttggtggac

SEQ ID NO: 25987 - DNA, 263 bp, Zea mays
  unsure (1)..(263): unsure at all n locations
ctcagcttgcccccggacattggcccttttctatccttgaagatatggaccagtggcataccgactccagttacccgaaacattgtctgctgtgcataatgtgttccacgtgtctcaattgaagaagtgtcttcgggttccagatcgaaccattgaagtgacaaatgtcgccttataaccagacttgacatattccgaacatcctattcgagtcttggaccanaaggacaggattacccgaaggagaactctcaagttttata

SEQ ID NO: 25988 - DNA, 222 bp, Zea mays
tgactgccatgaatagcaatgggtccttggtccgaatgtatcttcatgcatagatatgctggatgaagtattgcttcgaaagcgttgagtgtcccacgaccaacgattgcattgtatgggtattccaagtcgacaatatcatacacaacctgttcagtccttgtgttgtggacaaatccaaaggttactggcattgtgatcttaccaagtgctacgatctgt

SEQ ID NO: 25989 - DNA, 105 bp, Zea mays
ggagatgcaccgtgggcggaagaccgagtatcttgagattcccctcaaagatagcattaaagggtggcgtctggagtggtttatagtcgataattatggaaattc

SEQ ID NO: 25990 - DNA, 196 bp, Zea mays
  unsure (1)..(196): unsure at all n locations
cactttctactaccttgtcacttganaaatgtcanacagcagacttcatatttttcctatgttcttcataacaaaacattaactattccaacggttggggtgctccctgcgtccttaattaaatcacctttcttatttcctttaactntaaacacaatgtgaaataaatggcagactctaccttaatgaggtgtac

SEQ ID NO: 25991 - DNA, 346 bp, Zea mays
  unsure (1)..(346): unsure at all n locations
acatgcttgattcaagtgcattctnttcattngcaagaatagctatagagggtttcatattaattacttctttgtctttattctctatagctatcttgactaaagatacttccttagtcaagacatctagcatttcatctttattgtgtagcaattcttgaagctctatgtttctttccttttcaaagataagcaagtcttcttgagcatcaagagatgcttttcttttatctaacttctccattaatttggtgataacattgtatccattcaagccaaaatctntaatcattntaattttcatggcaatttgttcatcatcatcatcattnggaaaatcattact

SEQ ID NO: 25992 - DNA, 470 bp, Zea mays
  unsure (1)..(470): unsure at all n locations
atgttctttatgaagtatggatattctcacaaagcatattcctctttacgaagcatgaaacaaaggggagggtgtttttcgccgaaggctcaaaaacgatatgtacataaagtttcatgcctcgcaaagaactgaattaaaaaacaacttacatattagattcaaaactatacacattaaatattacagacttagttcagcaaatgttacattgataacctagaaatatttctacaataactactattcttccttcagaactttctctgcaacttcgttaagcaatttgttaacaacttcatcaacaatagcttcggccgtattgataatttctattgctnntccttgttctgggtcggccagtgggtcgaatggctctggtggaggaggtaattcagctgcggtagaaaacatcaattagttcgaggccacgaaaataaaacgatgaagatagaggccattagataata

SEQ ID NO: 25993 - DNA, 483 bp, Zea mays
  unsure (1)..(483): unsure at all n locations
tcctccgcattctgagcccctaggcatccgaaggtaacaatatgtttcactaggggttatgaagctgngttttggctcatcctccttcttcatccaaatttgataatagcctgaataacaatccagcagactcataagctctgatgaagctgctgcatcgactagagaatctatccttggcaatggaaactcgtccttcggacaggccttgttgagatcagtaaaatcaatacacattctccatttaccattggccttctttaccataatagtgttagccagccattctgggtattttacctctctgataactccggcactaaggagcctttntacttcattccgagcaccttcggccttgtcatcagacatcttccgaagcctctgctttctgggtctaaaggatgggtcaacattgagcgagtgttcaataacatccctgttgactccacaaagatcattggctgaccatgcaaaaacatc

SEQ ID NO: 25994 - DNA, 475 bp, Zea mays
  unsure (1)..(475): unsure at all n locations
agcttgttggagctgctctaagcgaccaagtacagcagctaatttcctttaggtagnggcggagctgacaaaaactagtaattttcggcaattaaaatgttntaagaggctaatagaaattggacaattntctatggatactctaaaggaccatataaattattttggcccacgaaaatttacggattttctattgtatgggtcttagccagggttttagtaattttcctccgctaataaacataaaggctggtaaaaattagtctatttcagtgggctgtcctaagaaatcataaaaattattttggcctatatttttattttcttattatatagacctagttgcttagaaaaataatttatttcaggctagatctgggttagaggccttctagcccccattgaagatccacccnctactcanggcttgttcggntattttcaatccatatggattggaggggatngatatgga

SEQ ID NO: 25995 - DNA, 400 bp, Zea mays
  unsure (1)..(400): unsure at all n locations
tgngctgactaggccgctgtgccgtatggagccggagtcaccatgccaacaagctgtggcagaattctgggtggtagccaagcagatcgggaccagagatctagtccaagaatatatggcctatagggtgttcccaacgctgagtgaatggaacatgccgaagctaaaggggacaaatgagaagaaagagcttgtgcgactaccttataagttcaaattcgagaaacagttcaaagggccatgtcaagaatggttagaaatgatagaaaccatgtgcaacgataatttggagaattacactataaaagaagatcagttgatgactgcagtcttcggcaaccgaccgaagcgaaaggtgaatcgggtgatggatgccctgaacttcgaatatcctgattat

SEQ ID NO: 25996 - DNA, 480 bp, Zea mays
  unsure (1)..(480): unsure at all n locations
agcttctaaagggagaacatgtgataggtctaaccaatgttcatttcgaaaaagatagaccttgtgcagcttgtcaagcacggaaacaagtgggaggctctcatcacaccaaaaatgtgatgacaacatcaagacccctggagctgctacatatggacctcttcggacccgtcgcctatctgagcataggaggaagtaagtatggtctagttattgttgatgacttttcccgctcacttgggtgttatttttgcaggataaatctgaaacccaagggaccctcaagcgcttcctcaggagagctcanaatgagtttgagctcaaggtgaagaagataaggagcgacaacgggtccgagttcaagaaccttcaagtggaggagttccttgaggaggaggggatcaagcacgagttctccgctccctacacacctcagcanaatggtgtggtagagaggaagaacaggacactcatagatat

SEQ ID NO: 25997 - DNA, 399 bp, Zea mays
  unsure (1)..(399): unsure at all n locations
taagcttctcagcgcatgccacccttttcctgacactctcgggcctcatgcctatcatcaatgggaactctagaacattagaaacagttagaccgcactgcagtaggaatgctatgttaggcttgaccacatcctcaaggttccgactgaggagcattggattgatcctgatggcggagtgaacccgatcgaagcaacccatgaaggagagatagaactggaggtgggagatctttntgggagcgacgaagatgttggggacgatggtaatgaggcgggagaattgggaaggggatagcccaaggctcatgagctgagcgaagcgaggggttagggttttgtccaccttggagcagaggagccgcgggtacctggcgataccggcgatgatgtcgtctt

SEQ ID NO: 25998 - DNA, 389 bp, Zea mays
  unsure (1)..(389): unsure at all n locations
aattatgattatagagatgaggaagacaccaattcacataccattggttgatagatatgatattgtgggagaagggtgaaatggtgcttaaaactgtgacacccactatatatttgtgcttcaatttggtgaccaacagaaaaatgggaccctttctagctttctttcaaaaattgtatctgcttaagcttagatctttgctttgttaaagcattgacaaaatgtccaaagagatttcatgaagaaagtgaatgaaataattaaaaagaaaacttcagatcttctcagtgatactctcatgctngcaggtattatacctattacctatttacactctcacgtttgctgcttagatatgttacaatttctgaaaattctatctagttgca

SEQ ID NO: 25999 - DNA, 344 bp, Zea mays
  unsure (1)..(344): unsure at all n locations
cacgaatacatgatcgagattctgtgaacgttntgtgcaatatatttaagtaaatctctagcgtccattacgaaaatcaagtatgcaattgttgttataaaaatcaaggctgcaattgttaccattactttgatacacctaatgtactatatgtaaaaaaaatcctgcttcttagcccgctttntttttctgaattgatttctacatactgacggtagctaaatagaactgcactagaatttcatcttgaataaagattatttgtgttgaggcagtacatatatactctgggggctactagatcaaatatttgctttgacttttgatgaagcgagcaaaatgag

SEQ ID NO: 26000 - DNA, 73 bp, Zea mays
  unsure (1)..(73): unsure at all n locations
actatgaaactaagcttgatgcctgcngacgacgctaaggatgccacggtctcgttctttatgcccctatcaa

SEQ ID NO: 26001 - DNA, 457 bp, Zea mays
  unsure (1)..(457): unsure at all n locations
tatattttcctgcattaaaatttactttatattaaaactcgtctcttttattttcaactcttctagtctgattntggtctatcagaagactctactcggaaacactacaagatgatcaagctagggttgcggaacttgaagcgaaatttgcgagaagaaaccttttcgaagctatcaacgatgccctattctctatcttatccccactctacaagaagttttgttatggattccctagatctattcattgacttcttggctaggttgataggattgttctttagtattaagattttcgactagatcggtaaagacgacattatattatagtggttttctaatccataatattgctataaaacccttgacttcttatacttttggttccttgccattgtattgccatccttaagcaatatctacctcgatatattaaaactttgtccctctacttctc

SEQ ID NO: 26002 - DNA, 448 bp, Zea mays
  unsure (1)..(448): unsure at all n locations
cttggatctctggctnntataactttatcaatatgaccagaaataactcgggaatcagtttttagaaccgcccttctgattcccatcgcctttaacttccgaagacccaaatgtaaagcttcgtactcagcaatattatttgtgcaactgaaatcaatattgtccaaacttcagcatctttattcgtttcttcttcctaagcccatgacatccagtcagcaatgaagtctgccaatgcttgagattgaatcgaagatctatgcacataatcaatacagaattcattgagctccgcggcccattttccaacccttccagtagtttctctatttctcataatatccttcaacgggtgtgaagaaggaacaactatattgtatgcctganaatagtgtcgaagcttcctgaaggccattaanacagcatacagcaccttctccaactctat

SEQ ID NO: 26003 - DNA, 383 bp, Zea mays
  unsure (1)..(383): unsure at all n locations
ctggttaacgcgtgcgtgtgcgtgagacttgttgtgtgcgtgtacnagttanatggagagagggcgcgaatatcgtcggccggtgggcgcacgtgggtcgtgcggacgaacgcgtcctgcgggcacgacgcagcgcacaggcgcggacatggcggagggccgggtggtggaatggagctctgacacgggtatatgtagcaccagtctgtgctgtaatcgctctaggggtgtcctgtagataaggccagcatacagacaggtgacggagagctattcgccggagcgttcggcggacatatccactgatcatctccttcatctctgcgtgctctgttcttcggtggagtgagcgctctttcttgagtgagaggtgtcataagagt

SEQ ID NO: 26004 - DNA, 457 bp, Zea mays
  unsure (1)..(457): unsure at all n locations
tattagtgaccttagaaactaagcttctaagggagaacacgtgataggattaactaatgtgcaattcgaaaaagatagaccttgtgcagcttgtcaagcaggtaaacaagtgggaggagcacatcacagcaagaatgtgatgaccacctcaagacctctggagctgctgcatatggacctcttcggacccgtcgcctatctgagcataggaggaagtaagtatggtttagttattgttgatgacttttcccgcttcacttgggtgttctttttgcaggataagtctganacccaagggacctgaagcgcttcctcaggagagctcanaatgagtttgagctcaaggtgaagaagataaggagcgacaacgggtccgaattcaagaaccttaaagtggaggagttccttgaggaggaggggatcaagcacgagttcttcgcttcctacacaccacaac

SEQ ID NO: 26005 - DNA, 398 bp, Zea mays
agcttatgaagattcttcatcccaacgtgggctattcagtgatgccagagcccacccatgtttgtcttagcaattaagcaagtgtcgagttcagctctattaaaatcaactaagtataggtgaccctctaacacttccttaaatgctactgaatcatcacttcttataaagacaagaacacctaaatccgtaataagacaattgtagcccattttgcataattgagaaacagacagcatattgtaatataaagaatctacaagaaaacattggaaatagaatggtcaggagatatagcaattttaccaagtcctttgaccaaaccttgatttccatccccgaatgtgataactctttggggaccatggcttttcttggatgaagagaacattcttttc

SEQ ID NO: 26006 - DNA, 451 bp, Zea mays
  unsure (1)..(451): unsure at all n locations
actccgcttgacttatcctactggagtactgtgcttagaagactcctatgggtttccatctttctattggaaacgaagtaccatactattgtactgtacagtgacttacacgtatggagggatagggctcatctcacattctagcttcgtgagtcacatgattntataagtattgcctttctatgcttctgctcttatgtgtgctaagctgaacggtgcttggttgtagtgagcacaaagggatctttctagcttactcgaagtagcaagcaactggcgactgctgaaaccacaaactggtgccaccaaagtggaagatatacactcgaagaaccatactgtcagtctgcttgtcatagagcattcatcttttcttgcaagtaactcgggctcgacttactgacacgagcaatagtctgataacgctacaagacaccgatgtgcaatggtc

SEQ ID NO: 26007 - DNA, 413 bp, Zea mays
  unsure (1)..(413): unsure at all n locations
gctttccctcgttngatggcatcttgcggnttgcagntggatggtgatgacaatgacgatgatggggaccaggagaactgagccctcgcgtttaggcggngaattatgtgacccgtttgggggattntttttggttgtttgacttagctggaactcaacttagggaactgtttagtgccttatgaagtcaaccaacttgaaaggagactgctatatcataatctcggtatatctatcaacgcagtttgacctgtgattcagtttgtttgtgcttcggtcggtcgccttcagatgcatgatgcatggacatgttgtcactgctcaacaactatggccccttgtccgagtgtttccgtttgcatatggacttgtgtcttggcctcttggccgagtgatctagtcgcgagcattcc

SEQ ID NO: 26008 - DNA, 477 bp, Zea mays
  unsure (1)..(477): unsure at all n locations
tactcagcttcaaactaanagctncagtaaattttgcgcgcaagagataaaattgagtaagcaggggcagatggcaagtgtgcgtaccaaaatgagtttgtggtatgatcttatttatacgcccagtgcgttgaaagttgaaagacccacttgtcagtgaatgttgctattctagcaaagggaaggtgttttttcggaccttcggcttaaggccttcgtccatatcgcaatctaaatttatcattaataaattaatattgcgaggngctactgttgggggccttcgtcctccgaaggtcctcanaaacatgatttgacaatatcttccaagtgaaatgtatgaacagatatcttcggattcagattgtgaacatgaagtacgatcaggacgaagcttaagctagacgaaggaagattgagatgaaggacgggctgatcaccaagccgtacgagggatggtgcatagccgaagctatg

SEQ ID NO: 26009 - DNA, 432 bp, Zea mays
  unsure (1)..(432): unsure at all n locations
agcttctaagggagaacacgtgatanggttgactaacgtgcaattcgaaaaagatagaccttgtgcagcttgtcaagcaggtaaacaagtgggaggagcacatcacagcaagaatgtgatgaccacttcaagacctctggagctgctgcatatggacctcttcggacccgtcgcctatctgagcataggaagaagtaagtatgggctagttattgttgatgacttttcccgcttcacttgggtgttctttttgcaggataagtctgaaacccaagggaccctcaagcgcttcctaaggagagctcacaatgagtttgagctcaaggtgaagaagataagaagcgacaatgggtccgagttcaagaaccttcaagtggaggagttccttgaggaggaggggatcaagcacgagttctccgctccctacacacc

SEQ ID NO: 26010 - DNA, 502 bp, Zea mays
  unsure (1)..(502): unsure at all n locations
tgacagtccanaatcaagaacttcaagtgcaacttgaaaactgcaagaacctcaatgcttcatctttattggttgaatctaagtctagctcctcaaataataccgtttgtaaacattgtgtaaaatatcatgcttcttgttgtttgactaaccatgcaaggaagaaaagctcacaggttaaggtcaaagaaatactgaagaaatgttctagcaatgatgggttaaagaaagttgaacccaagtacaagtccttgaagcccaacaatgggagaaaggggcttaggtataacttatataaggaaaaccctagcatagtgcataaggggtggagatcccccaagttcatagagggaaccaccctatatgatgccttgnggaggattcactcctcanatgacaagtcaactcaagtaaaggtaaacgtgagtttcataaagaataagatgaangaagcggnttccacanatggagaanaattaaagctcccatttctcattcttat

SEQ ID NO: 26011 - DNA, 421 bp, Zea mays
  unsure (1)..(421): unsure at all n locations
agctgacaacaccatttgacatcttanataaaatttctgagatcaagtatttttaattcattcctcaacatgcaaaagcgggttttatcaagtggcttagtgaaaatatctgctaattgatcttccgacctcactccttctaaaatgatgtctcctttagcaacatgatctctaaggaagtgatgacggatatcaatgtgcttggtgcgagagtgttgaacaagattattagcaattttaatagcactctcattgtcacacaacaaaggtaccttttctagaactacgccatagtctagaagagtttgtttcatatataaaatttgtatgcaacaagcacctgcggcaatgtattccgcttcggcggttgacaaggcaacactttnntgctttttggatgtccatgatactagtgatctcc

SEQ ID NO: 26012 - DNA, 379 bp, Zea mays
  unsure (1)..(379): unsure at all n locations
gctagaagtnntctccctgctcgggcaacccttcttagttcaccaagctgattgcccacacatggccacttcaacgctgggggttggatattgtcgggccactaccaacggctcaagggaacctcaagttcaccttcgtcgtcgtcgaatacttcaccaagtggatcgaggctatggcagtatccacaataacgtctaagactgcccagaagttcttctagcaaaacattgtttgccgattcggagtcccgtccgagctcacagtcgacaatggcatacagtttgacaaccaggacttcagggacttctgcctctccatcggcaccaagcttgccttcacctcgatgtaccacccgcaatccaacggtgtcgtcgagcg

SEQ ID NO: 26013 - DNA, 442 bp, Zea mays
agcttcggggagccgaaggtccacaaaacaccttccctgagctcgttgccgagaaacgattcactctccctgcgcgtagcggccccaccttgcagagttactgttcggtctctgtggtccaccgttcagcgagtgcgagcgggtgtccgcctggtgtaaaacttctggcgcttcgccttcttacctgcggcactatataaacagacgagtaggtgtgaagttaccacagcatttactgctatttgcactgttttgctgccaaaatttttaaccgtcgccgaagcttgtttgtcagaattgaacgaagcttcatcttgaagcctgcttcggagaaaaaagtattaaagtttcacaagttcatagttaaatggccagagtccgttctaccgctagggttgaacgtgagggggacgaaactgaagcttcggagactgtccctatc

SEQ ID NO: 26014 - DNA, 477 bp, Zea mays
  unsure (1)..(477): unsure at all n locations
tctanagggagaacatgtgttaggtctaacaaatgtaactntcataaaagatagaccttgtgcagctnttcaagcaggataacaagtgggaagtgctcatcacatcaagaatgtgatgactacatcaagacctctggagctattgcatatggacctcttcggacccgtcgcctacattagcatcgggggaagtaagtatggtcttgttgttgttgatgaattttcccgcttcacttgggtattctttttgcaggagaaatcaaaaacccaagggaccctcaagcgctntctaaggcgagctcaaaacgagtttgagctcaaggtgaaaaagaatagaagcgacaacgggtccgagttcaagaacctgcaagtggaggagtttcttgaggaggaaggaatcaagcacgagttctccgctccctacacaccacagcanaatggtgttgtagagaggaagaacaggacacttatagacat

SEQ ID NO: 26015 - DNA, 427 bp, Zea mays
  unsure (1)..(427): unsure at all n locations
aagattcttcatcccaacatgggctattctgcgatgccagagccaacccatattagtcttagcaattaagcaagtgtcaagttcagctctatagaaatcaactaagtatacctgaccctctaacactcccttaaatgctactgaatcatcacttcttctgaagacagtaacacctacatctgtaaaaagacagttgtatcccattttgcataattgagagactgaaagcaaattgtaaccctaagaatctacaagaaaaacattggaaatggaatggtcaggtgatattgtgacaccccagtgtcacctatggtttctcttaaaatgccaaaccaagaaccatcattttatgtgaaccaaagtgagcatgagcatcaaagtaacttaagaataaagaattcaccaagcatatacttaanagtatcat

SEQ ID NO: 26016 - DNA, 422 bp, Zea mays
  unsure (1)..(422): unsure at all n locations
cgacatcaccatctcgagattaagtcaagtctctaagatcaagaatatttagctcatttctcaacatacaaaagcgggttttatctaaaggttttgtgaaaatatccgctaattgatctttcgatctcactccttctaaaataatatctcctttaacaacatgatctctaaggaagtgatgacggatatcgatgtgcttgatgcgagagtgtngtataggattattagtaatcttaacagcactctcattgtcacacaatataggtaccctttctagaactacaccatagtctagaagagtttgtgtcatataaaaaatttgtgtgcaacaagcacccacgacaatgtattccgcttcggcgggtgacaaggcaacactatnttgcttcttagatgtccatgagactagtgatctcccaagc

SEQ ID NO: 26017 - DNA, 478 bp, Zea mays
  unsure (1)..(478): unsure at all n locations
agcttacaaattcncgattacttcctcgggagtcattagtgtatatctaggattaccacgaattaattgaacttgagtagggttaaggaaaataagtgatctaagaataaccttaaccatctcgtggtcatcccactttttgctctcgaggttgcgcacttggttcaccaaggttttgagccggttgtacatgtcttatggctcttcccctttacgaagccggaagcgaccgagctccccctcgatcgtctcccgcttggtgatcttggttagttcatctccctcgtgtgcggtcttgagcacgtcccanacctccttggcgctctttaatccttgcaccttgttatactcctctcgacttagagaggcgaggagtatagttgtggcttgngagttgaagtgctcgatttgggccacctcgtcctcatcataatcctcatcccctacggatggtacctgtgctccanactcaacaaca

SEQ ID NO: 26018 - DNA, 417 bp, Zea mays
  unsure (1)..(417): unsure at all n locations
ntacanaacacttaaagagtntagagagagatcagganagcatgattaaggaaaccaagcaacaagagcaacaaatgaaacacgaatcactctctcaagtcactaatcactaatgatcacttgtctcaattgtggaacttgaagagattggaagctttgattgtgtcttggaatggattgctagctgttgtattgaatgtatatgagtggagtgcttggatgtgttgaatggaggtggttggngttgtatttatagccaccaaccacttcctagccgttgctccctttctgccgaccgcggacggtccgcgcccctggtccggacggtccgcccctgcacatcaacggctgaaatcgcaatggtcagtagtaacagctatagagcatttaatgagtcgtcagatgtaagataaagca

SEQ ID NO: 26019 - DNA, 366 bp, Zea mays
  unsure (1)..(366): unsure at all n locations
cgctcgattccgcggcggagatcctccgaaggtgagggcgcgaccatggcgaggttctggggtgctgggaaagggctcangtgagttcggggtgacacgacggactcggcagtgggcacaacaccggcgcggaggcaccaaacggcaccagtccacgatagtgtggcccgacgatagcacatctcaactccgacgagcgattgcatgaacagcagggtaagaaatggggaattaagggcatggggaggttagttacctcaagagacggctctagagcgcttgagcgacggcgaggacatatcgaggccctggtcgacgactgtggagaaacagctgcgcggtgagaagtacggcgagcatgaacag

SEQ ID NO: 26020 - DNA, 446 bp, Zea mays
  unsure (1)..(446): unsure at all n locations
ttaggacctatgaaactcagctntggtggcaactggaccttttaggcccnctccctctatgaagttggtcgatgagtggtctcctacgcccgacagtgaggctaccaggagcaacaggaagcaggagtagtatagtgtaatagtagaaatagtagtgatgtataataggtagtgcaatgctgttgtaaaattcgagtctgtaacattactctttttagtaatgtaaaatggatgtttttatttggcatattatattgttttcaaatgtttgttgccacagatgccttcccagactcgtgctcangatggggctagtacctcccgtgggagggaggcaacaccaaacccacctccagtccctcccacacttgccgaggctatcgccgccttggtaaatgctacaacaaataatacccgtttcctacgggagatggcaggtcagcaac

SEQ ID NO: 26021 - DNA, 373 bp, Zea mays
acatgtgctatctagctagctgctacaagaagtgatagatagaattgcttctggatttgatcacatgaggtataatggcatcagggccagccacgtactactctttcgtccgagccggctaaacagatttgggaggaataaaacttgctttctggttgcttgaaaggcttcatcacccacaaaaaccctatagatttggatctttgcatatacacttgcttgaccttggtcgacaagtaattgaatgtacgtacagagttaagtatttggccaggatgtcacgcacgcacctgtccccttctatctcaaccccgctgctatatatagctctatggaggcatcaccttctctcatctgtgtctttggataatac

SEQ ID NO: 26022 - DNA, 436 bp, Zea mays
  unsure (1)..(436): unsure at all n locations
ggtgcttcgtcagtcatcacaatagtcggcctctntaagccaaagtgtggcttcatgggcctctagatgatatccctaatgtattccctcttcttcaagtcgatcttcatgtaaaaccattccttcgtccaagaggctatccacttgcttcggtacaccaaggaaagataccagacatccttccggtatgcgaaggtgtaacaaccaaagttattatgaagttgctcttttccacttgccttcatctgataatggagctcatgaatggtgcagaagcagtctacatttggctccacgctntggctccttactgccttgataaagatccccattcttaccaaagcattnggggtcagctgatgaagaaagatatcacaattcttcaagacctccactagcattntgtgaagtggaaatcatagtctagctctcatga

SEQ ID NO: 26023 - DNA, 407 bp, Zea mays
  unsure (1)..(407): unsure at all n locations
agcttcctcaatctttattggtgcttattaaatatacttcaatgtttataattggcccaagccatgattctaagtttttcatactcttttccccattttcttgaattttgnttatagggctcaattagggtttttgttggggttgcaccttttgcctttttgaaaaacccatttgttttgatcatgatacttttaagtataagcttagtgggttctttatccttaaatcaacttgatgttcatgctcaattttgattcacataagatgatggttcttgggttagcacttgagagaaaccctangtgacactgggtgtcacacttgtcctcaccgcagaataagcaataaattnttctaggctgatccccanaccttccaccgaagcccctggcgcctctacctcttg

SEQ ID NO: 26024 - DNA, 423 bp, Zea mays
  unsure (1)..(423): unsure at all n locations
tttagcaacaaatgtattcaacgactgagaaaaatcttccactcagttggagctagcagtgagaaattcaccccgtcagctgaagatttaccanagaccttcgaacatattgagaggtgaaatgatgagcttgacgaagttatagcccggcacggtgacttctgtgcctgggtagcttctcggggcactgctgcagctttcctgaaagctggctgtgatcatggaaaaattgtcaataggcccaatttcactctatcaccatcaattctggatgacattcctgatctcgcccgaagcatttctaatagaattgtaaagatgatatggacaaaaggcgggcgagaaaaggctggagacgaagctcggagccatcttgaaccagtaagagatcataccttgtgctttaccttttcttcaagcttg

SEQ ID NO: 26025 - DNA, 361 bp, Zea mays
tataatatgcgaaatgactcaagtctagctatgggtgcataggtttcaccgaaatccaaaccttcgacttgagagtattcctcggccacaagtcgagctttgtttcttgtcaccacaccatgcccgtcttgcttgttgcggaagacccacttggctcctacaacattttgattaggacgtggaaccaaatgtcatacctcattcctagtgaaggtgttgagctcctcttgcatcgccaccacccaatccgaatcttgaagtgcttcctctaccctgtgtggctcaatagaggaaacaaaagagtaatgctcacaaaaatgtgcaacacgagatctagtggttacccccttatgaaatgtcg

SEQ ID NO: 26026 - DNA, 436 bp, Zea mays
  unsure (1)..(436): unsure at all n locations
ctgacatanacttgtcgggctagctcgtggccaacttatggcccgttcgtttctaacagtttcaatcctagtctgaacacttccagggcaaggatcaagtgaatctagttggttcactgaaacctgctcaccagtgaaattcaggcaggaaagaaaactgtagaaccaatgatggttgttcgtttcaaatagaaatagaaacacttgtttcacaacaaactggtattatctagtttgaacttgacaataaaacaagtgataagcatgatagctgttaacaacaagtgtgctagtaataccaagtgataaagaagtgatggttctagtgatgctnggaaggcaatggataagttgtcatgtggcagagctcanatatgagtacttgctagcatcctgaagttcagacacgaagtgtagtctgtcagcaattgtcagt

SEQ ID NO: 26027 - DNA, 394 bp, Zea mays
gcttcagaacaggctgcaacctttctcttgtgaagggatttaatcgattgtcggaccaacataaaattatcatgaatcgatctacctctgataaaagcactttgattagattctaccaattcatgcagacgagggcccaaacgattagcgagtaattttgtgaccaatttagcaacactatgaattaggctaattggcctgaaatcaccagccgacgaagcatccatctttttatgaatcaaaataatgtaggaggaattcagttgtcccaatctctgaacattgccctggtgtatgataaacagagccgccagcagatccaccttaatgatactccaacaagatttatagaacctccctggtaacccatcatgcccaggagccttatcagacg

SEQ ID NO: 26028 - DNA, 438 bp, Zea mays
  unsure (1)..(438): unsure at all n locations
tctattaggacctatgatactcaagctgaaaagatatcagctgctacaaacgcctgcacatcatcggcaacttattntactcaaacttcagagtaaggcacccttgcaagttaccgttgatatcttcgtgttgatttaggtattctaactctaattcattntaatagagtttattgttaagcaaagctctgaaaatgcaacatgatgacaaagacaggaagaatgaaattgttgtaaagggtttcgaagacaaaatcaagaaacttgaagattctntataagatcaagatgatttgctgcatttagccgaaggatcgcttgccaaagcgcaggctcagaatgaaaaaatgagcaaggagttgaaagaggctcatatgctnttggaagagaactccagccgattcaaccgtgaaaccgaagctntgaacatgacaatca

SEQ ID NO: 26029 - DNA, 435 bp, Zea mays
  unsure (1)..(435): unsure at all n locations
agcttgccaatacttgtcanaacaacaacatctaccatcacaacaactgcagaccataccagtaacttggcccttcgcatgctgtggactggatatgattggacctttcaagaaagctcaaggaggatacactcatgtattggtagcaatcgacaaattcactaaatggatagagttcaagcccattgcttctttaacctcatctaaggccgtggaattcatacaaaacataatattcagattcgggataccaaacagcatcataactgacctatgatccaacttcacgagttcagaattcttcgacttctgcgagcaaaaaagcattcagatcaagtatgcttctgtagcacatccgagagccaatgggcaggttgagcgagccaacgggatgatactagaggcactcaagaaaaaggtcttcgataagaatga

SEQ ID NO: 26030 - DNA, 499 bp, Zea mays
  unsure (1)..(499): unsure at all n locations
tagtcatgaaaggttactaagaatggacctaaattacattcacactcctgaaataccaaanaaccctaaaaaagaccctgtgaaaccctanacctaaaccctagggggctaagtgcaaaattggtgcacttttggactaaagtgcaaaaatcatgataataaggtgtcctaagtcatatggttcacaatcatgaagatttgcaagctaaaccctgacttttggatctatttgcaaaaagaccctattggtgttctaaaggctaagtctgaaattcagtgtttgagctcatctttggagcttgtaactttcaaattataaggtttttgccctaggtcaccacatcaattntgtaaacctattataggagagcaactttgatgcagacacccctctggttgttatgcanaaattggagaatagcaagcccaaagttgctctatcagaactgggttagataactgaaatngaaccctagatcagaaatggtcacagtgagat

SEQ ID NO: 26031 - DNA, 484 bp, Zea mays
  unsure (1)..(484): unsure at all n locations
agctngcaatatttaaccggcgtagcactagcagtggcaaccacgaccacgatcgccgacgaccaaacctacctagtactagcggctactggctactgctacgcctacgcctcagggttctctatgctcagctctcccgcgcgggcgcgcacgaaaatggagcagatcgactagtaaaaagccgcgcgcctttcgctgtcgcaagaagatgctctggtgtcccaattgctttgtccctgtctgaacagtggacagtcgggggaacaggaacaccatgggcacgcatggcgctcggaccgtggagtggatagagagtggccattgcccgttgtcgattgcattgctactactcatccatccatttggtacgggtctgttacacgcgcacgagctgacgagcacatacacacacacacacnaccgctgtcgacgacgagagcgcgactgagatcacatgacggagcangcgttgacgtcgtcgtcg

SEQ ID NO: 26032 - DNA, 498 bp, Zea mays
  unsure (1)..(498): unsure at all n locations
ctaagctatgcgtctcaggtacctggtttntgcctcatgaaggacctcgctgacgtagtagaccggcctctgaactatccggactcctgcagccggtcccgagttctctggttcctggccttctagtgtcgttctctcgacaactagcaccatgcttaccgcttctgcgaccaccgtgatgtataaatacagcggctcccctggctctggagctaccagtattggtagggacaccagttgctgcttcaactcctggaaaggcttgtccgcctcttcgttccaagagaagggcccggacttctgcaacagctngaagaaaggcagtgccctcttggccagccttgaaatgaagcagctaagggcggctaatgaccctgtaagctnttggaacatccttgatatgggccggggcctcatcgcctcaattgctntgatcttctncaggtttgcctcaatgccccggtacgaaaccaggaaccccaacaactttccaatgga

SEQ ID NO: 26033 - DNA, 464 bp, Zea mays
  unsure (1)..(464): unsure at all n locations
agcttagcaagtgtgagttctagatcagcgaagttctattcttgggtcatattataaattgagatggactagctgtggatccaaaaaaggtagcagtgattctggactaaaaagcaccaaaagatgtccaatgaatcaagagtttcattggaatggccgattattatcggtgtttcattgaaggtttctccaagattgtcaggccaatgacagccttactagcaaagaaggttgagttcaagtggaccccagcgtgccaagaatcatttgagatgttgaagcagaagttgacaacagcaccggtgttggttttactagatgttcacaagccattctcagtatattgcgatgcttcatacaccagactgggatgtgtgttaatgcangaaggtaaagtagtggcatactcgtcccaacaattgaaagttcatgagaagaaataccctactcatgatctggagcta

SEQ ID NO: 26034 - DNA, 449 bp, Zea mays
  unsure (1)..(449): unsure at all n locations
tgaagctgtcctttccgccatgtcaaaggatgacctcgcagactgtcttgcatacaacagtctanaggtacggaagtgatggactcaaaaatagattatcttgtctcgtattctcgtgctgatcctatctttctgtagggcttaattcttagtaacgctntgagggcatagaagaatgctgaagatgaaagctgccagatagccctcggcaaccttcggtcagaagttatcaagctgagaaatgaagccatggagaataataaaattctgctttcattggtggacaaagcgaanaaaggcgaagcanaatttaacgctcgatccgaagctcataaagccaaagttgaagaccttcgganaaaacttgccgaagctaatgaanattttgaactttgcaaagtgaaacaagaaataagtgaatggtcgaacactangctggagaaaaatgt

SEQ ID NO: 26035 - DNA, 473 bp, Zea mays
gcttaaagccatggtgagtagcatgggcaagttaaatgcgaactgtctcaagcctagctacgggtgcatagggttcaccgaaatccaaaccttcgacttgtgaatatcccttggccacaagtcgggctttgttccttgtcaccacaccatgctcatcttgtttgttgcggaagacccacttggttcctacaacattttggttaagacgtggaactaaatgccatacctcgttcctagtgaagttgttgagctcctcttgcatcgccaccacccaatccgaatcttgtagtgcctcctctaccctgtgtggctcaatagaggaaacaaaagagtaatgttcacaaaaatgagcaacccgagatcgagtaggtaccccctctttaatatcaccgaggatggtgttcacggcgtgatctcgttgattgcttggggactcttggtgtggcggcttgaacatgtcatcttcctatctg

SEQ ID NO: 26036 - DNA, 486 bp, Zea mays
  unsure (1)..(486): unsure at all n locations
tgactacaccatntgacatcttacataaaatntctgagatcaagaatatctagttcattcctcaatatgcaaaagcgggtcttatcaagtggcttagtaaaaatatccgctaattgatcttccgacctcactccttctaaaatgatattcctttagcaacatgatctctaaggaaatgatgacagatatcaatgtgcttggtgcgagagtgttgtacaggattattagcaattttaacagcactctcattatcacacaacanaggtaccttttctagaactatgccatagtctagaagagtttgtttcatatataaaatttgtgtgcaacaagcacctgcggtaatgtattctgcttcgacagttgacaaggcaacactatnttgctnnttggatgtccatganactagtgatctaccaagcagatggcatccnctagaagtactcttcctatcaattntgcaaccagcataatccgaatcagaat

SEQ ID NO: 26037 - DNA, 467 bp, Zea mays
  unsure (1)..(467): unsure at all n locations
agctntganagcccagaaggatgcagaagacgaaagcattcataatagctttggaaaccttcattcgaaagttataacgcttaggaatgaagctcttgagaaggataaaatactgctctccttgattgaaaggttaaagtctagcaaagctaggctgtctagcatttccaaagcagatcaaaaaaatcaaggagtttgaaaagaagcaagagaaagatgcgaagcgtattgctgatctagaatatgcactatctattgaggtgggattacacagatccaaagtgcaaggattggagaagaagcttgatgaagtaactgaaaatttcaatgtggaacaaacacaatccgagatatctgatatggaatgattaagagttacaaaaatgtgaggagcttcgtatgctaagaggagtgctcaaggttctatgaatgttgaataattgaaaatagtgtgctaaggtgcacat

SEQ ID NO: 26038 - DNA, 426 bp, Zea mays
  unsure (1)..(426): unsure at all n locations
ttgagaagctgaagaagctattgactacagcaccagtgctagctctaccagatatcgcanagccatttggtgtgtattgtgatgcttctagcattggcattgggtgcgtactaatgcaagaaggtcgtgttattgcctgtgcttctcgacagctcaagcgttacgaagagaattatccaacccatgatcttgagttggctacgggtgttcatgtgctcaagatttggcgccgttatctgagaggttatacatgtcacatttacactgaccataagagtctgaagtacatttttacccagtccgaactgaacatgagacagagaaggtggcttgaagtgatcaaagattatgatctagaagttcattatcatcctgtgaaggataatgttgtggcagatgctcttagccgtaaatctcagtgtaatt

SEQ ID NO: 26039 - DNA, 410 bp, Zea mays
  unsure (1)..(410): unsure at all n locations
agcttnccattcgccttgggacaatgactgggttggccagccacactaggtgatgaacctcttcgatgaagtcggcgtctagcagcttccggacctcctttcggatgaagtcctgccgctcaacagactgtctccgaggcttctgactcaccggtttggtgtcagggttgatcttcagatggtgctcgatcacctccctgaggatcccaggcatctgcgatggctcccatgcgaacatgtcagcatttgcctggaggaaggagatgggcgcgagttcctatttttcctccagatcactcgcaatgcgagtggtctgcggngaatccgcatagagccggacggccttgacggagatgttgcccactccggatggcggcacctttggcaccttggtaggcgccttggtaccg

SEQ ID NO: 26040 - DNA, 503 bp, Zea mays
  unsure (1)..(503): unsure at all n locations
ngaggaacacccaatcgcctactacagagtgccgctcgtaacgacctttgtccgcttgacgtttcataccgaagttggccctttccaaatgcagctcgataacatcagatatcaactgccgctcatgcaaccatgacgccagatcagtggtactgatgatagtgtcatgatcaatgccaaaaaacctgggacgacaaccatacaagacttcgaacggagaccgaccaatagctgagtgaggagaagagttataccataattgagcgacagataaccattgactccactgattcggataggcatgcacaaaacagcgcataatagtttccagacactgattcacacgctccgtttggccatcggtctgagggtgataagccgagctcattcttagatgcacatcagccagacgaaataactccctccacagattactgagaaatattctatcacgatcagaaacaatagactgaggtanaccatggtggttatatatctgatca

SEQ ID NO: 26041 - DNA, 403 bp, Zea mays
cttcatccacacatgtgctaagcggcgatgccacagccagcccatgctagtcttagctattaagcatgcatctagaccggcctcttcttttgcaaaatcaactaaataaagtttgccgtctaatacacccttaaaagctaatgaaccatcgcttcttctaaagacagacacatctacatttgtaaatagacagttatatcccatatgacataattgactaacagatagcagattatatccaagactctctactaaatatacattagagatagaatgctcattagaaattgcaattttacctaacccttttaccttgccttgattcccatcaccgaatataattgaatcttgggaatccttattcttgacgtaggaagtgaacatcttcttctccccgtcatat

SEQ ID NO: 26042 - DNA, 485 bp, Zea mays
  unsure (1)..(485): unsure at all n locations
ngacattgctctggctcagttgttggaacccaatgccatccttaatgccaaagcgtctcccattatagagcatgcttctagcaaatntaaacattatatttttcaagttcatgctcggcaatttttgcatttaaattagctatgtgatcattttgttgtttaatcatgggaaggtgatcatcaatagcttctatattaacatctctacatctagtacaaatggtgacattctcaatagtagatgtagattgtatgcatatgttcaagtcattaatcttagcattcagactagcattctcatccctaagacatgaaattgaatcattgcaaatattcaaatcttcaatcttagaaactaaactatcattttcatctctaagacaggagatcgaattattgcagatgctaagcttcttagacaagttttcacatttctctacttctagagcataagcatttttcaacttaacatagtttctattatc

SEQ ID NO: 26043 - DNA, 457 bp, Zea mays
  unsure (1)..(457): unsure at all n locations
gcttcggtattacaaaccgacttaaagatagaatgaccttttagtccataaaggtctgagtcaatgttgtaagctttcgtaaggggcatatttgtaattcctcacaggctgcgtcctgtgcctataaatagtgaacaaaattccgctactgttcacgcactccagtattggcgattgcatcatttgggaaccaatctttgccaaggcaaaggtataattgtattcaatggataaatataatgagtagtcataatgtggttcattatgattcgnttaaccttgatactttgtgttttatgcaatctattaaaatacaattacgaagatttagtctttgtaattgtactgtaatcaaccttcgtccaaagtccattaatccccaaaggaataatgctttgttggacgaaggacattaacatttaacactttatgttgccttgtcttgattatagcattt

SEQ ID NO: 26044 - DNA, 447 bp, Zea mays
  unsure (1)..(447): unsure at all n locations
nnggaaaatctagaataaatcagcggtaataaccagccattccattgaaacttcggacttgatgtacagtggttgggggtttccactccaaaatatccttgactttgctgggaccaccgcaatcccgttagcagacaacacttgtcccaaaaattggatctcctccagccaaaatgcgcatttactgaatttagcatataattgatgctcccttaagcgtgttaacacgatccgcaaatgccgagcatgctcctcttcattcttggaatatattaagatatcatcaatgaacaccaccacgaatttatccaactcggacatgaataccaagttcataagatatgtgaagtgggcaggagcatttgttagtctgaaagacattaccagatattcaaataatccataccgtgtagtgaatgcggtcttgggtatatctttgggtcggat

SEQ ID NO: 26045 - DNA, 462 bp, Zea mays
  unsure (1)..(462): unsure at all n locations
gcttctaaaggagaacacgtgataggttngacttacgtgcaattccaaaaagatagaccttgtgcagcttgtcaagcacgtaaacaagtgggaggagcacatcacagccagaatgtgatgaccacttcaagacctctagagctactgcatatggacctcttcggacccgtcgcctatctgagcataagaggaagtaaggatggtctagttattgttgatgactcttcccgcttcacttgggtgttctttttacaggataagtctgaaacccaagggaccctcaaacgcttcctcatgagagctcaaaatgaaggtgaagaagataagaagcgacaacaggtctgaattcaagaatcttcaagtggaggagcttcttgaggaggaggggatcaagcacgagttctccgcttcctacacacctcagcaaaatggtgtggtagagaggaagaacaagacactcat

SEQ ID NO: 26046 - DNA, 476 bp, Zea mays
  unsure (1)..(476): unsure at all n locations
tctnagggagaacacgcgataggttngactaacgtacaattcttataagatagaccttgtgcagcttgtcaggcaggtaaacaggtgggaggagcgcatcacagcaagaatgtgatgaccacatcaagacccctggagctgctacatatggacctcttcggacccgtcgcctatctaagcataggaggatgtaagtatgggttagttattgttgatgacttttcccgcttcacttgggtgttctttntgcaggataagtctgaaacccaagggaccctcaagcgcttcctcaggagagctcataatgagtttgagctcaaggtgaagaagataaggagcgacaacgggtccgagttcaagaaccttcaagtggaggagttccttgaggaggaatggatcaagcacgagttctccactccctacacaccacagcaaaatggtgtggtagagaggaagaacaggacgcttatcgatat

SEQ ID NO: 26047 - DNA, 430 bp, Zea mays
  unsure (1)..(430): unsure at all n locations
agctttcattcttcttctttacaacaaggctggacatccgcaaggcgaagtacttgggcgaataaatcccttgtccagcaactcttgcaattgtttcttcaattctgccaacttagcgggtggcatccggtaaggcctcttggaaatgggtgccgttcccggttgcaactcgatggcaaattcaatgtcccggtctggtggcattcctggcaattcatcaggaaagacatctgcatattcgcagaccactggaatcttcttcaagggtaactccgtcatagcaaaagcacatgactgagtagagtcttgactgggcaaaaacaaggtgaaacttccacatatcggggaatngacttccacgatgcggctggctacatcaagcactacttggtgtanggtcatcgaattagtgcccagaataatatccaca

SEQ ID NO: 26048 - DNA, 478 bp, Zea mays
  unsure (1)..(478): unsure at all n locations
tctatagggagaacacatgataggtctaacaaatgttactttctgaaaagatagaccttgtgcagcttgtcaagcagggaaacaggtgggaagctctcatcatgccaaaaatgtgatgacaacatcaagacccctggagttacttcatatggacctcttcggacccgtcgcctatctaagcataggaggaagtaagtatggtcttgttatagttgatgaattttcctgcttcacttgggtattctttntgcaggataaatctgaaacccaagggaccctcaagcgctntctaaagagagctcanaacgagtttgagctcaaggtgaagaagataaggagcgacaatgggtccgagttcaagaaccttcaagtggaggagtatcttgaggaggaaggaatcaagcacgagttcttcgctccctatacaccacagcanaatggtgtggtagagaggaagaacangacgcttatagacatg

SEQ ID NO: 26049 - DNA, 413 bp, Zea mays
  unsure (1)..(413): unsure at all n locations
gagcacattntatgactaaccaatgttcattttgagaaagacagggtttgtagtgcatgccaagcaggaaagcaagttggtgcccatcatccacacaagaacatcatgacgaccgacaggccgcttgagctactccacatggatntattcggcccgattgcttacataagcatcggcgggagtaagtattgtcttgtaatagtggatgattactctcgcttcacttgtgtattctttttgcaggagaaatctcaaacccaagaaaccttataaggattcttgagacgggctcaaaatgagttcggcttaaggatcaagaaaaatagaagcgacaacgggacagagttcaagaactcacanattgaaggcttccttgaggagganggcatcaagcatgagttctcttctcccta

SEQ ID NO: 26050 - DNA, 453 bp, Zea mays
  unsure (1)..(453): unsure at all n locations
tataccacagataagtattgaagtgcagatataaaggcgagtaagacagagagtcaggatacaatacagaatagagcacacagacgcaaggatttatcccgaggttcggccaagcctgaaatgcttgcctagtcctcgttggagttagccacacctgngcttggagtctatttcaactccttcctccgtttgctcagatctgtcagtatgacagatagagcctttcactattgagtggggttacaacagaaacgtggctgcttacaaacttcttggcagcaccccgacagagtaacgatacgctcaagaccttgctctagctcttagcaacactactcctctctctaaaggcttatagctgtgccttctacacaaaatatagagttacacacaagagggagagcgagaatngatttcaatgaagtctacacttgttggctgcacttatatatt

SEQ ID NO: 26051 - DNA, 419 bp, Zea mays
  unsure (1)..(419): unsure at all n locations
tagagttgngagctactgctgcctccattatattgatgatggaaccaatcttatantttgtatatctctctccatcatattgatggaagcaaccctatactttgttttcttgttggcgtattctgaattattattataaaacattgctgtttggtgatttgtgccagcctacttaatggatttcagaaacatggcaattctgaacatttagttctttttttcatgactggtgctacataatctgtctaattactaatctggntatgagatgctgttccatgttagtctgctccgttattntttgtgctgatcagctacttattgtgttgcgatgatgatcatatcaatacatccagacatgctataaattattaatcagtatgctntaatttatgcaattattctggaactgtatataa

SEQ ID NO: 26052 - DNA, 424 bp, Zea mays
tgcacagggaagataaataataccactaattagacaaactatcaccatgtgtttcttcaaaactatgtatggtgctctagcactgcccatcatcaacataaagatggttttccccctaaatgacggcggtgcaccaaacacatgggacgtgcagtcacattatagtaccatagcatctgagggagtacgttgtttcgttccttgttgatatggatccataacacaccgtcttgatactcttatgctagaaccagcagcatccctattatatcccctatcacataccttatttcagacttcaatatgcagacagtatcatctacaatgtaaatactatattttacacggtccactgaagactacctaacaaggcacgagtctatttttaatgcacagcatcataatctatggtcatcacatgagt

SEQ ID NO: 26053 - DNA, 507 bp, Zea mays
  unsure (1)..(507): unsure at all n locations
ggcacanaacacagaagttcagactctaaatgtattaagtctgatatccacattttctgacagctctagtttggaccagttttactccaagttccaaatagttttatagctagatgacttaaccaaacttatactcctcatgtagctctatgactgtgttataaggaccatcttcaaaatgcttatagataagaatgtacaagggttcaaggttggctagtttatattaatttcagaagttccaatgtgaacccacaactgaatttctgcacatactccaaattcttccacacaacttgggaatctccaaataagatagttattcaattctccaagttctacaactttggtatatggactgttagctaaatccttctagactatgaattcctcttttgggctagttntagggtttcaaatgtgactcctcatctagcgatntaccaactcaattcatacttctatggaacaagtgaatgcttaatctcaatgcaactctagtacatg

SEQ ID NO: 26054 - DNA, 441 bp, Zea mays
agcttcatgccccgaggatggggcgttctaacagacaagacaaaccctaaccattctaaatatagtccaaggaaggactttatctgggagagttaatttcagctgtagcgagacaaggctgtaactaaaagatactaacagtcaagcatgacccaaggagggttcatgctgatactagtcaaattggactacaatgacagctaaataactgaactagcatgccactcccacatttcatcggtagaatcccaactgtacctagcttaagcctgacatttcttgttgaagcataaaccatttaggcaaacctacccttctatagtcctgctgttacggtgttacctagaccaaatgcatatgatatatgaccagcgactagtgtaaccaactcatcttttctttgcaaaagattagatgcaccaacctaacaattatttgatc

SEQ ID NO: 26055 - DNA, 516 bp, Zea mays
  unsure (1)..(516): unsure at all n locations
gacactataatactaagctngtacaggccttcttctntntctccatagcaggaaccttactggaacactaccccacttaaaaagaatgagggtagcactcttgaatcttggggttntgaactccttgaagtacctcataacaagggtgttacaggggcttcttctgctgttgctgcttgaacaggctgcagagagatgactgacacagggttgattctgggagaaccttcttcttatcttctcttcactatcttcttttctcttctcacttttcactgtccctttctttctctttgctcttcccactggaggattctatcaaagagtattaccatcgtatagaggagaaaaccaaaggctatgaaccatgtgcaacagtcttcaacccaagaatcaccaagcattgtgatcttangggcgagggagtggaaaatggagttgcttgcgattggtagagggtatttatctggtgttgctttgcttngatgggagtgangaaatcgtgggggaattata

SEQ ID NO: 26056 - DNA, 403 bp, Zea mays
agctacatgccttcttctttgtctccatagcaggaaccttgccggaacactaccccacttaaaaaggatgagggtagatctcttggatttttggggaattgaactccttgaagtgcctcataacaagggtgttacgggcccttcttctgctgttgctgcttgagcaagctccggagaaatgactgacacagggttgattctgggagaaccttcttattatcttcccttcgctatcctcgtttcactgaccctttctttctctttgctctttccacttgaggattctatccaagagtattaccatcatacagaggaagaagccaaatactatgaaccatgtgcaacagtcttcaacccaagaatcaccaagcattgtgatcttaagggcgagggagtggaaaat

SEQ ID NO: 26057 - DNA, 348 bp, Zea mays
  unsure (1)..(348): unsure at all n locations
agctttggaggcaaagaaaaaaccagtagcacgacgcataagcagtgattgtcgtgctcaaccactcaaattnttcctctttttatacaaaaaggcacgataatcgattacctgcccatcttctctcactgcactttggtacccataagctataagctcaaaggttatttttaacgacctatgggaaggagtttttggaccttcattataaggcatccaaagtatatttcacgacctgagcttgtattaaaaatgaactaatcctgtgaggggtctactattgggggccctattgccaaaggtcctcaaagcatggtattatctgccaaatatgtttctaggtactat

SEQ ID NO: 26058 - DNA, 472 bp, Zea mays
  unsure (1)..(472): unsure at all n locations
tatagggtttttgagatgactaggggcttcggagggcgaatccaccctatgcatgtcagatcaatccacaactctagtcagagtgaggacagaggaagctagtttcagaggccacatcatagctcacaatcttcgggacagcagcagagctctttcaggccaccagctccaaggggcaggggtggcaggggcttcggaggaagatatggggatcagcccagganactctactacttattctgtggtgaggacaagggccacactacaagaacatgctangtcaccattcagaagcaaaaagaaatttctgaagccgaagcgcctcagaattagtcgaagcagggtttacatacttcttgtgctattctccctatataccagaatacgtgggcaatcaatctacagtttctggtgcttcggcaagccattcatacccgaagccagcagctagaagggcaccagcactcccaat

SEQ ID NO: 26059 - DNA, 470 bp, Zea mays
  unsure (1)..(470): unsure at all n locations
atgcaagcttgtcttccagccaggcgaagaatgctactgctgcgcttaccatgttctcagagaaggtgtcctggatgacgtgtctgccattttcggcttgcatgtggatccaagacttcccgtangcaccgtttcgtccaggccagggccgtttctagcagcagcaggtagatttcgggtgacggtcactggaaaaggaggacatgctgcagggccgcaggatgctgtggatcccattgttgcagcatcctctgccatcgtcagccttcagcttcttgttgcccgcgaaattgatcccctccaggctgcagtatgtaatctatcccccagctgaccatgcttccatagtagctttgcctttgcagttgcagccttccttgcgtgtcttaatttgttcccttgcagcctacattattgtaatcccagatgatgctctgataatagcatgatctcctcttttgcttgcactg

SEQ ID NO: 26060 - DNA, 493 bp, Zea mays
  unsure (1)..(493): unsure at all n locations
ntgccagatagggcgcataattatacgcttgatatcttctcgtattgtcagatcattcttcacataaaaccattctgtcatccagtcgccgggccatctcttccgaaaggttggcacggngcagcttgacccggaccgagaaacaaaactgtagcaaccaaaattattgtgatactgttccttaccccaaggctttgtctcatatgataattcgtgtatattacagaagctntntgcatcaggcttcagaccttggcttctcacggcccacacgaagatattcagccttataattgcttcgggggtaagttgatggagatagacttcgaatattttcagtacctctacaacgaagctgctcanagganatcgcagtccagctttcanaaaacttcggtatactacgacttcattctcttcagggtgtgggcaagttttttccccttcgtcggccctcacaatggacaaatcccgaanataccttcctctcatg

SEQ ID NO: 26061 - DNA, 462 bp, Zea mays
  unsure (1)..(462): unsure at all n locations
agcttgatgagaaacatgtgaggttntctagcatgaattcagctaattntgtgctcacgatagtatgcaggatataaaatgtagccctctctatcctgaaccatgagagctttacccttaacaaaattagagagtttgttcttgggggcattgagtttggtgttgctttgtcttccttgttggaaaccaataccattcttaatgttagggcgtctnccattataaagcatgttacgagcaaatttaaacttttcattgtctagctcatgctcggcaattttagaatttaatttagctatgtgatcattttgttctttaatcatggcaaggtgatcatcaatagcttcaacattaacatctctacatctagtacaaatagtgacacgttcaacaatagatgtagagggtttgcaattattcacttcttctatcttagcatttaaattaacattctcatctcta

SEQ ID NO: 26062 - DNA, 442 bp, Zea mays
  unsure (1)..(442): unsure at all n locations
agcttctaagggagaacacgtgataggtntaactaatgtgcaattcgaaaaagatagaccttgtgcagcttgtcaagcaggcaaacaggtgggaagctctcatcacaccaaanatgtgatgaccacatcaagacctttggagatgcttcacatggacctcttcggacccgtcgcctatctaagtataggaggaagtaagtatggtcttgttatagttgatgacttttcctgcttcacttgggtattctttttgcaggataaatctgaaacccaagggaccctcaagcgcttcctaaggagagctcaaaacgagtttgagctcaaggtgaaaaagataaggagcgacaatgggtccgagttcaagaaccttcaagtggaggagtaccttgaggaggaanggatcaagcacgagttttctcgctcctacacaccacattcaaat

SEQ ID NO: 26063 - DNA, 497 bp, Zea mays
  unsure (1)..(497): unsure at all n locations
tgtggaggacccgatcatccaagcatgtaagcttctagatgagatatggtcacccaagttgtggtgatgaagcaccagaagactaatcaaggaaggaatccatgtgggagttcgcaagagaaaggtttgcgtgttggcatcgatgcttcctcaataagctaagagaaacctagaagcctgaagatgatctttgagtagccagaatcaacgtttgcaatcagcaaccggatgctcctgaaaggccagaatttgttgaagttccatctcctcgaagagtctgcaaagtgaagatatgtagctgaagtaaagctatacccataacccttttaagccaaatcttgaggacaagattccttttaagtggggtagatttgtagcatcccacaaattcanattctgaaatattctcaaactcgctctanattcaaaatggaatttcaaatttggttcataatgtttgtttgaagttgatatcacaagtaaagatagtggctata

SEQ ID NO: 26064 - DNA, 371 bp, Zea mays
  unsure (1)..(371): unsure at all n locations
ttttctggaaggagcaagattcaagattnttgccgtttctaatacgacatccagtacatttgccatcctcctcctcttangagttgtagcagaactttttgtgtcttccgcattgttgcttctgttgaagggcttaaaatctctggcatctttgttatttctttagtttttgactttccagccttatctttgtcaaccttcgttttaactagctcaaccgaaggtaccttcggcattatagctggctcttccgttctctgcatgggaggaacagtttctcttgattcagtagctgaagaggcctccccaccaaactcaggcaccacagccggttcaatataacgcggtcggtgggtaagtaccttcatctt

SEQ ID NO: 26065 - DNA, 358 bp, Zea mays
  unsure (1)..(358): unsure at all n locations
ntaccaaatagacgtgaaaagtgccttcctcaatggaccaatcaaagaagaggtctatgttgagcaacctctccgctcttaagatagngagtatcctaaccatgtctgtaaactctctaaagcgctttatgggctcaagcaagccccaagagcatggtatgaatgcctaagagaatttcttatcactaatggcctcaaagtcagaaaggccaatcctactctctttacaaaaacacttgcaaatgaattggtttgatgccaaatctatgatgatgatatcatatttgggtctactaacgaatctacatgtgaagaagttagtaggatcatgactcagaatttcgagatgtctatgatg

SEQ ID NO: 26066 - DNA, 469 bp, Zea mays
  unsure (1)..(469): unsure at all n locations
agcttaaagccatggtnagtagcataggcaagttatatacgaattgactcaagcctagctacgggtgcataggtttcaccgaaatccaaaccttcgacttgtgagtatcccttggccataagtcgggctttgttccttgtcaccacaccatgctcatcttgcttgttgcggaagacccacttggttcctacaacattttggttaggacgtggaactaaatgccatacctcattcctagtgaagtgttgagctcctcttgcatcgccaccacccaatcctaatcttgtagtgcttcctctaccctgtgtggctcaatagaggaaacaaaagagtaatgttcacaaaaatgagcaacacgagatcgagtagttaccctcttttgaatattgccgaggatggtgttcacggngtgatctcgttggattgcttggtggactcttgggtgtggcggtcttggaactagttcatc

SEQ ID NO: 26067 - DNA, 494 bp, Zea mays
  unsure (1)..(494): unsure at all n locations
ntatcaaatggacgtaaagagtgccttcctcaatggaccaatcaatgaagaggtctatgttgagcaacctcccggctgtgaagatagtgagtaccctaaccatgtctataaactctctaaggcgctttatgggctcaagcaagccccaagagcatggtatgaatgccttagagattttcttatcactaatggattcaaagtcggaaaggccgatcctacactctttaccanaacacttgaaaatgagttgtttgtatgccaaatttatgttgatgatattatatttgggtctactaacgaatctacgtgtgaagagtttagtaggatcatgacacanaaattcgagatgtctatgatggnggagtngaagtacttcttaggatttcaagtgaagcaactccaagatgggtaccttctaagccaaacgaagtatactcaagatattntaagcanagttgggatgaaggatgccaaacccatcaagacacccatgg

SEQ ID NO: 26068 - DNA, 456 bp, Zea mays
  unsure (1)..(456): unsure at all n locations
agcttaagatgtactatctattcatacatggtagcaagcattattagcaatcaacagcttacatcaactcatcatatttccacttattactcaatgcagtacaatggatcaagcagtctcattagctgcgagaagcagacaattcgaatcgagtttttatccttgcaaggtaaacctaaacacacgacatgcaggggcactccgtccccacacatatcaactgtccccatcgattccctggcaacagaaaggggctcaccgccttggcgtacaatgcctcactgaccccgactgccgtcgtgcagtgaccgcacttgtacccaccataaccggaatgggagaccacgtctcangtcgcgtgaggagggcaatctgcgggcaggttcactcangtactanngcttaccgattaccatatttctcggtatgtgtttagtacgttcaaacgcttgacac

SEQ ID NO: 26069 - DNA, 408 bp, Zea mays
  unsure (1)..(408): unsure at all n locations
tctaacatcttttagaacatacaagaaaatctataattcttctgtgatttctagatggatgaagagaggagatatttatttatctagtatcgtttgggtacctgctagtatgcaacgggagtacattgtgttcaaaaggtgtgtcacttttgatacaactcatacaactaatctatatgatgaatcacttgatacgtntngtcgtgctaaccactaantcaccatctctagtgcaccatgtntcattntgcgttgctgcgtgatgaaattgtgagacattcagtggcattaatgcattaatacatcatggacgctaggggccacgagtatgctgcaagtatggattgacacttgcattttgcaatcgctttatcttatatatcaatgtatgaatattaattatattgt

SEQ ID NO: 26070 - DNA, 435 bp, Zea mays
  unsure (1)..(435): unsure at all n locations
agcttgcttctttgacgagtgccaaggccacatcactcggcaaagaggctntaccggtgcccaggtgtgccttctttgccgagtgctatgaccttaaaactcggcaaagtacctctttgtcgagtgttgcacacggcaaagtgaatagaatacccctttttatttgtttttgctattccatccaaacaaaagatatatcacataatcatcacatatacataacagatatcacataatcataacagatatcacatatacatcgcatatctcacaaagaccataaatctcataaagcaacaagttcgaacacaaacataagtctccaacactcaagaacataagtctcaagtatctcacaaagcattaccaacatcaacaagtttagaccaagttatctcacaatgtattaacaacactaacaaagataagatcatg

SEQ ID NO: 26071 - DNA, 345 bp, Zea mays
  unsure (1)..(345): unsure at all n locations
tcgaaccagaanatagaaggcatagaaaagaagtgcaacatagagtccaacatgtgggtgtacaaggcccatacattaagttcagtggtcacatatcccaatcatatctacctaggacgaccattggctcaaagattacccacatagtgatgacatggtaattacatacataataaaaggcttcatcatgcacaatgtcctggcagatatggacatcacatcagacattatctttcttgggtaatcanngcaatgcacgaactcgaagaccagctgcaaagagcaataaacacactctgtggtttctgaggaaagatgtttggagttttgaggaaagcatgtttc

SEQ ID NO: 26072 - DNA, 467 bp, Zea mays
agcttagcgactgccagttcgacctctagaagcagtcctacgtggtcgcatgcgctgctgtgtacgacaagctcccacgaagccaccgcttggatgcggtccagagcagctgcaccgcactatccattattaagcaggttgggcctcaatgttaagcacacggtctagagcagctgcacgactctcgggttgttctagacaccgcatctgacgacgacgccatcacgccgttcagctcatcgtccacctgaagcccaacctgccatgtaagtcgctactgaccgaacatgaattcttgtgcgctgggatgatggccgttgctgacgttgtgtgagtgtactctaacatgatgtatgtagtggagtaaagcattctgtggtgcaacggccagacgtactacctcgctgatgagcccggagtgcacttcgttttgacagtcaaccaagagtcatcggtactcgtcatat

SEQ ID NO: 26073 - DNA, 463 bp, Zea mays
agtgaaggttcttcatcctcacatgtgctaagcggcgatgccacatccagcccatgctagtcttagctattaagcatgcatctagaccggcctcttcttttgcaaagtcaactaaataaagtttgccgtctaatacacccttaaaggctagtgaaccatcacttcttctaaagacagacacatctacatttgtaaatagacagctatatgccatattgcataattgactaacggatagcaaattatatcctagagactctactataaacacattagagatagagtgctcattagaaattgcaatattacctaacccttctaccttgccttgattcccatcaccgaatataattgaatcttgggaatccttattcttgacgtaggaggtgaacatcttcttctcccccgtcatatggttagtcatccgctgtcgataatccagctgaaccccggatgcataact

SEQ ID NO: 26074 - DNA, 474 bp, Zea mays
  unsure (1)..(474): unsure at all n locations
agcttgccaattcttatcaaaacagcagcatttgctatcactgtatctgcagaccatacccataacgtggccattngcgtgctgggtactggacatgattggacctttcaagaaagctcaaggaggctacactcatgtgttggtcaccatagacaaattcaccagatggatagaatataaacccattgcttctctaacttcagccaaggtagtcgaattcatataaaatataatgttcaagtttgggataccaaatagcatcataaccgacctgngatccaatttcactagctctaaatgctctgatttctgcgaaaaacagagcattcagatcaaatatgtgtcagtagcacacccaagagccaacggtcaggtggaaagggctaatggaatgatactggaagcactcatgaaataagtcttcgacaagaatgataagttcgcatgaaagtggatcagagaaataccttacgt

SEQ ID NO: 26075 - DNA, 460 bp, Zea mays
  unsure (1)..(460): unsure at all n locations
tcggctccatctatattgtggattggctttgagtctgtccaatgtccttcatctcttttggcagcttcctgacttccatgaatagcaataggcccttgatccgaaggtatcttcatgcatagatatgctggatgaagaattgcttcgaatgagttgagtgttccacgaccaatgattgcattgtaggggtattccatgtcaacaatatcaaacacaacctattcagttcttgtattgtggacaaatccgaaggtcactggcatcgtgatcttaccaagtgctacaatctgccttcctctgaaaccacaaagagggtgtgtagcatcatggatcttatcctctggctcttgcatttatctgaaggccttagcanatatgatatccattgcactgcctgtatcaatcagaacattgttgactagaaatcccttgatgacacaagatatgaccatagcatcat

SEQ ID NO: 26076 - DNA, 472 bp, Zea mays
  unsure (1)..(472): unsure at all n locations
tgcagcttagcaaaagaaatntgtagaatcaagaatattgatctcatgcctaagtctggtaaaagattgttcatcaagtggcttggtaaagatatcggctaattgatctttagtattaatgtaagaaatctcgatatcccccttttgttggtgatccctaagaaaatgataccgaatggctatgtgcttagtgcggctatgctcgacgggattgtcggccattttgattgcactctcattatcacatagcaaagggactttggntaatttgtaaccgtagtcccgcagggtttgcctcatcaaagcaattgcgcgcaacaatgtccttgcgcaatgtactcgacttcggcggtggaaagagcgaccgaattttgcttctttgagcccaagacaccacgatctttccagaactggcaagtcctgatgtgctttctataatttgcacccgccatcggcatcgataaccataaat

SEQ ID NO: 26077 - DNA, 434 bp, Zea mays
tgtctgttagaatcgaacgaagctccagagtcgatatctgcttctgtagaagagaatattccagtttcacacgttcataattgaatggccagagtccgctctaccgccaatgcggagcgcgaggaggaggaaactgaaagctctgagactttccccatctacgaagccatgcgacgatcgggtctagtgacttctgaacagatccctcatgatggcgcagaacaagcagaacaagcgatcgctgaagcagatgacaaagatattgatgaaactgattccgaagatgcatatcgtattgccatgccaagcatgacgagccacttgtacttccgattatctactgattcgaaagctgatctgtccagatggtataatcaggctttctcactgataatcacaagaagctattgcgcttctgtggagaagagactacc

SEQ ID NO: 26078 - DNA, 463 bp, Zea mays
  unsure (1)..(463): unsure at all n locations
gcaccgcagctgcagctttnctaaggggatgtgttaatcaagctttgctttgtgttattcatatgcttcctgcagtattatatgtgttgcatcatatggactaatgcttccgttgctataaatttattggcatctattgtgttcattctgaaataaatagtcatgtggttaatgctgctttaagattgctttcacataatgtcttagcttgaaatggtatcttaatgatgaataatgggagggtgatatttctgtgatatatccactaaaatgaatggtgtctaactctgattatgtgcacttgtgtgttatagcatcatggcttgattcttgccaatgcatactataaagtgctcacgagtagaaatgtttcgatttgcctaagcatgtgcacattggcgtctgatgccaaaattatgtatctgaagtaagcacttatgtacggggagcattctatattctt

SEQ ID NO: 26079 - DNA, 476 bp, Zea mays
  unsure (1)..(476): unsure at all n locations
tgagcttcttccgtcactacaactggtggcctctntataccaaagcaagacacaatgggcctctgaataatctccttgataccctccctcttctttaagtcatttttcacgtaaaaccactgcctcatccagaaagccgaccatttgcttcggtatgccaagacaaggtatgtgaaggtgtagcaaccaaaattgttatgaagttgttctttccatgttgcttttgttngataatatagttcatgaatattgcagaaaacaaacaacattggctccacaccttggcttctcgctgcccaaataaaatatccccaccctcatcaaagcattcagggttagctgatgaaggtaaatatcaaatttcttcaatacttctaccagcattntgtggaaaggaaactaaagaccggccttctaaagcttcggaaaccataattcatctttttaaggtgagaacaacatctccaccagcctac

SEQ ID NO: 26080 - DNA, 400 bp, Zea mays
  unsure (1)..(400): unsure at all n locations
agcttctnctggacaagcgccgcacttactgtatagtgctaagctgccacatacagcagcagaggagcccctggcgctggtggagttagggttggtaaatctatcagatactgctttagttcttcgaaggcttgttggtgagctgatccccattgaaaaacttctgctgacttcagcacttcacagaatggtaaatttctctctgctgatctggatataaatcgattcaaagatgccagtcttcctgttagccgttgagcccctttctttgtgcttggcggctccatccgaaggatagctnttgatttatttggattagcttcgatcccttttgttgaaaccaaacaaccaaggaatttccccttctttactccgaagacacatttttctggattcagct

SEQ ID NO: 26081 - DNA, 150 bp, Zea mays
atcaacaggcagcgggagcagacctttttgtagtctagcatagcagggcggtagctctatcaaactaccggatagtgacctttacacaccctatgctatgatctactcttctaagagaggacactattaatataagacgtgtacccattt

SEQ ID NO: 26082 - DNA, 490 bp, Zea mays
  unsure (1)..(490): unsure at all n locations
tcagatcgatctatatcgcggattgcgcttgacgctgaccactgtgcttcttccttcttggcagcttactgactgccatgactagcaatgtgcccttgatccgaatgcatcttgatgcatagatatgctggatgaataattgcttccaatgtctcgagtgttccacgaccaatgattgcattgtatgggtattccatgccaacaatatcaaacactacctattcagttcttgtattgtggacatatccgaangtcactggcttcgtgatctatccaatgctacaatctgccttcctctgataccacaaagagggtgtgtaccatcatggatcttatcctctggctcttgcatttatctgacagccttatctaatatgatgttcatngcactgtctgtatcaatcataacatcgaggactggatagcccatcgtgacacaagatatgaccatgtcatgcatgtgtgggtaatccttgagctgaaggttctc

SEQ ID NO: 26083 - DNA, 465 bp, Zea mays
  unsure (1)..(465): unsure at all n locations
agcttgtgaaggttcttcatccccacatgtgctatacggcgatgccacagccaacccatgctagtcttagcaattaagcatgcatctagatcggcctcctcttttgcaaaatcaactaaataaagtttgccgtctagtacacccttaaaagctaatgaaccatcacttcttctaaagacagacacatctacattggtgaataaacagttatatcccatattgcaaagttgattcacagacaacaagttatatccaagcgattcaactaaaaacacattagaaatagagtgctcggaagagatagcaatttttcctaaccctttcaccttgccttggttcccatcaccgaatatgattgaatcttgnggatccttgttcttgacgtaggaagagaacatcctcttttcccccgtcatgtggtttgtgcatccactgtcgataatccagcttgagcccncggatgca

SEQ ID NO: 26084 - DNA, 427 bp, Zea mays
  unsure (1)..(427): unsure at all n locations
agcgacttataggcgctgactgcatgtaaatattgtgcccgcgctgtgtgaactgttctggtgcgtgtctagttcgtatcagctacttggccatgcgtactctaaactaaaataaaacatggcttgtgactgtgactagttaaatgtagcctgttgctgacagtaattaggtgccttaactttcagaaactcatttgttagcatcctcgattcctagacctacgaattaaaaaatatccgacgtgctagcagatgcagcaccatttgcttgtgctggataaaactgtctacctaacagaaacaaccgtgtttctcatgtcatggaccgactgagaccgaccattgttccaacttccaagtgggttntccaagcgtggttcctactcggtagttagccgcccattgatccttcattccatgccgtcat

SEQ ID NO: 26085 - DNA, 482 bp, Zea mays
  unsure (1)..(482): unsure at all n locations
agcttctgagccgaagcaactccagctttgaacgaatccatcagctcagagagtggaagtgagttcaccggaggtgggtgccaatgttggggacttgttctcaaatgtttcgaattaagaacaaggcaacccaaaaatgttgagtataaatgcccttcgtccgctgaagcactatttccctaaggatttaatgagcttcggacgaaggtcataagtaaagtatcacgaaggtttcactttcgttatcacatttttaagacaacaataagaaatgaaatataaagcacgaaatatattcacatgttttattacacaaatatacaagtattaaaacataatatttaggcacatttatacctttgccttggcagaaaacaataatccaagtgtaacgtgtccgtgattacgagatcgcgtgaacagtatcgggatactgttcacctatttataggcacaggatgcaacctgcgcannaatacatt

SEQ ID NO: 26086 - DNA, 484 bp, Zea mays
  unsure (1)..(484): unsure at all n locations
tgacattgtctnccctctggaagccaatgccatccttaatatctgggcgtcntccactatatagcatactacgagcaaatttaaatttctcattttctaattcatgctcggnaaatttagcatctcaatttgatatatgatcatntctgtgtttaatcatagcaatgtgatcatggatagcatcaacattaacatctctacatctagtgcaaatagagacatgactaacggtagatgtagagggtttgcaaacatntaattcatcaatcttagcatgtaacatgaacgtttcatttctaagattggaaacaatatcattgcanacatttaaatntttagccttaataatcaatttttcattttctatcttaaggctagcaattgattcattcaactcgtcaatcttagcaattatattagcattatcattttaagtttacaagagaatctcacatcattaattctcaccttacaatcaattaca

SEQ ID NO: 26087 - DNA, 213 bp, Zea mays
  unsure (1)..(213): unsure at all n locations
tcttggctgtctaactgctgggcgttgtcaactgtgagttcngacagtactccgaagcggcaaacaatgttttgtcacaagaattcctgtgcaccctttgatgatatagcggatacaggcctggacttgatccatttggtgaaatactccacagccacgaaagtgagattgaggctcccttgagccatgggcggggtcccgacaatgtgcatt

SEQ ID NO: 26088 - DNA, 450 bp, Zea mays
  unsure (1)..(450): unsure at all n locations
tcggccttcggaggccgaaagtcgagatgaatgaagccgcctattattgccaaagagccttctgcgttgtctgctctgttataggaacaagagactttntacaagagcatatcgccttcaggtgtggccgcttgctgagaaatgggaaatgccacatgaaaccattatagaggccgactaaggtggacttgtcaggtttaagtacacttttaaattgggagataaatttattgagccagatgatgagtggttgaaaagcattgacaatttaagtgatgaactgctggggacctactcgaaggccgaagataacgcaatgtcagcagccttcggaggccgaactaagaagagactgaatcgggtatttgatgccatcggggttgtctaccctgactattgctatcccattcgaaggcagaagagaacaaacacaacctctgcagaagaaga

SEQ ID NO: 26089 - DNA, 436 bp, Zea mays
  unsure (1)..(436): unsure at all n locations
cctatgctcctatgcaaagacatagttgagcacaatgtggtgctgggatctcaattgtctgatgaacaaganaaaactctgttgatatttctgtcaacaataaggatgtctttgcttggtcagccaatgatctatgtggtgttaacaaagatgttatcgagcattcacttaatgtagatccgactaccaggccaagagaccagaagcttcggaagatgtccgatgataaagccgaacgtgcacgaaatgaagtcaaaatgcttctaagtgccggtgtaatcagagaagtaacatatccagagtggctagccaatactgtgatggtgaagaaagctaatggaaagtggataatgtgcattaatttacaggtctcaataaggcatgtccgaaggatgagttctcattgccaagaatagactctcttgtggatgcaaca

SEQ ID NO: 26090 - DNA, 487 bp, Zea mays
  unsure (1)..(487): unsure at all n locations
ggtctggggctcgtcttatttcttcatccaaatttggtgatagcctgaatagcaatccaataaactcatgagctctgaagtagctgttgcatccacaagagagtctattcttggcaatgagaactcatccttcggacatgccttattgagacctgtaaaattaatgcacattatccactttccattagctttcttcaccatcacagtattggctagccactctggatatgttacttctctgattacaccggcacttagaagcctcttgacttcatttcgtgcaccttcggctntatcatcggacatcttccgaagcttctggtttcttggcctggtagtcggatctacattaagtgaatgctcgataacatctgggataacaccacatagatcattggctgaccaagcaaagacatccttattgttgaacagagatatcaacagagttttttctcgttcatcagacaattgagatcccacgcacacc

SEQ ID NO: 26091 - DNA, 428 bp, Zea mays
agctatacgcgacacaattatttgtctaacacgaaccaagttgcaacactacacgttacaaggcattttatcaagcatataaataaaccataatatgcctgtgctacagattagatggtcgccgcataattttgcatcaaaattctagacctcaacccctgacttgactactttataattctaaaaataattatatcaccacagaacagcacattgacacaacaacggatctagccataaccaataagcgcacctatgctaaataaaaggatcatcacaacctacatatctattaatccattcattaaactaaatattggaagtgacgagataccttaccataattaaattcacttataaccatgagatcgacgatgtctttcagctctaggtaccacagcagcacgccaatggtatgactagtcatc

SEQ ID NO: 26092 - DNA, 467 bp, Zea mays
  unsure (1)..(467): unsure at all n locations
tatggactctgcaatgaagtctttntattcttatgttaatcctttattctatcttgcagggcttaatacttagcaacgccctaaggtcgcaaaagaatgctgaagatgagagttgcactatagctctcaacaaccttcgatcaaaggttatcaggttgagaaacgaagccacggaaaagacaagattctactttcattggtggataaagtaaaggaagatgaagatagcttcaaaactcaatctgaggcccaaaaaatcgagatcgaagaccttcggaaacagctgaccgaagccaaagataaatgtggtctcgcgaaggccaaccgagatattagtgagtattggaaaaactatttagaagaaacagttgaagaactntgcgcatccaaagaaagatgcttcgaaaaatccctaggctgtgtggagaagataaaggctagcttcgccaacgtgggcgcctattcca

SEQ ID NO: 26093 - DNA, 335 bp, Zea mays
  unsure (1)..(335): unsure at all n locations
ctctgggatgggtgctacaaccagtgtttcagcacgggctgcatcagaggaatcttcagccaacatatccagcatggcacttatctctgcatcacttggattcaaatgtacctcgaaatgaacaagcctctcgtcgtcagggatttcgccaagtgaggcaaccaaagcactaacctcttcgggagagggtcacactctaaggcccaaaccgctatcaccagcaggaggatttgacacaaaactggtaaaggccttggaaggaggcagattccangctgagtatgcaacaggagcgccgatgttcgacaccttgcctctgagtatcatctcgagtc

SEQ ID NO: 26094 - DNA, 478 bp, Zea mays
  unsure (1)..(478): unsure at all n locations
tctaaagggagaacacantttgggactaagcaaatattcatttaagaaagacaggatttgtagcgcatgtcaggcagggaagcaagttgggactcatcatccacacaagaacattatgacgaccgacaggccactcgagctcctacacatggatctatttggcctgatagcttacataagcatcggcgggagtaagtactgtctagttattgtggatgattattcgcgcttcactcgggtattctttntgcaggagaaatctcatacccaagaaaccttatagggattcttgagacgggctcaaaatgagttcggcttaaggatcaagaaaattagaagcgacaacgggacggagttcaagaactctcanattgaagggcttcttgaggaggagggcatcaagcatgagttctcttctccctacacgccacaacanaatggtgtagtggagaggaagaatcgaactctattggacatg

SEQ ID NO: 26095 - DNA, 449 bp, Zea mays
  unsure (1)..(449): unsure at all n locations
atcctctgagncacctgcngcatgcaagcttctnctggacaagtgctgcacttaccgctgagtgcgaagctgccacgtataataacaaaggagcccctggcgttggtggagttaatgttgttaaatctatcagatattgcttcagttcttcgaaggctctttgctggcttggtccccattggaaaacttcggctgatttctacacttcgaagaatggtagatttctttctgctgatctagatataaatctattaagagatgccaacctccctgttaatctttgggcccccttttttgtagttggtggctccatccgaagtatagcttcaattttacttggattagcttcaattccctttgttgaaaccaagcatccaagaaatttccccttctttactccgaagacacatttntctggattcaactntaagccagcttgtctgaaactg

SEQ ID NO: 26096 - DNA, 517 bp, Zea mays
  unsure (1)..(517): unsure at all n locations
ctttagcgaccttagatactcagctagggcttagattctatggcaattgaagatagaattgacacacttgcacatataggaagggtatgggttcaagtatctttgatatatatcagtgactntgaagtgcagatgacaataatttcacccctcccgattcctttacgttgatgtggtaagttgtttatggcttaatgcttgatataatttatttctgaaattntgatatcgctctattaatgcggtagatatcgctggtcattngtgagaaatgaagttgtattatgcttgtgatatacaagtatgcctatgttgttttcactatgtatttcatggttgagatttattacaataatatcgttatatatgcttgactgaggatgtttctaagacgagtgtgaattgcgtgttttggggtacaaggtaagtcatcaattgaatctaagttgttgagcggttggtggatagctccaactatctttgcaagaatgaatgttatgtcgaaaaccagttctga

SEQ ID NO: 26097 - DNA, 333 bp, Zea mays
gcagacatgtcatctcttcatggcgccataacatcccttctttcggcgcagttatatgcttaggataataacagcacaagcacagcttagcgttccctgcctcaagatttgataattccgtaacaggtgatggacggctggacttcttttccggctgcaagaagtttgactgcgtgacgtggatccagcgtggtccttgggctggccaacttggtgttgtcctttgtccagggcggtcgaacatgtggaactctcttgctgcgggtcaccgtccaccccccaccctccccagtagccacttgactagattcagcattctggcgcttcaattct

SEQ ID NO: 26098 - DNA, 414 bp, Zea mays
ttctggaggccattaagacgacatatagcaccttctccaattctgttattttttctctgattaactgagaacttcggagacgaagtacactggggctttctctttagtttgtccttcaagcttctcctggacaagcgccgcactcactgcagagtgcgaagctgccacatacagcagcagaggagcccctggcgctggtggagttagcgtcgttagatctatcagatactgcttcagttcttcgaaggctttctgctgagctgatccccattgaaagacttcggctgacttcagcacttcaaagaatggtaagattctctctgctgatctggatataaatcgattcaaagatgccaatcttactgtcagccgttgagcccccttctatgtgcttgacggctccatccgaagaat

SEQ ID NO: 26099 - DNA, 478 bp, Zea mays
agcttctaaaggagaacacgtgatatgtctaaccaatgttcatttcgaataagatagaccttatgtagcgtgtcaagcaggtaaacaagtgggaggagcacatcacagcaagaatgtgatgaccacgtcaagacctctggagctgctacatatggacctcttcggacccgtcgcctatctgagcataggaggaagtaagtatggtctagttattgttgatgacttttcccgcttcacttgggtgttctttttgttggataagtctgaaacccaagggaccctcaagcgcttcctaaggagagctcataatgagttcgagctcaacgtgaagaagataaggagcgacaacgggtccgaattcaagaatcttcaagtggaggagttccttgaggaggaggggatcaagcacgagttctgcgcttcctacacacctcagcaaaatggtgtggtatagaggaagaacaggacactcatatat

SEQ ID NO: 26100 - DNA, 471 bp, Zea mays
  unsure (1)..(471): unsure at all n locations
tgctttccttatcgtcatcaaggctgacgtagaaccgttccgatttccaccctgctgtccatatgcttcggtagctgatcataggatacttcgtagttttccgataagcaaaattatagcaaccaaaattctcatgtaatccatcttttctagcctttgtctgatagtgcaattcgtgaacccggcagaagctgtccgcaaacggttccatcgcctggcttcggagtgcccagatataaacattgagcctaacgatagcgttgggggtcagctggtgaaaatagatcccaaaattctctaatatctctgcaataatcccatgaagggggaatcttaatccagcctttaggaagctcttanaaataacaatttcatctttntccggctttggggtagtctcttcttccncgaagcgtaatagcttctttcgattctcagtaaaatagcctgactntaccatcttggacaaat

SEQ ID NO: 26101 - DNA, 344 bp, Zea mays
atactccccatgccggcgagtgctcagaaagcggcggcgaggacaactctctaccccctgcccgtgtgaagactgctctatacaactgctgtagactgtagagcctggacagctcttatcaaaagttggacgcctatctctccccaaacacaacgatgatggatcggccatatacgagatacttctcgctggatcccggccgccgaatttccttaatctacatcgaagggacagaggtcgggagatatatcaacttaccagcccattgaaccgaccacggagagctgcgcagcgtggtaatgcggtggatcatgccattagtgggaggagaccccttcttctgc

SEQ ID NO: 26102 - DNA, 444 bp, Zea mays
  unsure (1)..(444): unsure at all n locations
agcttangatatgaagcccacataacatgactttcttattctgtctagtcngtaatcaaaacaacaaagaaaaacgtgatgcgatgcacatcttttcttttcttttcttttctttggaacgaaggccacgtctttctgtgtctcgaatctggaggggagcacgcacatatgaatctcctgatcactagttatctattattttggtttattatcggacacatgaggccggggtccgagaccagcaatgctgtacctactcaaagtgaaaaagaaagtgggcaacgtgtcgcattgcatgtgtggcttcttgtacaaaaatctaatgctagttctgctccttccaatagcgatagccatagctaggctaaccacggaatatatatggagtacggtcagcctcatccaccgcaccacgaggatactccatcgccgcagtatatatta

SEQ ID NO: 26103 - DNA, 407 bp, Zea mays
  unsure (1)..(407): unsure at all n locations
tatgaagattcttatcccacatgggctagtcggcggtgccagagcctacccatgttagtcttagcaattaagcaagtgtcgagttcagctctatcaaaatctactaagtatagctgacccttttacactcccttanatgctattgaatcatcatttcttctaaagacagtgacaccaacatcagtgaatagacaagtgtaacccatttgacataattgtgatacagaaagccagttggtatctagagaatcaacaagaaaaacattggaaatggaatggtcaggagatatagcaatnttacccaaacctttgaccaaaccttgatttncatccccgaatgtgatcgctctttggggatcnttggttttctcatatgaggagaacatctttntctccccaggcatgtg

SEQ ID NO: 26104 - DNA, 459 bp, Zea mays
  unsure (1)..(459): unsure at all n locations
cacctgcaggctcgcattctcctctgaagtgggccccgggaccactgtcggtaccctgaaactagggtacctctcactactgtatgaagatgcggtacccacgcggctatctttagtcgcgtggtaaaagagttgtatgtgggaccaggccatgactcgccttagcctcgggcgactactctgggctagcaacaacgcctgaccccaccacatgggcgggtccgggaccgccacctatctagagaaagtgatatactcaaaggcatcaatagtgagttcggaccctcatgggagagtgccggacccgtgtcagacctctgtatatacggtccaggcctccaagtttggcccaggacctccacgtgtgcgaaccgaacccctagaatgggatccgaacccctcgtatggggtccgggctgcccacagtgnggtcccagggttccaggacagaacatacct

SEQ ID NO: 26105 - DNA, 506 bp, Zea mays
  unsure (1)..(506): unsure at all n locations
tctgccatgaagtgatagtccctggccgaagagaagattaccacgttttggccacattcttaactgccatgacgaaggacttggccatgacagctccattgcctctgtatgaagatatagctgattcataactcattaaaaactgctttgggtctgaatgcccatcatacattggaagctaaggtggctcgtatgatgggggccacgagatagcctgcagttntgctgccaagggagaagcatcatcaaaagttaagggatcatgattaaaatcataatactatccatcgtcgttgaacaagccctcttgatgaagctccctatgttggggccttctatcttgctcgtcttgagcaaggtgacgtacttcttcagtggcttcatcaatctgcctttgaaggtcagctagtcgggccatcttctncttcttcttttgcacttgctaataaagcatctccatgtttctgatttctgggtccaactcatcctcgtagggtgttggacta

SEQ ID NO: 26106 - DNA, 393 bp, Zea mays
tacagaaacgtgatggcaatctttctaaatatttttggacaaatattatgtgagagtaacatgttcgggcttgaactccgggtgaagaacgacagagatatatggtatatagcctgagacaccatacatacatgtatataatgaataaatacatatatattacgccgtaccattattgttattctttagtttgatttgattgagtgaagctcttcagtagattcagatgcaatgaactgcggtgtggtgtactggtatgacctcgtgacattgaaaaggcggcgggcacgaggacgaccatgaccaacacagcatcgtggtgcacatgctagacaacaagcgtggcatgagtcggacgtatgtggctagaccgaggtcgtcacgggagtctct

SEQ ID NO: 26107 - DNA, 483 bp, Zea mays
  unsure (1)..(483): unsure at all n locations
ntgccanatagggcgcataactatacctttaatatcttcccgtgttttcaggtcattcttcacataaaaccattctgtcatccagtcgccgggccatctcttccgaaaggttggcacgggacagcttgacccagaccgagaaacgaaactgtagcagccaaaattattatgatactgttccttaccccagggttttgtctcgtatgataattcgtgtatgttgcagaaacttttcgcatcaggttccagaccttggcttctcacggcccacacgaagatattcagccttatgattgcttcgggggtaagttggtgaagatagacttcaaatattttcagcacctctacgacaaagttgctcaggggaaatcgtagtccagctttcaaaaagcttcggtacactacgacttcattntcttcangggtcagacaagtcttttctccttcgtcggccctcacaacagacaagtcccggaaatatct

SEQ ID NO: 26108 - DNA, 456 bp, Zea mays
  unsure (1)..(456): unsure at all n locations
taactgagatcaagaaacaacggtacgcccaactggaaaacatacgtctgagacctgatccgagtaggatcccctggtctgatgggctagacgatctacccattcgacgaaatgccgaanaaagatcaagtgatcctggagagctcaagatcaaatctctcaccgcgcgacggccgagcaaagttggtacgcacgaaagagcaataaaaaaacagccaaaacggaacagctggactgaatagcactacgcccgccacccatccaacanaatgcctggccggccggccagcactcccgatcaataaacctcgcggcacgcaagcaaggatcgcccacctggaagaacaaggcgcagctcggggagacgccatcccagacgagtcgtcacggtctggacggacggagcagaactgagctgagctgcacgcgagcacaggaagcangtgcgggtcaatg

SEQ ID NO: 26109 - DNA, 453 bp, Zea mays
agcttcgcacctctgaactaactcggctgcatcgttcttctctgtcggccaatagaatcctgacctgaaaaccttcccgactagtgttctggatgctgcatgtattccacattgcccagcatggacctcctccagaagttgctttccagtggatgggagaatgcacttcatgaggacgcctgatgcaccccttctgtataatatctccccaatgagtgtatagtgagccgactgtctggcgatgcgctctgccgagttcttgtcgtctggttcttcttcattctttatatacttaatgatcggccttctccagtcatcagagtctgactcgagttgatctatgacgttgcactcttctgtttgatcaattgagatactcggctgcagaatttcttgcacgaagaactcgggtgggacctgagttcgattggatccgagcttggatagtacatc

SEQ ID NO: 26110 - DNA, 464 bp, Zea mays
  unsure (1)..(464): unsure at all n locations
tcttagggggagcacatttaggactaacatatgttcattntgactaagacatgatttgtagtgcatgtcaagaagggaagcaagttagagctcatcatccacacaagaatatcatgactaccgagagaccgcttgagctactccatatggatctattcggctcgatcgcttacataagcatcgacgagagtaagtattgtcttgtcattgtggatgattattctcgcttcacttgggtggttcttttgcaggagaaatctcaaacccaagagaccttaaagagattcttgagacgggctcaaaatgagctcaaattgagaatcaagaagattagaagcgagaatggaaccgagattaagaactcccaaatcgaaggatttcttgaggagganggcatcaagcatgagttctcttctccctacacacctcaacanaatggtgtagtggagaggaagaatataact

SEQ ID NO: 26111 - DNA, 482 bp, Zea mays
  unsure (1)..(482): unsure at all n locations
agcttctatagggggagcacantttgggactaaccgatgttcactctgagaaagacaggatntgtagcgcatgccaagcagggaagcaagttggcactcatcatccacacaagaacataatgacgactgacaggccactggagctcctacacatggatctattcggcccgatcgcttacataagcatcggcgggagtaagtactgtctagttattgtggatgattattctcgcttcacttgggtattctttttacaggaaaaatctcaaacccaagaaactntannagggatcttgagacgggctcaaaatgagttcagcttaaggatcaagaaaataagaagcgacaacgggacggagttcaagaactctcaaattgaaagcttccttgaggaggagggcatcaagcatgaagtctctttctcctacacgccacaacanaatggtgtagtggagaggaagaatcgaactctattggaaatg

SEQ ID NO: 26112 - DNA, 469 bp, Zea mays
  unsure (1)..(469): unsure at all n locations
taggacctatgaaactcagctgagcacggttgcccatatccttctgtgagaggaagaaattgcttgacaagtcccatagctcgactttgccatcatcatgcaaggttacagacttgacacccgcgaggacaaggttttttgctgaagaaattaaatggtcataagcaaatcatgtagaaaagcagaacaaaagatataatatgcatcctcataagcaatttaaaatttaaaagctaaacatgatacacttgatggctaacatcgatacaataaaaagaattaacacactacactatggcaaacatgttttgcttttagatctgaagctcacatgttgtgccggtgactaaaagcgtgcacatcataactctaattntagaaagcaacanagccagctatcgttgtcgataaaacatgttcaatcctttggccaagtgagccaggagatctaactgaccagcaacctgat

SEQ ID NO: 26113 - DNA, 430 bp, Zea mays
  unsure (1)..(430): unsure at all n locations
tctaaattcatcatttctacttgacttctaagcatagaattctcagtttaaagttgagcaacatcagataacacatcatgattatttctttgctcaaataaaacagattcataccgttggaccaaattgtcatgagagcactttagctcctcatgttctttggtcatctcctccaagctatcattggttttgatgagagtttcctctagcctgagaagcgtctcgccttgttccttgttcctcctcaacaacttaaccaagagcactttgtcttctttgctgagatgggtgtagaaccggcgtatctcctcttcttccacatcatctgtctcactttccctgtcattattatcagtggaagcaatacaggaaaatgtaccttgtggtgatgaagcctcatccttgctatcatcctcatattcctnctcat

SEQ ID NO: 26114 - DNA, 318 bp, Zea mays
gatgggcacgtcgctcacgagcctcaacagacagatgcctatgcttgctggcgaagctattgctgatcacgttcccactcactagactctgcacttgcgcatacttaatgattcccactatctgcatctagatgctccaggatcttgcgcatgaggtctgcgatatgataagtacgcatgacttctaacaagattgaggtgctgcttcgcaggatatgtcgtgacctgagctcatgcatcacattcgatgattggacatgacgcatatgtgataccctgaactgtaggaggagtgcgactcgcctatcttctatgacc

SEQ ID NO: 26115 - DNA, 450 bp, Zea mays
  unsure (1)..(450): unsure at all n locations
agctgctgcagaaactntggttcanaagcacctataacaggcactacacagctccaaaactgcactaaaaatactgatttcagattttcagttctgaatagactaagtcaccaaccacctgacagtcaaactttgagcagctgttacaccactttttatgtgggatcatgtccattatcctttaataaagttgttcaccattaggtggtatttagttcatttataaaaacctcagtccaaaaccttatagaacaaccacaaaagggctccaaacttggcaccatacaacaaatttcagatttcagaactgaaccaaatgcagttaaagcactgtctgtcagtccaaccttgagcaagctttctctccaacttttgtgtaggatcaaaccanagtcacttaaggagaacttatcaccatcatatggtattaatacctctatatattctaca

SEQ ID NO: 26116 - DNA, 353 bp, Zea mays
ttcgcttcagtctatcatccgcagtccaacggggtcgtggagcgtgccaatgggaaaatcttcacagctgtcaagaagatgctcctcgatgaaaaaaaggcagatggaccgatttattaccggaggcagtctgggcgctaaacacaactgagtgcagggcgaccgggttcactcctttccgccttctatacggatcggaggcgatgaccccgcaagaaataaagcatgggtccccgcgtacagttccgtcagccgttcccgacgtggacgagccaacttcaaatgatctcattgacggagaccgggtcttcgtcctacaggccctaaacaaataccaagcccagaccaaagca

SEQ ID NO: 26117 - DNA, 421 bp, Zea mays
  unsure (1)..(421): unsure at all n locations
gcaagcttgtgaaggttcttcatcctcacatgtgctaagcggcgatgccacagccagcccatgctagtcttagcaattaagcatgcatctagaccggcctcctcttttgcaaaatcaactaaataaagtttgccgtctaatacacccttaaaagctagtgaaccatcacttcttctaaagacagacacatctacatttgtaaaaagacaattatatcccatattgcataattgactaacagataacaaattatatccaagagactcaactaanaacacattagagatagagtgctcattagatattgcaattntacctaacccttttaccttgccttgattcccatcaccgaatattattgaatcttgggaatccttattcttgacgtaggaggtgaacatncttcttctccncgtcatat

SEQ ID NO: 26118 - DNA, 495 bp, Zea mays
  unsure (1)..(495): unsure at all n locations
tgtcagcaatataagcacanaagcctatgctcttgtgtgaagatatagcagaccaaagggtattgctgggatctcagttatctgatgaacaaganaagactatgctaagattcttgttcaacaaataagatgtcttcgcttggacagctaatgatatctgtggtgttaacagagatgtcatcgagcattcactcaacgtggatccatctttcaggccaaggaagcaaagacttcggaaaatgtctgaggataaagccgaaggtgctcggaatgaagtaaagagacttctcagtgctggtgttattagagaagtaacatatctagagtggctagccaacactgttatggtgaagaaggccaataggaaatggagaatgtatattgatttcacagatctcaacaaggcatgcctgaaggacgagttccctttactaagaatagacctccttgtagatgcagcagcttcttcgtaactatgagttataggactgtctc

SEQ ID NO: 26119 - DNA, 434 bp, Zea mays
  unsure (1)..(434): unsure at all n locations
tgatatgcaagtacacctaatcatacatctcgtggatcagataanaatattagggccactatatttacatcatatgtttcagttggagcgatacctgtgagtattaaaaggttatgtgcgaaatcgtgctcacccagagggttcaatcatggagggatacactacagaagaagtgattgagagctgtatagattacatcagtgacggaacaatgataggtgtgcctgtacctaaacatgagggtaaactatgtgggagagggagaatgggcaagaaaacttttcgcgttgaggattacaagctagtacattgtgctcatggtagtgtactacaacatctcacgatagccgagccttacatagaggaacacctgaatgagcttcgtanagaaaatcagaaccgcacagaggactggatcatgatggagcacaaac

SEQ ID NO: 26120 - DNA, 260 bp, Zea mays
ctacagataatcagctgcatacagcttcacattaagtatcactgtccattctcataatgctacagctcttaatatgaataaaaaatactgagtgaaccacattatttaatacatgtacaaatactatgatagatgatacaatgctgtagttcgagagaacttcttcctaaattgtccacagataaatgctaaagctcataactgaccatatcactgtctgcctatatatgtgctacacgacccacgtgaggactcatctc

SEQ ID NO: 26121 - DNA, 481 bp, Zea mays
gcttcgcacctccgaactaactcggctgcatcatctttctgtgttggtcaatagaatcccgacctgaagactttcccgactagtgtcttggacgctgcgtgtattccacattgaccagcatggacctcgtctagaagtcgcttcccagtagatgagagaatgcactttatgaagatgcctgatgcgccccttctgtatagtgtctccccaatgagtgtgtagtgagctgactgtctagcgatgcgctcagctgcatttttatcgtccggttcctcttcattctttatatatctgataatcggacttctccaatcatcagagcctgactctgggtgaatcacgagattacactcttctgcttgatccattgagatgcttggctgtggtatatcttgtacaaagactcctggtgggacttgagttctactggagtccagcttgggacatacatccgctgccgcgtttcgatctctttctacat

SEQ ID NO: 26122 - DNA, 408 bp, Zea mays
  unsure (1)..(408): unsure at all n locations
cttagagactcagcttggtaagggctcgcccgattgatggactcgggtgagtcgctgccatcactctttgatcgggtgatggtgttcgtcatcacaataagagctcttgggagtgaagaatggagtgattccaatgtcacacgaatattcatgagagcctataaacaaaaggataagagtcttgccaggatgattanggatcgcgatgactatgaggatatgacgcctcatccattatttgcaaagattcgacaacacgagtccgaagaagcccctatcaagtcaagggactctcatgccttgatcactaatgaacaagacaaccccaagaagaacaaagaccacaaagcanagaaagtggtcgagacctcaagtgatgaagacacagctatgttcatcaaaacattc

SEQ ID NO: 26123 - DNA, 419 bp, Zea mays
  unsure (1)..(419): unsure at all n locations
agcttaatgcccctcctaaaagattgtctaactctattaatggctatgctcccatgggtcaagataacgagggttacattntataccctatcggttatcccgaacacaaaattaggagaattcattctaggaagtctcactctggctctcatcatgcttttatgtataagagtgaggcatctagttctaggcaatccactcgtgctaaattgcctaaaaaggaaactcctgttgcatcaaatgaacccaatatttcatttaagactttcgatgcatcttatgtactcactaacaaatcagggaaagtagttgccaaatatgttgggggcaaacacaaggggtcaaagacttgtgtttgggtacccaaggtgcttgtttctaatgtcaaaggacccaagaaccgttgggtacctaagaac

SEQ ID NO: 26124 - DNA, 505 bp, Zea mays
  unsure (1)..(505): unsure at all n locations
tcagcttcggcgacagtttcngcgacataacttaagcatcatcttcaccttcgtcatcctacataaatcaaggaatcgtgagtaaaaatcaagtgcaaagaaaaaggtaagtacgaagtattatctcttactggttcaagatgacttcgtgcttcatctccagccttctcccgcccgccttttgtccatatcatttttataaatctattggagatacttcgggcaaggtcaggcatatcatccaggattgatggagataaggtgaagttgggcctgttgacaacttttccatgttcgcagccggccttcagatatgcagcagccgtaccccgagaagccacccaggcacagaagtcgccgtgcccggctataacttcgtcaagctcttcgatttcagcttcaatatgatcgaaggcctgnggtaaattttccgccgaagggttaannattccactgcttggtccaacagagtaaaatatcttctttaatcgtccaatacaattat

SEQ ID NO: 26125 - DNA, 391 bp, Zea mays
agcttgtccggaactgttggtggaatggaactgtttggaatacatggtacaccggaaaaacaaacccagccacacacacatgtggtgagaacagcgcaatgaaagacgaaagccatcgatcgatcgagtcaaacccaaaactttatgcattaaattattacgagtactataatatggttgctttcctacgcacttttctgccacggcatgggcacaggacacgcattaattatgcgttatcattattgagtgcagcgcaatgtggcacgcacaactggccatgctatgctggctccatcttcgtaggctctctccaagctcttgagatgttagtgttgagaaaccctactgaagggttatataggcaagtaccgaatatagtcctgagggc

SEQ ID NO: 26126 - DNA, 500 bp, Zea mays
  unsure (1)..(500): unsure at all n locations
tctcctatagagactcacttgaccgccgctcaaaggattctagagatatttgaagtgtactcccaatattggtctatggtatcccaaaggtgctcaatttgaattaattggatattcggattcggactatgcggngtgcaaagttgatagaaaaagcacctccggttgttgtcaatttcttggtagatctcttgtttcatggtcttctaagaaacaaaattcggttgctctatctaccgccgaggcggaatatatatcggccggaaattgttgtgctcaactattatggatgaaacaaaccttattggactatggaattattntcaagaatgtgcctctcatgtgtgataatgagagtgcggtgaaattggctaccaatccggtccaacattcaagaaccaagcatattgatatacggcatcacttcttaagagatcatgtnggcaaaggagatatctctatttattccattggcaccgatgatcaattagcagacattt

SEQ ID NO: 26127 - DNA, 469 bp, Zea mays
  unsure (1)..(469): unsure at all n locations
agcttgtgaagattcttcatcccaacatgggctattcggcggtgccagagccaacccatgttagtcttagcaattaagcatgtgtcgagttcagctctatcaaaatctactaagtatagctgaccctctaacacacccttaaatgctattgaatcatcacttcttctgaagacagtgacacctacatcagtgaaaagacagttgtagcccattttgcataattgagatacagaaagcaaattgtaatctaaagagtctacaagaaaaacattagatatggaatggtcaggtgaaatagcaattttacccaaacctttgaccaaaccttgatttccatccccgaatgtgatagctcgttggggatcttggtttttctcgtaggaggagaacatcctnttctcccctgtcatatggtttgtgcacccgctgtcgagtatccaacttgagcccccggatgcataaacctaca

SEQ ID NO: 26128 - DNA, 494 bp, Zea mays
  unsure (1)..(494): unsure at all n locations
ggagctgctgccatgcaaccagaatgcggaggataatatctacgtgatcatccatggaagtgtgagagggagaaccaactctgacaccctcgagggctgtgtcatagctcgcgctgcccatccgagccggatcatccccggcgacaccctcggnggctgggtaagcgctagcgccatccttgagggccgagctctctgtaacggtcacctctaaagctgaaggaccttcacgcacttccatgggagcagaacaatccagaccagctctctgacccttaagaccgcgctctaaggtcgatgaggcacgagacgctgcttgagataactccaatccggcatcaggcacatcagcgcaaacgtccatcattccaccatctgccggctctgacaatagatcttctgtgaccatgtcttcaagagtctgatcaaagtttgccagagacaattctcgtagaccaatgacggcagacacagctggagaaggtacaccacta

SEQ ID NO: 26129 - DNA, 404 bp, Zea mays
  unsure (1)..(404): unsure at all n locations
aaagtcataaaatgaccacaaatataaagttgaatcacatttataccccggggataccagaaaccctaattggaaccctggaaaaaccctaaaactaaaccctatgggcttatgtgcaaaagtggtgaacctttggactaaagtgtaaaaactactatgtttaaacatataaagtcatttggttcacaaatatgtgaatttgcaagttaaaccctaagttgtgggcttatttgcaaaaatcaccttttaagcactatagagcctaagtctgaaattcagttgtgttggttcaactntggagccctgtatcttttaaaatataagggatttgcccaaagtgaccacaagtttgtagaccaattaatggagaacaactntgcttaagggtgaagctcacttgttga

SEQ ID NO: 26130 - DNA, 471 bp, Zea mays
  unsure (1)..(471): unsure at all n locations
ngagtcaatcattntgcanagaataatagatgctcaatttgattttctgggtatgaagcacatacgagagaagataagggctggagtagcccaatgtttcaaggaagacgatcaaggtgtgatatggtttaaaaaccgcatagtagtgccaaagaatgaagagctccgccagcaaattcatgatgaagcacatcttagtcgttattctattcatcccggaagcactaagatgtatcaagacttaaagcaacattattggtggacgaagatgataatcgaaattgcacgctatgtggctaagtgtgacacttgcagacgtgtcaaggccatacacatganaactgctggtccattacaatctttgccaatcccaacatggaaatgggaagacatcagtatggactttattgtgggactgcccaggacgataaaagggtatgactctatttgtgttataattgatcggcttac

SEQ ID NO: 26131 - DNA, 398 bp, Zea mays
tgcaagcttgatgtttagaatgacatcagcctctcccttatctttcatctcaaaattgctcgatagaagatttttaactctctcaatcacattgagatttgatccaaagatcaaaatgtcatcaacataaaggcacagcataacagactcacccccaccataccgatagtatacacacgtgtcagattcatttacaacaaagctagatgttgtaagagtattatcaaacttttcatgccattgcttaggtgcttgttttaggtcatacaatgattttatcaacctgcacaccttgttctcttgaccatccgcaatgaacccttctggctgatccatataaatctcctcatccaactctccatttaggaaagctgtcttaacatccatctgatgaatga

SEQ ID NO: 26132 - DNA, 391 bp, Zea mays
  unsure (1)..(391): unsure at all n locations
tactacagaccttcttctttttctccatagtaggaaccttactggaatactaccccacttaanaagaatgagggtagaactcttaaatcttgnggatttgaactccctgagtatctctaacaagggtgttacagggccttcttctgctgttgctgcctgaacacgctacggatagatgactgacactgtgttgaatctgggagaaccttcttcttatcttctcttcgctatcttcttttctcttctcactgcctctttctttctctttgctctctccactggaggaatctattaaagagtattactatcatacactggaggaaaccgaagactatgaaccatgtaccacagtcttcaaccctagaatcaccaagcattgtgatcttacggg

SEQ ID NO: 26133 - DNA, 294 bp, Zea mays
  unsure (1)..(294): unsure at all n locations
aaggtaccacggatagctgactctcctacactcccttaaatgctattgaatcatcacttcttttaaagacagtgacacctacatcaagaaatagacaggtgtagcccatttgacataattgggatacggaaagcaaatttgtatctaaggaatctacaagaacaacatcttgaatattatggtccggtgatatatcaattttacccaattctttgaccaaaccntgattntcatccccgaatgtgatagctcgttggggatctctggttttctcatatgaggagaacatccttt

SEQ ID NO: 26134 - DNA, 417 bp, Zea mays
  unsure (1)..(417): unsure at all n locations
aagaaatttctagaatcaagaatattgagctcatgcctaagtctggtaaaagattgttcatcaagtggcttggtaaagatatcggctaattgatctttagtattaatgtaagaaatctcgatatcccccttttgttggtgatccctaagaaaatgataccgaatggctatgtgcttagtgcggctatgctcgacgggattgtcggccatcttaattgcactctcattatcacatagcaaagggactntggttaatttgtaaccgtagtcccgcagggtttgcctcatccaaagcaattgcgcgcaacaatgtcctgcggcaatgtactcggcttcggcggtggaaagagcgaccgaattttgcttctttgaagcccaagacaccaaggatcttcccaagaactggcaagtccccgat

SEQ ID NO: 26135 - DNA, 436 bp, Zea mays
  unsure (1)..(436): unsure at all n locations
ctcaagcttagccgggcctacgacaggcgccgttcccgacccggttcctagccccgactaccatcaccaagtactcggtggaaacaaggccggaattgtggcttgcggactaccggctggcctgccagctaggtggaacggatgatgacaacctcatcatccgcaacctccccctgttcctctccgatgccgcccgagcctagctggagcatcttcctcctgcgtagatctccaactgggacgatctggtcaaagccttcgttggaaacttccagggcacatacgtgcgccctgngaactcctgngatctccgaagctgccgccagcagccaggggaatccttgtgggactacattcggcgattntcgaagcagcgcaccgagctgcccaacatcaccgactcggatgtcatcggcacgttcctcgccggcaccac

SEQ ID NO: 26136 - DNA, 405 bp, Zea mays
agcttctacttgtcatcattaaccttgacatagaaccactccgacttccagcctgctgcccatttgcttcagtaactgattacaagatatattgtggttttccgataggcgaaattatagcaaccaaaaatgtcatgcaatccatcctttctagccttcgtctgataatgcagctcgtgaacctggcaaaagctgtccgcaaatggctccactgcttggctatgaagtgcccagatatagacactaagcctaacgatagcgttaagggtcagctggtgaaaatagataccgaacctcttcagtacgtctgcaataatcccatgtatggggaatcttaatccagcctttataaagctcttacatatgacgaattcatccttctccgggcttggagtagtctcttct

SEQ ID NO: 26137 - DNA, 385 bp, Zea mays
ctgcgcatagacaggatattcgaagcccagtgcatcaagcactccgatcaaccttcgcctcggaatggtgccgaatgctgactgcattaaatgaactttctttttcgaataatgtccaagaatttcattacacatcacctcaactgtgtgcagccactcttggcaaggcttcttaaaatattacttgaatttgaagtggtaaagaagtccgacaagatccccttccttcttctccccctttaactttggcatttcccattctttcagagtatggaagaacttgaatgctaagaattcttgaaccagatccctcgtaccaatatgctctgcagtgattttgaatcatccattgtccgttgagtttgaccctctggtgtcatgttgc

SEQ ID NO: 26138 - DNA, 476 bp, Zea mays
  unsure (1)..(476): unsure at all n locations
tggacaagtgctgcacttaccgctgagtgcgaagctgccacatataataacaaaggagcccctggcgttggtggagttaatgttgttaaatctatcaaatattgcttcagttcctcgaaggctttttgttgacttggtccccattgaaagacttcggctgatttcaacacttcgaagaatggtaaatttctttctgctgatctggatatgaatctattgagagatngccagcctcctgtcaatctttgggcccccttntttgtagttggtggctccattcgaagtatagtttcaattttacttggattagcttcaattccctttgttgaaaccaaacatccaagaaatttccccttctttactccgaagacacattnttctggattcaactntagaccagcttgtctaaaactggcgaaggtctcctgcaaatcanncatgtgattntcctggtttgtgccttttacaatgatatc

SEQ ID NO: 26139 - DNA, 483 bp, Zea mays
  unsure (1)..(483): unsure at all n locations
ntgcgggccattntccaatccttccagtagcttctctattcctcatgatatccttcaggggatgtgatgaaggaacaattatgtgatatgcttgaaaataatgccgaagcttcctggacgcgattaacacaacatacaacaccttctccaattctgtatagtttttctttgataaactcaaaacttcggagacaaagtatactgggacttgctttttagattgtccttcaagcttctcttatacaagcgccgcactcactgtagagtgcgaagatgccacatacaatagcaatggagcccctagcacgggtggagttaatgttgttaaatcaatcaggtattgcttcagctcttcgaaagctntctgttgagttgggccccattgaataacttcagctgactctagtacttcaaagaatggtaaatttctttctgctgatctagatataaatcgattcatagatgccagaattcctgtcagtc

SEQ ID NO: 26140 - DNA, 427 bp, Zea mays
  unsure (1)..(427): unsure at all n locations
ctggacccactccatcatgtttcagtcagcagagtcagagctcctttcatgccccctcgattgcaagcaaccaactgccagtaaatgcctattggcactgcaaagaccccagtcacttcaaaaacaactgcccccaattgaaggcatcaagacctgcttactccaactcggtgaatggccccaagaatacctcaacactctcccccaaggcgccctcctccatcagccagcagaacaagacccagtatcaaggaagggcacgagtaaatcatgtcgatgctcaggaggctcagcaagctccgggagtagtgctgggtgagttccttgttgaatntactccctctactgtactttttgattcaggaccatcccattcttntatagccactatgtttgtggaaaagcatggcatcccctctacccctct

SEQ ID NO: 26141 - DNA, 462 bp, Zea mays
  unsure (1)..(462): unsure at all n locations
tgcaatgtccataccatctctgtaatggaccacatgtgttctttggaaacaattcaaagaacttaaccaattcagattagaattgaagataaaaggaacttaaaatctcattctcgatgatactcgtcaagtatttatcttatgggaaaaacattgtaacacctctggtgttactggcactaaaacttgagcataacatcatgtgcattgacatatcatgtgttngttacacctagaatgcattcactangtaaaattttcaaacaagttgtgatgatgggacttgaagagtgcttaaccttatggtcggatacttaaccctggaattagggcctatggatgaaagtgaagccaaaataagtaaaaatctcaaaagccattaggaatgttcacaagatatcaaagttgatgaactntagtggcacanaaaccctaaagtactaanaccctaaaagaaaccct

SEQ ID NO: 26142 - DNA, 481 bp, Zea mays
  unsure (1)..(481): unsure at all n locations
agcttgtcagaaccacgctcatatcttctatggagatcgagtatgtcaataagatggatttatatattattttttctacagcttatcaaatcctattaactataccggtcataatatcatcaacagaaaggagcttttagaatttaaaaatattaaagaactatttgatgtctacactgtctcaagaaagatcgaatggtttgaccatcttatatattgagaaaaactattagataagattaatatcaacacaatcattgatgactntgcctcaagaattgtagaagaaattttgaggcattgtaatttttgatataatattttaatatcatattaatgttatcgatataatataagactatatatatgtatactaaaaaatattatatatatactgnggttccaatttttaatgttgcctggaccaccgaaatctcagctccagccctangtgtacatggttgtgtgtgcttcatgaaag

SEQ ID NO: 26143 - DNA, 416 bp, Zea mays
  unsure (1)..(416): unsure at all n locations
gattcagtttcatggcctttccttttggaggtcttacaacatcttggctgtggtgctcggtggtgtgatatgttggcaaagttgctacgctcttcttctactagagctntggttaacggtgaaccaggagagttgatttatcatcaaagggggctccgtcagggagaccctttatctcctatgctctttgtgtgtgtcatggacgttctaaattcaataatcttgaaggctgagagctatggtttgttacagccgctgcttcgtcggngaattggacagagaatttccttatacgccgatgatgtggttctgtttttgcatccggtgaggtgtgacttggagacagtcaaacaagttttgaaagtgttcggtgaagcctcangacttcgttactaattagcanagaagctcgttac

SEQ ID NO: 26144 - DNA, 457 bp, Zea mays
  unsure (1)..(457): unsure at all n locations
agcttatcaatcaatcaaaacaatntgatcaggagaagctataactgaattcgaagcttaaagccgaagtccagaccagctcagaattgaagaaagcattaataagccttcaagacaaatgcttgaactttggcaataattgtattggacgattaaagaagatattttactctgttggagccagcagtgggaaatttaacccttcggcggaaaatttaccccaggccttcgatcatattgaagctgaaatcgaagagcttgacgaagttatagccgggcatggcgacttctgtgcctgggtagcttctcggggtacggctgctgcatttctgaaggccggctgcgaacatggaaaagttgtcaacaggcccaacttcaccttatctccatcaatcctggatgatatgcctgacctcgcccgaagtatctncaatagatntataanaatgatatggac

SEQ ID NO: 26145 - DNA, 463 bp, Zea mays
  unsure (1)..(463): unsure at all n locations
ttggggtgctagagagagtcaattcattctttaactcaagctatcattcttcaacgatctatatccaagaatgacccanagttattttgaattggtatatctaaaactcatatcatctcggggaagatattgatgttgtacgaaataaaaaattaatcctatgccgaaaagtcaaggcctacaacatggaggaaagccaaaggatggtaacaattatgcctttaagtgcacatatcttaaattatcatttcttatgtgtcttgagtagtcacatagaaaaaggaagcacttcanatgtttttaaattatgtcaccattctttgaagaaattcctctcatatggtagattngatattcatcattgctataccatggcaatctacatgctctaaattggtgtaagtatctcatgggatgctctacactaatcatcctattattggcttgttctagttatagagag

SEQ ID NO: 26146 - DNA, 375 bp, Zea mays
  unsure (1)..(375): unsure at all n locations
cgacccgngatccttacagtcacctgcngcatgcaagcttcggcatttcaacgactttctatttgatggttgacgagaagaacattgtcgacccaacgctgtccggattttacgaagctatggaaaggaccaatgcacagaagaatgcacatgagacgttatctgggatatctgagtgttccagtgataatgaaggctntgatgtacaaagcgagaatgaaggcgccgaagatcggtcctggagaccaagccatgttgtttttgggaaatcaaccatcaagcaagggcaaattgatgcaacgaagggaaggtacttccatgatatttcaatcgtgagggctggaggggaaaataatgtccctctgcccgaagctg

SEQ ID NO: 26147 - DNA, 398 bp, Zea mays
  unsure (1)..(398): unsure at all n locations
cgcgaaggttctttatccctacatgtgctaagcggcgatgcctcagccagcccatgctagtcttagcaattaagcatgcatctagaccggcctcctcttttgcaaaatcaactaaatagagtttgccgtctaatacacccttaaaagctaatgaaccatcacttcttctaaagacagacacatctacatttgtgaatagactattatatcccatattacataattgacttacggatagcanattatatccaagcgactcaactaagaatacattagaaatagagtgctcatttgagattgcaatcttgcctaagcctttaacattgccttggttcccatcaccgaatatgattgaatcttggggatcctcgttcttgacgtaggaagagaacatcctc

SEQ ID NO: 26148 - DNA, 423 bp, Zea mays
  unsure (1)..(423): unsure at all n locations
gcttgaagccatggtaagtagcataggccaataatatacgaatngactcaagcctagctacgggtgcataggtttcaccgaaatccaaacctttgacttgggagtatcctttggccacaagtcgagctttgttccttgtcaccgcaccatgctcgtcttgcttgttgcggaacacccacttggtccctacaacattttgattaggacgtggaaccaaatgccatacctcgttcctagtgaagatgttgagctcctcttgcattgccaccacccaatccgaatcttgaagtgcttcctctaccctgtgtggctcaatagaggaaacaaaagagtaatgctcacaaaaatgtgcaacacgagatctagtagttacccncttatgaatgtcgccgaggatggtgtcgacggggtgatctcattgga

SEQ ID NO: 26149 - DNA, 426 bp, Zea mays
  unsure (1)..(426): unsure at all n locations
gacactatgagactcagcgtcctgggacagcctgcggtccaactgcgttgaacaaggtcatcatgcagaagggagccaatatgatccgcatcatagggacttcagagaacagtccgaagctcgcacggtcaacagcactgtgccagaatcaaagcacatctattgacaaatatcctaccttgatagtaatctttttcattcagttttatttattgtgtaataaaagacattgtttagaaagacattggttagatgtcatgaaaatagttcccacaaggagaatatattatcttcacaggcttcagttgttgaagtttaaggattngtcataacagagaggaccttcgaattatcggagaaattcttcgaagcaacaaaaagtcgttccaaggaacgcagagtaatgttgacgaagtcacaaaaagt

SEQ ID NO: 26150 - DNA, 451 bp, Zea mays
  unsure (1)..(451): unsure at all n locations
cagctgcaggagctggttagagagagtntctatatcttatcttctattntaaattntatttattaaacagtatcattctattgtagtcactcgtagttttctagaaaggataatagaaaataaggcaacacaactaagtatatttcaagtttcttctattttttttaagtaaaagttactgtaggaaggcctacagtattttttgcttaaggaaaccagagtggggatgaagatacatgagggtgagtacagaaaaaaattaaagttacagaacagaataaagaagctaggttctaattntatctcctattactggcttaactcgatgactaagaaggttcatttcagatttgaacatagcacggcaaccttccaccgtgggcggaatctcattgaacacccaattatttctacatttccagatgccccaggtcaataagaattatagttc

SEQ ID NO: 26151 - DNA, 463 bp, Zea mays
  unsure (1)..(463): unsure at all n locations
ntgtattctcacaatgaanaagatttagaatgcttacaactacaccattgattggtgtgaagaccttattgtccaagtaggtgttggtgttcttgatgttcttcctttntcatttgagtgccctccctttgtagttgtctctttttccttccaaacttattgaaaatacttgagagagatgtcaatagcgcaagggagtgtatgatgaaagatgattgctttagatgattagcatacataattcatcatccacaagtcacacagacatgaagtaaaatccttaacattagtgcatttcatttgagaaatatgagagagcaccttttaagctttntaataatcattggagattntactttatcatattgaatntagttaatcattacttggaagtaaaacaatatgataacatatatatagatatcgcanaggcattaaatagattctaatggacatgagcatt

SEQ ID NO: 26152 - DNA, 457 bp, Zea mays
  unsure (1)..(457): unsure at all n locations
agcttctaaagggagagcacattttaggattaactaatgttcattttgagaaagacaggatttgtagcgcatgccaagctgggaagcaagttggtgttcatcatccacacaagaacatcatgacgactgacaggccactggagctcctacacatggatttattcggcccgatcgcttacataagcatcggcgggagtaagtactgtctagttattgtggatgattgttctcgcttctcttgggtattctttttgcaggaaaaatctcacacccaagagaccttatagggactcttgagacgggctcaaaatgagttcgccttaaggatcaagaaaataagaagcgacaacgggacggagttcaagaattcacaaattgaatgcttccttgaggaggagggcatcaagcatgagttctcttctccctacaccccacaacanaatggtgtagtggagat

SEQ ID NO: 26153 - DNA, 400 bp, Zea mays
  unsure (1)..(400): unsure at all n locations
taataatacatcctttattcgattatacaacagcaacttaagcgtcgtgttacccaatgtgtacatcttttctcgttgcgagtgtaaccacatcacggcatacacccgcacacctcaaacaattatctcacgccaccactactatatcacaccacggcacacacacctacgtgcactaattaaatcctcgcatcccatgtatttccgatttactcatcacgttaaacaacacaacacgtttgcttacctaaatcttaaggcaaccttgctacggcatataacccaaaacattttatacccacacacattccaataccaatgtacaccacatcaaccagnatataattatacaaactactaatcgtacacatcanacaatacatcgcatatattcctatcg

SEQ ID NO: 26154 - DNA, 438 bp, Zea mays
  unsure (1)..(438): unsure at all n locations
acatcactgattacaatgtcaaacttggttctcctctcccggagaatttggatagcaacactggctaaaccgcatgtggtgactgtaggtaaaacaattattntaatataagacatgatatatcgaccataaatatagatgcaccatgcatgcttataaaacataattttcagctgatagtagtgattatgtgctgtccagaccgctgttaggaggatgttcatttaaattttaagcatgtacataacctcttccctatcttaattgaaaggcagagctcctgccaattnttttaanaaaaagagtttatcaaggaacagaccattcagttgtgataaaattgctaacatgtcagccaaatggactaacaattcttgccagatgaaaataaagatgttccaaagacaataatatgctcgcttggtactcactgaaact

SEQ ID NO: 26155 - DNA, 501 bp, Zea mays
  unsure (1)..(501): unsure at all n locations
ggcttactnggtaagatgaccaaagcgctcttcacgggtttaccggagaggacgttagatttattggaactcatacatactgatgtgtgcggaccaatgagtacgacagctaggggaggattccaatacttcataatcttcactgatgattctagtagatatgggtatgtctacttaatgaaacacaagtctgaatccttagaaaagttcaaagagtttcagaatgaagtagaaaatcagcgtggcaagaaaattaaagcactgcgatcagatcgtggtggtgaatatttgagtcatgagtttagcaatcatctaaagagttgtggaattgttccacagcttacgccgcctggaacgcctcagaggaatggcgtgtctgagcgacgtaatcggactntattggatatggttcgatcaatgatgagccagtcggacctacctctgtcgtttcgggatacgctctagaaacagcagctttcacactatatagggtaccggcta

SEQ ID NO: 26156 - DNA, 432 bp, Zea mays
  unsure (1)..(432): unsure at all n locations
agctttcatccttcttcttcacgaacagtgctggacatccncaaggcgaagtacttgggcgaataaatcccttatccagcaactcctgcaattgcttcttcaattctgccaactcagcgggtggcattcggtagggcctcttggaaattggtgccgttcccggttgcaactcgatggcaaattcaatatcccggtctggtggcattcctagcaattcatcaggaaagacatctgcatactcacataccactgggatctttttcagaggtaactccgtcatagagaaagcacatgacatagtagaaccttgactgggcaaaattaaggtgaagttcccacagaacgtagaattaatttccacggtacagctggctacatcaagcacaacttggtgcaaggtcatccaattagcttccagaataatgtccacat

SEQ ID NO: 26157 - DNA, 247 bp, Zea mays
  unsure (1)..(247): unsure at all n locations
ctttgccgggaatntccagagcacatacgtgcgccctgtgaattcctgggaccttcgaagctgccgatagcagccgggagagtctctccgagactacatccggcgattctcgaagcagcgcaccgagctgcccaacatcaccgactcggatgtcatcggcgcgttcctcgccggcaccacttgccgcgacctggtgagcaagctgggtcgcaagacccccaccagggcgagcgagctgatggacatc

SEQ ID NO: 26158 - DNA, 419 bp, Zea mays
agcattggcattactatctaagcatatcattattatatgcctttatcgcaacccctataagacataatgatgaatatacaagctactggaaggatcggtaaatgggccaaggtacttaacgaatacaccatagattttgtacacagatcctcaattcaatctcaggcgttagcatactccattgatgaatagacgccacgggctatgggtgatgaaacgtccattgatgtccgagcatgaacggtattttgcgatagatctttaggaacctttggcgccataacaactgctttcctactctcaccctctatattcataacattgtatgcaatagagttagcactcagcatgttcaaatacatagtcgagtataatgctcttcttatggggctttggaagcttaaggcaattggaatatg

SEQ ID NO: 26159 - DNA, 401 bp, Zea mays
tcttgtcttttgcgtatggacgtctcacggttcttgctatggacagggagttgtagcgtcaccaaggtgccagtgtcagaatgcctggtcccgaggtcaaactgcgccaaaaccgagtcaaatgaatatggtttgagttcaaacttttccaggacgtgttcaaaggaatttggcacaactttgatatttggatctcctggctctgagttttgaaaaacagagaacacagatgatctttgggaagaggtctgaaattcagaaattcagaaatatgaatttctccaagggtccatagttcaagggctgattttgggatttatttgagttatttttgctaagctttctcaatctttcttggtgcttattaaatatactctaattgttataattggctcaagtca

SEQ ID NO: 26160 - DNA, 448 bp, Zea mays
  unsure (1)..(448): unsure at all n locations
ttcagtcacctgttagctgcaacgctagctactgcgcgctgggcgaccggagttccntcgtctttaatctcggcgacggcggcaaggcgacgatgactgctgccactgtcgcattggggacggcagaccggttagcggncaggtagcggtcctacaccgagccgcatctgttcaacaggagatggaagaatgctctggcagaagactggtgctggaccgacccttacccgaacccggcgacgaccaccggctgaccgttggacggagcgaggcaccgcagggaagtacagtagttggtatctgtcagattgaccttgcctataagatggtagtagatcatactctcgcattaatttacaggttcacaaagagctatacatatgaggcctagatgtgatcgacagtgataaggcctangggagaagactgctgcatatatggtgaacgc

SEQ ID NO: 26161 - DNA, 335 bp, Zea mays
tacttaacgcctctcctataagattgtctatttatgttaaggtcatagctcccatgcctcacgataatgagggttacatttaataccctgccggttatccctgaacactaaattagaagaattcactctaggaagtctcactctggctctcatcatgcttttatgtataagagtgaagcatctagttctaggcaatcaacacatgatgcataaaatgaacctaatattcatttaaaacttttgacgcatcttatgtgcttactaacaaatcaagcaaagtatctgccaaatatagttggggcaaactaaaagggttaaagacttgtgtttgggta

SEQ ID NO: 26162 - DNA, 486 bp, Zea mays
  unsure (1)..(486): unsure at all n locations
atcctctcagtcacctgcggcatgcacnagctttgataatttgttntcctcccattagtgagagcttctagtggatccacaattatttggcgaggagacaaattcaatggagaattataatttcagaatgattatattcagtgtgtcaaatttacttccaacctcaatggagtggcttggattctgggcaatgtgtatgccctagactctcacttggccaaacttcagtttattcaataactctcctcttttcatatgaaggataattttggttaccttttagttggtgattgtaatctcatcataaatctttcagacagaaatagactatgtgaaaatttgcagaaattctatagtcaataatgcaattngtgatcttggtttggaagaattacctttctntggctctaagttcacctagtccaataattagtatccccctactcgagcgcttggattgggtgtttgcctccacctcttggatca

SEQ ID NO: 26163 - DNA, 456 bp, Zea mays
  unsure (1)..(456): unsure at all n locations
tagcagcacaagccagcttgaggtcatgtttggttctatcctaatccatatgaattgagagagattaaggaggtttcaatctctaataaattaaaatctatgtcaattcatatcaataccatgcaatccatatgaatttaaaataatggaacaagccatgctatggcaagtgggcctgacggacactaacatcgagggcaaggatgaggcccggtcacgagcttgtgataagatggaggcgtggcttcatggaatcatgatggaagaagaaaagaggaaaaacaaagaagataagaaaatagaaaaataaaaaatcagaataatgctggaccctacgtgttaatggcttatcctagtttaatgtctcaaaaattaaaatataatataagcattcgatgtcattccatatcttcttgttntcgtctgaactatctcatccatgatgggaccgtgaaa

SEQ ID NO: 26164 - DNA, 434 bp, Zea mays
  unsure (1)..(434): unsure at all n locations
agcttntaaaattcataacttctatttagttcatccaaatttggtcaaaccaattntgtcgtaatctaaataatgtgacctacttaagaaaaatacacaacccctatgtactgaagaaaactataaggttctgatttaagtatagttttggccaaaagctcaataatagaaagaaaattaattgtactatttgactagggttagaaaaatttggagaagtttatatctacctactgacctgtttaaaaatgttaaacctctctgtccactccattaagttagtttttaccccttattttataatatgcttaaggttaagaaaaatagaaaatgtaagttaaataatgaaccagagggcacccctatttntgntagggtacttattcaatgtagntcactggaaaaatctatcatacccttggttagtataacat

SEQ ID NO: 26165 - DNA, 439 bp, Zea mays
ctgacatctgggaaaatggctgacgagggatggcccttgaaataatgaagaagagcgaatatgacattcatgacgcccgagaagcaacacaagcagctgtaaaagttgcggaactcgaaagacggataggtattatttaatggcttttaagcttgttgtctattcttatgacttcgaattaatttatgtcttggaccgcaactgaactatctcccccccagagcccttcaatccactagccgacctataaacaaagaatacaatagagattatcaatatggccaaagctattgtggatgaagttgttaccaagctgctaaccgaagctgctgaataagttccgaatgaagacgagtagctatttgtaaacatttattaagatctaatgcatatttgttgaactaagctgcatattcgatgcttgatctttgatgaatat

SEQ ID NO: 26166 - DNA, 280 bp, Zea mays
aacaggcgcaaaggatgaaggcgtgctcagcatgagcacgtgcggtcatcaagatgaggcgccccatcagcaacagctgccgcccccgccctcgatgtcgactgagcagatgattctgatgcagactcatgcaggtcaagccatcggtcagactctggccgccattcaagagcaacagcagcagcaggctccaccccagccctagatgcctcagatgcctaaagacaagcgtgcagaattcatgaaaggtcatccaccaacgtatgctccatctactgac

SEQ ID NO: 26167 - DNA, 469 bp, Zea mays
tgagtggtccttgatgatccctaagggttgtctatgtcttctagactataatgataggctaatgttgttttataaactaaaagtatatgatatggtttctacttattcttgttcaaattataattagttcccaaagtctaccttagcaattatactttgtgttaacctcagccatttctcgatattccgctgcaagaaaacaactaacatattttcacgattaatcactacacattgaacacattacataatttttaataaatacatgtttacattacatataggaaatcaacgttaaacacaatttagaggcactgatttgaactagctatacatatttacatagtgaataaaatgacatacacgtattgatttgtttactatagtcgtctaaatatggacttgaatgtttgtgaaggtttatctactcgaagagtaccatggttcatgtctaagcacacatgctcct

SEQ ID NO: 26168 - DNA, 419 bp, Zea mays
agcttgaagccatggtaagtagcgtaggccaataatatacgaattgattcaagcctagctacgggtgcataggtttcaccgaaatccaaaccttcgacttgggagtatcctttggccacaagtcgacctttgttccttgtcaccacaccatgctcgtcttgcttgttgcggaagacccatttggtttctacaacattttgattaggacgtggaactaaatgccatacctcgttcctagtgaagttgttgagctcctcttgcatcgccactatccagtccgaatcttggagtgcttcctctaccctgtgtggctcaatagaggaaacaaaagattaatgctcacaaaaatgtgcaacacgagatctagtggctacccccttatgaatgtcgccgaggatggtgtcgacggggtgatctcg

SEQ ID NO: 26169 - DNA, 466 bp, Zea mays
  unsure (1)..(466): unsure at all n locations
tctgtgccaaagatcacagaaagctaagggatggttatttagttatgattttctaaagtttaatgccaaaaaggcactttctactacattgttatttgaaaaatgtcaaacaacatatttcatatttttcctaagttcttaataacaaaacattaactatcccaagggtcggggtgttttcaccttggggttatttctgtagggtttttctaagttttccttgttttcttaaaataaaaggtatcctatttattttatactaaaccagggtatcatagatttttttagtaaactatactgaataagtaccctaacaaaaataggagtacccctggttcattatttaaatcaccttttctatttttcttaaccttaagcatattgtaaaataaatggcaaanactaacttaatggggtggacagagaggttagcattntaaacaggtcagtangtgacataaacttc

SEQ ID NO: 26170 - DNA, 454 bp, Zea mays
agcttcggtgggctttatatgcgcgggcatgggtaacggcgctggctcggccttggcgcgacgcggggcacgcgggggcgcgcgtcgggcgtgctctggcagctcagagcgcgtcgaacacgtggctcattacttctgcccttgttcttccctctgctgagcggccaaaacatacgaatcttggcctaggacctttgagagatctcttccctgcacctagagctacctagttcatgtgagttccaagggtagatgtggtcgggttagagagatatgggggtgggaagtcggctatgtcagtgctgtccaaaccgagacaaaacttgtgccaagtagtgtcaaacgacttatggttgggttcaaacttttccaggatattctaagggtatttcggcaccaattggtcaattgtgtcaaatgggtttgaagattatatgagggtgaacttgtctga

SEQ ID NO: 26171 - DNA, 411 bp, Zea mays
cgcgaagattcttcatcccaacatgggcaagtcggcgatgccaaagccagcccatattagtcttagcaattaaacaagtgtctagctcagcttgattatcattaaaatccactaaatatagttgaccatctaacactcccttaaatgctattgaatcatcacttctaaagacagtaacacctatatcagtgaatagacagctgtagcccattttgcataattgagaaacagaaaacaaattgtaatctaaagaatctataagaaaaacattggaaatagaatggtcaggtgatatagcaattttacccaaacctttgaccaaaccttgatttccatccccgaatgtaatagctcgttggggatcttcattattcttataggaggagaacattctcttctcccctatcatgt

SEQ ID NO: 26172 - DNA, 446 bp, Zea mays
  unsure (1)..(446): unsure at all n locations
agcttgttcatgctttcgctacgctgtgtttacaacattagcccacaataatgattccatacatcttgttgagagtaatgttatcgtacagatggaaatcttcaagtagcattgaccatgcagtctcaaactccaactcagtcaaaggatgatgtattatagattggaaccttgtcttaaagtccatttcctcaaaccttgcatacaactcgtttagaaaaggcatatacctattttgcacatgtcatatacacaaccgatgtattgtgtgtgggaaaaccctctcgagtgctactggcattgcaggatcttgatctgcattcatagatgttaaaattgtatgaatcttattccatgttagacagaaaataaaatcaaatttaagacatattttatgtatatacatntcttgcattattatcagacgtacctatcagcatcactcg

SEQ ID NO: 26173 - DNA, 347 bp, Zea mays
tagcaaatcgtagtgcacaagagctaaaatttgagtgagctggagcaattggccagagagcgtgtcaaatgcgtttgcggtatggccgtatatataccccaagtgcgttgaaaattgaaagaccccgcttgtcagtgaatgttgctattctaacaaagggaaggtgttttttcggaccttcggcgtaaagccttcgtccagctcgcaatctaaatttattattttgaacaaattaatattgcgaggggctactgttggggaccttcggcatccgaaggtcctcaaaaacaggaattaatagtgtttctagagtataatgtgtgaacaggtattttctgactcaagtc

SEQ ID NO: 26174 - DNA, 418 bp, Zea mays
agcttcgatgaaggcaagttcacccttcccttgatgcatgaattacctattctctctaccactgcctatgccgggaattccgggggaatattgcattgtgagtaagagatggcccgcattgacctatatatataatctggatacgaaatgtggatcaggaagaagggcaatgtgtttcttcaattaaagtctcccttttttgaaaagttatgcgatgaagggtactcaccctcatcaccttaggagtgggatgatcagggactccctggtttatgggagggcctaaggtgttggctcaactggtttatgcgtgagcagaaggattgtctcctcatataaggaccagtttgtcattttcactacatgtactcctttatagtacaaccacatcgagactgtgtgtgcagtcactcaattc

SEQ ID NO: 26175 - DNA, 383 bp, Zea mays
  unsure (1)..(383): unsure at all n locations
ctataggtgatagcttcggcgctgcttctgagagaatctgtcgaaagtgttctcttgctttaggatcttcggctacgaagcataccctcaacagtagccccttcgcggtgctagatcgtttttcgtaacgagcttgatctgtgaaaaagtcttctatgcttcgggatgccgaagatccaaaaaacaccttccctgagctcgttggcgagaaacgattaaaatattccgctcgcggagtggccccatcttgcagcaattacgcgcgccctggcaattcaccttctcggactctgtggcccaccgatcagtgagtgcgagtgactgtttgtctggtgcggaanaccttgacgattcaccttttcacctgcgggcacctgcgggac

SEQ ID NO: 26176 - DNA, 409 bp, Zea mays
agcttgccaatacctgtcgaattaacagcacatgccagcacagcagctacaaaccataccagtaacttggcctttcgcatgctggggattggatatgattggacctttcaagaaagctcaaggaggatacacccatgtattggtggcaattgacaaattcactaaatggatagagttccagcccattgcctctttaacctctgctaaagccgtggaattcatacaaagcataatattcagatttgggataccaaacagtatcatcactgacttgggatccaacttcaccagttcagaattctttgacttctgcgagcaaaaaagcattcagatcaagtatgcatctgtagcccatccgagagccaacgggcatgttgagcgagccaacggaatgatattggaggcactt

SEQ ID NO: 26177 - DNA, 383 bp, Zea mays
  unsure (1)..(383): unsure at all n locations
tgagacagacattagccgctaccgacgacagcacatcgttgatagnttggtctattccaatttcaaggtgaacaactcttctctaacttttattgtttttaataacgaaaatgttttctaacaaaggttgtttgtgtgcagagtatgctactgagtaaagctctgaaaatgcagcaagaattggaagataaaaaacacgaagttataattgagaatttagaaagcaagataaaaaaccaatcagctgctcttgaaaagaaagacttcgagcttcagacaaccgaaagcttattggcagaagctgaagctaaaatagcagaattaaatacgaagcttctcttccagttagaaagcttcaaacaagaaaagcagaagctcaatgc

SEQ ID NO: 26178 - DNA, 457 bp, Zea mays
agcttctccataatcttgaggtaaactgcgtattctcgatcagacacgatcttctttggtactccatgtaaacacacaatccgagccatatataactctgctagctgagaacctttatatgtagtcctcacaggaataaagtgagccactttagtcaatctatccaaatcacccatatagcatcatatcctttctgggtgcgaggcaatccagtaatgaaatccataccaatctcttcccatttccactcgggtatcttcagtggatgcagtagtccagctggcctctggtgttcagccttaactttttgacatatgtcgcacatagccacatgtgcagctacatctcttttcaatccataccaccaatacttccgtttcagatcctgatacatcttggtactaccacgatgaatagaatacgccgagtcatgggcctcctttaatatagtctctcg

SEQ ID NO: 26179 - DNA, 464 bp, Zea mays
  unsure (1)..(464): unsure at all n locations
actacagctggacccctgggtgggagcccaaagggtcgagctctctggtgacgatcttgctgttttgctcggaggacctgtaactttctcttgatgtgccctttttcttactcttctgctctctacacttgaatagctttgttggaaaggtgagagaagctgtggaagtcctgactggcgaggatggtcttaacctcgggtcttaaccctctcagagaacgagccatctttctggcctcggtgctgacattctcaggagcgtagcgggccatctctgtgaacttgtgcacatactcactgactgtcctcccgccctgagttagctcccggaactcatcttccttgagttgaactatccnctcgggtacgtggtgcttacggaacgctgcttcaaattctgcccatgtngctgctgtgatggtttcactgatagtgtccaccatgctatagcattcctgaaactg

SEQ ID NO: 26180 - DNA, 398 bp, Zea mays
  unsure (1)..(398): unsure at all n locations
gcatgcaagctggaagcgatggtnagtagcataggccattattatacgaatngactcaagcatagtgtgcgggtgcataggttncaccgcccacccacaaccttcgacttgcgagtatcccttggccacaagtcgggctttgttccttgtcaccacaccatgctcgtcttgcttgttgcggaagaaccatttggttcctacaacattttgattaggacgtggaactaaatgccatacctcgttcctagtgaagttgttgagctcctcttgcattgccaccacccaatctgaatcttgtagtgcttcctctaccttgtgtggctcaatagaggaaactaaagagtaatgctcacaaaaatgtgcaacacgagatctagttgttacccccttatgaatgt

SEQ ID NO: 26181 - DNA, 410 bp, Zea mays
  unsure (1)..(410): unsure at all n locations
tgatactggattatgcgctatgacgaaggagtatcttgtgtatagcctagcatactatancctgaaagtatgagaactgcgtgcttggaaattttataattcgtaagatattcttttattcttatgtcaactcttttacatatagggtttaatactaagcaacgcgttatgagcgcaaaagaatgctgaagacgagagctatgatattgctatcagcaacctacgatcagaggtcattatgctgagaaacgaagctctggaaaaggataaaattatgcttacattggtggacaaggtaaaacaggacgaagctgcctcacaagcccaggccgaagctcagaaacgcgatattaaagatcttcaaaaacatctagctatagccaaagaagaatgttatccgtagagacaag

SEQ ID NO: 26182 - DNA, 360 bp, Zea mays
agcttcatacaagagaagcagaagctcaatgcttatattcgggcagagattcataacagttcaggattgataaaaatcattgactggccatcactaacaaatgcttagagttcattaatcgatgtatacaatgactgaatcacgtcttttattcggttggagccatcagcgagaaatataatccttcgactgaagacctgccatgggcctttcgaacatatcggatgtgaaactgacgacctttatgaaagtatatctggacatggtgacttctcgccctggtaacttctaggggcacatctgtcgtcttcctataaattgtgggcgaacatggataggttgtctataaacccaatttca

SEQ ID NO: 26183 - DNA, 446 bp, Zea mays
  unsure (1)..(446): unsure at all n locations
agcttatgaaggttcttcatcccaacatgtgctagacggtgatgccaaagccagcccatattagtcttagctattaagcatgcatctagattgacattctctttcgaaaaatcaactaagtagagcttgccatctagtacacccttaaaagctagtgaaccatcacttcttctaaaaacagatacatctacatttgtgaataaacaattataacccatgttacacaattgactcacagataacagattatacccgagctattcaactaaaaacacatcagagatagaatgcttggatgtaatggctatttttcctaatcctttgaccttgccttggttcccatctccaaagatgatcgaatcctgggaatccttggtcttaacgtaggaggtgaacanttttttctcccctgtcatgtggttcgtgcatccgctgtcgataatcta

SEQ ID NO: 26184 - DNA, 464 bp, Zea mays
tatagtcatggtaagtagcatacgctaataatattcgaattgactcaagcctatctacaggtgcataggtttcaccgaaatccaaaccttcgacttgggagtatcctctggccacaagtcgagctttgttccttgtcaccacaccatgctcatattgcttgttgtggaagacccatttggttcctacaacattctgattaggacgtggaactaaatgccatacctcgctcctagtgaagttgttgagctcctgttggggacttgttctcaaatgctatgagtcaagaacaaggcaacagaagatgttaaatgttaatatccttacggcttcgaagcattattttcccaaggatataatgattctcaggatgaaagttatgaatgacgcaccttcatcagcacaaaatataataatgaatgaaacatacgagacatgaagataacctaacagttgtgactattgc

SEQ ID NO: 26185 - DNA, 394 bp, Zea mays
agcttgtgaatgttcttcatccccacatgtgttaagcggcgatgccacagccagcccatgctagtactagctattaagcatgcgtctagaccggcctcttcttttgaaaataaactatataaaggtggccgtgtaatacaccctttaaagctagtgaaccatctcttcttctatagacagacacatctacatttggaaatagacagatatatcccatattgcataattgactcacagatagcagattatatccaagagactccactcaatacacattaaatatggagcgctcattacacatgtgattattacctaaacctgttaccttggcttgattcccatcaccgaatataattgaatcttgcgattcttatacttgcgtacgagggaacat

SEQ ID NO: 26186 - DNA, 339 bp, Zea mays
gtcaacacctacttctgaagtcatcagactatctacttatatccacacgcttcagggctgtaatacatcaagtcatcatcgaatccatctatactcgttctgcacatcttcatctgaattattcttaaagtactgtgtatctcattcctgcatggatgtttactatcttgtgccacaaacacattcattttacttgctatctcaatccaactacaaccgggttgcttactgacatccctgtccttcatggatctcctaactctaaaaacatgtgcccaatttcacatctcatcgtacatatttcgaaagaatgacatatggtccagatgtctcatgatc

SEQ ID NO: 26187 - DNA, 389 bp, Zea mays
ctcaagcttgacattgctttcctggtggaaacctatgttatcctttattccagtgcgtcttccattaccaatcatgcccctatcgaatttaatatttttatgttctatctaatgctcattaataatactagttagctgggctatatgaacattatgctgtttaatcaaagctacgtgatcatgaatcaccatatcattgatagtctctacatctagtacaaatagtgacatgatcataactatatgtggatggtttgcaagcatttaatacatcaatcttaccatgtaacatggcattctcatctctaagatgggacatataaatactgcaaacattcaattcatttacctctgaaaataaactagcattttcgtcgtaaggctagaaa

SEQ ID NO: 26188 - DNA, 465 bp, Zea mays
  unsure (1)..(465): unsure at all n locations
ctgcggcatgcatgcttagctcctcanattatggattgcttttgagtcagtccagtttccctcggcccttctggcagctccctcactcccatgaatagcaatgggtccttgatccgaaggtatcttcatgcaaaggtaagcaggatgaagaattgcttcgaaagcattgagggtgccacgaccaataattgcattgtaagggtattccatgtcaacaatgtcaaacacaacttgctcagttctggtgttgttgatgaatccgaaggtcactggcatggtgattttgcccagtgctacaatctgtcttcctccgaagccacagagagggtgcgtagcatcatgaatcttatcttctggctcttgcatttgtctgaaggccttagcanatataatatcagctgcactgcctgtatcaaccaaaacattgtggaccagaaatcctttgataacgcaagagataaccat

SEQ ID NO: 26189 - DNA, 455 bp, Zea mays
  unsure (1)..(455): unsure at all n locations
agcttatgatctctctgttnttattgcaacatgttatcgattgctaaataatcgatactactaccttagagtcacctagaatatacaaatgtactgatacaaatttatcccttgacttgcattgactagttgctacctagtcaagtttgtaaattttgtttttccttcgtcaaaatatatctaccattcctagatatactggggtttactccctttattctcgaatatttgattctcgctagtttatttttgaactaaaacgtgataaataaaaaaacggaggaagtaatttgtaaaggatggtggggagatagataagaaacttcattcatataaaaggaagaggaaggggaaccgtgaagatagatggactatcctatgccttcaaaattaagccaaacaatccctaactntgctactaatatatgttctgcggctgtatgtatactatacta

SEQ ID NO: 26190 - DNA, 455 bp, Zea mays
  unsure (1)..(455): unsure at all n locations
tatatgcgataaacatacaaactctcattgacacactagtcntttactgaagtatcaagatacatgcaagctttctcctaatccttattagaacccagtcaagggaatgcccatgtgaggccaaccactcgatttggtaactccatagatagccatgagccttctatatgtgcaagtgtggcctcccccaaatactcctagctgtctcgactatcaagtttctagccaaaacacaacaatcctcgttccctccactacatgatgtcgaccgcaccacaaaaatagttaatgtgatcttgtaagattacaagctctcctggtacaacatacgatgacacactcaaacatcaagtgataaaatgatgtgggcgagcacaaaagggttgacggtatctaacctcacttttaatcattacggaaaacctatagcaagcactattgaattggtctagtaa

SEQ ID NO: 26191 - DNA, 428 bp, Zea mays
  unsure (1)..(428): unsure at all n locations
agctttcacaaagataatggagataactgattggcatgagcganaggaataccaaaatctgtctgggacttgacttcaacaacagattatactactctcatacgaatgagtcatcaggactagggagaatacaacatgtctccataagatctttatatttctatcacaaattaacatcactgacagtattgcggtcgagaattgcggctcttctaatgccaagaaccaaggacaaattaaagcctaatgtagctcctagctctgtggtgatgagggattccatggctattttttgaactcttcttacttctagtagatcagatatagactatcggtagcatacctaggagtggaatacaactgtagtctgctacataaaccccagatatatgtctattcagaatcaacctttaccatatggtttatag

SEQ ID NO: 26192 - DNA, 428 bp, Zea mays
  unsure (1)..(428): unsure at all n locations
taatgccncaagaaactatctaattttgttaagggtaatgctcacatggttcacgatagagatggctacattctatatcctaagaactatcctgaacacaaaattacgaaaattcatgctagaacacgttacaatgtttatcatcatgcttttatgtatcgaaatgaggcctctatctctaagcattccactcatatcaaaatgcctaaaaagaaaattgtgaatgcatcaaatgagcatgacattttatttaagacttttgatgcttcttatgtgcttactaacaaatcaggcaaagtagttgccaaatatgttgggggcaaacacaagagtccaaagatttgtgtttgggtaccttgttgggacttgttctcaaatgctatgagttaatgaacatggcaacacagacagaagttaatggttaatgc

SEQ ID NO: 26193 - DNA, 397 bp, Zea mays
agcttctgcccaacagcttatgttttttctgtcgccagcgccaaggggcagaggcgccatgggcttctggggaaggtttggagaccacccaagataaatatattgcctattctgtggtgaagacaagggccatactaccacgatgtgccatgttaccatccaaaagcagaatgaaatatccgaagcagcatcgcaacagagtcagccgaagcaggtcatgcatactgcttcatatcactcaccttatattccagaatatgtaagcaaccaccctgcagcttctgttgcttcggcgagccaaccccaagcatattggcagcaaccttcaccgccaccgctgatccagcgaggacaacagctataagggaagtagcacaatcatcttcagagggatttt

SEQ ID NO: 26194 - DNA, 450 bp, Zea mays
  unsure (1)..(450): unsure at all n locations
tgctcctggtcttcctcgtggacagcttcttgctcaaggatgagcacgtactctccgtcagcgatattgcaatctaatgaatgcaatgagtaagatacatgcatggcatgatatgcaattttacaattaaaatttgatgggggaggattaatttaatatggtggagcttaatcttactactgaaggtttttgtggtacacttagtaaattagggtcaagcttgtgtaagctaattggtaagttcattttggtgttccactgatttctttttaatgtcttagtgagagtctattaagatttccagctgagttcattggagtgagaattattttccctctctttctctctatttcttttatgcttttaacgtgggtttgaactacaagatagctcaataaattntcaaagattctacanaaattacagtggtttcttattggtgtataattc

SEQ ID NO: 26195 - DNA, 443 bp, Zea mays
  unsure (1)..(443): unsure at all n locations
agcttcatggttatgaaccttctgccatcttatgcaaacagcttcagccgaaagccgattctcccttgaagaccttcggcgacgaagcatagacccaacagtatccaaaggggtctacctttgacttgattggatactcatactccgattatgttggatgccaggttgataggaagagtacattatggacgtgccaattcctacgaaggtccctggtgtcttggagttcaaagaaacaaacctccgntgccctatccaccgctgaggccgagtatgttgccgcacgacagtgctgcgcgcaactactttggatgaggcanaccctctgggactttggctacaatctgggcaaagtcccactcctatgtgacaatgagagtgcaatctgcatggcggataattggataaacacagtcgcactaagcacatagacatccgacatc

SEQ ID NO: 26196 - DNA, 464 bp, Zea mays
  unsure (1)..(464): unsure at all n locations
tgacattgtctccctgtcggaagccaatggcatccttaatgccagggcgtctcccactataaagcatactacgagcaaatttaaatctttcattttctagttcatgctcagcaattttagcatctagtttagctatatgatcattttgttgtttaatcatagcaaggtgatcatgaatagcatctacaataacatctctacatctagtgcaaatagagacatgatcaaccgtagatgtagagggtttgcaatcatttaaatcaacaatcttagcatgtaaaatagcattctcatctctaagattggaaatagaaacattgcaaacatctaattccttagccttagcaattaatttatcattctcaaacttaaggctagcaagagattcattcaacatgtcaatcttagcaattaaactatcattatcatttctaagattaacaatngaattatcacaaacattt

SEQ ID NO: 26197 - DNA, 443 bp, Zea mays
  unsure (1)..(443): unsure at all n locations
agcttgtgtttacaagaaggaaagtgggagcgctgttgtatttctgatcttgtatgtggatgacatattattgattgggaatgacattcctatgccggagtccgtcaaggcttcactgaaaaagagtttttctatgaaggacttatgggaagcagcatatattttgggcataaggatctatagagataggtcgaagaggcttataggattaagtcaagatacgtacattgacaaggttttgaaacggttcaacatggaacagtccaagaaaggtttcatgcctatgtcacatggtaaacaccttatccagatgcaatgtcctgcgacggctaatgagcgggagcgcatgagtaanggaccatacgcctcagcgattggatcaatcatgtatgccatgataagtacacgccccagatgtttcatacgctattagtgctacgagt

SEQ ID NO: 26198 - DNA, 457 bp, Zea mays
  unsure (1)..(457): unsure at all n locations
agctntataatggngatgnatttgattgaagcttctacaatgaagatgatcctgatagatgcttttacgttagagataatactaattattttgatggaaacgatgatggaccaccaataaagagttttgaagatatttattgtacaatcaagatcaaaatggctttgcatgtagatagatcttagttagagcatctccaagagagactctaaacatgatcctattttaaatatagggctcaaaaccataaaacatccttccaacagcggtcctattttataaaatttcatcaaatggttatagggctcggtctctcgggtcctaaatatagtacccatatactggagccctatcctcatttccacttaatctccgaccatttatttcttatatcatgagttatttcctacataacattatttaacgcctaactattggagtaaacatttcttttgag

SEQ ID NO: 26199 - DNA, 422 bp, Zea mays
  unsure (1)..(422): unsure at all n locations
agcttcagctncatctatgttatggattgcttctgagtcagtccaattgccttctgtccttcttgcagcttcctgacttccatggatagcaatgggtccctgatccgaaggtatcttcatgcaaagataggcaggatgaaggattgcttcaaaggcattgagagtaccacgaccaataattgcattgtaaggatattccatgtcaacaatgttaaacacaacttgctcagttctagtgttgttgatgaacccgaaggttactgacatggtgatcttgcccagtgctactatctgtctccctccgaagccacagagaggatgcgtagcatcatgaatcttatcttctggctcttgcatatgtctgaaggctctatcaaatatgatgtcagctgcactgcctgtgtcaaccaagacattgtgga

SEQ ID NO: 26200 - DNA, 439 bp, Zea mays
gctgaggaggttctccatacccacatgtgctaagcggtgatgccacagccagtttatgcaagtcttaaccattaagcatgcatctagaccggccacttcttatgcaaaatcaactaatgaaagcttgccgtctagaatacccttaaaagctagtgaaccatcacatcttctaaagacagacacatctacatttgtaaacagacagttatatcccatattgcataattgactaacagatagcaaattatatccaagagactctactaataacacattagagatagagtgctcatttgagattgcaattttacctaacccttttaccttgccttgatttccatcaccgaatattattgaatcctgcgaatctttattcttgacgtaagatgtgaacatcttcttcttccccgcatatgggtagcgcatcgctgcaatattc

SEQ ID NO: 26201 - DNA, 431 bp, Zea mays
agcttgacaacatcaaattctactttaccaacattcgagatcatcttcttatatatgcagcagcatccacttcaccataccaatcagtaaactccctgcctcctccagcacatggcaaaccctaaatcagatgaaccgtatcttttgttatcttcaaatccttgccagcctctgggcgtatggtcatgtcatgtggatccaatttatccatcaaccacctgatgagtgatctgctctctaaggcatcagatcgcaaatcaaatatgcttgataatcccaacctatcgacagcattgcgctgccgatcgctcattatccaagatgataacataacatcatagggaatgccgcggatattctgtttctggaagcataaatgaatatgcattaatacacaaagtatatatatagttataacttatggttacata

SEQ ID NO: 26202 - DNA, 468 bp, Zea mays
tctaaagggagaacacgtgataggtctaaccaatgttcaattcgaaaaagatagaccttgtgcaacttgtcaagcaaggaaacaggagggaggagcacatcacagcaagaatgtgatgaccacttcaagacccctggagctgctgcatatggaccttttctgacccgtcgcctatctaatcataaggggaagtaagtatggcctagttattgttgatgactattcccgcttcacttgggtgttctttttgcaagataagtctgaaacccaagggaccctcaagcgcttactcatgagggctcaaatatagtttgagctcaaagtgaagaagataaggagcgacatcggatcttagtccaagaaccttcaattggatgagttccttgtagaggaatggatcaagcacgagatttccgctccctacacatcacaacttaatggtgttgtatagaggaataacaagacctt

SEQ ID NO: 26203 - DNA, 440 bp, Zea mays
  unsure (1)..(440): unsure at all n locations
agctttgatgaagctgctgcatctactagagaatctattcttagcaatgggaactcatcctttggacaagccttgttaagatctgtaaaatcgatgcacattctccatttaccatttgccttcttcaccataatagtgttagctagccactctgcgtatttgacctctctgataacgccagcactaagaagcctcttcacttcgttccgagcaccttcagctttgtcatcggacattttccgaagcctttgttttcttggcctgaaagatggatccacattgagtgagtgctcaatgacatctctgttgacaccgcaaagatcattagctgaccaagcaaacacatcttttgtggtgaataaanaccttatcaaggtgttctcctgctcttcagataactgagatcctagcaataccttctgctctgctatgtcttacat

SEQ ID NO: 26204 - DNA, 466 bp, Zea mays
  unsure (1)..(466): unsure at all n locations
tctaggcacaacctncgcctccacctccgttacagcaaggacagcagccagaatggagccagtatgctccacaccaaagggactttcgagagcagtccgaagctcgtacagtcaacagcaccgtgccagagtctaagcacatctattgacaaatatcctaccctaatagcaatcttttctatcaagttttgttttctgtaataaaggatattgtttaggtttcatataaatactttcggtgattcccacaaggaaaatatatttttctcaggcttaaattgttaaagtttaaagacttgtgataatcaagaggaccttcggattaccgagaattattcgaaacagcataaagtctgtctaaagaacgcagagtaagttgtcgaagtcataataaaagtcgttccacagggaacgcagtgtaagttttctgctcccagaccgtcctaaaggaatgcagagcttacag

SEQ ID NO: 26205 - DNA, 215 bp, Zea mays
gacaaagacagcgatccgtatcgcatgccacccggagacgcaatgtagagcccattatccacacaagatcatcgtgactatcgacaggccgcttgagctactacacatggatcaattcggaccgattgcttacataaacattcgggggagtaagtcttgactcgtactatcggatgataattctcgctctcaatttggtattactcttacaagaa

SEQ ID NO: 26206 - DNA, 344 bp, Zea mays
cctctatactgtcaatgctgctacaatggtcttatgttagtatgtctccatgggtaaattgaacccctaggaactaaagaaaatgccccaacagagaaagttcaagcctatagataagagtgttcaatccatataattggccagtcaaatcattagtatgaaacgtaaggcatattgggtgtagaactatctaaggtacctaatatgcttcgtgtaatgatataagaaattctggctgaggatgataagaaacatcaagcattaaagccaaggatgaaataacatgctgggcatctgtttaagaagctcgattttcatacatcaactatcagttctgggatata

SEQ ID NO: 26207 - DNA, 435 bp, Zea mays
agcttgagctgctgccatacaaccagaatgcggaggagaagaccctacgtgaacgtccatggaagtgtgagagggagaaccgactcggacaccctcgggggctgggtcatagctcgcgctacccattcgagccgggtcatccccggcaacaccctcgggggctgggtaaacgctagtgtcgtccttgagggccaagctctccgtaacagccacctctaaggctgaaggaccttcacccacttccatgtgagcagaacaatccagaccagcttcctgacccttaagaccacactctaaggtcgatgagacacgggacgccactcgagataactctagcccagcatcaggcacatcggcatgaatatccatcattccaccatctgccggctccaacaacagatcttctgggaccatgtcttctagagtctgatcaaa

SEQ ID NO: 26208 - DNA, 455 bp, Zea mays
  unsure (1)..(455): unsure at all n locations
tattacatgcgtgtcaaaacgtattaagtatggacactaatccacatcgttgcattgtaggttatcaaaatgaatcgaactcgcttggaccaattgtcgatgctaagaaacgtaagaggcatagggatagggaaagatatgttgcgatgattgttgaagaaaagaatgacaaaaataggaagcgtcatgaagcacgtcaacgaaataaaggctatcgatagagccactctcatctagaggtgatgaaaagttaatttttttttattgttatacctacatgtttgtactatacaaagttgatgtgtagccttttgtaaatgggaggtggttagctntccagatgactgtagcaccattgatttcacatattttgcaacacaagacattgcatgtataacaatcacaatnttttgtcacattagcactatctattatgttaactctttacttatgct

SEQ ID NO: 26209 - DNA, 432 bp, Zea mays
agcttccacgtgttcgacgcgagctggcattctggggcgcgctcatagcacgcccgtgcgcgaacccccgcgcgcccgcggtcgtctgtgaccacgcccgcgccacggctataaagcccaccccagtgcttggctgccttccccgttaccttctccgtacctcgccggacttgcccgagccagccattaactccggcgacctccccgcgacccgccagtgccgcccgagagcaaccactggaacacccctggtgttactataactaaaacttgagcatgacatcataagcattggcattgcatatgtgtgacacacctagagtgcattcactatgcaaaaatttcacacaagttgtattggtttaatgtttttgcaatggaaccctggtaatggacttaaccctaaatagtagtaaaggggacaacttaccc

SEQ ID NO: 26210 - DNA, 403 bp, Zea mays
cgttttcactactacaagcacgccggtgctagataatattatcctcatcctccctctgctggaagtatggccttcttggcctgaaccaagataaaccttgtgtctcatcttgcatcaatccatccaggcatggacacgcatcattaaatttactagtcagcttatggtcccccgggttcaatacaccgacaattggcccattgaggaaggcactcttcacgttcatttgatagatcttaaaagaatggtgagcatcatacgctaataggattcgaatagactcaatcctaactacatgagcaaaagtctcctcaaaatccagactagtgacttggtcataagtctcgccttgtttcttgtcgtcacctcgtactcgtctagttagttgggaaacacccacttt

SEQ ID NO: 26211 - DNA, 339 bp, Zea mays
agcttgtccaatcgtcagttatgcctgctatatagagatgtgcgccacacgacgcgattatatagtatgtattggatatcggtctgctacaccagtggtgctattacttatcagaacttagcatgaccccagggcatatagaacttcttagtttgatgctccgcatgccacgagatttttcttttgctatttttagtagctgatgtagctcgtcttacacgtaaaatctacatattaataaaaacgctttaactgccttgtgaggctagtgagcacatttaagtgtagtttgggggaacaagatccttgtagcgctaaatatattttgtaagacaatca

SEQ ID NO: 26212 - DNA, 392 bp, Zea mays
  unsure (1)..(392): unsure at all n locations
actttctagacaaagctgtgtgcacgtgcgggtgccagtctatattatctcttgggggccacagcanaaaattttcttaaatatattggcattcaacctccacatgtcgagcctacataccaaggggccaggtaccagggagaaattggtaacaaacgcacaccacaaaggcaaatagcatacatataaggtatgtcactggtagaataatactttccaaaagtatcttacaaaaccagaaaaatattacaagtcgcctcccatcgggaaccttgccttctctctgcagaatcagctacttgncatcgacagtggagtccagcacccggagcgcgtcngagatagacgtcggcggctcctacacccggatggggcttacccctacggcacca

SEQ ID NO: 26213 - DNA, 60 bp, Zea mays
agcttcttctttccccgttccggatccatcgtgtcgtgcctgcgcccagaaataggatcg

SEQ ID NO: 26214 - DNA, 333 bp, Zea mays
  unsure (1)..(333): unsure at all n locations
tcacccagcagtatcgaccatgagcgctctagtgccatgctctcttggacaacctactatttttgagtgctttcggtattcctggagtctatttttgcgccattttttgggttcttatatacccaaggaacttctttaaagcatccaaccactaattggttgtggagtctttggtttggattctttctccttcgctattagagtagagacatcatttnttggattttgggaagattaacttgtgcacatggtttttggttgattcaagtgcttcgttgtgtttgtcgatatcaactgggaacatctaaccacttaatggctcaagtgcatctc

SEQ ID NO: 26215 - DNA, 410 bp, Zea mays
agctggtgaatattcttcatcctcacatgtgctaagcggcgatgccacagccagcccatgctagtcttagcaattaagcatgcatctagaccggcctgctcttttacaaaatcaactaaatagagtttgccgtctaatacacccttaaaagctagtgaaccatcacttcttctaaagacagacacatctatatttgtgaatagacaattatattccatattacacagttgacttacagacaataagttatatcctagcgactcaactaagaacacgttagaaatagagtgctcggatgaaatagcaatttttcctaaccctttcaccttgcctgggttcccatcaccgaatatgattgaatcttggggatcctcgttcttgacgtaagaagagaacattctcttttcccc

SEQ ID NO: 26216 - DNA, 436 bp, Zea mays
  unsure (1)..(436): unsure at all n locations
tgaatagtcttgtgaaagtagctcaaaaaactcctggtataacttgtataaagtatgatgtaatctgagttntactttgtaatataatcttacttttccgtccatgtatgaaatgctttggtgtggacgaaatttcattcttgagccgaaggcgaaaaaacaccttcccttcttttcgtacacaacgaagcataaaaaatttctctttctccgaagttttttctcatagccgaagcatctgccctttttctgtatggtatgatgatgatgatcctatatatgtcttaatgaatggttatgaatgcaaatgtcatgatgtaatgtattgtgcanatgattatccgaatgtacattcaaaaccataatcatagcctttcattccttgggaatgactcagnatattttgcccgttattatttgcttcaccgttactttt

SEQ ID NO: 26217 - DNA, 416 bp, Zea mays
  unsure (1)..(416): unsure at all n locations
agctngagaaatatttagacacggtccgaatgattgaagcttcctttgaagggttttctgtcaaaaatattcctcgagtagaaaatgaacatgctgatttgctaaccaaatcagcagcacaggggctgcccttaccttcggaagtatttttcgaaacaataaaagcacctttcgttgaacttcttgaaagagcagtcctcaatatatctcctgtttatagtgaagactggagaactgagatcatctctttcctttagggtaaccttttttcagatgacgaagcttataacaagagaatagaggcaagagctcgaccatatgttataatagaaggggagctgtacaagcatggngtctggtctccactactcaaatgtttatctagagccgaaggtatagaattgatgaaggaaata

SEQ ID NO: 26218 - DNA, 451 bp, Zea mays
  unsure (1)..(451): unsure at all n locations
cggagatgctcttgcactctgaagacagaagtcacatggtgttccaattccatacaaggatggacaccatgcttgacgtgtctatggcaatggaatatctgcaccatgagcatcacgaggtggttctgcactgtgacttgaagccaagcaatgtgctgntcgatgatgatatgacagcacacgtagcagactttggcatcgcaaagttgctactgggtgatgacaactccatggtcgtttccaccatgcctggaacacttggatacatggcaccaagtatgtacgcagtaacactttgtaatattgcacaatctatagtccgttttagcatattgaatgctcaanttgtttagcacatcgaatctgtctgtcctatggaacttctgtgcagagtatggatctcttggaaagcatcgcgcagagtgatgtgtcagctttggaatcatgcttt

SEQ ID NO: 26219 - DNA, 423 bp, Zea mays
  unsure (1)..(423): unsure at all n locations
agctctctcaatccttcttgttgcttatcaaatatactntaacttatataatcggctcaactcacaattttaaacttttcattcccttatgcttattttcttgaattctgttcatggggttcacttacggttcttaattacggttgcacattcttatcttttcaaagactcaattgttttgatcatgacacttttagacatattcttggtgaactctttcttacttaagttattttgatgctcatgcttactttggttcacataaaataatggttctcggtttggctttttaagagaaaccctatgcgacactggggtgtcacagcgtaccttcttgttcttatcgtccttatccatgaaacacttgtggcccacgtcgaccgaaaagacactcttggtgaccggattgctgtgactcctctt

SEQ ID NO: 26220 - DNA, 459 bp, Zea mays
tcggcattacataccgacttaaagatagaatgaccttctagtccataaatgtctgagtcaatgttgtaagtttttataaggggcatacttgtaattcctcacaggctgcgtcctgtgcctataaatagtgaacagtattccgttactgttcacgcattctggattttgcaatcacatctctcggaattcaacctttgccaaggcataggtatcattgtatctaatgattcaatatattaagtaaatataatataatgcatctgtgatttatccattcatcttataccttctatttcacattatcttacaatgtttattgaaagtttattacgaacgttcaacttcgtaataatactctcatcaaccttcgtccaagatccattatcctcaaaggaataatgcctcatggacgaaggacagtaacatttaacactttatcgtgccttctcttaattatag

SEQ ID NO: 26221 - DNA, 339 bp, Zea mays
  unsure (1)..(339): unsure at all n locations
agcttttacaccagacagttcagacgccacactggacagtctagtggcttctctccactagtgccaccaggaactatagttccctggtggaccgtacactccggtgtgtgccaccggacagacncgttcgtggcaccacttttcttcgcctctcggactatgctagtcacttgccggacataacttgcgattcgcataatgactttttttgaggagctgctttcctcattgtcttatatcaagccacttttgcttcctgctgtctcactatattatctctacacctcttctcttctcttccggcatgttattcattaaactctacaaccttaccttcta

SEQ ID NO: 26222 - DNA, 306 bp, Zea mays
agctcgaagccatggttagtagcatacgcttgtcacatgctaattgattctaacctaactacgggagcataggcttaaccacaatccaaaccttcgactcgagaatataccttggccacaagacgggcttttgatacttgtcaccacaccatgctcatcttgttagttgcggaacacccacttggttcctacaacaacttggttaggacgtggaactcaatgccttaccttattactagtgaagctgctgagctgctcttgcatcgccaccacccaatccgaatcttgaagtgcttcctctacctt

SEQ ID NO: 26223 - DNA, 464 bp, Zea mays
  unsure (1)..(464): unsure at all n locations
agcttcggctatggtcaaatatttggcagcttaacattgcaatagcaatgaatgttgtggtaacttcacacctacccgtttgtttatatagtgccgcaggtgggaaggtgaatcgtcaagtcttccgcaccggacgaacagtcgcccgcacccactaaatggtgggccacagaacccgagaaggtgaatcgccaggacacgtgtactcgccgcatgatggggccacctcgcgcttggaatattttaatcgtttctcggcaacgagctctgggaaggtgttttcggaccttcgacattccgaagcctatgagactttttcacggatcaagctcgttacgaanaacgatctagcaccacgaaggggctactgttgtgggtatgcttcgtcgccgaagatcctgtaagaagaaacaccttctgcagatcctctcataagcagtgccgaagctatcatccataaagct

SEQ ID NO: 26224 - DNA, 332 bp, Zea mays
  unsure (1)..(332): unsure at all n locations
tcttattcattgaagttntgaatctcacagtgatcatcttaatttgtggatgttatgctggacatgcgagtcagtaaagtgatcttgagaactgctgcagtctacggtgagtatagagagcttggcttttaaggtatgtacaacccactaatcattgagtaacattctatgttgttaagcctgaccattaaccaagataaagcatcaacctactaatccattggtctaaatgaatatcttggatatctattgtatgcgtcactaataccttaatcaaactaaatacttctttccagttggcagatcaacgtgttgctttttctgggctgatg

SEQ ID NO: 26225 - DNA, 312 bp, Zea mays
  unsure (1)..(312): unsure at all n locations
agcttctcccaatccatgatggttntaaaaggaagatttgcatacatgccactggtcactagtcgttacccctggttgctattataccatggcatgtctcaatgacaagcgggccctggtgccagctgccattgagacatccagcagtgcaaaaacagataactgtggtttggcccatnggtatgtttgcaaactcccattttttattatacagagtgttaacttaattgctgacatgacgccctgattattcttctaagtagagaacttgctgtatcatgggcattatgtgcggtttgccttggggacaca

SEQ ID NO: 26226 - DNA, 411 bp, Zea mays
atcaaatggacgtgaagagtgcttctctcaatggaccaatcaatgaagatgtctatgttgagcaacctcccggctttgaagatagtgagtaccctaaccatgtctataagctcttctaggcgctttatgggctcaagcaagccccaagagcatggtatgaatgccttagagatttccttattgctaatggcttcaaagtcggcaaggccgatcctacattattcactataactcttgacaatgatttgtttgtatgccacaattatgttgatgatattatatttgggtctactaaccaatctacatgtgaagaaattagtatgatcatgacacacaacatcgagatgtctatgatgtgggagttgaagtattttctaggatttctagtcaagcaactcccagagggcacct

SEQ ID NO: 26227 - DNA, 359 bp, Zea mays
tagcgagaactatccgaatgagaggggacccccactccaccttctaccatcgacgtggaagaaattctaaatgtaatgactgcacccatgcccacaaagcttagaccattacggcctcaactgacgaagctatttcacaatgtggcggagccggaataaacgaagataacctatgctaataggcaaataattattgtctgtacaaaaattattgtctagactcctccgcgagcattaattcataaaacagccgctgctgaagacacaacagacgtcgaagtcgctccttcggaggttcgggctacctaagccgctacagcctactatgtgaacttaaacactacgactgtaatatctac

SEQ ID NO: 26228 - DNA, 229 bp, Zea mays
cccatgctagtctcaccaatgaagcctgcatctagaccagccgtctctgtatgcaaacacaaccatataagagtatggcgatctaatacacccttaaaagctaatgaatcaactacttttctgaagacagacacatctacatttggcgaaagacaatatatcccatcttagcttaaatgacttacggatagtaaattatttgcaagcgactctactaagaatacattac

SEQ ID NO: 26229 - DNA, 441 bp, Zea mays
  unsure (1)..(441): unsure at all n locations
agctntagtaggatgtgtattagcaacttgcttcccagcttgacatgcactacaaggcttgtccttttcaaataccacatcctttaatcctcgaaccatgtccttctttaataccttcttgagtgtgctcatcccaacatgagcaagcctcctatgccgaagccatccaagtgatgctttggtgaagaggcaagttcttaagtctgcatcttctgaagtgaaatctactaaagagagattgttgtatctaaatcccttgaacaccattgattcatcatccatctttgatacaataacctctgttggagtgaataagcattgaagtccaagatcacagagttgacccactgataataacatgaagctcagaggtgcaaccaagagaacatttgaaattgatatatcatntgaaattgccacctngccaagtccttgcacttt

SEQ ID NO: 26230 - DNA, 367 bp, Zea mays
ttacttcatttgttctcttgtatggagtactgtttgttccctaatttgaatggatggatgtatgtatgcttgcaatcgcatagagaacgatccggtcgaagagcccgaggaactcgcaggagaagcccctgagcagcagtcggttggtggaggcaagtgtcccttgacctatctctgtcctatacattctttaattcacctcccacactacacatttatacttaaggattgactagcttttgttatccatgtacttgtttacctatttgggttggattattattgtctagctctatgctattggctaactctaatcaatgaacatgatgagattatccatgatacgcttgtttcccttctcttatat

SEQ ID NO: 26231 - DNA, 444 bp, Zea mays
  unsure (1)..(444): unsure at all n locations
tagcttcgtatagatatttttctaagctactcttccgaagctacactttgtaaagatattttcaaagcgttcttctgtacattgataatgtgtccacctcttgtgctatatgcaaaatgatgtatgatgcttatgctatgcaaaatgatgtgatgatgttatgctatgcgacgtgatgtttattcccaagatacagacacatncctgcaataaaacatgattcttttataagcctcccttaggagcttcttcgccttatacttcggcggaatcagcgtttatttttcgctgtaagcctcccttaagagcttcttctccttttactttcagcggtattcgcggtgactattcacgcctcgccttttacttatgtggtatcaacgatgactattcgctgatgctctgcattcctcttgaacgactttgagcagaaacttaactgcc

SEQ ID NO: 26232 - DNA, 427 bp, Zea mays
agctattgatgattaaggtcatctcctcgttttcgagcttggaggcgacaattggttgtctacttggtgtatactcctccttcttgtcctccgttgccttaaaagccaccggttgcgcctctgatgtggagggctcgtcaagctcgttgatcttcttggagcccttaatcatgcattcaaagctaacaaaattttcgatgactatctcgagggtcattatcggatatcttggattaccacgaattaaatgaacttgtgtggggtttaggaaaataagagctcttagaataaccttaaccactttgtggtcataccactttgtactcccgaggttgcgcacttggttcaacacagatcttgaatccgttgtacatgtcctgtggctcctccccttgcagaacactgagcgaccgagctcccccccatc

SEQ ID NO: 26233 - DNA, 372 bp, Zea mays
cttgatcttgtgcattgtgatctatggacatcacctatttttatcctcttggagtataaatattacttgctgattctggatgatttcactcattttctttcgacttttccattgcgggtgaaatcccacactttcaccaccctatcacaattttttgtttgggtcttcacacagtttggtcaccctattcgtgctcttcagtgcgacaatggtcttgagttcaaccacttctgctccttcctttctcacggtgttaagctgtttgcgcccttacaccttcccctcaaatggtcgagcaaatcgcatgattcgcactaccatcaatatgatgtgttggctcctttttcaagcgtctctttctcgcagctacta

SEQ ID NO: 26234 - DNA, 271 bp, Zea mays
gcttaccgcatttgaaacatgagcgcttttccttggtcttggacttgcttggttgtcccttgcgaacttttaacgccgccttgaatcttttgatgatgagggccatctcttcatcattaagatcggccgcctcaatttgcgccaccttgctagggagcgcctccttgctccttgttgccctgagagcaatgggttgaggctcatggattggaccattcaatgcgtcgtccacctaccttgcctccttgatcatcattcgcccgcttacaaa

SEQ ID NO: 26235 - DNA, 465 bp, Zea mays
  unsure (1)..(465): unsure at all n locations
tgtgaagattcttcattccaacatgggcttgtcggcggtgtcaaagcctacccaagttagtcttagcaactaagcaagtgtcgagttcagctctttcaaaatctaccaagtatagctgaccctctaacactcccttaaaagctattgaatcgtcacttcttctaaagacagtaacaccagtatcagtaaaaagacagttgtagcccattttacataattgggatacggaaagcaaattgtaatctatagaatctacaagaaatacattggaaatagcatggtcaggtgatatatcaattttacccaaacctttgaccaaaccttgatttccatccncgaatgtgatagctcgttggggatcttggcttttctcatatgaggagaacatctttntctcccctgtcatatagcttgtgcacncactgtcgagtattcaacttgagcccccgatgcataaacctacaa

SEQ ID NO: 26236 - DNA, 386 bp, Zea mays
agcttgtgaaggttcttcattcccacatgtgctaagcggcgatgccacaaccagtccatgcaagtcttagccattaagcatgcatctagactggcctcttcttttgccaaatcaactaagtaaagtttgtcgtctagtacacccttaaaagctaatgaaccatcacttgttctatagacagacacatctacatttgtaaataaacaattatatcccatattacaataattgactaacagatagtaaattatatccaagactctcaactataaacacattatagatagaaagctcatttgatattgtaatggtgcctaaacctttcaccttgccttggttcccatgaccgtatatgattgaatattgggaatccctattcttgacgg

SEQ ID NO: 26237 - DNA, 430 bp, Zea mays
ttaattgtgttgccatcaatcaccaaaaagggggagaatgaaagctctcttgtgagtcttggtgtttggatgacaactcaattaaaggactaacaagtatgctaagtgttgaacaggtgcttaatgtaaagctaacagggttcaacacaagtgaacaagtgtgatggtccaaggactaaatgatggatagataacgggcatcacaagtaagatggacattgcataaagtgagactcgggtgcgtagcttggaaacaactgatcaagccaaggatggaggcaagaagagcttctaggtaccaagtgcacgggagaaggtcaaagaggctgacgaacccacagccaacggtgaagaagaagacttgcaaagtcaatggtgatcgagtttgagaacaactaccggtcatcatggatcactacataatgacgtg

SEQ ID NO: 26238 - DNA, 329 bp, Zea mays
  unsure (1)..(329): unsure at all n locations
agctntatttggttgattctactaaagagaatgtccatctagatgcatgcttaattgctaagactaacttaggctggctctggcaccgtcgtctatcacatgttggaatgaagaaccttcataagcttctaaagggagaacatgtgttacgactaatagatgtctgtttgagaaatacataccttgtcagtatgccaagcatggaagcatgtgggaacaaatcatccaagcaaaatgtgatgactacatgaagaccactggaagttcttcttaaggacctttttggaccccgatcttaccttacatcccgggaagtaagatgggctatt

SEQ ID NO: 26239 - DNA, 388 bp, Zea mays
  unsure (1)..(388): unsure at all n locations
ctaactctcacgagacctttttccatttctttctaaccattgtgagttcattattgtatgtgatattctatgcatatatactttatttgctctcctgtntggggtactggttgtttcctaatttgaatgtatggatgtgtgtatgcttgcaatcgcatatagaacgatcaggttgaagagcccgaggaactcccaagagaaacccctgatcagcattggttggtggaggcaagtagtccttgacctatctctgtgctattcattctttatttcaccttccgcattacacgtgtatacttaaagattgactagctcttgttattcatgtacttgtttacctattcggggtggattataattgttaactttatgctattgctcaaactct

SEQ ID NO: 26240 - DNA, 445 bp, Zea mays
agcttgaattgtctgtgaatgtaggtgaactacaagaccggtgggagccattgggttattgacagtggatgcacacaacatatgacaggcaacccacggatgttcacctcattagatgagaatgttgatggtgaagataaaatcacatttggagacaactcaaaaggaaaagtacaaggacttggcaaggtggcaatctcaaatgacttatcaatatcaaatgttctcttagttgcacctttgagcttcaatttattatcagtgggacaactctgtgatcttggacttcaatgcttattcactccatcagaggttattgtaacaaaaatggatgatgaatcaatggtattcaagggttttagatacaacaacctctacttagtggatttcacttcagaagatgcagacttaagaactttgcctcttaccaaagcttctcttggat

SEQ ID NO: 26241 - DNA, 335 bp, Zea mays
taggctccacctacaggctcgcatactgctctgaggtggtctccagggccactaatcttaccctaaaactagtgtaccccttacctgtataaagacgcagtacccacgcatctatctttatgcgcatggttaaagagctgtatgtgggaccatgccatgactcgccccagccttgggcgactactctgggccagcaacagcgcctgacctcaccacataggcaggtccagtgcctccacatgtacagagaaagtgatctactccaaagcatcaacagatagttcggacccccatgggagagtgtcagacccctgtatataccgactagtgcctca

SEQ ID NO: 26242 - DNA, 444 bp, Zea mays
ctcttatggttaatatgaatagaaatggttatctatatcatattccagtggacactctctatttttgttatggtacttattcagtgtatctcactagaaaaatctattatactctggtttattataaaataaatatgataccttttatattaagaaaacatggataacttataaaaaccctacacaaatacccccaaggcgaaaacaccccaacctttaggatgattaatgttttgtatgaagaacatacgagaaatatgaaatctgctgtgtgacattattcaaacaacaatgtactaagaagagcctttttggcattaaactttgaaaaatcataactaaataacacatccttagctctctatgagttttggcacaaaagcgtattattacttgtagatgcccacataaataactcttatgacacaacccacctctaattaa

SEQ ID NO: 26243 - DNA, 389 bp, Zea mays
ctcaacttcacagaagaggatgatccatccgggctgataatgactttcaccacatatggcaacaatcatacatgtcttctgcaatgaccaggggcttcaaatgaacaattctccccatgcatgtgaataatcaaaccataatttccacacttcaagagatgacattaggaaagccagtcctcattatgccatcaacattagctcccaatcttgtaggagcaacaacttaaactttctcacgccatcagtcccatgggtcagacgctgtacatgctcttaaagaagatacatggatcagactatatcgctatatggcatatactggagcgaaactatgccccacctataaacatgcatgttacatcctgaaacaaaatacaatgttaatc

SEQ ID NO: 26244 - DNA, 435 bp, Zea mays
  unsure (1)..(435): unsure at all n locations
agctntttcttttttgtacataacggaacatataagaccacttcttccttttgccgaagcaaccacttatgaacacaaatgctatgaatgaatgcttatgaatgcaaatgctatgatgtaatgtgcgaatgaatgtccaaagcatataaccgaagccacactcaaccattatttccttggaatcaaccacacatcagctctgcattcccttaggaacgactttggagcttcctcgacttttacttagacggtataaactctgcattcccttaagaacgtctttggagtttcttcgccttttacttatgcggtataagctctgcattcccttaagaacgtctttggagcttcttcgtcttttacttagacggtataaactctgcattcccttaggaacgtctttggagattcttctgcctttacttaagcggtata

SEQ ID NO: 26245 - DNA, 305 bp, Zea mays
cacaagagctaaagattgagtgattgtgagcagtcggtcatatagcgtatcaaatgagttcgcggtatggccgtatctatactccaagtgcgttgtaaattgaaagacctcgcttgtcattgaatgttgctattctagcaaagggaatgtgtcttttcggacctttggcgtaaagccttcgtccatgtcgcaatctaaattcattattttgaacaatgtaatattgcgaggggctactgttggggacctatggcatctcgaagtgctcacaaacaggatttaacagtatttctggagtataatgt

SEQ ID NO: 26246 - DNA, 277 bp, Zea mays
aaaacttcggtgcaaggacaacaatcttctgatttttgcacaagaacaaagcaagacactctatacatgatcgcaggaaatcggtatgtaaacttatgggcaagtgaatcccacaaagctttatcttcctataaagggacagtccctacataattccctttgaaagctaagctcactcacaagccttcaagtaccatcgagctatcttgagacataaaaccgaaggtatgtctgaaattcctgtatatgaccgagatggaacggattatgctcagac

SEQ ID NO: 26247 - DNA, 375 bp, Zea mays
  unsure (1)..(375): unsure at all n locations
agcttcgggaaaccgatactctntgatagagttccgatcactcttccaccggtttgatctcgtatacagcttaacccttcatcatcaatgccaccgaagagaagacgccctggccggtacccgcaagatataacatactcttttaattcctctttttcagcttctgtcagctcttggccaactaagttcggaagtcaaaagttttatcttccgaagattcttcggatatttcttccttctcgggttctgcgggcgagggctcttcggtggctgcaacagcttcttctgcggccatgtttagcagcattttatctatatcaacagctatgtctctaaattaatatcttccgatatggcatctatggctctggcctc

SEQ ID NO: 26248 - DNA, 452 bp, Zea mays
  unsure (1)..(452): unsure at all n locations
ctaagcttgaattgtctcgctttggatgccaataccatccttaatgcctgngcgtctctcactatagagcatgcttctagcaaatgttaattcttcacttttcaagtcatgctcactatatttggcactaagttgagctatgtgatcattttgatgtttaattagagctaggtgatcatagatagcattaacaataatgtctctacatctagtgcaaattagtacatgctctacggtacatgttaatggtttgcaagtacttaaatcaacaatcttagcatgtgtaatagcggtcttcattttattagcgaaatataaacattgcaaacatttatatcttagccttagcaataattttcattctcaatatacggctcagagagatgcatcatgttgtcatcttaacatcaatatgcatatcaatcttagggtgatagagatcatcctacatt

SEQ ID NO: 26249 - DNA, 392 bp, Zea mays
  unsure (1)..(392): unsure at all n locations
agcttatgaagattcttcatcccaacatgggctantcggcgatgccagagcctacccatgttagtcttagcaattaagcaagtgtcgagttcagctctatcaaaatctaccaagtatagctgaccctctaacactcccttaaatgctattgaatcatcacttcttctaaagacagtgacacctacatcagtgaatagacagttgtagcccatctgacataattgggaaacagaaagcaagtcgttatctaaggaatcaacaagaacaacattggaaatagaatggtcatgagatatagcaatgttaccaagacccttgaccaaaccttgatgttcatccccgaatgtgatagcttcgtggggatgtcggtttatctcatatgaggagaacat

SEQ ID NO: 26250 - DNA, 453 bp, Zea mays
  unsure (1)..(453): unsure at all n locations
tagcaagtgtgagttntggatcagagaatttgtattcctgtgtcatattataaaccgagaaggattagctatggatctaaagatagtagcagccattctggactggaaagcaccaaaagatgtccgagtaatcaagagtttcattggaatggccggatattatcggtgtttcattgaaagcttctccaagatagccagaccaatgacagcctcgttggcaaagaaagttgagttcaagtggaccccagcatgccacaagtcttttgagacattgaaggagaagttgacaacgacaccaatactgattctgacagatgttcacaagccattctcggtgtattgtgatgcttcgtacatccgactgggatgtgtgttgatgcacgaagggagagtagtggcatactcctcccgacagctgacgattcatgagagaaactatcctactcatgatct

SEQ ID NO: 26251 - DNA, 306 bp, Zea mays
cccacacgtgtcttagcggcgatgcctcaagcagcctatgctcgtctcagctattaaacatgcgactagaccggactcttctctggcaaaatcaacataaaaaagtatgccgtctacaacacgccttaaagctacagaaccatctgctcttctcaagacagacacattcatatttgtaaatagacaattatatgccatatgacataattgactcacagaaagcagaatgtatccaacactctctagtacaactacattagagatagaatgcccattgaaatcgcaattcgacctaacctttcacct

SEQ ID NO: 26252 - DNA, 290 bp, Zea mays
gaacataaaactcaactcctaaggagacagcggtagactaacaatggccgtttgtaaaaaagacccctagcccatgcaagccggaaataaggggagcactcatcacagcagaattgaggagacatacaaccactggagcctcttacatggacctttcgacccgctcctacctcagcatcgagggaaaaagtatgggcttgtaacagtgatgatttttcccgcttcaatgggtgggcttttacaggataagtcagatacccaagggacccctaaacgcctcttaaagagag

SEQ ID NO: 26253 - DNA, 454 bp, Zea mays
  unsure (1)..(454): unsure at all n locations
agctttcttggcttgttatcatagaattattattngtattgatttatcacttccgctttatttgaaagctatactctttaccagcaagaacttagtttttatactccgataattgttcatcttgttctaaccactaatcataggatctagttgggggataaagttttaattttcaggttttgcctatccaccccccctctaggcgactttcacattttcatactgcctcgaggacaatttctcattaagtcgcgattggaattctctgttacaacaaataaacaatagcgtattaagtcacgattactacatagatacacaaatgacaaatttcatcttacttgaaatacggagtcatatcatccatatttnatacatatagagcanagcatccaactctttctcgcgctcgggatgatattcggtggatgcttcgacagtcttgccctcaatc

SEQ ID NO: 26254 - DNA, 413 bp, Zea mays
  unsure (1)..(413): unsure at all n locations
taaccttgtaacgaggataagctacctttgttccaaaggttgatggtccttaagtctctttgaaatctttacaggacaatgcttaaaatgtttgcaacatgctatcataagtgcataaactgtcttgagcatcactcatatactatgacacaatgcactttactttctctatgatatagactcgctctcattaacctaattatgtgcccttggtatttaaggccaaaatatgtattcctctcaaggcacatatttaggcggagaaatctatattgtatagaactatgatcatgcttaattgacatatctcttgatcatatctctctcattttggtacagatgcatatatnctattattcccgtaccatgactacgactaatatgtattcaagcatatctctatgctaagtcgt

SEQ ID NO: 26255 - DNA, 375 bp, Zea mays
  unsure (1)..(375): unsure at all n locations
agctatacctagtttgatttgctaaagaagatgtcggtctagatgcatgcttaatggctaagacttgcatgggctggctgtggcatcgccccttagcacatgtggggatgaagaacctccacaagcttctaaagggagaacatgggataggtcttactaatgttcatttcgaaaaagatagaccttgtgcagcttgtcaagcacggaaacaagtgggaagctctcatcacaccaaaaatgtgatgaccacattaagacccctggagctgctacatatggacctcttcggacccgtcgcctatctgagcataagaggaagtaagtatggtctagttatttgtgatgacttntcccgcttcacttgtgtggtctttt

SEQ ID NO: 26256 - DNA, 378 bp, Zea mays
tctttccttctttggcggaagtcgttgtcaacccacatgttctctccatcttctgaagcagcttctccagtgtttgtgggggcttcctggcgaagtattgagttgtaggtcctggccgaagaccattaatcatggcctcaatgacaaattcatttggcattgtgggtgcttgtgcccttagtcgcaagaacctttggacatacgcctgaaggtattcctcatggtcttgcgtacactggaataaggcctgagctgtgactggcttcgtctgaaagccttggaaactggtcaccagcatgttcttaagcttttgccatgacgtgattgtccctggccgaaaggaaaataccatgtctgggccacattccagactgctat

SEQ ID NO: 26257 - DNA, 410 bp, Zea mays
  unsure (1)..(410): unsure at all n locations
gcagctgactggaatgaaanatgatcatgactatagataaggcgatcacgaagctatgtgcaaaaaggcttcggcacaacaacaaaaaagaaccgacttaaagatgaaaagccaaattggacctcgaagaattactgcagctattaataaatgtaaagggcatctatgtaattttacacgggctgcgacccgagtccataaataggtgaacagtactcccgtactgttcacgctgacttggcatacgctntttcgcatcatctttgtactttcaccttatatcagtctgaaagtacatttgtaattcgtttttatgaatntaataacgggaatatattgatgataatgctagtattaatactcgcatattctagacataaatattctgtttactcatttattaacctaac

SEQ ID NO: 26258 - DNA, 325 bp, Zea mays
  unsure (1)..(325): unsure at all n locations
ngaaaagtatctatatacagtccgaaagattgaagctttcttcgaaagcttctctgtcaaaaatattcctcgtggagaaaatgaatacgctgatctattggccaagtcagcagcccaagggctggctataccttcgaaagtatttttcgaaacaataaaagcaccttcggtcgagcttcttgaaagagcaatccttaatatatccnctggttctagcgaggaatggagaactgagatcgtctctttccttcagggtaattttctttcagacgacgaagcttataacaggagaatagaagcaagagctcgaccatatgtcataata

SEQ ID NO: 26259 - DNA, 460 bp, Zea mays
  unsure (1)..(460): unsure at all n locations
tgcagcatgcaagcttgccttcgcctcagtatatcacccgcagtccaacggtattgnggaacgcgccaatggaaaaaaattcacagctgtcaagaagatgctcctcgacgaataaagggcaggtggccgacttgttacctgaagcggtctgggcgctaaacacgactgagtgcatggcgattgggttcacccctttccgccttctatatggatcggaggccatgaccccacaagaaataaagcatgggtccccgtgaacagttgcgtcagctgtccccgatgtggaccgacccacttcgaaggatcttatcgacggagaccgcgtcttcactctacatgctctaaataaataccaagcccagacaaaagcatggcgcgacctcgcagtcatcccgcgggaattcagcgaaggggacctcttactcgtctgaacagcttggacagagtccaggggcaagct

SEQ ID NO: 26260 - DNA, 434 bp, Zea mays
  unsure (1)..(434): unsure at all n locations
tactcaagctngaagccatggtaagtagcataggctaataatatacgaattgactcaagcctagctacgggtgcataggtttcaccanaatccataccttcgacttgtgagaatcccttggccacaagttgagctttgttccttgtcaccacaccatgctcatcttgcttgttgcggaagacccatttggttcctacatcattttgattaggacgtggaactagatgccatacctcgttcctagtgaagttgttgagctcctcttgcattgccaccacccaatccgaatcttgaattgcttcttctaccctatgtggctcaatagaggaaacaaaagagtaatgctcacaaaaatgtgcaacacgagatctagtggttacccccttatgaatgcctccgaggatggtgtctacggagtgaactcgttagattgc

SEQ ID NO: 26261 - DNA, 433 bp, Zea mays
  unsure (1)..(433): unsure at all n locations
agcctggtcattntattgctaactgtcccgtcaatgatagtgatcacgatcacaggaacaagagggagaagatgaataactataagatagctaagggcgaggcgcatctatgcaaggagggggatttggattgctcctcttccgactccgacaatgaaggactcgccgccaccgccttcaacaagtcatccctcttccccaacgagcgtcacacatgccttatggcaagggagaagaaggtatgtactcgaaactctacttatgcttcttcaagtgaggacgaatctagtgatgaggatgaaatagattactcatgtatatttaagggcctagatacaaccacggtagataacattaatgaattgattgatgccttgaatgataagaataggcttttagaaaagcaagatgatctgtcgtatgaagaacatga

SEQ ID NO: 26262 - DNA, 251 bp, Zea mays
tgtctgactctgctagaaaagctgctgctgagatgaagctgagtcttgatgaagagaagaacttgtggtttcatataccgaggcctacatacctacacataataaatgccagagagatgcctgaaggtctgtctgaagatactggtgaccttgaatattactatgtggacagcggtggcgaagactcctaagatcgccctggcgagcaagccacttatattatggtcgatctgctatcaaagagaatcatc

SEQ ID NO: 26263 - DNA, 406 bp, Zea mays
agcttccctcatactcaccgacgcatgcaattggattgagaatcctctggtcgccgggaacgcgaccacctagccgcaatgctctcggtcaccgtggccagagctcagtagttggtcgttcgtgcaattaggttaggggaaatgctcgagctagctccgattcggtgtccaccgctcgggagcgccggtcactgccccaatcggccggtacagtggctcgccggagcttctccgtgcgctgccgtcgtctgggacctagccgtgcgaagagatagaaaccggagggcctctttgtgaagtgtcagcgactcctcaaaatagtgaaagggctcgttcgctgttagacaaagacgcgagggtctctgcgcataacagccatggcgcgggcgcctattctctctggact

SEQ ID NO: 26264 - DNA, 373 bp, Zea mays
  unsure (1)..(373): unsure at all n locations
tanagtcatggtaagtagcataggctaataatattcgaattgactcaagcctatctacgggtgcataggtttcaccgaaatccaaaccttcgacttgggagtatcctttggccacaagtcgagctttgttccttgtcaccacaccatgctcatcttgcttgttgcggaagacccacttggttcctacaacattttgattaggacgtggaaccaaatgccatacctcattcctagtgaagttgttgagctcctcttgcatcgccaccacccaatccgaatcttgaagtgcttcctctaccctgtgtggctcaatagacgaaacaaaagagtaatgctcacaaaaatgtgcaacaccagatctagtggttacccc

SEQ ID NO: 26265 - DNA, 429 bp, Zea mays
agcttatctgtccgctgggggacaagcacctatttgaagaccgcgggaatgtcacggatcacaagagataatggagtcagtcatcggtatgcggcgtcagagggacgaagatgtcgtgcccaggcttctgcggcaagccggcaacgacgcaagaatgtgctaaatgggctatgtcatacattagctggggtcggcctgtttggaacgatatatgtgtgtctctgtaaactgaggaggacatggttaaacacataacagaaacgtttcttctctgcctcgtctccttccttgctgccgtccttaccttttcttcacgaagtctggcattgctgcgtggttctcttctgcagcctcgctaggcatctgcagcttcgctaggcatctgttacatgcccctgatggccaccaccgtaaagtccgcggccgatc

SEQ ID NO: 26266 - DNA, 407 bp, Zea mays
  unsure (1)..(407): unsure at all n locations
gcttcccaaccttagcaattaaattggcattctcatttctaatgttggaaatattatcatggctagtgcttagctcactagttatttttcgcatttttctacttctagagcataagcatttttcactttaacatgcttcttgttttctttaattaggaagtcctcttggctatccaagagttcatccttatcatgaatagcactaatttattcatttaatttttcctttcgttgcatgtgtaacttggcaaaaagagtaaacaagtcatcctcattatcactagaattagcctcatcgctagatgttgcatatttagnggaggatttggatttcaccttcttctttttgccgtcctttgccatgaagcattttgggccgacattgtggaagacgagccctttgttga

SEQ ID NO: 26267 - DNA, 321 bp, Zea mays
gagctgcactgacagaaaccttttgttctactgaaaacatttcacggttttcatccatcacatctactgtacctactacatgctagatgagtccaggcacattaggagtatactcgaggaccttaagcactgcatggtgatataaaacattaagggcctgagtataataatcatgagatactgtaggccttcttgaaggaccatgaatgccatagtgggatatgttacaccccttaggaatgaattttaatggaggcaactgcagccataacatctttataacacaatgatatgttattatgaaaatctgaaagatacatt

SEQ ID NO: 26268 - DNA, 454 bp, Zea mays
agcttcaggtctttagccttgcaacattgtgtcaatatgacccgcaacaatctgagaatcagttttaaggatcgccctcctgatccccatcgcctttagtatccgaagacccagaagcaaagcttcttactcagcatatatgattttgtgcagctgaagtccagtcttgctgcatagctagttttatccttggacggtgaaatcaaaacagcatctgctcctgctccgaacgttccccaagagccatcacaaaacactgtccaagcttcaggatctttattcgcttcttcgccctgagcccttggcgtccagtctgcaataaaaatctgccaatgcttgagactggatcgaggatctgcgcacatactctatgttaaattcattaatctcctcagcgcatttttcacttctgccacgagcttctttatttctcatgatatctttcaacggctgt

SEQ ID NO: 26269 - DNA, 341 bp, Zea mays
  unsure (1)..(341): unsure at all n locations
gatactcaactcatacttgagcctctagacggatctgtaagagtaaaagtgtgtgacttattatcaaccacttttgacggtgtttgcacatcacaattctaaacttgatgattgttttctggtaatttgcttggatcctctacatggtgaggattcctttagtctctatgcagagctaatgacatcagaagaagttttcttgtcactgcttataagaaattaagtacagaagaaacagctaatgacttctctatcatgctggacaacatagaagtcgatctcccatgggaaggttccctctttgcatactctagntggtcagaaacactttcaaatatctg

SEQ ID NO: 26270 - DNA, 390 bp, Zea mays
agcttggatccagtcgaactcacgtcccacccggagtcttcgagcaagaaattctgcagccgagtatctcaatggatcaaacagaagagtgcaacatcataaatcaacccgagtcagactctgatgactggaaaaggctgattattaagtacataaagaatgaagaagaaccagacgacaagaactcggcagagcgcgttgccaggcagtcggctcactatacactcattggggaggaattgtacagaatgggcgcatcaggcatcctcatgaagtgtgttctcccatccactgtgaagcaacttctggaggaggtccatgcagggcaatgtggaatacatgcagcatccagaacactagtcggaaaggttttcaggtaaagattctatt

SEQ ID NO: 26271 - DNA, 397 bp, Zea mays
tgtcatccttaatgctatggcgtctcccattatagagcatgcttctagatgtagtatatttgggggtacttctagaatgtaccttcttcttcttgccgtcctttgccatgaaatatttgtggccggcgttggggaagagaagtcccttgttgacggcgatgatggtggcgtcctcgtcagaggagtcggtggagctctcgtcggagtctcattcccgccccatgtgcgcctcgccgcccttcttcttgtagtactgtttcttatccattttattcttccccatcttatcgtaggccctgtcattctcacttgtatatggacattttgcaatgaaatgaccggacttaccacatcggtagcacaccctcttggagcggggcttatagtcattccccct

SEQ ID NO: 26272 - DNA, 315 bp, Zea mays
tgcatgtcaacctgaagacatggagggcgacatagagtctgtctcgttttagaccaccttcttgatcttcttcttcttgtcacccttccgatgcgtcttgttggaggaagaggattcctccttatgcttgtggccgaactctctcgaaagagttctccctgagcttgcgggcttgcagcccgtcatgatctccctcttggcgtgttctcccgacatcacttcgagttcttagactctaatgaatcgccggactctgataccaacttgaagtcacctagagggggggggggtgaatacgctcagttctgaatctta

SEQ ID NO: 26273 - DNA, 72 bp, Zea mays
ggacctcaagcactgagctgagcttttttattctgtgaaccatccttgtccttcataaacgatgttcactcc

SEQ ID NO: 26274 - DNA, 268 bp, Zea mays
ccgggacacgcgtattgaataccgacgtccgccaatgaggaagttacctgtcggcgattgatggcgcgaaggtagctgtccactctacgcggcagatcaccaacatccgtgaagaatctccgcgacaccgtgaacccctccctttcaattgcgccctcgtacaacttttacgtgagcaacccaagctttgggttaccagattggtgcctgaatcccgctaccggcggctttctatggtggcggcgatggaattctctccttatctttt

SEQ ID NO: 26275 - DNA, 403 bp, Zea mays
  unsure (1)..(403): unsure at all n locations
tgagtctatcatcttgcanagaataattgatgctcaaaatgatattgtgggtatgaagcacatacgggagaagataaaggctggaacagccaaatgtttcaaagaagacgatcaaggtgtgatatggttcaataaccgcataatagtgccaaagaatgaagaactccgccagcaaatcttagatgaagcacatcttagtcgctattctattcatccgggaagcactaagatgtatcatgatctcaaaccgcactactggtggacgaagatgaaaattgaaaattgcacgctatgtggctaggtctgacacttgcagacgtgtcaaagccatacacatgaaaactgctggtccattacaatctttgtcgatcccaacatggaaatgggaagacataagtatgga

SEQ ID NO: 26276 - DNA, 397 bp, Zea mays
agcttaatgatgcgtcacgatgcccgatcttcacgacgtaggatcaatcttcagatattagcttcgaagaagccaagataacttgctgcaggcagcgataactagtgtaatctgacaaataaaactcgaagccaacaatcgtctttaaccggcaaccagaatcgaggattcacccaaccacactctcaaagaaccaaccaacacagcctacaatcaatcgaggagatctcgaatggagaaagagcaccacttggaagcagatgaagccaccgcttttgcaatcccgcgatggaattcacaaaaagcaaggggtagagatcactctcatatttgtagcacacagctgaaaaaagttctgttttagataataaaagctgcttacatcgaaacatagggg

SEQ ID NO: 26277 - DNA, 329 bp, Zea mays
tcttgtcattgcctcacagtaaggacacctgacaccactttatgtcaagaaatggaaaagttgaatatatggatagtacaacaaggaactctggcacaattgaagcttgagtcagttcttctaccaaggattattgatgctcaaagaacagataagggtattaaatatattcatgagaaaatggaagccgacaaggcttattgtttttggaaagatgatcaaggagtaatatggttcaaagaccacatagtggtgccaaaggatgctgaagttcgtcaacaaatcctggacgaagctcatcttattccgtattccattcaccctggaag

SEQ ID NO: 26278 - DNA, 441 bp, Zea mays
agcttagttaatgaaccatgaacaataatattctattactctttaattgcagttagccagttacttatcaaagtgggattcttattacagctgtgggacattcttgtagagaacaattatgacattatggttctgttttatgcctatttttctaccatcattttgcctttgcattatgattgtgtggtagaagaaattcaacggctccatattggaatgtttctatggaatttcactgtaggcagacattatggaggtccattctccattgaacactctatggtgtcttgaggctgttacaaactagcttgaattgtactgtttcaaaactaaacctgactgatgtagatgtcttcaagtctcggagcttaaggcttaacattagtgtacacttttatatccgactccctataatatcattcatgaccactatgccacaca

SEQ ID NO: 26279 - DNA, 344 bp, Zea mays
tctacacatatatatgtcgtattaattacttgatccatctctaacgagctatggctctagtagtatcttggactcgcagtcaggattgccataacactggtgtccacgctgaggtgagcggttccgatgctgagtcccaacgggagcggcggaaccatcatacatataacgaggttcgcgcgcgtcagtctgtacagggcgaactcacacgagccctactctattcgtgtagtgcttggtccacctccgtgtttagcacaggggctaggttgactgtgctgctatatctaagattgctcgtaccgacaggagagatcatcgcgccccctgtgcttgcagatgga

SEQ ID NO: 26280 - DNA, 436 bp, Zea mays
  unsure (1)..(436): unsure at all n locations
agcttgcccgaattgtagactctcttatgtgttcttgcccctatcattntcatgaacttcaggcatctcacaactcattatgcatatctagttaatacatgttggagtgaggtaaatgtttgtccccatctctttgcagaaatggtactgcatcctacacaaatagataatatgtgatattatattcttcctaaagtacttatattgatgcgatgaagtgaaatatatatcttgtgattgacttacagagaaaacaaatgtaacttatgaaatatttaagatcttatggcgtagccacctatgcatgtcaatgaatatacaatgagttttgtcatccttattccaattgaacacttcctttataacatctacgaattccttcactactaacatgttccaatgatggaacctctattacacaccctctaatacctga

SEQ ID NO: 26281 - DNA, 472 bp, Zea mays
  unsure (1)..(472): unsure at all n locations
tntctgcacatctttcataatgtactacaatcaagctaagtaaccaattgaatgcttgcttgaacacatagaagacaagaatgaaagagcatcacccattggtccatcgaaaagttcaatgaaagaaacatcctaataagaaactataaggagtaatagctaaaaactgtttaaacaaatcctattgtggaacagttgattcacaaaccttttgcaagctaccaatttcactagtgcttgtttctgctcctctgcttcaacataagataaattgacctgaacatgagataaagaacaaaaagaaaggtaagggctacaaatacagctgacaacataaaantaatgcattgtacacattttagtatcaacaagatattagcatataacatacatacctcataactacctagaccatgttgtttatcacaatgcctattaacacagatgaatagccctgcaaagagcatattct

SEQ ID NO: 26282 - DNA, 442 bp, Zea mays
  unsure (1)..(442): unsure at all n locations
agcttggtattgtgatcccgacgganacgatctctctttggcatctgtatttgcatgataccctgcatactggcatagattgttgaacacttgggcatactggagtactgtgcggttgccttgggtcaacgcaagatactctgtcattttttgctccattagaccttctggaatgtggtgtgccctgaaagctatcttgaattcttcccataaaactaggtgatctgctgggagcatggcatggtgattgacccaccatagacgagcagatcctcttaattgttgtgcagcaaatctaaccttgctttcctccgggaaatatgttataagtagagtgaatttggactcattgatgtgtattcaagcatcagcgtccaaaggttcttccgttttgtggaacagaggtggttgggtactcaagaaatcttgatagcttgccact

SEQ ID NO: 26283 - DNA, 339 bp, Zea mays
tcaaccatctcacgacttgcaagattatggcagctccctccatcaatgattaccataactactttgtcttgcacttttgctcgcgttcgaaaaacattatgacgctgtccaatatcagcttctctcatttgaacactcaagatttgtgtaaccacatgagtattaccatgctcaaattcacatcccgtatgttcttcaattaatcaatggcatcatcattgcctgcctcagcttcctcatcactatctgatgtatattctccatcatcagtcacaatgatcacacgatcattcggacactcttcatgacatgacacgacctcacacttgaaccctgaat

SEQ ID NO: 26284 - DNA, 382 bp, Zea mays
agcttgtgaatgttcttcatccccacatgtgccaagcggcgatgccacagccagcccatgctagtcttagctattaagcatgcatctagaccggcctcctcttttgcaaaatcaactaagtaaagtttgtcgtttaatacacccttaaatgctagagaaccatcacttcttctaaagacagacacatctacatttgtaaaaagacaattatatcccatattgcatagttgactaacagatagcaaattgaaccaagagactcaactaaaaacacattggagatggagtgctcattagaaattgcaattttacctaacccttttaccttgccttgaatcccatcaccgaatataattgaatcctgagaatctttattcttgac

SEQ ID NO: 26285 - DNA, 440 bp, Zea mays
  unsure (1)..(440): unsure at all n locations
ngattncattctagacttgttatgactatccttgatactctaattatccgcatctaacacctggaggaccatggccatcactagccatatcaggccaaacatagtcgactatgggcgcccctggcctatccctggtcatttgtggcctatccctgcttggttgctggtggtcaaggcaagattcccctagttcccttgccacgactacctagtgtctacgtatggcatgtccatgcccagctgcatttgtggtctcctatggcctagctgaaagggaaatgtgctcttggaccatttctaagtattttagtgattaagtgtccaacacaaatgggtatgtgttaaactatgccaaatggtggacaaagtgcaaatcaatacaatggtatgattctagacttattacattgggttttgtgtactaacatatatggttaagt

SEQ ID NO: 26286 - DNA, 423 bp, Zea mays
tctaaaggagttggagcagccaactcgcttcagccacccctttagcaacatctctggtactcaacctcaacactggagcaggagactacgggttgtcgcttggaaaaccaagagatgaggttggccccaagaaaaccgcatagcttaagttagaccggcgggagttcaggcacccgacctattcgagtgccgatgtagatgattagctcgtgggtggaggaacgctatagatagagctcgtagtcgacaataccttggatcactcaagtgtgggtcacgagaatcgtgcatgtagagaacctgctggataacatacatgatgtcaggcctgataaaggtgagatattgaagagtgtctgctagactgcggtatgcagtactgacacgtgcaacgttgtcgaagagcttggcttgagtgtcagt

SEQ ID NO: 26287 - DNA, 454 bp, Zea mays
agctctggctgtcttatgcggttagcacatctaaatctaattcctaaatttaacttggtcaaaaagtataagtgccatgtgtgtgttgaatcaaaacaaccccgcaagcctcacaaggctgctgaggcgaggaatctggcacctctagaacttgttcattctgatctgtgcgagatgaatggaattttgaccaaaggtggtaaaagatactttctcacttttatagatgactccaccactatttgctatgtgtatctattaaaaacaaaggatgaagcgtctaattattttaagacctataaagctgaagttgagaaccaacttgagaggataataaaacgtttaaggtccgatcgacgtggagaatatttctctaatgtgttcgatgagttctgcgtggaacatggtattattcatgagaggacaccgtcattctcatcacaatccaatggga

SEQ ID NO: 26288 - DNA, 299 bp, Zea mays
aatataacttttatcaatcactacataaacatcgatttctccagcgcccatttgcttcgagcagatcaaagaacttcgtgtttcgatagcaaaatttaccaccaaagttctcatgtataccatcctttctatcctttgtctgatattgcagctcgtgaacttcgcaaaagctgtcaacaaaaggttccatcgcctgtcttatgagtgcccagatatatacattaagcctaacgaatgcgtatgaattaatcggtgaaaatagaatccaaatattttcaataacctctgcataatcccat

SEQ ID NO: 26289 - DNA, 424 bp, Zea mays
  unsure (1)..(424): unsure at all n locations
agcttagcttcacaattcttcttttcttgctcaaagctntctgattatcggaggagttcatcgcttaatatggcaatttccgcttgagcttctgccaatgaactctccattgtttgaagaaggaaatctttcttttctagagaaacttcatggtctttgattttcttttccaagcccttgattataatttcattctttttatctttgaggtcttgttgcattctcaacgctttgcttagcagcatacgctgtgcaaaataaccttcaccagaaatctttgcttcatcacaaaacagtaaaagctgagggaaaaactctaccttataaatggaatagaataagctgtcgacgatatgttgcgatcggtatctgctaatgttatcttcaagcttccgaaaaccaacactattcgatagagtgctga

SEQ ID NO: 26290 - DNA, 316 bp, Zea mays
  unsure (1)..(316): unsure at all n locations
tagccgtaaccgagcgcaagatggtccttcgcccagattatttataattggncgagcctatctactgaccgcgacgcccgaatccaaacgccggcgacacaattagcggatgaaggaaccgtccgccgtgaaagctgctgagctggtcgtctgatctacagagaacactggaccatggcgcttctttagtcaattggcccgacaggcaacatttgaactcgaatcttctctcatatcttttgggttctaggcaaagatctgataacagttatacagccccatccagctatactttggtcctaggattcctacaaaa

SEQ ID NO: 26291 - DNA, 363 bp, Zea mays
  unsure (1)..(363): unsure at all n locations
nacttctatagggagagcacattntatgattaacaaatgttcattctgagaaagacaggatttgtagcgcatgccatgcggtgaagcatgttggagtccatcattcacacaagaacgtcatgacgaccgacaggccgcttgagctactccacatggatctattcgacccgattgcttacataagcatcggcgggagcaagtattgtctttgtatagtggatgattattctcgcttcacttgggtattctttttacaggaaaaatctcaaactcaagagaccttaaagggattctcgagacgggcatcaaatgagttctgcttaaggatccagcacaataagatacgactacgggacggagttc

SEQ ID NO: 26292 - DNA, 313 bp, Zea mays
  unsure (1)..(313): unsure at all n locations
tgaagttagcatggcccctgggggacagtgatatcggaaaccttatgacaaccgatttgactaccacccataccctatggaacaaggatacccaaatttgcaaattttttgggtgaccagggtaagatcacacattagcacataggcccttcctaactcagttagacgaattggctgacatagaggcgttttacgttcgtttattctcattgtctcctacagggactacattggcatgatacgtcacactacctcctaactctatattttcgtgggggatttagagcaaacattncatgatcattttatcttc

SEQ ID NO: 26293 - DNA, 360 bp, Zea mays
  unsure (1)..(360): unsure at all n locations
gataatccaaatcgcgctcaacggagattaagaacacgccggcgcacgtggaccgggttaaccccttcaccatattctgattcgttgcgcgcatgggctctgtgtcatcccgtgaagctccttgtgcccattaattgaactctcccgccggggtttggccggagcaggcgccgccgtcgatccccgccggctgtgttcgtggccaggggagcttcgatcacctttgacgccgacccgcacatctacgtgaccgtcgngaccttctgaacaccatcgaccaccacgccggacctccctcgtcgctgtaagccgcgccacccttttcttcccgcgggtactgttttagttaaaggaacgact

SEQ ID NO: 26294 - DNA, 335 bp, Zea mays
ttcggctgccctatcatttcaagttcaaaaaacacttcatagagccttgccaagaatggctggattcaattgaagttatgtgcaacaagattttgggcaattatacgaaaaaagaagatcagttgatgactgcatccttctgcacccgaccgaagcgaagattgaatcgggtaatggatgccctgaattttgaatatccagactatgagcgattgaacaagggtgccgaagggcataaaagaaaaagaattgttagtgttgtgggcagacatgctgctataatggtgaaagaggatgaagaaatcctgaagaagagaaaattaagccctgagccg

SEQ ID NO: 26295 - DNA, 449 bp, Zea mays
ctcggagaccaatactctgtgatagagtaccgataacctttgctccggattgatctcggacgcagcctaacctttcatcgtcaacaccgccgaaaagtagtgcccctggttgatacccgcaggatatggcgtattctctcagctcttctttctcagccttcgacaactctttcccaattaagttttgaaagttaaagtctttttcttccgaagcatcttcagttatttccttctccttctcaggtactatagccatggtttcttcagcggctgcagcagcttcttctgtggccatgtccagaagtatcttatcaatgttagaaagtgtgctttctaagttgcatcttcacacgttcagcttccgtagttgctgctttgatagctgtaccgctctaacagctggtgctttgaagcaaagctgacgtggagctctccatagctttgcacag

SEQ ID NO: 26296 - DNA, 365 bp, Zea mays
  unsure (1)..(365): unsure at all n locations
agctatntcactcgctttgatgacggtcatctcaactaggttatacaatctctagacgcaatacaagatatttaaacatgccatgcaagcttgacaacaccatttgacatcttacataaaacctctgagatcaagtatatgtaattcattcctcaacatgcaatagcgggtcttatcaagcggcttagcgaacatattcgctatttgatcttacgacctcactcattccaaaaagataattcctttaacaacacgatcatctatgaagtgatgaagacttccaagtgtctgaccgcgagacgtccttactactattacaccataacagctcatcattctcacacacgaggcccctcctttaacat

SEQ ID NO: 26297 - DNA, 387 bp, Zea mays
  unsure (1)..(387): unsure at all n locations
ctgaggcatgcaagcttatcaagtctactttcatatggatccttaattatagtcatatctgntctgacgccgccgcaatcatcgttttcttaccgacacatttcctgccttttctgcccatggtgctgcgtcaccctattttggcccaatgggtcgtgtatcaagttaggtgcattaaggacgcatcctaaggttgcagcacgaccccaatacccttgaggtagatctcccatgtttatataacccctagccgccaccaagaacagcgggttttgtttagatcaagtttagctctcgctacttgcttgccagcgcgcgtgctagctaaaccgctcgtcttcttgccttcggaaccccaccatattggacgtcgagtcttaaacctac

SEQ ID NO: 26298 - DNA, 437 bp, Zea mays
  unsure (1)..(437): unsure at all n locations
agcttacccatgatgaggcatgtgatcagttaaaaggtcctctatccgcaagcctacatcgagacgatccttaatcgactcagacggagacactacaccgagactttattctcgtgcaagttacccgcccggtcttagctttatcatttcaacccaaagtttgcgacccgacagaggtacatcttttccaatgttgaacccatcatggccatgatggatccaccatcaagttntatttttgaaaatcatcccttcccacttgaagcatcatcctttgttgaaaacaaaacattttgtttttctagagcaagactaagcatcagaaaaaccttttttaaaaactggtgatcaaggaaaagtaatcaaacttctaacgaggaaatgtatcaattgtttagcacacaactcctatcacctaatgcatcaagcaagtgaga

SEQ ID NO: 26299 - DNA, 478 bp, Zea mays
  unsure (1)..(478): unsure at all n locations
ttacagtcacctgangcatgcaagcttgtggaggttcttcatccncacatgtgctaagcggctttgccacagccagtccatgcaagtcttagcaattaagcatgcatctagactggcctcttcttttgtaaaatcaaccaaataaagtttgccgtctagtacacccttaaaagctagtgaaccatcacaccttctaaagacagacacatctacatttgtgaatagacaattatatcccatattgcataattgactaacagacaacaaattatatccaagagactcaactaaaaacacattatatatagagtgctcggatgaaatagcaattttacctaacccttttaccttgccttgggtcccatcaccgaatattattgaatcttgcgaatccttacttttgacgtatgaggagaacattttcttcctccacgcaatatggttgtgatccgtttcgataatccagttgaaccccgga

SEQ ID NO: 26300 - DNA, 306 bp, Zea mays
gatccttaagtcacctgccgcatgcaagcttaatgcatgcgtgtggaatggatatattctacgctaacgtgtctgcttggcttgagtgaaagaccatgtgcaacggtaggaaaactggaggaagcgcgcagttactggcggcatggctgttcggccttgacgtcgggctgaaaacaaggtgttctccatggggcacggtcctaaaacggatgctctggcacaaacatctaaaataagctaatttctagcatgtggaaagacaccgaacatacagtgtatgttcttggtgaagggcacagtggaact

SEQ ID NO: 26301 - DNA, 436 bp, Zea mays
agctctctcaatctatcttgttgcttattatatatactctaacttatataattggctcaactcaacatttaaacttttcattcccttttgcttattttcttgaattttgctcatggggttcacttacggttcttaattacggttgcacattcttatcttttcaaagactcaattgttttgatcatgacacttttaagcatacttggtgaactctttctcacttaagttattttgatgctcatgcttactttgatttacataaaatgatggtttttggttgggcttttcaagagacaccctatgtgacactgtggtgtcacaagttattgcctcccatggtttgtattaataatactcagcactcatatattatgttctagtctgcaaatatataactctgtcttactcttcaataaaagtaagtcatcgcacttgc

SEQ ID NO: 26302 - DNA, 447 bp, Zea mays
agcttcggcaacaaaggtttcagtgtgcacttctgaagtttcaacaattttcttcggagttgtgcttgaagacttaattgtctccaaaacatccagcacattaaccatcctttttcttttgggggtcactgctggacccttttggctttttgttgcctcaatttttgttgaaggacttaaaacttctgatgtctttgtttcttcagccctcggttcttctattttttccgtcgctggcacttcggctagcccttcaatatttggcaggggggttggctctttagcttcggtggccgaagaggtctcaccgataaactcaggcactgtggccggttcaatataacgtggccggtgtgtgagaacctttaccctttttctcttcagcgccggctcgctaggagcggctgaagcagtttccttcggagaagatgtattctttcttttttt

SEQ ID NO: 26303 - DNA, 431 bp, Zea mays
agcttaccgcacttgaagcatgatcgcttttccttggtcttagtcttgcttggctgtccctttcgaccttttagcgccgtcttgaatcttttgatgatgagggccatctcttcatcattaagaccggcagcctcaatttgtgccaccttgctgggtagcgcctccttgctccttgttgccttgagagcaatgggttgaggctcgttgatcggaccattcaaggcgtcgtcgacgtatctcgcctccttgatcatcatccgcccgcttacgaattttccgagtacctcctcgggcgtcatcatcgtgtacctgagattctcacgaatattgtttatgagatgaggatcaagaacagtaaaggaccttagcattaggcggacgacgtcgtggtccgtccatcgcgtgcttccgtagcttcttattttgttgat

SEQ ID NO: 26304 - DNA, 435 bp, Zea mays
  unsure (1)..(435): unsure at all n locations
agctnttaaagggagaacatgtgataggtttaactaacgtgcaattcgaaaaagatagaccttgtgcagcatgtcaagcacgtaaacaggtgggaggagcacatcacagcaagaatgtgatgaccacatcaaggcccctggagctgctacatatggacctcttcggacccgtcgcctatctaagcatagggggaagtaagtatggcttagttattgtggatgacttttaccgctacacttgggtattctttttgcaggataagtctgaaacccaagggaccctcaagcgcttcctaaggagagctcaaaacgagtttgagctcaaggtgaaaaatacaaggagcgacaatgggtccgagttcaagaaccttcaagtggaggagtacctcgaagaggaacggatcaagcacgagatctccgctctctacacaccac

SEQ ID NO: 26305 - DNA, 299 bp, Zea mays
agcttctcatgtggggacttaatgggaattctgaattctagaattctgaaattcagaccttgagccaaagatcagggatgttcaccttgatccctaactcgaatcctaatggtcccattgacaaaatcgtgtctaactaacccctctgtcgcgtgccaaaagatggcattgggacgcgagccctatacaccacaaaaccttatatttgtctcgggttcgggcacggagacagacctgatttactgggtccatatctctgcaaccagtatgcaaaatcctatgacccccacaccatattg

SEQ ID NO: 26306 - DNA, 390 bp, Zea mays
  unsure (1)..(390): unsure at all n locations
agcttcngctatggttaaaatttttagcagcacaacagtgcattggtaatgaatgttgtggtaacttcacacctacccatctgtttatatagtgctgcaggtgggaaggtgaatcgccaagttgcctgcacgcgctgaacagatactcgcacccgctgaacggtggaccacccgacgcttgggaggagaatcgccagaccgtgtgtacctgtcgcatggtgggccacctcgcgattggaatattttaatcgtttctcgacaacgagctcagggaagggtgtttttggaccttcggcattccgaagctttggagatattttcacggatcaagctcgttacgaaaaacgatctagcaccgcgaaggggctactgttgggggtctgcttcgtc

SEQ ID NO: 26307 - DNA, 399 bp, Zea mays
  unsure (1)..(399): unsure at all n locations
cagcttttttataataccaggactctgcggagacatcctacgagcatcttgatcgacgagttgctgaacttgttacacgcatggacgtgctataggctcgtcccccaccacaagctccagtcccacctgctggtgcagtagtgttctctcccgcagaggacgacgacgactatgacagagatgttgatgcatcgctgcgacaacgcctcgcacataatcgacaaggtatgggaggtaatggcagacgtcgttattataatcatgaaatagacaatgatccatatgctaagattaagttctttattccactgttcattggttcttatgatgttgaagcttatntagactgggagatgacggtagaacaaaaatgttattctcatcttgttcctgagcagc

SEQ ID NO: 26308 - DNA, 393 bp, Zea mays
  unsure (1)..(393): unsure at all n locations
agcttgttcatcgtattctaccgaagcaccactgttggttttgcttcgtcacaagaagaagagcttcagaaaaattaaaaaagtcaacaacttcatcaaaaattgtgaggaatccatcaaatggcaagggtacgctccactgccagggttacacgtgacggagaagaagacgaagttgctgaaaccgctccgatttccgaagtgatgaaacggtcggggctggtaatgccggagaatgtttctgacgaacgtgtacctgctgctgaagttgagcangttggtgctgaagaaagtgaatctgaagatgattatagcgccgtgccatctaaacccagccacctggagtttgggaggtccactgttaccaaagatgatatgcctaagttgatgaag

SEQ ID NO: 26309 - DNA, 393 bp, Zea mays
agctttatcaaatggacgtgaaaagtgccttcctaagtggaccaatcaaagaagaggtctatgttgagcaacctcccggctttgaagatagtgagcaacctcccggcttctctaaggcgctttatgggcttaagcaagccccaagagcatggtatgaatgccttaaggatttccttatcattaatggattcaaagtcggaaaggccgatcctactctattcactaaaactcttgaaaatgacttgtttgtatgccaaatttatgttgatgatattatatttgggtctactaacgagtctacatgtgaagaatttagtaggatcatgacacacaaattcgagatgtctatgatgggggagttgaagtatttcttatgatttcaagtgaagcaac

SEQ ID NO: 26310 - DNA, 397 bp, Zea mays
  unsure (1)..(397): unsure at all n locations
agcttctcactcttcacattcaatacaagagcaaagaatacactccaaagacacaatcaaagcatcaaatcctctccaagctccaaaatcaaatcaagtgcttagtgacttgagagagggtgatttgtgtttcttttgttgctcttgttgcttagattgctttcttcttctcactcaaaacttatgaagtgttttgtaaagcaagcgagagacacctaattgtgtggtgatccttgcggggtcttagtgacctgtgtgattaagaagaagcacttgaccggtctaagtgactgattgagagagggaaagggttggaatagacccgacctttgtggcctcctcaatggggagtaggtntcttggaaccgaacctcgggaaacaaatcaccgtgttcat

SEQ ID NO: 26311 - DNA, 393 bp, Zea mays
atcttgttataagccttcttctttttctccatagcaggaactttactggaacactaccccacttaaaatgaatgagggtagatctcttgaatcttggggatttgaactccttgaagtaccacataacaagggtgttacgggtccttcttgctgctgttgctgcttgagcaagctgcggagggatgactggcacagggttgattctgggagaaccttcttcttatcttctcttcacttatcttcttttctcttctcacttttcacttttcactgcctctttctttctctttgctcttcccactggaggattctatagatgagtattaccatcatacagaggaggaaccaaagactatgaaccatgtgcaacagtcttcaacccaagaatcacca

SEQ ID NO: 26312 - DNA, 393 bp, Zea mays
agctttatcaaatggacgtgaaaagtgccttcctcaatggaccaatcaaggaagaggtctatgttgagcaacctcccggctttgaagacagtgagtatcctaaccatgtctataagctctctaaggcgctttatgggctcaagcaagccccaagagcatggtatgaatgccttagagattttcttattgcaaatggattcaaagtcggaaaggccgatcctacactcttcactaaaactcttgaaaatgacttgtttgtgtgccaaatttatgttgatgatattatatttgggtccactaacgagtctacatgtgaagagtttagtatgatcatgacacagaaattcgagatgtctatgatgggggaggtgaagtatttcttaggatttcaag

SEQ ID NO: 26313 - DNA, 360 bp, Zea mays
ctcaacagagcctgccatgccgcatggcacccatttgatccagcccctatacccatgtataaccaagagcaattcacacctccatatatccgcactctaggaacaaccatttgatggtatgatcatcttacggattgttgagtctacaaagttacactggatacaaacacatatgtagaaatctctacgtaacacaacggttccgaataatatctcatatctgttagccagcctcaacatctctattgatttaatatcaactaactatcttaagcctatgcgaattatggaacgtaatccacaacatatattttaagaacattgttcggcagggatgcctgacctctactacggagctcg

SEQ ID NO: 26314 - DNA, 358 bp, Zea mays
atatttctttattattcgggagacagtacaaaaaaattttcttcccgctgccattgaatactaatgcccccttcggatatttcagtttttgggcataatgctgagcttctcgttcttcttccttataaaggtcttttcccgaaacatggcggatgatgtagtcaatgctctcttttaaagcttctggagcaggagttgttatcttttctatcgaaatttgctctgtgaccttttcttctgttgccacttcttcaatgtcggcatactttttctcagctgactttgaatgcccaggatctatttcagtctcaatcgttgcagcttcaacttctatatgcttagtatcagcttcagtttg

SEQ ID NO: 26315 - DNA, 394 bp, Zea mays
ttctttttatgagatggagatggtataaagctttgggatgcttgagagagtcaattcaatttttattaactcaagctatcaatctacagtgatctacatatccaagattgacccaaggttatttcaaattattatgtctaaaactcatatcatctcgggaagatattaatgttgtaggaatcaaaaaaaactaatcccatgtcgaaaagtcaagatctacaacatggaggaaagccaaaggatggtaacaattatgttttcaagtgcaagtatctcaaattatcatttcttatgtgtcttgtgtagttacatagaaaaggaagcactcaaaatgttcttaaaattatgtcaccattcctttgaaaatattcctccatatgggagaattgatatt

SEQ ID NO: 26316 - DNA, 388 bp, Zea mays
agcttaaatgcagaaatcattcatgaaacaagatatcttttaatgcttcaactttgctagtgagattagatacccgtactccctccactttagtttgttatagccttatttaagtgagcagatagattaagttataaagcctacgaaaagacaagagcaaatgaccaagcttaaatcttatttgatggcttgatgcaagtcaagattttcctctagcatgaagatgacggcagtatatggagaatatgcagatagtatcattgataactacactagagcataattttttttgtgaagtggattcaagtttaaaccatttatattattatatacctcgtcgtcagtggtttgcagtataaattaattggctcacatcacccgaatcaag

SEQ ID NO: 26317 - DNA, 377 bp, Zea mays
agcttgcacacatagctcttttgaatacctttgatcatatctcctttatatactatgactaatgtgttttcaagtttatttcaaaccaagtcataagtatattgaaagggaattggagtcttccgcgaagacaaaggcttccactccgtaactcatacttcgccatcactccgagcaactctctcgtctttgggggagaaatgagcatcaaggaaaaggacttcatccttgggggagagagtaaaagctcaaacgcaaaaggacttcgtctttggtataatcttaactcacttatttatgaccaaaggggaagattgcaccacaagggctctaatgattccgtttttggcgattcatgcccacaagggggagaagtg

SEQ ID NO: 26318 - DNA, 323 bp, Zea mays
  unsure (1)..(323): unsure at all n locations
gcgccccggaccttaacacgcagccttatcttttccccacaacggggaagggggagaacccacccactggcaaaaacctaaangccctaaggtaaaagacatataatagacgccccaaaacacaagttgaactgacatttattaccctcggaaaccaaaacactaatgaaaccctgaaaaccctaaaccaaaccctagggcctattgcaaaatagtccatctgggcaaagtgccaaaccaaccccaaaacatctaagcccatgcgcacattcggaagatcacaagcccacccgagtttgggcttaatgcaaaaagcccaccga

SEQ ID NO: 26319 - DNA, 389 bp, Zea mays
agcttaccacatttgaagcatgagcgcttcccctttgtcttggtcttgcttggttgccccttgcggccttttagtgccgtcttgaatctcttgatgatgagaaccatctcttcatcattaagtctggccgcctcaatttgtgccaccttgctaggtagcatttccttgcttcttgttgccttgagagcaagaggttgaggctcattgattggaccatttagagcgtcgtcgacgtatctcgcctccttgatcatcatccgcccgcttacgaattttccgagtacctcctcgggcgtcatcatcgtgtacctgggattctcacgaatattgtttacgagatgaggatcaagaacggttaaggaccttagcattaagcggacgacgtcgtg

SEQ ID NO: 26320 - DNA, 390 bp, Zea mays
agcttatcatatcacagtgcaccagagttaaaaaatgagtgagcaggagtggttggccagaaagcgtgcaaaataagtttgcggtatggccgtatttatacgcttgatgcgttgaaagttgaaggaccccacttgtcattgaatgttgctattctagcaaagggaaggtgttttttcggaccttcggcataaagccttcgttcatatcgcaatctgaatttattatttcaaacaaattaatattgcgaggggctactgttggggaccttcggcgtccgaaggtcctcaaaaacaggatttaacagtatttctgtagtacaatgtgtaaacaggtactctcggactaaagtcggcattgcagcagaccgaaataatacgaagcttgataca

SEQ ID NO: 26321 - DNA, 396 bp, Zea mays
  unsure (1)..(396): unsure at all n locations
agcttctaagggagaacacgtgataggtttgactaacgtgcaattcgaaaaagatagaccttgtacagcttgtcaagcaggtaaacaagtgggaggagcgcatcacagcaagaatgtgatgaccacatcaagacccctggagctgctacatatggacctcttcggacccgtcgcctatctaagcataggaggaagtaagtatggtctagttattgttgatgacttttcccgctttacttgggtattctttttgcaggataagtctgaaacccaaaggaccctcaagcgcttcctaaggagagctcanaatgagtttgagctcaaagtgaagaagataagaagcgacaacgggtccgagttcaagaacctttcagtggaggagtttcttgaggagga

SEQ ID NO: 26322 - DNA, 388 bp, Zea mays
  unsure (1)..(388): unsure at all n locations
agcttttatgatttgtatagatgtgacaaatgtttcccagcagataatgacgccaaattttcagggcatggaccacaacagctaattccaggtcatgagttggataatgctcttcatgccggcgcaactgccttgaagcgtangctatcactcggccctcttgcattagaacacagcctaaaccactgccggatgagtcacaatacacatcaaaggggttttcaatatccagttgagctaataccggagcagtggttaataacaccttcagcttatcgaaagcttcattacattttgaggaccaattaaattttgtatcgttcttcaataaacttgtgatcgacttcacaagcttggaaaaatctggaatgaatcggcggtaataacc

SEQ ID NO: 26323 - DNA, 399 bp, Zea mays
agcttataccacatataagtattgaagtgcagatataaagacgagtaagacagagagtcatgatacaatacagaacagagcacacagatgcaaggatttatcccgaggttcggccaagcctgaaatgcttgcctagtcctcgttggagttagccacacctgggcttggagtctatttcaactccttcctccgtttgcttagatctgtcagtatgacagatagagcctttcactattgagtggggttacaacagaaccgcggctgcttacaaacttcttggcagcacctcggcagagtaacgatacgctcaagaccttgctctagctcttagcagcactattcctctctctaaaggcttatagttgtgccttctacacaaactatagagttacacacaag

SEQ ID NO: 26324 - DNA, 388 bp, Zea mays
  unsure (1)..(388): unsure at all n locations
atcttgtatgaccattggtntagctcatgttgtgctagattagaagtgacatacgattcatatactcactccatgtgccactagctacaacacttatttacttatctatactttatcatctctctccctttttactatatcagtattacccatgtttaagttggtgattgttcatagtcagccacaaactgtatttacaaactaccttcgtcttatactttccctaggcatataaatatgatactaggaatactccaaattaaagttttgcatcgatataatgtatgcagtatgcttgtggaatagaccaattgagcataaaaatgctaacaactataaaagcgcatctagaggaacctattgattgctacctaacaccttgggagca

SEQ ID NO: 26325 - DNA, 394 bp, Zea mays
agcttgactcatgtatccacacattaatccttaattcatttttcccgtctcatggacaaggcatcctccctagatccaagtccatagaccaacataaatcccgttatcaatatgaatgcaatcaattcctgacctcgcgcgagtgctagaaaaatcactcgacttctaccgagatcctgattagcaagcagctactcgacctagcatactagtattcatctcaaaaggaatcctaagttcatgcaactagaggtttcaagcaactcctacacttaagtgcacattgcaatcctacaagcattaagtgtagtaaagtagcatataacaatacgattatgcataaaaccggggcttgcctttaattgttggggctgctgggagatcctcaatagca

SEQ ID NO: 26326 - DNA, 393 bp, Zea mays
agcttgtcactgcctgtgaaccatggtactactgcagttgtccacacactacagacagcagctcaccacgtcaccttacccgaatttgttccaacaattggcaccgttcccctgggcattacgcaaacattgcccatacaacagcataacgttcttcaaaccacaggcgcatgacaacaagctaggtcacacaccaaaactattttttaatagcaccaacaacatgcgtagcaacacgtttgttttaagggcactggcatcaagctttaatagacacatgaattgaacaggtaatcacaaattgacgggacaagcagacacagatctagagatatgattcggactctcttcccagctgggatgatcccaatcagaaacatgtagagcaactga

SEQ ID NO: 26327 - DNA, 381 bp, Zea mays
  unsure (1)..(381): unsure at all n locations
agcttncaaactctctcctctctctctcattcaaacttgagcttgctgagccgagctaccgatctgcagcatcgcatggcctgtggggtgcaagcgtgcaactaagtcaatactgcaatgcatcatcctctctctctctctctctctctctctctgcacagntacgtactgcttctcttctcccctagagagagagagtgtgtgtgtgtgtgcagagaagtcacaagtgcatggccaagggctcttctttggctgtctggtagtcttctgtaactctgttgctccacatggtgtcacatgcaacagtgcctctccgtctccgatccctagccttctcttctcacctctctctctcttctgctcatacacgacaacagtttc

SEQ ID NO: 26328 - DNA, 303 bp, Zea mays
atgctctataatcgagccggaagcatgccagcttgtctaaagctcgactgctgtttcccttgaacagttttctcttggaaggtctgaacatatttgaaatctgccttcatcaaactactcctcgaacaatcataacgatgagcatcttcgtctgggccgtgaggagccaaggtctagaaccaaatgcagaaggatctgcgacatacatgagctattgactgagacagaacccttgtggtaaagagcgatattactaacaactttggctgctacaactttggtgcccacatctgggtgaagctg

SEQ ID NO: 26329 - DNA, 391 bp, Zea mays
agcttatgaagattcttcatcccaacatgggctagtcggtggtgccagagccaacccatgttagtcttagcaattaagcatgtgtcgagttcagctctatcaaaatctactaagtatagctgaccctctaacacaccctcaaatgctattgaatcatcacttcttctaaagacagtgacacctacatcagtgaatagacagttgtagcccattttgcataattgagaaacagaaagcaaattgtagtctaatgaatctacaagaaaaacattggaaatagaatggtcaggtgatatagcaattttacccaatcctatgaccaaaccttgatttccatccccgaatgtgatagctcgttggggatcttggtttttcttatatgaagagaaca

SEQ ID NO: 26330 - DNA, 389 bp, Zea mays
agcttgtagagtcaaagtcaacccaagaaagccgtaaacctatgaaccaacctcgttttcttgctagcttcttcttgaatctcgggggcgagattctgttaagggggttagatttgtaacaccctgaattcgggggtataaaatttcttttctaatatccaccaaattcaagtgttaccctcttcttcacttgcttttcttcttcattttttgtttctaaataatggacattaactttattatatatatatatatatatgagtttttggcatagtaaaataaaatcctggataaactttgattgttgcattgcattgtgtctatgagtgcaaaagggtttttttaaactaaatcgaattatcttaatcttgtttctgaaatttttcggg

SEQ ID NO: 26331 - DNA, 396 bp, Zea mays
agctttaagctgaagatatcgaagcaaatcccaagaaaggggattcaaatcaaaagcacaaataggagataatcgctccagagccaactgcttcctgagtccaatccgaagaaaatctgaagaaaagcattaaaggaaaaacaaaagagtccattgtttgtcttcgtcctgcggatgaggctcacacttgctaatcgattaattaaatattatgttgtcgcattgtactagctatagcagatgcaagtgctacacaaataataatataaaaatatggctgtgtgcataggcaaatggccaaaagcccacaaatctgatccaagcgttgccaccttctcaggtggagcaaacaaagtaaactatatataggactaaataggacaacttcacctaatc

SEQ ID NO: 26332 - DNA, 377 bp, Zea mays
  unsure (1)..(377): unsure at all n locations
agcttcttattgtataacacattntangactaacaaatgttcattctgagaaagacacgatttatagcgcatgccaggcaagaaagcaagttggcacccatcatccacacaagaacatcatgacgaccgacaggccactggaactcctacacatggatctattcggcccgatcgcttacataagcatcggcgggagtaagtactgtctaattattgtggatgattattctcgcttcacttgggtattcttcttacacgaaaaatctcaaacccaagagaccttaaagggattcttgagactggctcacaatgaattcagcttgatgatcaagaaaataagaagcgacaactggacggagttcagaactttcaaattg

SEQ ID NO: 26333 - DNA, 321 bp, Zea mays
agctttttcgtcatgttggacatcatggacaataatcacctgatcttaatgctggacttacagccgtagctcataagaattcatacttgagagagctactcgctggtcttctggaacactgattggaaatctatcaccgatgcaaatctcagtttaccaagattgtttactcatacagagtcccagtggaagactaccccctcagctgaagatgtctcaaaaccttcgaacatatagaggtgagagtgcaagctcgacgaactatatctggccatggagacgtctgagcctgacacgcctctctatgcactgctgcagctt

SEQ ID NO: 26334 - DNA, 272 bp, Zea mays
cgagctctgatccggtgcctccgaatcaatcgagacggttgcttgctatcgtgacctgacgaccctacctgtcccgcgttcatgtttaccttgcgaggataaaaactcggttcggatcatgtgcttctcgcagctcaagagactgcttgatccattgcactgcattgagtaacaagcgtgaatatgatgactagagatacgatgttgattgctgataaggctcgctatcatgtatgagtagatagtccacttttagccttaagaggtcacac

SEQ ID NO: 26335 - DNA, 443 bp, Zea mays
  unsure (1)..(443): unsure at all n locations
ctacgtgcttgacgggagatctaccccgcgactggttgcgcttgctcccatgtgcggaatacatcctccacaccggtttacaatcgtacctgcgcgacacgccgttccccgtattctatggccgcgaccctccctgacttccctcctacaagccgggggcaacgccggtgcctgcgggggccacgactttggaggagcgcgtggagttcctggcaaatatccgtcaccggctggagcangcccaggctgtccacaaacatcattatgatcgtctacatcgtgacatctacatacaggtcggtgagtgggtgttgcttcgtctacgccagcgcccgacggtctccatgctcgactcgtctggtggcaagctgaagccgcggttctacagcccttaccgcgtngtccagcgcatcaacgccgtggctgttccgctggctctgcct

SEQ ID NO: 26336 - DNA, 390 bp, Zea mays
agcttctaaagggagaacacgtgataggtctaacaaatgtgcatttcgaaaaagatagaccttgtgcagcttgtcaagcagggaaacaggtgggaagctctcatcacaccaaaaatgtgatgaccacatcaagacccttggagatgcttcatatggacctcttcggacccgtcgcctatctaagcataggaggaagtaagtatggtcttgttatagttgatgatttttcccgcttcacttgggtattctttttgcaggataaatctgaaacccaaaggaccctcaagcgcttcctcaggagagctcaaaatgagtttgagctcaaggtgaagaagataaggagcgacaatgggtccaagttcaagaaccttcaagtggaggagttccttg

SEQ ID NO: 26337 - DNA, 370 bp, Zea mays
agctttatacaagtttaaacagttcaaggctgaagtagagaatcaacacgatttgaagataaagattgttcgatcagatcgtgggggggagtactatgggcgtcataccgagtatggccaggtcccaagacctttcgcgaggttcctaagagaaaacggtattgttgctcagtattcaacacctggcgaaccacaacagaatggggttgccgaaaggcgtaacagaacgctaatggatatggtaaggagtatgctaagtttctctaacctgccattgggtctatggatggaggctttaaaaaccgctatgcatatactcaacagagttcctagtaaatcagtgactagaactccatatgagttgtggact

SEQ ID NO: 26338 - DNA, 389 bp, Zea mays
  unsure (1)..(389): unsure at all n locations
agcttaccacatttgaagcatgaacgcttcccctttgtcttggtcttgcttggctgccccttgcgaccctttagcgccgtcttgaatctcttgatgaggagggccatctcttcatcattaagtccggctgcctcaatttgtgccaccctgctaggtagcgcctccttgcttcttgttgccttgagagcaaggggttgaggctcgttgattggaccattcaatgcgtcgtccacgtatcttgcctccttgatcatcattcgcccgcttacgaattttccaaggacttcttcgggcgacattntggtgtacctgggattntcacgaatattattcaccaaatgaggatcaagaaaggtaaaggaccttagaatcaatcggacggcgtcgtg

SEQ ID NO: 26339 - DNA, 270 bp, Zea mays
  unsure (1)..(270): unsure at all n locations
ctaatactatctccagcgatctcactatctcacttcctatttcaatcttcactctcactttctatttcaatcttcactctgtagagttttgcacgctcatggagatggcctacacattgacaagacatggtaatctttagaaggtgaacgtatcaagtacgttactcaacaggaaataaggtcaaactctttgctacatgattttggcggttgaattgcccaacacanataatcggactaactagtctgctctagattatcaagtctaca

SEQ ID NO: 26340 - DNA, 390 bp, Zea mays
agctttgttccagtgcacacaagatcatgaagaatacctccaggcgtatgtccgaaggttcttgcgtctgagagaacaagcgcccatagtgcccaatgaaatcgtcattgaggccatgtcaaaggtcttcgaccaggacctacggctcaatacttagccaggaaaccccctcagactctggatgtaacacccccattggtcccacacattggatgttaccaaatacccttcccactaaacttatgcaacacaagaaatgaaaataaagagagaaagtattgcaaaatccggcagcacctcccttgaaagaagcataacaagggggggaaacatggagttcatacaggatataaaagacagataattcacgtagtagaatctaaatgcaaa

SEQ ID NO: 26341 - DNA, 363 bp, Zea mays
  unsure (1)..(363): unsure at all n locations
cgcggcgtgcaagcttcgtgagatattatccggcgctgtaaaaaagctgtatgtggcctctctaatgaagctacgctgtttctcactatatcttgtgccttaacgcgatcttctctttttcacagcattctactgagagtaatactgtatacgcttcttgctccggacgctatatgttgcatgatgctgatgttatgcanaaggaatgtgtgatgttgtggctttcaacatgatctctgtgccgaaaatacacacatgcctgcaatggagcacacaatctttttatatcaacgttgactttactctgtaagcctcccttaagagctatctcagcttatactttcagcggaatcagcgaatatt

SEQ ID NO: 26342 - DNA, 397 bp, Zea mays
  unsure (1)..(397): unsure at all n locations
agctttacgcgtctactttttaaaagaaaacttccccttcttcctagcttttctcttgtctttcttgatcttcaaatgaagctgtaccttcttcttgctaatgatgccaagtggcttcaaaaaggttttagacctgttgtttccttcatcggacatctccacatctgtattcaagagagcacagaacacatcagctgaggaaaaacaagataaggtacaagtgaagttgcaggaagagaaaacaacaggatcccacagaagtaaaagaaaaaaaggcactctgcaatgtttttcaatcaaccatttgaattaaaaagaacggcattcccaagttataaatgttgcaagattatttttaaaaaatcaccatccgtgcanagcatcataaaaactgaat

SEQ ID NO: 26343 - DNA, 382 bp, Zea mays
agcttgtggatgttcttcatccccacatgtgctaagcggcgatgccacaaccagcccatgcaagtcttagccattaagcatgcatctagaccggcctcttcttttgcaaaatcaactaagtaaaggttgtcgtctagtacacccttaaaagctagtgaaccatcacatcttctaaagacagacacatctacatttgtaaataaacaattatatcccatattacataattgactgacagatagtaaattatatccaagagactcaactaaaaacacattagagatagagtgctcattagatattgcaatcttgcctaaacctttcaccttgccttggttcccatcaccgaatatgattgaatctgggaattcttattcttgac

SEQ ID NO: 26344 - DNA, 391 bp, Zea mays
agcttgtgttttctataaagaaagtgggagcgctggtgtatttctagatcctgtgcgtggatgacatattattgattgggaatgacattcctatgctggagtccgcaaggcttcactgaaaaagagtttttctatgaatgacttacgggaagaagcgtatctcttgggcatcaagatctatagagatatgtccaagaggcttatctgattaacgacagatacctacattgactaggctttgaaactgttcaacatgaaacatggcaagaaaaggctcatacctatgtcacatggtaaacacctgtaccagatacaatgtcctgctacggctaatgagcgggagcgcatgagtcacgaccatacgcctcagcaatgggatcaatcatgtatg

SEQ ID NO: 26345 - DNA, 378 bp, Zea mays
agcttatgaagattcttcatcccaacatgtgctagtcggcgatgccagagccagcccatgttagtcttagcaattaagcaagtgtcgagttcagctctatcaaaatttactaagtatagctgaccctctaacactcccttaaatgctattgaatcatcacttcttctaaagacagtgacacctacatcagtgaatagacagttgtagcccattttgcataattgagatacagaaagcaaattgtaatctaaagaatctacaagaaaaacattggaaatagaatggtcaggggatatagcaattttacccaatcctttgaccaaaccttgatttccatcccgaatgtgatagctcgttggggatcttggtttttctcgt

SEQ ID NO: 26346 - DNA, 374 bp, Zea mays
  unsure (1)..(374): unsure at all n locations
atcaatcaccaaaaagggggagaatgaaagctctcttgtgggttttggtgttcggatgaatatccattaaaggactaacaagtgtgctaagtgttgaacaggtgcttaatgcaaagcctacaaggttcaacacaagtgaacaagtgtgatggtccaaagactgatttatctatagataatgaacactgcttaagtgagactcggtgtgcgtaactcagagacaaccgatcaagccaaggatggaggcaagatgagcttcgaggtaccgattgcacgggagaaggacaaggagaccagacacccanagccagtggtgaagaagaaaacttgcaaagtcaaagttgatcgagttaaaattatggtgcatcaatgat

SEQ ID NO: 26347 - DNA, 391 bp, Zea mays
  unsure (1)..(391): unsure at all n locations
agctttaaagctaaaagctcagcagatcacagtgcacaagagctaaaaaatgagtgagcaggagtggttggccagaaagcgtgcaaaataagtttgcggtatggccgtatttatacgcttgatgcgttgaaagttgaaagaccccacttgtcattgaatgttgctattctagcaaagggaaggtgttttttcggaccttcggcataaagccttcgttcatatcgcaatctgaatttattatttcaaacaaattaatattgcgaggggctactgttggggaccttcngcgtccgaaagtcctcaaaaacagaatttaacagtatttctgtagtacaatatgtgaacaggtaccctcagactaaaatcggcattgcagcagaccggaataata

SEQ ID NO: 26348 - DNA, 357 bp, Zea mays
tacgttagtctcagtcttagttagtcttaattagacagggtagtttgctatatcctgtgcatttatgtttgtcatgatgaactatgtttggtttggatctttgtaatgattgtcaccagagtgtgggtatcccctgcattttggtttacctattatgttaatggagctagttatatagttgggaaaccttttattccactctcgtctttatctgagaagctgtgtggtctgtgttggagattagtgaagatgctcatctgttcagtgctgttgaagaattctattctcttttcttatgctgcaagattttccagatcagttctgatgtgtggttgcattctgcagatgtcagagaac

SEQ ID NO: 26349 - DNA, 367 bp, Zea mays
agcttatttgagattattttggtaaaaaacccactacccatggttatgtaaatagaaattacaatatatgtcatcattcttttctcacctcaaataaacaaacaagggtattattgtctttgtgaataatctacatttatataatctaaactacaaaacaactacatgtaaattataatatatctagattataatctggattatataatttagattataatctagattatataatttataaactgaaacaaacatgcccttagttcctaaattgtcaaacggtaggactaaaatagggactaaactgctttagtccctagtccctcaagatatggttaaaagagattaaatcatattaattacacat

SEQ ID NO: 26350 - DNA, 395 bp, Zea mays
agcttcggttttaaagacacatttttgtcatctctagaggaaaaaatgtctcaagacaagaagattgctgctgaaatgaagctaacttgagaggagaagctttttgaggagaaaaaggttgtgaatccttacattgctggatttatcgagtcaatggcaaaatcgaatacagaaaagatcactaaggagatactggagggcctgtgtgaagataccggtgatagtgacagttatgatgcataaagtggaggcgaagatctcgaggatcgattctggagaccaagtcatgcaactttagcaaaatcgaccatcaagcaaagtcacctttgaaacatgaggggaaggtactttctggacatgtctatcgtgagggctattggagacacaacgttcat

SEQ ID NO: 26351 - DNA, 385 bp, Zea mays
agcttgccgtatttgtggcagccgtcgtctcgtgccagcttcttgttgccgacagcgccgccttgggcaccttcacgtgcaccaccctcaacatgtcctcgcgccccgggctgggcgcctccacgcgccttgcgcggcttgccgcgtttgcggcctcgtgtcgaggaggactcccccttcttcttgtcaccctggcaagcctcccactgctcccgagtgagatgtagcttcccgccgatagtgataggcccagagagagcctgtggttcgtcgccgtcgaccaccttgaggcgaccaatcgcctcttcgatcgtcatcgtggagaggtctagcagagactcgatcgagcgagcaatctgcttgtacttctcggggatgcaacgga

SEQ ID NO: 26352 - DNA, 398 bp, Zea mays
agcttaccttgttagccgccctttcagagtcaagctgagcactaagagaggaattcaatgaatgggcgtcatctaaagaagtagacacccaagccagatcgatttgaccctgggaatacttttctttgagttcagagtactgccgagccatatctaatgaaaaacggttgaagaagggcgcacaatttaaaacaggctaatcaagtagctaaggaagaagcaaagacactaaccagcattcgctattttcaattcagatagccatttctgaagcagcaacggattccactgcgtcagggacagagctccttccgggaaagaggcacctcgtgatctcaattgaccaaccatcccgtcaaccaaatcatgatattacaaacgaatgagtacaaagacag

SEQ ID NO: 26353 - DNA, 386 bp, Zea mays
  unsure (1)..(386): unsure at all n locations
agcttatgtccgacggctgtggtcgtcgaaagctgtttcgttcactgtagtgatgttaaccttttgattagaaaattgataatgaagatacctataagatatgtaagcattntaatttacaaaaactaacgtataggtcgtagtatgttgttatgcaaaagagaataacaaatgcgatctttaattctttgcatgatctacatatcacgagagaactacgtttcgtaacccatctataacctaacgagtcacaattatattagttagttatatctattttagtatttttgaaatatcaaatggtatgtcgcattgaatactacactactttatattttatgagtaaatatatgtaaaactaaccactctattattagttacaaaaa

SEQ ID NO: 26354 - DNA, 318 bp, Zea mays
agcttcttaatggagaacacgtgataagtttgactaacgtgcatttcgaaaaagatagaccttgtgcagcttgttaaacaagttaacaagtgggaggaacgcatcacagcaagaacgtgatgaccacttcaagacccctggagctgctgcacatggacctcttcggacctgtcgcctatctgagcataagagggagtaagtatggtctagttattgttgatgatttttcccgcttcacttgggtgttctttttgcaagataagtctgaaacccaaaggaccctcaagcgctttcttatgagaactcaaaatgagtttg

SEQ ID NO: 26355 - DNA, 384 bp, Zea mays
agcttcgttaaaataatctccgaagctatacctcgaaaatcaatattgtttctccctgtaacttggcatgatttgccctttttcaaagcattttccgaagatcgataacatgcccccttcttgtgccacatgcagcatgatgtatgatgattatgctatgcaaaatgatgtgatgatgttatgttatgcagaatgatattttgtgccgaagatacgcacattcctgcaatggggcacaatcttttgtatcaatactgactttttcattataagtctcccttaagagcttcttcgccttttacttcagcggaatcagcggttatttttcgctgtaagttctgcatccccttaagaacgtctttggaacttcttcgccttttactt

SEQ ID NO: 26356 - DNA, 381 bp, Zea mays
  unsure (1)..(381): unsure at all n locations
agcttcttcaccatgtgatcacagttatcttgagaaggttgagcaatgcacttcccttttagttgtgtcaagctcatttttagcctctcattttcttctttgagcttttgatatgtatcatcgtttattcctgcaaattctagctcaaaggaagatttgcttgtcgacggacaacaagcattagcacatggtaatgtagtttcattttgaatacatgtgcatgagtgaggttgtcgggattttaagttttctatcacaacctcatgagcaatatttaatatgatatgatcatccataagattntcatgagaacatatgagcgtatcatatttntcttgaaaagctagattttcatcttttagcttttctacttggtcctta

SEQ ID NO: 26357 - DNA, 377 bp, Zea mays
agcttctaaagggagaacacattttaggactaaccaatgttcattttgagaaagacaggatttgtagcgcatgccaagcagggaagcaagttggcactcatcatccacacaagaacataatgacgactgacaggccactggagctcctacacatggatctattcggcccgatcgcttacataagcatcggcgggagtaagtactgtctagttattgtggatgattattctcgcttcacttgggtattctttttacagaaaaaatctcaaacccaagagaccttaaagggattcttgagacgagctcaaaatgagttcggcttaaagatcaagaaaataagaagcgacaacgggacggagttcaagaactctcaaatt

SEQ ID NO: 26358 - DNA, 214 bp, Zea mays
gagctctgatccggtggcgcgaatcaatcgggacggatgcttgcgagcgtgacaagctgtccctacctgtcgagcgttcacggtgaacctagaacgatctcacctgactttggacgcccgcctgcgcgcgtttaccgaacaatccggtgagttgctcttcaattgctcacgcacacgccttgcttgatcccggatgaaactctctgacccataa

SEQ ID NO: 26359 - DNA, 391 bp, Zea mays
agcttagtttaactatatggtaagtccattttggtgttccactgatttccttttaatgtcttaatgagaatttattatgctttctagttgaacttattggagcgagatttatttttactctctttccttctatttcttttatgcctttaaggggggtttgaactacaagttaacttaatcaattttccaaaattctgcagacattacagtggcttcttactggtgtataaatttctatcccaaaatttggggttcaaaaagtgaggggctctccctgtataaaattatcaaatattacggcagagggggtgttttgaactacaactcctttttaacagagggttattctctaagacatatttttgctggcatctatatgttataacatgac

SEQ ID NO: 26360 - DNA, 378 bp, Zea mays
  unsure (1)..(378): unsure at all n locations
agcttctaataggagaacatgtnataggtctaactaatgttcaattcgaaaaagatagaccttgtgcagcttgtcaaggcaggaaacaagtaggaagctctcatcacaccaaaaatgtgatgacgacatcaagacccttggagatgctgcatatggacctcttcggacccgtcgcctatgtgagcataggagggagtaagtatggtctagttattgtagatgatttttcccgcttcacttgngtgttctttttgcaggataagtctgaaacctaaaggaccctcaagcgcttcctcaagagagctcaaaatgagtttgagctcaaggtgaagaagataagaagcgacaacgggtccgagttcaagaaccttcaagtgg

SEQ ID NO: 26361 - DNA, 401 bp, Zea mays
gagcttatcatttatataagcataaaagagaaaaggctgcttcagcagatcaaccaaagcccatgcttttgtgtgaagacatagccgagaaaaaagtgttattgggatctcaattatctgatgaacaagagaagaccttgctaagatttctgttcaacaacaaagatgtttttgcttggtcggccaatgatatctgcggtgtcaataaagatattatcgagcattcacttaatgtagacccagccttcagaccaagaaaggagagccttcagagaatgtccgatgataaagacgaaagtgcacgaagcgaagtgaaaagacatatgagtgcttgtgttattagagaagtgacatacctagattggctggctaatactgtcatggtaaaaaaagccaatggg

SEQ ID NO: 26362 - DNA, 111 bp, Zea mays
  unsure (1)..(111): unsure at all n locations
tttanttgccccgggatcctaagtcacctgcagcatgcatcttttatgtcacaacccaacggccgggtgacgtggctggcgcaccttacagtatcctgtggctcactggac

SEQ ID NO: 26363 - DNA, 392 bp, Zea mays
agcttgaacaatacttgacctcgatgtgccttggctgcatcggctaatcttaagaaacttacacattaaacaatgagaggcaaggaaatttacgtaaccagcaacaataaaaaaatatatttggttaaagcagggaaaattaagacaaagatatgaggacaagatacaaaatgagaagcattttgagtaacaccagaacttttaagagaggatgtagaaattgtgaaggaatagaatcgaatctagattttacaaaggtgaaacagagtactatttttgttgtacagcaactatgcgacaaagttgctatgtcccaaataagagttcatgcaacaatctatgagcacgaaaaatgttttgtcgacgaactgaaacgcaagcaatacacacat

SEQ ID NO: 26364 - DNA, 374 bp, Zea mays
  unsure (1)..(374): unsure at all n locations
gagaacatgtgatatgtctaacccatgttcatttccaaaaagatagaccttgtgcagcttgtcaagccgggaaacaggtgggaagaacgcatcacagcaagaatgtgatgaccacttcaagacccctggagctgctgcatatggacctcttccgacccgtcccctatctgagcatangaggaaataagtatgggttagttattattgatgacttttcccgctttactagggtgttctttttgcaggaaaagtcccaaacccaagggactctcaaacgcttcctcaagagagctcaaaatgagtttgagctcaaagtgaaaaaaataacgagcgacaacgggtcccagttcaagaaccttcaagtggaggagttc

SEQ ID NO: 26365 - DNA, 389 bp, Zea mays
  unsure (1)..(389): unsure at all n locations
agcttgagttgtctgtagaaaaagctctaaaaactcttgtaataacttgtgtaaagaatgatgtaattaaattttacttcgtgaactttgtccataccttgtaatatattcttacctttccatcaatttataaagtgctttggtgtgaacgaaattagcatttttgagccgaaggcgaaaaacaccttcccttcttttcgtacacagtgaagcataaaactgcttcttttccttttttttccgaagccttctctttagagccgaagcaactgtctatgttatgatgatgatcctatgtatgtctaaatgaatgtntatgaatgcaaatgtatgatgtaatgtatcgtgcaagtaaatgtccaaagtcacatacgaaggcacaaccaaaa

SEQ ID NO: 26366 - DNA, 366 bp, Zea mays
  unsure (1)..(366): unsure at all n locations
agcttttaccctaaatagggattaaaggggtaaaacctaacccaagttgagaaaacctaaaagctttacggtaaaagtcataaaatgaccccaaaaacaaagttgaatcacatttatacccctgggataccagaaaccctaattgaaaccctggaaaaccctaaaactaaaccctaggggcttatgtgcaaatttagtccattttgggctaaagtgcaaaaaccaagccaaataagtatcttaagtcacatggttcacatttgggaagatttacaagccaaaccctgagttttgggcttatttgcaaaagagtcacatntgaactcttttgactaagtctaatttcagagttttgtgctcatcttt

SEQ ID NO: 26367 - DNA, 379 bp, Zea mays
  unsure (1)..(379): unsure at all n locations
tagcttataggggatttgctttgcgtgggctttggcaggatccgatccagccaacgggtactccgccagtactgaactcaggtgcattccctcataagagattcctccgttccactgtacattgccaaaaatagtcctgtacatacatacatggttggttgactgctggatactgtatctgttccatctcctgattttctttgcatgcgtatatatatatgctagttagattggggcacatgaagcacattagttctgcaattntatttgagagctacggagatttcattaattctgtgatttcatttgagagctatggttccatcatgaagctctaagtctgtggcacagttgcagatgagctagctactgtttaaag

SEQ ID NO: 26368 - DNA, 386 bp, Zea mays
agcttttgatctttagccctgcaacttttgtcaacatgacccgaaaccacctgggaatcaattttaagaatcgcccttctgattcccattgcctttaatttccgaaggcccaaaagggaggcttcgtactcagtaatattatttgtacagctgaaatcaagtcttgctgcataacaagttttaaccttggatggtgaaaccaacacagcggctgcacctgctccgaaggttccccaagagccatcacaaaacactgtccacacttcggcatctttatttgcttcttcatcctgagcccctggcgtccagtcggcgatgaagtctgccaatgcttgagactggatcgaggatctatgcacataatcaatgtaaaattcattgagctc

SEQ ID NO: 26369 - DNA, 381 bp, Zea mays
agcttatgaagattcttcatcccaacatgggctagtctgcggtgccagagccaacccatgtttgtcttagcaattaaacatgtgtcgagctcagctctatcaaaatctactaagtatagctgaccctctaacacacccttaaatgctattgaatcatcacttcttctaaagacagtgacacatatatcagtaaaaagacagttgtagcccatttgacataattgggaaacagaaagcaagttgtaatctaatgaatcaacaagaaaaacattggaaatggaatggtcaggtgaaatagcaattttacccaaacctgtgaccaacccttgatttccatcctcgaatgtgatagctcgttggggatctttgttttctcatatg

SEQ ID NO: 26370 - DNA, 396 bp, Zea mays
agcttgagactgaaacaaccgtggcatgcactacattccttgaagaaaatgtcaaagaattgaggattgccatgaagagggaacaaaatatgaaattcaacaccttctccaaaagcctcaaccacgcctccacaaaaggtaacatccaaagtaatgatcaaaccacacttcacattaaaaaatgtagtgaatgctttgaagaaaggcacttgattaagtcatgtccctatattaatggcttgattatcaacaaggatgatagactttgttttaaatgctcaaagaaaggatacttacttagatcttgtccccatttaaaacaaagagacatatggttataaaagaacacttttactaaccatgtagcacgcaacaaacaacgaataaagaaatctt

SEQ ID NO: 26371 - DNA, 348 bp, Zea mays
tctcgtagtcctctgaaggactttgcttaaatgttcctcatgctcttgctcattcctggaatatacgagaatatcatcaatgaacaccactaccaacctgtcgaggtagtccatgaacacactgttcatcacgttcatgaagtaagttggcgcattcatcaatctgaatgacataaccaccaactcatatagtccatacttggtgatgaatgctgtcttcagtatgtctgcgggtcgaattctgagttgatggtgacctgacctcagatctatctttgagaacacactggctcctctcacctgatcaaatatgtcttcaattcgaagcagggggctcttgttctttac

SEQ ID NO: 26372 - DNA, 388 bp, Zea mays
agcttataagcactttcgcttcttagcccccccgacatgatcttttcctcacgcagttaagcgttagaacgaggattagcctctgataccaattgaaagttgcctagaggggggtgaataggcaagtggaaactttttcaacaaaaaactataaacgaactgggtaaaaccggtttaaccggtgtcaaaaccggttcaaccggtttgcacgagctcaactaaagaatgagatataaactgaattgatcatgaaattcacctagttaactttggaaatgagatgttctagttgatccacagggttcaaagtagtagatctgagaaaggcacttctcaaaatccacacaccacaaagatataaacaaatcttccacggaatggtgacaga

SEQ ID NO: 26373 - DNA, 384 bp, Zea mays
tatcttgttgctggatgctgtcatcggtctaaatttggaagaaagaattagtgtcttttaaaaatccttttgttgaagtcggagtctatcatgttgatttaacttttctccgtgataaaatcttgaacttggaaccgtggagttaagtatgtatgaggttttttagatggccgggaggcagcgtcgtggccagaacgagcgcgttcctacaccgacgacaccacctcccactctgcaagagctcatggctcagcagaatgagatcctaatgcagctggctcagcgtcagccaccacctcagcattatggtggtggagaccatcagcgtcaccccgcggcggctacataccaggaattccttagcacccagcctccattgttcac

SEQ ID NO: 26374 - DNA, 375 bp, Zea mays
  unsure (1)..(375): unsure at all n locations
ctgtcccagctggagctctgaccgtggcgcgaatcatgggacgtgatcgggggacgactgcctcatatcggtgttaagctacctgcgggaccaaaccgaactaatccttgcttgtcgcagtcatgagacagttgacccttggatgcttgagaagcaacgganatgtgctgagtcgagataacaagttgatagctgagaatgcttgctaccctgtgtgagtatatactccactattggccttgagagagtcccactcatttttgactaagttaggatcttgatctacaaactcaccgagcgctgatggaaaccaaaccctacagacaaatagctgtttggctagaggtagaggagtagactcctcacagcgggtga

SEQ ID NO: 26375 - DNA, 380 bp, Zea mays
cagcttttcaaattgtatttaaacttccaaatcggatatgatatgtattcgtggtggcaaaaacgaaccagagatgtttttggtgatgggggatttcgtggtgaccaaaacgtggtagaactcaaaactcttaaggaataaactaagaccagcaactcgacacaaccgatgcaaccaaaaactcaacaagccctaactaagtagtactagtaaatgctcaatggtttataagattgcggtaaaactaatctactattttttggctttttctggactataggagataagaaaacagcgaagaaaagttaatctctcaccgataaaccttgctctgattaccaactgatgtgcacccgttgggtgattgcccgatctttcat

SEQ ID NO: 26376 - DNA, 390 bp, Zea mays
agcttgttttctttaaaggactcgatgcaaagcttagggagatccgaagctatttggatcttgtaattgacgggaagctcccactgaatcacgaaattttgtaccatttgcaggctagtctctttcttgaaatttgtcatgtattacttttactggaattgaatgaactaaacggtaaatgctgaaatctaccagctttcttagtagcagtagtatcggaatgggaaacataagatgagtaaagggtgcttagtatatttttagttgattattaactttttctttgtattttagtacaaattgatcccttgatatcagttattctcccacacatagttttatttgtttttttttcattatatgaagcattgatttttaattctatcttaa

SEQ ID NO: 26377 - DNA, 383 bp, Zea mays
agctttttcacggtaacctcagagagcactggccacggtgaagcgaaggtgagcgcgcacggtatggtcagacatgatcaatggatgttgtggtgaacttatgcgaggatagacggtcacgctcatgctatacaaccgtaagggataacatgtttatggtgcacagataatttgagtcaaagaggtgagggcacggtgaattttagtttcttcctcgcggcattgatcacaccagaaggcactgagtgcatcaccattgctctcgctaggttttaaaggaacgacggcacgactggctacccacggtcactaatgtacgacacaagtgcatggacaccacgtaatatagagacacattgaagtatggccgccgatgacaccgt

SEQ ID NO: 26378 - DNA, 377 bp, Zea mays
agcttctttcccctctgcctcttaaggctggcggtttgaaagaactttgatgcgttctaattgactgggaactatgctagtgaccttggttgtgattgcctttgtcttcattttggctgggattgtgtattgatctaacacgccttgggtggagccttcctccgaagcccctggttatctcagaatatatgtaagcttcctcccttctttgccgaaaatcagtgttggctctaatgtactcgtccatcttctagagaagcttctccagggtttgtgggggctttctagcaaaatattgtgttgtttgtcctgagcaaagtcccttgatcatggctttaatatacaattcatttggcaccgttggagcctgagctctg

SEQ ID NO: 26379 - DNA, 347 bp, Zea mays
tattctattagctataaaggcttttcgataaccatccataactctgatatgctcagaaatcttcacagcagataatgtgtccttaagcaaagtaaactttaaaatattcaatttagaaatcaaatcatttaactcaacatcacatgaaccatcatgagagaaagtgtttgcaaatttagtgcacaactcttcaagttctctatcatttagtgagcttagtgtgcttgagctcaataaaaacccacatatacctaaacatggagagttcttcaaatctggtcctcaaagaagtgttcggcatgtcaactaataccaacaaatagttgacttgaaaagctctctcattt

SEQ ID NO: 26380 - DNA, 369 bp, Zea mays
  unsure (1)..(369): unsure at all n locations
agcttatacttactcacttatacttagaacttaaattttgaggacantaaacattttgtggctaatagtaaattcttatcactgcttgatatcattatatcataaagaaatgacataatttaagtataggggcagtgttgtgctcctcctatatatagcatattcctcctctctgtgtaacataggagtatatcacagaagttgttggagaactatgttctcccaggggcgaatctaanggggcgattgggaggcgggctccagctccctatatccatgaaacttcattaaaaatagaggtggaagataaagcacaacgagaaagaaaaagagagaaaaantaagtttcctactagcttgtgatgactc

SEQ ID NO: 26381 - DNA, 477 bp, Zea mays
  unsure (1)..(477): unsure at all n locations
ctcagctacccatttgagcatgagcgcttccctttgcttggtcttgcttggcttgccctttcgaccttttagcgccgtcttgaatctcttgatgatgagagccatctcttcatcattaagtccggcagccttgatttgtgccaccttgctaggtaagcgctncttgcttcttgttgccttgagagcaagaggttgaggctcattgattggaccattcaatgcgtcatccacgtatcttgcttccttgatcatcattcgtccgcttacgaactttccaagtatctcctcgggcgtcatcttggtgtacctaggattctcacgaatattggttacgagatgaggatcaaggacagtaaaagaccttatcattaggcggacgacgtcatggtccgtccatcgcgtgcttccatagcttcttatcttggtgacaagagtcttgagcccggtgtaccgttgggttgctcttctcccttatat

SEQ ID NO: 26382 - DNA, 395 bp, Zea mays
  unsure (1)..(395): unsure at all n locations
agcttgagaccgacataagccgctaccgatgatattatcttgtcagcagcttattctattctaatttcaaggtaaaagctnttattcgactttntattgttttgaacaacgaaggtgttttctaacgaaggttgcttgtgcacagagtatgttgctgagtaaagctttgagaatgcaacaagatctcgaagataaaaaacatgaagttataattgagggtttagaaagtaaaataaaagatcaagcagctgctcttgaaaagaaggatttcgagcttcagacaacagaaggtttattggcagaagctaaagctaaaatntgcaagttaaatacggagcttctctcgaagtcataaagcttcgaacaggagaagcagaagttaaatgccaaattta

SEQ ID NO: 26383 - DNA, 291 bp, Zea mays
cagtagcaccatactactgcagctgctcaagtataatcgtacgaataggaatacgatcagcggcgtaccagcaccaggacgggaagaccaggttcccttggccacaagtcaaagaaacgggacacgcgatcaatactgcacgcgttttaagtatcgtgacgggcggcgtgcgtggggccgacggccaatgaccaaagccagtcaaaagcaggccgatgagcgggcgctttcgctatcagggacggtgacaccacaaccagcgtttgtgctggcgtgtccaagagttgaccg

SEQ ID NO: 26384 - DNA, 444 bp, Zea mays
  unsure (1)..(444): unsure at all n locations
tggagaagcaanatccttgaagtcttggctgtcaaactgcttgccgttgtcaactgttagttcggacggtactccgaagcggcaaacgatgttttgccaaaagaatttctgggcagtttttgatgttattgtgcaaacagcccttgcctcgatccatttggtgaagtactcgacaacgacgaaggcgaacttaaggttcccctgagcggtgggcaggggcccgacaatgtccaggccccagcgctggagaggccatgtgtgggcgatcagctntgtatactgcgaggggctgcctgaccgaggtgaaaacttctggcaggcttcgcaggaccttgtgacccgatttgcggcgcagatcattgcgggccaataaaagccttggcggatcactttaccagctagggcccttggccctgcgtgtgagctgcacgtgccactgtggac

SEQ ID NO: 26385 - DNA, 490 bp, Zea mays
  unsure (1)..(490): unsure at all n locations
tctaagggagaacacgtgataggtctaaccaatgtaactttcgaaaaagatagaccttgtgcagcttgtcaagcaggtaaacaagtgggaggagcgcatcacagcaagaatgtgatgaccacatcaagacctctggagctgctacatatggacctcttcgaacccatcgcctatctaagcataggaggaagtaagtatggtttagttattggtgatgactcttcccgcttcacttgggtattctttttgcaggataaatctgaaacccaagggactctcaagcgcttcctaaggagagctcanaacgagtttgagctcaaggtgaaaaagattaggagcgacaatggatccgaattcaagaaccttcaagtggaggagtaccttgaggaggaagggatcaagcacgagttctccgctccctacacaccacagcaaaatggtgtggtagagaggaagaacaggacgcttatagacatggcgaggacgatgc

SEQ ID NO: 26386 - DNA, 400 bp, Zea mays
  unsure (1)..(400): unsure at all n locations
cacccattagaacttcagctcatcttatcatccgcagacagacggccagactgaaagaacttaccagatcctagaagatatgttgagagcctgtgcgttgcaagacaagtcaggatgggacaaaaggttaccttatgcagaattctcctacaacaatagttaccaggccagcttgaagatgtcgccgtttcaggcactctatnggacggagtgtatgactccgctgcattgggaccagcctggagagagacaggtgtttggccccgacattttgcttgaagccgaagagaatatcaaaatggttcgggagaacctgaagatagcccagtcaagacagcgaagctatgctgacagaaggagaagagaactgagtcttgaagtgtgagactacgtctatctg

SEQ ID NO: 26387 - DNA, 384 bp, Zea mays
  unsure (1)..(384): unsure at all n locations
agcttncttcgaaggattntctgttaagaatatctctctagggcaaaatgaacatgctgatttgttagccaggtctgcagcacaggggctgccgctaccttcggatgtattcttcgaaacaataaaggcaccttcagtggagttacttgaaagagcagttcttactanttctcctgtgtacagtgaagattggagaactgaaataatttcttaccttcatggcaacttcctatcagatgacgaagcttataataaaagaatagaggcaagagctcgtccgtatatcattatagaaggggagttatacaagcatggagtttgtgccccgctgctcaagtgcttgtctagagccgaaggtatagagtngatgaaggagatacatgc

SEQ ID NO: 26388 - DNA, 459 bp, Zea mays
tctacctcacgcacatacgcagccgtttctttacctctcttatccacgccgaaggcaggacttctcaccagctggccccccatgtccgcatcccgcgcggggtaacctcacccaatgtccaaccatgcgctaggggccacattctgtatgcaatgaattccttgaccaggtcgcgtccgctactcatgcgggctgcatatcgaagggccccttcatcttcatcttcattctcttctgccacctcaaattgtgataatgccacataacaatgtgaacacaggatggcatggggcaaactcggcaacccttctatattcctcgggagctacataaaaccaaaagtcccaccaactgccctacttattcctagcacagggaacaatctcgacaacttcagccgaggtcttcccagtccttggcgtgaaagtgcatgacccaaattgggctaccttgtcacat

SEQ ID NO: 26389 - DNA, 328 bp, Zea mays
catgcaagcttggtgccatggagaagcagatatccttgtatatctggctgtcaaattgcttgcaattgtcaactgtgagctcggacgggactccgaagcggcaaacaatgttttgccagaagaacttctgggcagtctttgatgttatcgtggatacaaccctcgcctcgatccatttggtaaaatacttgactgcgacgaaagtgaacttgaggtttccctttgccatgggtaggggcccgacaatgtccaggccccagcgctgaagaggccacgtgtgggcgattagctttgtgaattgcgaagggcttcctgagcgcggagaaaa

SEQ ID NO: 26390 - DNA, 430 bp, Zea mays
agcttctcttgaaaagaaagatttcctactccaagcaatggaagttccctagcagaaacgcaagccaaaaatactagattgcacggggaacttctgcaaaaatcagagagctttgaacaagagagaaaaagcttgcagacaaaatacgaagccgaagctgtcgaaaatacgaagctgtagcaatctttgaaagagcttcggaacatgtgtttgggttttggcagccgctgcgtacagcgattgaaaaaagtttttaactcagttggagccagcgctgaaaagtttaccccttcggtcgaaaacatatcaagcacctttgaacacattgaaggcgaagtcgaggcgcttgacgaagtaataacggggcacgatgacttctgtgacctgctagcttctcgcgacacagctgtagcatttctgaaagctggat

SEQ ID NO: 26391 - DNA, 456 bp, Zea mays
tgtgaagattcttcatcccaacatgggctagtcggcggtgctagagccaacccatgttagtcttagcaattaagcaagtatcgagttcagctctatcaaaatctaccaagtatagctgaccctctaatactcccttaaatgctattgaatcatctcttcttctaaagacagtgacacctacattagtaaagagacagttgtagcccattttgcataattgagatacagaaagcaaattgtagtctaaagaatctacaagaaaaacattggaaatagaatggtcaggagatatagcaattttacccaatcctttgaccaaaccttgatttccatccccgaatgtgatagctcgttggggatcttggtttttctcgtaggaggagaacattttcttctcccctgtcatgtggtttgtgcacccgctgtcgatgatccaacttgagcccccggatgcat

SEQ ID NO: 26392 - DNA, 384 bp, Zea mays
  unsure (1)..(384): unsure at all n locations
gctttataagggacatacttgtnattccttacaggctgcgtcctgtgcctataaatagtgaacagtattccgttactgttcacgcattcgagttattgctatcacatcttcttgaatccaaccttttgccaaggcaaaggtattattgtattcaatgacttaatatattaagtagatacaatgtaattcatctatgatgtatttatccctcttatatctattgttgtatgttatcttataatctttactgaaattttattacgaagacttaaacttcgtaattatgctcttatcagccttcgtcaaggcccattatcctcaagggaataattgttcatggacgaaggacattgacatctaacactttattgtggcttgttctta

SEQ ID NO: 26393 - DNA, 408 bp, Zea mays
tatatctctgatctactaaggcactgtctggataaactaaatccctcccaattcaggccttgttctgttatttcaattccatgtggattggtgtgtattgggatggattgtgatgaattttgacttgctatggatttaaaccgactcaattccacctaatccacatggattaacggctaaacgaacaatcccttattttgtttggagtggaaaatgaactatattttcacatcaacctcttccataacatatcgattgaaggggattgctgcgatttcaaacaagccctaaatgttagtcaaaacttatgactcttgtagcaatcttaacactaatctatttaaagcatattattagatgcatacaaactctgtcagcacccttctagtgctgctctttagtcgaata

SEQ ID NO: 26394 - DNA, 393 bp, Zea mays
  unsure (1)..(393): unsure at all n locations
agcttcggcccaacatcagagttcttttcggtcgtcagcgccaaggggcagaggcgccagggggctttgtggaaggtttggagaccagccaagaaatatatattgcctattctgtggtgaagacaagggccatactaccaggatgtgccatgttaccatccagaagcagaaggaaatagcggaagcagcagcgcaacagagtcaaccgaagcangtcatgcatactgcttcgtatcactcaccttacattccagaatatgtaggcaaccactctgcagcttctgtcgcttcggcgagccaaccccaagcatcttggcagcaacctccacccgcaccgccgatccaaagaggtcagcagccagaaaggagtcagcgcactaaccttcagcggga

SEQ ID NO: 26395 - DNA, 477 bp, Zea mays
  unsure (1)..(477): unsure at all n locations
acgtganaagtgctttcctcaatggaccaatcaatgaagaggtctatgttgagcaacctcccggttgtgaagatagtaagtaccctaaccatgtctataagctctctaaggcgctttatgggctcaagcaagccccaagagcatggtatgaatgtcttagagatttccttatcgctaatggcttcaaagtcggcaaggccgatcctactctattcactanaactcttgacaatgatttgtttgtatgccacatttatgttgatgatatcatatttgggtctactaacgaatctacttgtgaggaatttagtaggatcatgacacagatattcgagatgtctatgatgggggagatgaagtatttcttatgatttcaagtgaagcaactccaagagggcaccttccttagccaaacgaagtatactcaagatattctaagcaagtctgggatgaatgatgccaagcccatcaagacac

SEQ ID NO: 26396 - DNA, 386 bp, Zea mays
  unsure (1)..(386): unsure at all n locations
agcttattgccaagtgggttagtgaaatatttggacccaaattccccacccatgactaaggtaactagatgaatttcatttccttttagatatgcatatctattttttatatctagtttttaccttacatgcctagttttacatgtagtatttattttttgagttgcatgcatactatgtcaatcatatggtaggaatgcttggttaattcatattcttgagcaaacctacatggtttaaaatgtttagttaagcacggcacgtagcttatttaacattcctaagtaaatgacactaatgcttcaaagtttatatcctactagtggtattctccaagtggtgtcattntgacttatatgtgccaaaactcggattatatataattt

SEQ ID NO: 26397 - DNA, 458 bp, Zea mays
  unsure (1)..(458): unsure at all n locations
ctggccttcagacggatgacanggaagcaattcaatatctgttctatgcccgaatggagcactccattctttatatattgttgacgaggcttcaacatctgctgctgtaaggaacatgggtggttacatgccatccctactctttgctccctgctccaattctattgccaatgagacacaagtagaaaaccaagattctctagaccttacgcacagcaccagctacagtcagcaccttcaacatgacctccagctcaaccccgaaccttctgcaacgaccgagtcatcatttggtatgagttctgatgttgtcactgcaacaactacatcagagcgtatccatttccgacatcctaataaatgcatgtttaagggatgttccaaatgtgcatgaggagcatcangattgatattgctcaccgacgtgggcagagatgtcattaacctggatgccataa

SEQ ID NO: 26398 - DNA, 352 bp, Zea mays
agcttgttgagatcgcatacgtgcgaatcttggcaaaaatccggcgcagacctcttcctggcacctatggctatctcttgtatgtgagttccaagggaagataagccctaggtcagaagatatgcggacgccaaatctggcttgtctccctgcccacttcgcgacaaaagtgatgccaagacatgtcaaatgagtttgactagggttcacattattccagggggtgcattaggtggtttggcacatttttggtattcagaccaagtggttttggtgccatttactaagtgaacacgtctaatcttgagattagtgtttaaaattgacttacagagaattagagagctctaac

SEQ ID NO: 26399 - DNA, 426 bp, Zea mays
tgtgaagattcttcattccaacatgtgctagtcggcgatgccagagccagcccatgttagtcttagcaattaagcaaatgtcgagttcagctctatcaaaatctactaagtatagctgaccctctaacactcccttaaatgctattgaatcatcacttcttctaaagacagtaacacctgtatccgtaaaaagacagttgtaacccattttacataattgcgaaattgaaagcaagttgtaatctaaagagtctacaagaaaaatatttgaaatgggttgggagatatagcaattttacccaatcctttgaccaaaccttgatttccatccccgaatgtgatagctcgttggggatcttgggttttctcgtaggaggagaacatcttcttctcccctgtcatatggttggtgcacccgctatcgat

SEQ ID NO: 26400 - DNA, 410 bp, Zea mays
  unsure (1)..(410): unsure at all n locations
agctntatgtggcacatggattcccagaggttagaactacgtagagaggcagcaactatctgagcccttgaccccttgcgtacaacagggagtacttgtttgaaatcacccccgaacacaacagttctcccaccaaagggcagctcaggccgtcccattatatcacgcatgctattgtctagcgcctcaattgcttgtctcttagtcatcgatgcctcatcccagataatgagcgatgctttttgtagcaactttgctgtcccgctttgtttcgtgaagctacatacagcaccatcatcaatagtaagtggtatcttgaagcgtgaatgggcagtcctccccccaggcaatatggaagccgcaacaccagatgtagttgttgcaactgcaatcttgttctgactgcgtag

SEQ ID NO: 26401 - DNA, 449 bp, Zea mays
  unsure (1)..(449): unsure at all n locations
tcacgaagaggaaccttcgaccatcttatacaaacagcttctgccgaagaccgcttctttctataagaccttcggcgacgaagcataggcccaacatcggtttagaatgataatccatggggtgcaccggatgtgcacccaatgggtgtagcccccgaccttcaaatggagtttttaaggataatccattcgaaggtcttccttttgcttgaaaaaattggcatgaagctattcgcattatgctttggaggtcagcattatgtcatcaaaattttgctgcagaggtcagcatatattttgtctttagcagccgagtttgcaatccgtccatatcttgctaggtaatgcaatttatttgcttctgcgacttgattggacgtttgatggacgttctctgtctagncctcacatcgcttctgtccgcatatcttgtactttgctggtatatt

SEQ ID NO: 26402 - DNA, 424 bp, Zea mays
  unsure (1)..(424): unsure at all n locations
gcttgccaattattatcaaagcaacaacatttaccagcacagcaactgcagaccatacccgtaacatggccatttgcgtgctggggactggacatgattggacccttcaagaaagctcagggaggctacactcacgtgttggtcgccattgacaaattcaccaaatggatagaatacaaacccattgcttgtctaacttcagccagcagtggaatttatacaagatataatattcaggtttgggataccgaatagcatcataaccgacctgngatccaatttcactagctctgaattctttgatttctgcgaacaacggagtatccagatcaaatatgcgtcaatagcacatccaagagccaatggtcaggtggaaagggctaatggaatgatactggaagcactcangaagaaagtctttgac

SEQ ID NO: 26403 - DNA, 488 bp, Zea mays
tactcaagcttaaccctgcgagaccttttcccgtttctttctaaccattatgtatgcgatattgaatgtcatacttgatgcatattcactttatttgttcccttgtatgatgtactggttgtttcccaatttgaatggatgaatgtatgtatgcttgcaatcgcatagagaacgatccggtcgaagagcccgaggaactcgcaggagaagcccctgagcagcagtcggttggtggaggcaagtgtcctttgacctatctctgtcctattcattctttaattcacctcccgctttacacatttatacctaaggattgactagcttttgttatccatgtccttgattacctatttgggttggattattattacctagctttatgctattgcttaactctaatcaatgaacatgatgagattatctatgatacgttgttttcccttctcttattatgatgttgtacttgtgatcttcaagggggctcgagc

SEQ ID NO: 26404 - DNA, 352 bp, Zea mays
  unsure (1)..(352): unsure at all n locations
agcttaatcccgagaagtgtgtcttcggggtaccccgaggcatgctcttggggttcatcgtctccgagcgaggcatcgaagccaacccggagaagatcgcggccatcaccagcatggggcccatcaaggacttgaaaggcgtacagagagtcatgggatgccttgcggctcttagccgcttcatctcacgcctcggtgaaagaggcctgcctttgtaccgcctcttaaggaaggccgagtgcttcacttggacccccgaggccaaggaagccctcgggaacctgaaggcgctcctcacgaacgcgcccatcttggtgcccnccgcttccggagaagccctcttgatcaacgt

SEQ ID NO: 26405 - DNA, 492 bp, Zea mays
  unsure (1)..(492): unsure at all n locations
cctataaaactaagcttgtcgctatacacccttaaggctagtgaaccatcacttcttctatagacagacacatctacatttgttaaaagacaattatatcccatattgcatagttgactaacagatagcaaattataaccaagagactcaactaaaaacacattggagatagagtgctcattagaaattgcaattntacctaatccttttaccttgccttgattcccatcaccgaatattattgaatcttgggaatccttattcttgacgtaggaggtgaacatcttcttctcccccgtcatatggtttgtgcatccgctgtcgataatccagcttgaacccccggatgcataaacctgcaaggcaaatttaggcttgggtcttaagtacccaacttatgttgggtcctacaaggttagtgcaaatatccttagggacccaaatgcaagttttgtcttccttgcattntgcccctaacttcctagcaactat

SEQ ID NO: 26406 - DNA, 410 bp, Zea mays
  unsure (1)..(410): unsure at all n locations
atgcctttttcatcaatgacctcctatcattagcagccagggcacctaanatgttggagtcaaggaagggggcatgggacgtcacttttataaaccttagcacanaggggtatacctatttgcattgttcctttgggagatagaacacatacctaggttctgtttgtttgagctttggactttccaaaaaaacaaacagctcccataaacgaaaagtcattgtgagcttctggcttttggcatctggaagtttttttgcttctgaaaggtctaaaagctctcaggaagcccaaacaaacaggaggacctagtataatcggaacgaggggcctattccattntggtaatgcatgttgagacaaccggtatgaacttattccattgtagaatggtatttacacaaacaaaac

SEQ ID NO: 26407 - DNA, 462 bp, Zea mays
  unsure (1)..(462): unsure at all n locations
tctacttccattngcacagcttcaagaggagctgctataggttttaatactcgctgatgaaagggtggctgagggtttggtgtggcaggtagcaagcactggatctccatggattgcggttgcacctgtacatgcataataagataactaanatcacattgatataggcattttgcaagggaaacaacattntataaaaatgcacatacagattcangtctgaccacaactggatcagtcaggtttgtgcaagctagttcggccaccttaaaaggctctacttccaccataagagacagtggcgtcatcagcttacttttggaaacacagctttcctcatgaggtgctgctgtcaatattgattcctgttggccgtaggtagatggtgcggcattcagattcatgttctgagtaggtagacactggatatttaaagttgtggttgcactggcaccgatgttt

SEQ ID NO: 26408 - DNA, 441 bp, Zea mays
  unsure (1)..(441): unsure at all n locations
agcttggaatacaactggcaatcctatagcctctgcaataccttcctcaaatgctcttcatgctcttgctcattctgggaatatatgagaatatcattgatgaacaccactacgaatttgtcaaggtagtccatgaacacactattcatcaagtacatgaagaaagctggcgcattcgttagaccgaaggacatgactgtgtactcataaagcccatacttggtaataaatgttgtcttcggtatgtctaaaggccgaatcctgagctggtgataacctgacctcagatctatcttcaagaacacattgactcctctcaactggtcgaatagatcttctattctgggcagggggtacttgttcttgatagtgacttcattcagatctcggtagtctatgcacatcctcttcatgccatctttcttctncacaaacaacact

SEQ ID NO: 26409 - DNA, 405 bp, Zea mays
ttataccacaacacaactaatgggattgttggttcactaactaaaggtcaattcgggtaaatcaaatgtttgaatatcaattataagtattaaatatcgggggaactaggtataataaaattcgtctcatactttactctctataattagactatttttaaattcgtaattatcattccacatttgatgtgatagggactaatctttaattgtatggagccaaacaccccctaagcttgatctaactgctgtattagagcaactccaagagactctctactccctcgggtttcataatacaagtcgtttatgacatcgacacggtatctaatatatagctttgatcaatgtcctctgttaaactacaaataatatcttaatatatttatacttttctataagtac

SEQ ID NO: 26410 - DNA, 454 bp, Zea mays
  unsure (1)..(454): unsure at all n locations
agcttggaacattgccattggtntgagaaagagataatgcgtcattatatatggagagcaatagagtttctgtttttggagaactaattcattttatatgggtgaaatataaaacactatagtagcaagtttgtaaaatacatgacattgcaacaaaagtattttagtgacaataattggtgtcttaataccttgacttgttttaattctgctaagcctaactttgattctgtatttctgctaattctaaagggatggcgtggacacaccgacttgcctccgagtttttcctgatgtttcccttcttatatgaacttgaggaaagaacaatttggctgatctaagattagcgttggagatgaccatcatgaaaaaggaatctagctttgattggagagaacgctttctagtggtggcactcatttttgtgctaataantgcccttcttaatcat

SEQ ID NO: 26411 - DNA, 459 bp, Zea mays
  unsure (1)..(459): unsure at all n locations
tgatggtactattgaaaggtacaaggcgaggcttgttattaatagttattcacagaaggaagatgagtatttctttgatacttattcacctatggctcgattgaccacaattcgtgtactactttctctggctgcctcttatggtcttttcgtccatcaaatggatgttaagacaacattcctaaatagagagctagatgaggaaatctacatggagcagccaactgagtttgtagcaaacggacaagaaggcatggtgtgtaaattattgaaattgttatatggcctanaacaagcacctaagcaatggcatgaaaagttcgatagaaatttgacatctgtcggctttgttgtgaacgaagcagacaaatgtgtatattatcggtatggtggnggcgagggagtaattatgcctgtatgttgatgacattctaatcttgtgggtgagtcttgatgtga

SEQ ID NO: 26412 - DNA, 261 bp, Zea mays
agcttagtgcaagcgtgtggaatggttttattttacactaacgtgtatgtatggcttgagtgaagggcaaggtggaacggagggaaaacgggaggaggcgctcggcgacaggcggcaaggctgttcggccttgcgtctgggctgaaaacgaggtgttcgccatggcgcacgggccgaaaacggaggctcgggcacgaactctaaaataagctaagttcaagcatgtggaaagacaccgaacatacagtgtatgtctttggt

SEQ ID NO: 26413 - DNA, 339 bp, Zea mays
  unsure (1)..(339): unsure at all n locations
ccccccccagaggccttgtgctcgtgcacggacaaaaaccagcntaccggccaacgagaaaagacctttttatatagacacgcacagggaaaacggcgccaccagcaccaccgaaagccccaccgacggaagcaggcggcctagaccaaagaggggggcccgttccaccacgaaagaaaaacgcaaagaaggattactgcgccggagcccactatcacacccaagcaaaaaagccgcaaacaacacaaaggcgcaaccggggacccagccacccggcgggaccagaagaacaggcggaaacgaaccatcagccgacaaaagacagatcgcaccaaaaga

SEQ ID NO: 26414 - DNA, 411 bp, Zea mays
  unsure (1)..(411): unsure at all n locations
agcttgccagaattgttttgaagaactcattttatgttaaccactgcaccaatactggtaatgccagacatccacaagggatctgatgtgtattgcgatgcatcacaccttggacttggatgtgtgctaatgcaagaaggaaaagtgattgcttatgcttcaagacagttgaggaaacatgagaagaattatcctacgcatgatttggaactaactgccgtagtgcacgctntgaagatttggaggtactatatgattggaaacaagtgcaaaatcttcacggatcacaaaagcttgaaatatatattcactcagaaggaactcaacctcagacagagaagatggcttgaggtgaataaagaatatgatttggaatacaatatcaccccggaaaagcaaatgtagtagctg

SEQ ID NO: 26415 - DNA, 447 bp, Zea mays
tactcagcttcgaattggatgaaatcatggccgggtgaactctatggttctgactacttcacgaccaagacaactgtcgcgacgcgcacgacgtcgccacgccataatatcaattatcaccacggccatgaacagatgtgcgcacaaggagctagagaccgagcgtggcgagatagacagtaccaagctcggcagggaatagcacgcgcagtcaccatggcgcacgcaagggaactgagcagagaactttgagcggaactgtggctggcgagacctctgctggccggagagtgcatagagaaggggcctcggcgagcagaggagcgcgcacgaccagagcggagctggggagagcaggacgtgcccggcgaagcatgcctgcgcgtgggcgaacagagggagaaaggacagagctgagcgccgccaggaagatggagcatgccgaca

SEQ ID NO: 26416 - DNA, 253 bp, Zea mays
cgcgcagagagcttcatcaggagggtttctacaatgaggatgactggtatgaagatttccatcatggaaattttgcttttgatgatgctctctctctatcaacagaattgcaggctacaccatggccccagtcttacaagccacctcagctccccatgtatgacggtcattcagacccgaagcaatttttgatgagctatgaggcaaccatatcttcgtatggtggcaatacggcagtcatggcaaagtcttt

SEQ ID NO: 26417 - DNA, 482 bp, Zea mays
tgccttcgcctcagtataccacccgcagtccaacggagtttttgaacgcgcaaatggcaaaattttcacagctgtcaagaagatgctgctcgacgataaaaagggcaagtgggacgatttattacctgaagcggtctgggcattaaacaagactgagtgcagggcgactgggttcacccctttccgccttctatatggatcggaggccatgatcccgcaagaaataaaacatgggtccccacggacagtcccatcagctgtccccgacgtggacgagcccacttcataggacctgatcgatggagaccgggtctttgcactacaggctataaacaaataccaggcccaaacaaaagcatggcgtgaccatgcagtcatcccgagggaattcagcgaatgagacctcgtactcgtccggaccgctcggacagagtcccgaggcaaactggagcccaagtgggagggccctttcatcgtcagga

SEQ ID NO: 26418 - DNA, 355 bp, Zea mays
  unsure (1)..(355): unsure at all n locations
agctggtgaagattcttcatcccaacatgtgctagtcggcgatgccagagccagcccatgttagtcttagcaattaagcaagtgtcgagtttagctctatcaaaatctactaagtatagctgaccctctaacactcccttaaatgctattgaatcatcacttcttctaaagacagtaacacctacatctataaaaagacangtgtagcccattntgcataactgcgaaactgaaagcaagttgtaatctaaagaatctacaagaaaaacattggaaatggagtggtcaggagatatagcaattntacccaatcctttgaccaaaccttgattcccatccccgaatgtgatagctc

SEQ ID NO: 26419 - DNA, 485 bp, Zea mays
  unsure (1)..(485): unsure at all n locations
cttcggcggcatgacgaaagtcacagcttgccgaatgttgttgaatgagttcaccgacagtgggcgcttatgttggggacttgttctgaaatgctatgagttaagaacaaggcaacacagaatgttaatgattaaagaccttcgtccttcgaagcattatttcccttaagatataatgatcttcagacgaaggctatgaaggatgtaccttcattatctcagtgtataataacgaaattagaagcatgcgaaacatggaaaataatatgaataattatatgacatcctccatatatttttattggatcatcatgaataaacatgaactatattgaattacattcataccttcggcttgacagaaggtgaaaattctaatgtgacgtgcgagtgaatacaagagtgtgaacagtatggtgctactgttcacctatntatangcacaggacatagccctgtgcaaaatacatctatgcncttgacat

SEQ ID NO: 26420 - DNA, 407 bp, Zea mays
  unsure (1)..(407): unsure at all n locations
agctngagtcaattcttctgcaaaagattgttgatgcccaaagagatgataagggaatgaaacacattcacgagaaaataaaggccggtaaagaaaactgttttagaaaggatgatcaaggcattgtatggtttaataactgcatagttgtgcccaagaatgatgaagtctgccagcaaattttggatgaacctcatcttagtcgctatttcattcatcccggaagcactaagatgtatcatcatctaaagcaacattattagtggacaaaaatgaagattgaaattgcacgctttgtggcgaaatgtgacacctgtagacgtgtcaaggccatccacatgaagaatgctggtccactgcaatcttttgctatcccgacttggaaatgggaggacattagtatggac

SEQ ID NO: 26421 - DNA, 485 bp, Zea mays
  unsure (1)..(485): unsure at all n locations
tacttatagtggatcctctaaaagtcagctgtattgtcttgttaagtcattacctgaatctagagttctttctaccctagttcaagcacttggcctgcactagctgtcttttatcaccttttttctttactggattgctacgtgtaggacagtgaccaagtcttcatatccgagaagtaacagcaatctgaatcgattaatacccagctggggatctccaaccacacgacatatgtagcacttaacccttggatatgtcaactcgccaccgggtttcttaagaccagatcgggttaacgccaaccgagagcacagatacaccaccgtccagcctcttcccacggagggtacacgctactctcgccatctctccactcccattgcgggttggcctttctagtattagtctgcccgaggcanagctgacccatgacaaggcatgtggctagctaaaaggtcctcaatcatcaagcctacatcgacac

SEQ ID NO: 26422 - DNA, 301 bp, Zea mays
  unsure (1)..(301): unsure at all n locations
agcttgatattcagcagacttactttatgctgagaataaccaccgaagagcacattcaagttggtcacctccaggtgcgatgaataggattcctgcgcctgatccctgcagatttagcgagccttctaaatacatncaccatactttcgcagtctctgagtaatgtggcacttgttgttgggttcactactgataccaagtccacctatgctagaatcgttagtgcagtacgaggccgaaactcaatgttgtgtgctcccagctagaacgcatccttggctgttattacaatggcttattt

SEQ ID NO: 26423 - DNA, 468 bp, Zea mays
  unsure (1)..(468): unsure at all n locations
tgagcggatctggtatatcttcttaccgagtccctggtgtccaagcagcgacgaagtctgcttacgcctgtgactgaatngaggatctatgcacgctaacaatggtgaattcgttaagctccgcatcccactatccaatccttccagtaactgctctgttcctcattatgtccttcataggctgtgatgaaagaacaattatgtgatatacttgataataatgtcgaagctatctataggccattaacacaacatacaacaccttctgcaatgctgtgtaatggtactgtgacaaacttacaacttccgagacgaaggacactagagcttgctctttgacttaggcatctaacttgtcctgtacaagcaccacactcactgtagagtgcgaagctgccacatatgagagcaatggagccnctgtcgaaggtggaagtaatgtcgctaaatcatcaaatatcgatcaac

SEQ ID NO: 26424 - DNA, 355 bp, Zea mays
agcttatgaagattcttcatcccaacatgggctagtcagcggtgccagagccaacccatgttagtcttagcaattaagcatgtgtcgagctcagctctatcaaaatctactaagtatagctgaccttctaacacacccttaaatgctattgaatcatcacttcttctaaagacagtgacacctatatcagtgaagagacagttgtaacccaatttgcataattgagatacagaaagcaaattgtaatctaatgaatctacaagaaaaacattggaaatagaatggtcaggagatatagcaattttaccaagacctttgaccaaaccttgatttccatccccgaatgtgatagctc

SEQ ID NO: 26425 - DNA, 476 bp, Zea mays
  unsure (1)..(476): unsure at all n locations
tctaagggagaacacgtggtaggtttgtctaacgtgcaattcgaaaaagatagaccttgtgcagcttgtcaagcaggtaaacaagtgggaggagcgcatcacagcaagaatgtgatgagcacttcaagacctctggagctgctgcacatggacctcttcggacccgtcgcctatctgagcattggaggaagtaagtatggtctagttattgttgatgactnttcccgcttcacttgggtgttctttntgcaggataagtctgaaacccaagggaccctcaagcgcttcctaaggagagctcaaaatgagtttgagctcaaggtgaagaagataaggagtgacaacgggtccgaattcaagaaccttcaagtagaagagttccttgaagaggaggggatcaagcacgagttctccgctccctacacacctcagcaaaatggtgtggtagagaggaagaacaggacgctcatagatat

SEQ ID NO: 26426 - DNA, 449 bp, Zea mays
  unsure (1)..(449): unsure at all n locations
agctngatctaagtggntagcacaaaatacaagtctatcagagtaaggagactagttcaatcttgcaatggttttctctttcgaatgtgcagagtgaacttagaagcaacactaagggatttgtatgaagatcagcgtaagagaaattaggagggaagaggtaaacaaattgcaaacaatcaaacataaagacatgtcatttatttaccgaagttcggtttcctaatgaaacctagcatcccaaaggaccgggtctctttcaacccactcaagtggttccaaagatcaaagttgagacctctctcttttctcaatagttttaaggtcctccacacgcttggaggtacaatctattattgccttgcaccanagctcaatgatcacatcacaagctcctcagatcactcatgtgcactagctctatntatcacanaggaatgactaaatct

SEQ ID NO: 26427 - DNA, 498 bp, Zea mays
  unsure (1)..(498): unsure at all n locations
ataaatactaagcttggcaccctcagaacccttngcgttggcacttttccttgttactaagagcccaaaatacacgctgagcctaacgatggcgttggnggtcagctggtgtatgtagatttcaaactattttaaaacctcaccaatcatctcataaaagggggaactgaagtcctgccctgaagaagctgatgaagactacaacttcatcctctttcggctctggaattcgtctctctccagcaaaacgaaccagttcatcatcatcttctccaaaatatcctagtttcttcattagaactaaatcctcagctttaaccgtggatctcccgaattcaatatggttgggcttagtccgacataggatattatcatcattctcactttcagcttcagccacggtcctgttagcttcggcatcagtaatacctttggccataggttcttgcttcactaccaacccagaacgcctcatcattactagatgggagctgtctc

SEQ ID NO: 26428 - DNA, 396 bp, Zea mays
taacccttaatcaataataaatggtaagggcatgtatgtaattttacataagatgcgtcctgtgcctataaataaatgaagagtagcaccgtactgttcacgctgacttgtattcactcgcacgtcacacttggattctcaccttctgtcaagtcgaaggtataaatgtaattcaatattggtgatgtttattcatgattatataatgagaatataaatagtctaatgatatcatatgattatacatgttttatttatatgtgtcatatgatcctacttttcattatgtattgagatgatgaaggtatgcctttcatgaccttcgtctgaagatcattatatcctaaaggagataatgcttcgaaggacgaaggtctttaaccattaacattcatg

SEQ ID NO: 26429 - DNA, 481 bp, Zea mays
  unsure (1)..(481): unsure at all n locations
actaagctgctagctctgtcctagaggcttncatggcgaaagggtttgtttcttcatnacgtccaagatttntggtatgccaatggaagatgccgaaggagtttccatagagcgcttctgcggagaagacttcttctctttatcacgtctcgactccacaattatccgcttcttatatacgaaagtttcgacgacatcttggaagcttcagtttctttagaaacttttgatgtttttgctagtctttgcttttatccttctcaatggatcttattgcttgtctttttaggatacttacaactctgttcttcctcactcccccagcctctgcgtcaagtctatcataattggtatattcgaagccgacggcatccatcactcggtgtagccatcacttttcccgtgtaccgaaggcggcagtcatcaactggtcatccttctagtatagttcccaaggatttattacacagcgtttaataac

SEQ ID NO: 26430 - DNA, 400 bp, Zea mays
  unsure (1)..(400): unsure at all n locations
gcttcttgaccaactcaacgttcaccaagttgttgcagctaccaccataaatgatggtatgtacacgacagtccttgacgatgaggaacatgttgaagaggttgtggcgctgtctgttgtcgttgtcactagccgtggcactcaaagctcgttgcagaatcaaggccttataggtctcggtcgctgttgtaccaagaacctcttcatcaccatcgtaactctctgcaatgttagctccaacagtatcttcatcttcaacatcagaagcactaacatacccaccatcaccagtagcaatgtatggccgtttgctggggcaatctcgctgaatatggccaagtccctggcagcggtggcacttgatgtcgaaggagcagcctatggaagaggtngtcatagc

SEQ ID NO: 26431 - DNA, 445 bp, Zea mays
  unsure (1)..(445): unsure at all n locations
tctaagctttcaggggaaccatttgtgactacaaatgtcattttttttatacacgaatngtagcgcatgtcaagcatggtagcaacgtggtgttcatcatccacacaagaatatcatgacgactgataggccgcttgagctactccacatggacctaattcgcccgatcgcttacataagcatcagcgggagtaagtactatctagatattgtggatgattattctcgcttcacaatggtattcttgttacaggataaatttcacacccaagagaccttatagggattctcgagacgggctcacaaatgagttcggctagaggatcaaaaagattagaagcgacaactggacggagttcaagaactctcaaattgaaggctctctcgaggatgatggcatcatacatgagttctcttctcctcacacgccacaacataatggtgt

SEQ ID NO: 26432 - DNA, 418 bp, Zea mays
  unsure (1)..(418): unsure at all n locations
agcttgtgaaggttcttcatccncacatgtgctaagcggcgatgccacagccagcccatgctagtcttagctattaagcatgcatctagaccggcctcttcttttgcaaaatcaactaaataaagtttgccgtctaatacacccttaaaagctaatgaaccatcgcttcttctaaagacagacacatctacatttgtaaatagacagttataccccatatgacataattgactaacagatagcaaattatatccaagactctctactaaaaatacattagagatagaatgctcattagaaattgcaattttacctaaaccttntaccttgccttgattcccatcaccgaatacaattgaatcttgggaatccttatntttgacgtaggaggtgaacatcttcttcntccccgtcatat

SEQ ID NO: 26433 - DNA, 367 bp, Zea mays
  unsure (1)..(367): unsure at all n locations
cctgctcatgcgcctgtgccccatgcgcctgggtccccgtncacagctgggccgcctncaccgngtgagcactccnggncaactncgncccgtgcgcctgggcctcgtgagcctgggcccccgttcccagttgggtcatctccgcccagatcgtctgggcactcagcgcctgtgctgcttatgaaagggaaatgtgcctttgggccatttctaagtattttggtgattaagtgtcaacacaagtgcttaaatgtgaatcaatacccatggatgaacaaagtgcaaatctagagcaaaggtatgtctctaagtcttagtacatttggtttgtgtctaatatacatgtctgagtattacaaacatgaag

SEQ ID NO: 26434 - DNA, 420 bp, Zea mays
  unsure (1)..(420): unsure at all n locations
agctngaagccatggtaagtagcatattctattttatacgaatcgactcaagcctagctataggtgcataggtttcaccgaaatccaaaccttcgactagtgaatatccctgggccacaagtcgggctttgttccttgtcaccacatcatgctcattctgcttgttgcggaaaacccacttggatcctacaacattttggttagggcgtggaactaaatgccatacctcattccttgagaaggtgttgagttccccttgcatttgcaacacccaatctgaatctcttaaagcgccttccaccctgtatggctcaatagaagacacaaaagagtgatgttcacaaaaatgagcgacacgagagtgagttgttacccccttatgaatatcaccgaagatggagttcacgaggtgatctcttt

SEQ ID NO: 26435 - DNA, 408 bp, Zea mays
  unsure (1)..(408): unsure at all n locations
agcttgaagtcatggtaagtagcatatactagttatatgcgaattgactcaagcctagctacgggtgcataagtttcatcgaaatccaaaccttcgacttgtgaataacctttgaccacaagtcgggctttgtttcttgtcaccacaccatgctcatcttgcttgttgcggaatacccatttggtacctacaacattttggttaggacgtggaactaaatgtcatacctcattcctcgtgaagttgttgagatcctcttgcattgccagcacccaatccggatctcttagttcatcctccaccctgtatggctcaatagaggacacaaaagagtaatgttcacaaaaatgtgcaactcgagatctagtagttacccncttatgaatgtcaccgagaatggagttgacc

SEQ ID NO: 26436 - DNA, 465 bp, Zea mays
  unsure (1)..(465): unsure at all n locations
tactaagctttgaactgaaccgaacctatgcaacccttgtctatttatttgatacacaattgcttgcacattcttacttcataataatcaacattgggcacaaataatattttatatgtatactccatgaaatatgagcccaataaacaataatacacctagaactaaacacctgcaaatctcataaataattgtagtcccttaatcgtgttgtcattcaattcaccagaacccactcatgacctagatgcactntcaatagttccttatgcgcgtttcacagtccttggagcacgctntaggctccattgcgcaattcggacattttgggtgtaatagctaatgcaagcttggtcagtgcagctgatggaataatctcacgtctgccatgctcccacagcagtaagcctgttacccaccttctccattatggcgagcatgtcttttatgcttctgcacgtgaga

SEQ ID NO: 26437 - DNA, 368 bp, Zea mays
  unsure (1)..(368): unsure at all n locations
agcttcccaagggtacttttaaacaactatttattacttgtttacagaanaaatcccgggaataattttattaggaattaaataattttgtggactctataaaattggtttggtaattgtttgcattttctgttatttttaatggtttttcttattcagtttactaattaataaaggaaaaccctaaatagtaactgggccaaaacttgcccgaggaggcccagcacggcaagatctcgcgcccgcgcacgaggcttgcgcgcaccgttctacttttgcactagagaccctgctgttttaactaaactaatatgagtcccgagcactattctcattactcagtgacatcagcacttgcatccctcttc

SEQ ID NO: 26438 - DNA, 377 bp, Zea mays
agaaaccgccgacgaagcgagtgaaaaagcttaactcggatcaaacttgacaagtcttatgtttaagactttagcacttgaattcttacttcttatgcaattgttggtacttgaaatattcatgaggtactgcacttagggggagtattcaaaactcaaattactcatgaaaaaccctagtgcaaggccaaaatgcaaatttcaccatttgcctattttctctaaaaattatctagcctatggcaaaatattttgaagaatatgagaaaatatatgagggtgccaatacctgtcccaacaagtgttattttgtgtgattataagctgggattcggtctgtgtggaaatcagatagtaaaattcatatattccctctg

SEQ ID NO: 26439 - DNA, 419 bp, Zea mays
  unsure (1)..(419): unsure at all n locations
agctntatcttgntgatttcacaacaagtaaagtgacgcctgagacttgtttagtggcaaagtccgacaagggttggctatggcatcgccggctagcccatgtcggtttgaggaatttggccaaacttcaaaaggataatcacatcattggactaacaaatgttgtatttgagaaagatagggtttgtggcgcatgccaagcatgaaagcaacatggagtcccacatcaatcaaagaatgtggtcacaacaaagaggccattggagcttcttcacatggacctcttcggacctgtggcttacattagcattggtggtagtaagtatgggttagtcattggtgatgatttttctcgattcacctgngttttctttttgagtgataaaggtgaaactcaagagatattggagaaattcatg

SEQ ID NO: 26440 - DNA, 500 bp, Zea mays
  unsure (1)..(500): unsure at all n locations
acacatagatactcaagcttgcaagccctcgaacccggccagacttcaccggaggtcctttatcgacctcaccggacttcggtcttccgccgccgcgcgtggaccgagctatccagtgagtctccgcccaattccttgcgctcatatcttcgctggcatcccgtgaacctccctgacccatccaattgaactatctcgccgtgatccggccggactcctcaccgccgacgagcatccccgcctgcgcgcgtgaaccgaccgactccggccatctgcgacggcgtcccgcacaccgttgtgatccccgagacttccccttcgtcctcgaccacttcaccctcgccgccggtaagccccttcgcccattcttccatcgcggttactgtttaaggtagaagaaggacctcgggttaggatttgtagaacccgaggcggttttctgtaacgtcagtgactcatgtgaatagtagcttaaggactgatccgcgaagaanacttga

SEQ ID NO: 26441 - DNA, 313 bp, Zea mays
  unsure (1)..(313): unsure at all n locations
agcttgcgctgcacatggcgaggacctcccgcccgccccgcctgtggatcctcagtccatcgccgccgagcaagccgagaccggcaccactgacgtcgacgctcctcccgctgctgcgggtgcagccaccgtcgccgccgagcgccagggagcaggaacatacgcgcagccttcccaagccggccggcccagccctcgtggatctgtacctgaccgggcgcacggcgggcttcacggacacgcacggnctgaccgacgccatgctcagcttgatccaacaacacgcgcgtgggagaagccgaacccgatacac

SEQ ID NO: 26442 - DNA, 468 bp, Zea mays
  unsure (1)..(468): unsure at all n locations
ttaagggtcaacctcttccactacacccaggatatattcaatctcactaatagcctgantaatttgaagttactctagcacattgtctgctatcacccaagtagtatggaatcaagaattgaccttagcatgggatttccatgacaccacattggttttggccccataaatttacaatttcaatcctaggaagtatgccatttcttccaatttttcttgagaagggaactgcatcagaaagccatcatggcgattggtgtctttccacgtcctccccaaagaaatcattttcacgatccttagttgaagcatttccttccaaaatcttgatcaaacccaatagattttgtttagattttttggagttcagtttagcaaattgggaagtatagaaactaagcgcatccaaagccatactcacagttggcattatgtggttgctcttttatcggcacacacacttatcag

SEQ ID NO: 26443 - DNA, 372 bp, Zea mays
gtcggtctatcctatcgcgagttacttatcagagactgtgatgagtgagggctgcgtatacttgacgtgcaggagaccctctgctcggtcaagcttggatgcttacgagtacttcgctgatctcagcatccgatttgctaatctgccagaagccccaattgagatcctgcttgaaaaatatgctttctggatgaaacattggacgacaagggggtctccggcgttatacacacggatggagggcaacccgacaaaaatccaagcaatcatcaacatgacacccctgcagtccgctagggatgtccagcgactgacaagcagattggccgcttgaacgggttcatttaaaatccgtagaccgagtctaccgtc

SEQ ID NO: 26444 - DNA, 437 bp, Zea mays
gctgtcacgctatgcacacataagacagaatgctgcttcagcatatcaaccgaagcctatgctcctatgtgacgatataacagatcaaacggtactggtgggatctcagctgtctaatgagccagaaacaactctgataaggatgctgatcatcaacaaatatgtatttgctcggacagacaatgatctttgcggtgcctacagagacgtcatcaaacattcacttattgtggatccatctttcaggcccatgaagcacacacttcggaagaagtctgaggataaaactgctagagctcggaactaaataaatagactggtagagctggcgtatcagagaattgactatccagaatggctcactgactactgtatcgtgaagaaagctgatggcacatggacaatgtgtattgcattcgcagatctcaacaaaacgt

SEQ ID NO: 26445 - DNA, 461 bp, Zea mays
  unsure (1)..(461): unsure at all n locations
agcttcttctttcgctaagtctagccaacataatttctaaggactcgatctctgatccagcacccgaatgactgaatctcctaaggctgtctccaacagactgtgtatatgtatggtatagagtatacaccatttagatattcgagtttgaaatagtaggaggttatgcgaaagttgctggagagtggtagactctaacgcccctactgtgctggccaccgacgcatgcagaacctaacgtagatgccagcacactacctcaagacaccacggtgactttgtccgcaatttatcttgtcttgggtcttaagttacgactagctactgcattctcctcttcctttatagnttatacagtactagtttattatagataaaattaattagacatctagaggctatcaacaaacaccttgcgtgccttcaaccaggtgtggtggaagtggaagtcaccaatttct

SEQ ID NO: 26446 - DNA, 450 bp, Zea mays
tggaggcgtcgattggttgccgacttgatgtggactcctccttcttttcctccgttgccttgaatgcgacgggttgagcttcagatgtggaaggatcatcaagctcgttgatctttctcgacccttcgatcatgcactcaaaacttacaaaattcccgataacttcctcgggggtcattttagtatatctaggattaccacgaattaattgaacttgagtggggttaagaaaaataagagatcttagaataactttaaccatttcgtggtcgtcccacttcttgctcccgaggttgcgcacttggttcaccaaggtcttgagccggttgtacatgtgttgtggctcttcccctttgcgaagccggaaccgaccgagcatcccctcgatcgtttcccgcttggtgatctttgtgagctcatctccctcgtgcgccggtttgagtacatccc

SEQ ID NO: 26447 - DNA, 428 bp, Zea mays
  unsure (1)..(428): unsure at all n locations
agctnttgatgatcaaagccatctcctcgntgtcgagctctgaagcgtcgattgggtgtctacttggtgtagactcctccttcttctcctccgttgccttgaacgccaccggttgtgcttcggacgtggagggatcatcaagctcgttgatcttctttgagcccttgatcatacattcaaagctcacaaaattcccgataacttcctcgggagtcattagtgtgtatctaggattaccacgaattaattgaacttgagtgggattaaggaagatgagtgatctaagaataaccttaaccacctcgtggtcatcccatttcttgctcccgaggttgcgcacttggttcaccaagggtttgagccggttgtacatatcttgtggctcctccccttggcaaagacggaagcgaccgagctcccctcgatcg

SEQ ID NO: 26448 - DNA, 480 bp, Zea mays
catgagaggtcatccaccaacgtttgctcactcttttgaccccatggatgctgaagactggctgcacactgtggagcgggagttgcataccgctcagtgtgacgacagggagaaggtcctgtatggtccccgtctgttgagaggagcagctcagtcatggtgggagtcttatctcgccacccatgccaaccccgacgccatcacttgggaagagttcagaggtagctttcgtcagtaccatgttcctgcaggtctgatgacagtgaagaatgaggagttcctggcccttaagcaagggtcgatgtcagtcagtgagtatcgagacagggttctgcaattgtctcgctatgctcctgaagatgtcaacaccgacgccaagagacaataccgtttcctatgaggcttggttgaccctcttcagtatcagctgatgaatcataccttcccgacattccagcacctgattgacagagcaatcat

SEQ ID NO: 26449 - DNA, 330 bp, Zea mays
cgagccgatggactcctacgcctgctggatacggatacctcactcatcaccttccacgacaagcaactctcgcccgcacaaacatgcctgttaccgacgaacaaatacagatgctcggaataagacgaaaaaaggcgcacctctacagcgcaacgagggtgcgttctctggcatcagcggccgcaaaacgcacacgctacaaggcgatctgatcctgcaagctcgggtcttcacgctggaagggggctagcaccctcggcatcgacgacgccttcagcgagatccgacccagcctcggacggcgacgcggtccaaggacttctacgggaa

SEQ ID NO: 26450 - DNA, 476 bp, Zea mays
  unsure (1)..(476): unsure at all n locations
tctaaacggagagcacattgngggactaaccaatgatcatcttgttaaagacagggtttgcagcgcatgtcaagcanggaagcaagttggtgttcatcatccacaccagaacatcatgacgactaacaggccgcttgagctactccacatggacctattcggcccgatagcttacataagcatcgacgggagtaagtactatctagttattgcggatgattattctcgcttcacttgagtgttcttattgcaggatagatcccaaacccacagagatttaaagggattctcgagacgggctcataatgagttcggcttacggatcaaaaagattagaagcgataacgggtcggagctcaagagctcacacataggatgcttccttgaggacgagggcatcaagcatgagttctcttctccctactacgcccaacaaaatggtgtattggagaggaataatacaactctacttgaca

SEQ ID NO: 26451 - DNA, 380 bp, Zea mays
  unsure (1)..(380): unsure at all n locations
cacacatagctctttngaataccgttgatcatatctcttttatatgctatgactaatgtgttttcaagtttatttcaaaccaagtcatatgtatattgaaagggaattggagtcttcggcgaagataaaggctttcactccgtaactcatacttcgccaccactccgagcaactctctcttctttgggggagaaatgagcatcaaggaaaaggacttcatccttgggggagagagtaaaagctcaaacgcaaaaggacttcgtctttggtataatcttaactcacttatntatgaccaaaggggaagattgcacttcgagggctctaatgattccgtttttggcgattcatgccaaaggnggagaaagtatgagcccaaa

SEQ ID NO: 26452 - DNA, 465 bp, Zea mays
  unsure (1)..(465): unsure at all n locations
tctatagggagaacacattntatgattaacaaatgttcattttgagaaagacaggatttgtagcgcatgccaagcagggaagcaagttggctctcatcatccgcataagaacataatgacgaccgacaggccactggaactcctacacatggacctattcggcccgatcgcttacataagcatcggcgggagtaagtactgtctagttattgtggatgattattctcgcttcacttgggtattctttttacaggaaaaatctcaaacccaagagactttaaaggggttcttgagacgggctcataatgagttcggcttaaggatcaagaaaataagaagcgacaacgggacggagttcaagaactctcanattgaaagctttcttgaggaagagggcatcaagcatgagttctcttctccctacactccacaacanaatggtgtagtggagaggaagaatcgaac

SEQ ID NO: 26453 - DNA, 429 bp, Zea mays
  unsure (1)..(429): unsure at all n locations
agctnganagcatggannaatatttttatctttctcatcatatatatatatacaaagcactactgcaaagtggcccccacgatttagaaggtttcgctattctagcgaggggaacgtgttttttcggaccttcggttaaaggccttcgttcgttttacagtctgaatttgttacaaagaaacaaactaatactgcgaggggctactgttgggggccttcgtcttccgaaggtcctaaaaaacacggctaacgaccatttgttatcagcatgttactaagtgttacaggagcttcgtcatcagaaaagctccgcggataataatggaagtgcaacgaagtaagcttcgttatgttgacgcatgaaggcgacgtaaggagaaggtattgttcaagctgctaattgcaaatgacaatattatccctgtgata

SEQ ID NO: 26454 - DNA, 447 bp, Zea mays
  unsure (1)..(447): unsure at all n locations
taagcatttctcctgaagtnntgaaaggatctctgcttatttgagtatctatccacttcagctntcaggcttgtttcaaaatatttcttttcttgctcgaattcttctgattgacggagcaattcgttctttaatttgtcattttcagtttggacttcagccaaagagccctccatggtctgaataacaaaatccttcttttctaatgcaccttcgtgctctttgaccatgatttcaagatcttggattgcgaagtctttctttttcatattggcttcgtagttntcaaccttttcagccaaatcttgaatgacggctatatttttctcttcctccagatcttgttgcattttcagaaccttgcttaataatatgctctgtcgaaatgatcttcgctagaacacgactcacaagtttataataacagtgataaaataacacacatat

SEQ ID NO: 26455 - DNA, 465 bp, Zea mays
  unsure (1)..(465): unsure at all n locations
agctntatataaatgagaaatagcccgacatataccacttcatcaacactagaatcgacattntgtccaaactgcaggctggatacttcatctgatgtctgctgtatagaattcatttcagacatatgttctagaattatatactcactgttggagtagtattcccctgtttccttgctactggttttgttgtgcactatgacttgtgtactagagaacattatattcctatgtggtaaatgactgttcagctcttccatggtacattaggaaatctatgacatcgatgctgctgccttcaattggttccttgctagtgccgggagaaaatggaaggaattcaaggcaaccctaaaggagcaatactctaatgagaaactaacaaatgaggagcttgagacaaaagttggtgacagagttgatgatgatgcttggaaatttctcacagaatnattggatgtctct

SEQ ID NO: 26456 - DNA, 386 bp, Zea mays
gagattggagaccattggtgctacttacattgtgggttatcgtattaggtcagagcgaagccagatctgtcggccgccgccgaacgactttgttgttcctgtccactctgaagtcagccaggaacttcagctttgcttcttggatcagatggtcctggcgctcctcgaacaagagatgttcttcatccggcgaggcttcccatgtcggcgtgatgatattgctggtggaaacctcagagctatctcttgaatctgccatcgagggccgatttgataggtctatatgcgttaggcgcagcggagacgccaaaaagtatgttgacgcttttttggggcgccaaatactcaagaagaaccggcggatgtgctctctggtcaagcgcgga

SEQ ID NO: 26457 - DNA, 369 bp, Zea mays
  unsure (1)..(369): unsure at all n locations
agcttgctctcggcgctcgcccctgatttcttctctcagctccaccgcgacgtgaagtccctgcgcgcaagctatctgttggccgcgcgcgaactcctctgcttggcccgtcgtcgttctccagcgcactcgatggtttcgtcgtctcgtcttgacgtcagtctctacgtgacatctctgacgtgggttcacgccgacaaaagaatcccaagaagatatagagaagcaagcctttgatcaatgttcaagtggtcggcgaaaggccagaacaagaatcatcaccgtttatacggagttctacttaatatgaaaagattccaagaatngtggatagaagagaangtgaaacttcgtgctatactcgtcagc

SEQ ID NO: 26458 - DNA, 460 bp, Zea mays
  unsure (1)..(460): unsure at all n locations
tgtgaagatntnttattccaacatgggctagttggcgattgcttagccaacacatattagtcttagcaattaaacaagtgttgagttcagctgtgttctcattaaaatcaactaaatatagctgacccactaacactcccttaaatgctattgaatcatcacttcttctaaagacagtaacacctacatctgtaaaaagacagatgtagcccattttgcataattgagaaacagaaagcaaattgtaatataaagaatctacaagaaaaacatttgaaatggaatggtcaggggatatagcaattttactcaaacctttgaccaatccttgatttccatccccgaatgtgatagctcgttggggatcttcatttttctcataggaggaggacattctcttctcccctgtcatggtggttgtgcatccgctatcaattatccagcttgaacccctcgatgc

SEQ ID NO: 26459 - DNA, 412 bp, Zea mays
agcttccaccagttgaaggtccttgcttactgggcgttgaggcgactggtcgagttgatagtgaatatctgatctacccctgtccttgtgctttcagagagtataacaattcctgggtacatatgaaaacgacgcagcagctttagaaaagaagaaacgatgaaataaataggagtgtttgggcagtcatttggagagtgagaataccagatctccttgacgggtggcgagggaagggtagagatccgaaagagacttctcttcccacagtctctctaaaccattaggctgttctggctttgtctcgtatttacaggtgtaattggctgacaagcatgcatccttgcttttcctgatatatatctcgacttctttgggttgccgagacaactggagagcaacaaactggaaa

SEQ ID NO: 26460 - DNA, 463 bp, Zea mays
ttatcaaatggacgtgaagagtgccttcctcaatggactcttttaggaagaggtctatgttgagcaacctcccggctttgaagatagtgagtatcctaatcacgtatataaactctctaaggcgctttatgggctcaagcaagcccaaagagcatggtatgaatgcctaagagattttcttatcactaatggcttcaaagtcggaaaggccgatcctactttatttactaaaactcttgacaatgatttgtttgtatgccaaatatatgttgatgacatcatatttgggtctactaacgaatctacatgtgaagaatttagtaggatcatgacacagaaattcgagatgtcaatgatgggggagttgaagtacttgttgggatttcaagtgaagcaactccaagagggcaccttcctaagccaaatgaagtatactcaagatattctaagcaagtttgggatg

SEQ ID NO: 26461 - DNA, 388 bp, Zea mays
  unsure (1)..(388): unsure at all n locations
agctnttgaaacaaggagagaaaatttcatatcttgacaatgcttctcaaaatcttattcatttgcctttgactatttgcaaaagatctttgaaaagaatttacaaaagaatttgcaaaaacaaaacatatggtgcaagcgtggtccaaaatgttaaaaacaaagaaacgatccaagcatattttgtaagtattaatattggctaaattccaagcaacctttacacttacattatgcaaactagttcaatgatgcacttttatatttgctttggnttgtgttggcatcaatcaccaaaaagggggagattgaaagggaattatgcttacacctagttcctatacaattttggtgggtgaattgcccaacataaatctttggactaact

SEQ ID NO: 26462 - DNA, 469 bp, Zea mays
  unsure (1)..(469): unsure at all n locations
cttgattntcccaagatttacatggttaaataataaatctatgtttctatgttgattntataaatcatgtgagaaatatattaaagatttaactaagtcaactttaatctaagttataacttgattagagatcatcttgtagttggtttataattatagacaatttaaagtatcacatttaactatgattggaagagttgatctaataaataaacatggggtaaataaatatttattttgaagacatgttatatggtaaaataaggttactaaagtgtaggtaatattattatgaagctaacgcaacttgaacgggcaaaatcggggttaaaacataggagttatgaattttacaagtttctagaatttattnttgtactgaaaatcatatttcagaattatatttataaaatccgaagcctgtatgtacagtggacactattcttataaagctcatgggtgatttcat

SEQ ID NO: 26463 - DNA, 429 bp, Zea mays
  unsure (1)..(429): unsure at all n locations
agcttcttcaccatgtaatcacagttatcttgagaaggttgagcaatgcacttcccttttagttgtgtcaagctcattttagcctctcattttcttctttgagcttttgatatgtatcatcatttgtttctgcaaattctagctcaaaggaagatttgcttgtcgacggacaacaagcattagcacatggtaatgtagtttcaatttgaatacatgtgcatgagtgaggttgttgggattttaagttttctatcacaacctcatgagcaatatttaatatgatatgatcatccataagattttcatgagaacataggagcatatcatatttttcttganaagctagattntcatcttttagctnttctacttggtccttaagcaaggcattcctatttactaatngagcgacacaatgtanagcattat

SEQ ID NO: 26464 - DNA, 425 bp, Zea mays
tctctgtcgacaagtccatcagcgctacccgcggaccgacctctggctctttggctataatgtctgggttgtgtcccttgagaggggacgcgaacgagagccttctagctgcagcgtccgtcctgcgaccatcgctgctgctgcaaaggtcgctggcgagtcgcccggagcttgacgctccgcaggctctccggtgtggaggttgatcatacccgcgggagtggaaccggagttctgtttggaatggcaccttgagtgccggtgtttgttcattgtggctgtcggggcctgaacatgtatgtatttttggcatgaagccgtgttttttcctcatttcgagcactaggactcacctgtcggctaactgaaccgcttcaccatgtgtgagatgcctcgtgcgaacgtgatgagtgaggtatcccgat

SEQ ID NO: 26465 - DNA, 396 bp, Zea mays
agctggaccgcagacatgcagaaggaaatgtgcgggtccctctagagggaccaggagacctgtgggatgaactcaaccgcagacgcacgggcagagatgcctgtgcctatttggagaagacgcatgagcgctgcggcaatcttgggcaagattccgcagcggttgcatcgcaggccccaggggatgctcgattccaggccggcatcccgttggctagagtaggctgtgctgccctagcagaccatctccgcgcggcgacgtggccgcccaagtttcggccacatctgccggaggagtacgatggcacgacaaacccatcagaattccttcaggtttatgtcaccgccattacagcagcgagtggagacaccaccgtatttggcacctacttccatg

SEQ ID NO: 26466 - DNA, 469 bp, Zea mays
  unsure (1)..(469): unsure at all n locations
gatgttagtggaatagaactaattggttatatagcgagcacttgcgaatcacaaataatcaaagagaaggacaacacaagggacacagtggtttatcccatggttcggtcaagtataacacttgtctacctccacgttgtggcgtcccaatggatgagggtcgcactcaacccctttcaagtgatccaatgatcaacttgaataccacgactnttctttgcttatctctntttcccgtttgcgaggaatctccacaagttggagtctctcgcccttacaacaaagatcacagtgaaagcacaagagtaagggtgggaagcaacacacacaaatccgcagcaacacacacgcacacaagccaagacttgagctcaaaatgaagcacgagttcacaactagaatggagctcaaatcactaacacagtcgatcaagtgcgcggagacagagtgtggaagacttagaatgctt

SEQ ID NO: 26467 - DNA, 447 bp, Zea mays
  unsure (1)..(447): unsure at all n locations
agcttgtncttcactgagaacacctttaggatctgtgttgccatcatgccgaatcaagagaagatttaaaaatgcgagtaggagtgaggaggggatgagagattcgcgcgttgttggggatcttctcaagaaggggccggccctggacaggtgccggcggtgcggccgcaacgggcctccgagaaccaggggccccctatacgtgtatgtgtatatatatagaaaatgtttatgtagattacaacacaaagattgataaaaggccaaagcccatcaacttacagtatgcatgcttgtttaagctcgattacttggcttctcgtggacgcttgagctgcaatcctctttgccttctcatggaagcctccactcacgttgtccaggctacaacaattgtctagcaccagcagtagcagctagcagcgacagacgggagggatcaccttg

SEQ ID NO: 26468 - DNA, 485 bp, Zea mays
  unsure (1)..(485): unsure at all n locations
actaagcttctaagggagagcacattntgngactaacaaatgttcattttgagaaagacaagatttgtagcacatgtcaagcagggaagcaagttggtgttcttcatccacacaagaacatcatgacgactgacaagccggttgagctactccacatggacctattcggcccgatagcttacataagcatcggcgggagtaagtactgtctagttattgtggatgattattctcgcttcacttgggtattctttttgtaggataaatctaaaacccaagagaccttanagggattcttgagacgcgctcaaaatgagttcggcttaaggataaaaaagattagaagcgacaacgggacggagttcaagaactcacaaatagaaggctttcttgaggatgagggaatcaagcatgagttctcttctccctacacgccacaacanaatggtgtagtggagaggaagaatagaactctacttgacatg

SEQ ID NO: 26469 - DNA, 422 bp, Zea mays
  unsure (1)..(422): unsure at all n locations
agcttcatcaactataatgacgcatgtgaccactgttcccgcacgccttctaccaacccacgatggggcgtacgatacgacaagaacgcaggctgaaccttgggcgcaaactctgcctcacccaaagtcgaccttggcctcaagacaaactccacctcgcccgagctctgcctcagctacctactccccgcaaatcccgtaggaggccactccttcaactgtggcgtgcagatctccgaatcctggagcgggctcggtcgcgacctcgggcagaatttcgtcttgcccaagctcggctctaacctcgatatttgcaatatanaggcgcccaacgtcaccatatactggagaagtaacatattacttagaggctttttgccatactcagtactgtgttaaccactatggcatgggcaaacccc

SEQ ID NO: 26470 - DNA, 491 bp, Zea mays
  unsure (1)..(491): unsure at all n locations
tctaaagggagagncacatttgggactaaccaacgttcattttgataaagacaggatttgtagcgcatgtcaagcagggaagcaagttggtgttcatcatccacacaagaacatcatgacgaccgataggccacttgagctactccacatggacctattcggcccgatagcttatataagcatcggcgggagtaagtactgtctagttattgtggatgattattctcgcttcacttgggtgttctttttgcaagataaatctcaaacccaagaaacattgaagggattcttgagatgagctcaaaatgagtttggattgagaataaaaaagattagaagcgacaacaggaaggagttcaagaactcacaaatagaaggctttcttgaggatgagggcatcaagcatgagttctcttctccctacacaccatagcanaatggtgtagtggagaggaagaatagaactctacttgacatggcgaggaccatgc

SEQ ID NO: 26471 - DNA, 438 bp, Zea mays
  unsure (1)..(438): unsure at all n locations
agcttactttgtgccttggcatactttcattttttgtaaagcattctccgaaggtcggtctcgtttccaattgatgtcattgatgtgatatgatgtatgatgtgatgctatgcgatatgatgcgatgatatgatgctaatgccgaagacacatacccacgctgaaacacgatatctgcgtccccttaggaaccatcaaaatctctttgccgtttatttttcggcttcaccgcttatttttcggtgtaagttctacatccacttaggaacgtcttttgaacttcttcgccttctatttcggcggtattcacgttgactatttgcgctntgccttctatttcggcggtattcgcgttgacttttcgcgcttcgccttatatttcggcggtatttggctctgcattccctttggaatgacttttgagcagaanacttacac

SEQ ID NO: 26472 - DNA, 482 bp, Zea mays
  unsure (1)..(482): unsure at all n locations
actaagctttgacgactaagccatgccggaaaatggtaccggtttttctagtacctgagtgaagccgggcgcggactttatccctcatgcgacctgagacaaggtctcccatgctagctatggtgggtacaagtgcggtcactgcacggcggcagccggggtcagtggagcattgtatgccaaggcggtgaggcctggacgcgaacggggaatcgatggggacggntgtcatgtgtggtgtcggagtaccctgacatgccgtgtgtttaggtttaccttgcaaggttaaaactcgattcgaatcgtctgcttctcgcagctaatgagactgcttgattccttgtactgcatcgagtaagaagtgaaatgtggattacatgagaataactgttgattgaactaattgcttgttaccatgtatgcttagaaggagccaatctagctaagttaatgatggtagaaattgaaaagctaaaagttga

SEQ ID NO: 26473 - DNA, 470 bp, Zea mays
  unsure (1)..(470): unsure at all n locations
agcttatacacaagcctaactaatcctactctagaactagaaacaccctccagcctcaggaacacctcgagtacttcttatcacctgcaataacatgggttcgaaaaccttgagtacggagtgtactttcgcaagtcttacctaactaaggaaaaatgactctcaaggatatgctggttaaataggaatcaaggaaaggcttgagcaagaatcaacttagatacttttgcagaaatagcttactaaagtgagtccttactttcaatattttaacaccggattaaatattaatagactctagttgcatgtagtctaatttcaccatctcatcaatacaacattatttttattcataatgtttacatcctgacctangttgcaggtcagagatcaagtctccactgtccgangatataatagcgatccgaatcgatttactcagctgaggatctctaaccacatgacatatg

SEQ ID NO: 26474 - DNA, 484 bp, Zea mays
  unsure (1)..(484): unsure at all n locations
accccatacttctagccatcttccggcagacagattattctttggtgtctgggaggcagtataagaagtcatcttcatctgtgccgctgaatactaaggcccctttcgaatacttcagttcttgggcatagtgattagcttcaaaaatttcttcttcagataatttcttccccgaagcatgtcgtacaatataatcaagtactttggaagatgcttcgggggcagcagcgccagtttcttcagccaaaatttgttctgctatttttggtttttcggcttccaaggatttcaccttggcaggctctgaaggcccggcttcaatttcagactgttgctttgaagcttcgacgacaaaggcttcagtttgtacttcggaagatttaacaatttctttggaggtgtgcttgaagatttgattgtctctaanacatctagcacattaaccatccttcttcttttangggtcactgctggacccttatgg

SEQ ID NO: 26475 - DNA, 471 bp, Zea mays
  unsure (1)..(471): unsure at all n locations
agctnntcatttagctctatagggtacaatatatcttttgtatgtcccttcggtacttattatttctatccatcataggttaaatcataggtctgatgtgagtatcattagcataattctttagatgcatagcaatattaactagataatgaatcataagtggagatgtacgataatacacaccaaataatgtaagggttgaatcatagaacagttcanaaaatcgtagtatttttctaccttacccccaatataatgttctttagttaaaagcaactggccaccttcacgacacctaggatactaagcatggatgacagtactcaacgaggccttacgaggaaacaaatgcttaagaattagatatgtacaactccatctaacatccatatccaaacctaattttatcagtgcgtgacaccaacggcaatgcacaaactcttatatgcaacaattctttaattagatgag

SEQ ID NO: 26476 - DNA, 479 bp, Zea mays
  unsure (1)..(479): unsure at all n locations
tagcanaagaaatttctagaatcaagaatattgagctcatgctttttctggtaaaagattgttcatcaagtggcttggtaaagatatcggctaattgatctttagtattaatgtaagaaatctcgatatcccccttttgttggtgatccctaagaaaatgataccgaatggctatgtgcttagtgcggctatgctcgatgggattgtcggccattttaattgcactctcattatcacatagcaaaggaactttggttaatttgtaaccgtagtcccgcagggtttgcctcatccaaagcaattgcgcgcaacaatgtcctgcggcaatgtactcggcttcggcggtggaaagagcgaccgaattttgcttctttgaagcccaagacaccaaggatcttcccaagaactggcaagtccccgacgtgctcttcctattgattttgcaccccgcccaatcggcatccgaataaccaagtaaa

SEQ ID NO: 26477 - DNA, 414 bp, Zea mays
  unsure (1)..(414): unsure at all n locations
agcttcgtgaaatattctctgaagctaatattgttntatgttgcctctctaatgaagctacacttcttctcgatttatcttgtgccttagcacgattttctcttttccaaaatattctccgaagatcaatactgtattcccttcttgttcctcatgcaatatgctgtatgatgcttatgttatgcaaaatgatgtgatgatgttatgttatgcaaaatgatatttgtgccgcagatacatatccctgcaatagagcacacacactntttatatcagcgctgacttttcgctgtaagcctcccttatgagcttcttcgccttttactttcagcggaatcagcgtttatttttcactgtaagactcccttangagcttcttcgccttttactttcggtggaatcagcgctgacttt

SEQ ID NO: 26478 - DNA, 481 bp, Zea mays
tcagctccatctatattatggatgactgttgagtcttttcttttccctcagcctttctggcagctgtctgacttccgtgaattgcaatacggccttgttccgaaggtatcttcatgcataagtatgctggatgaagaattgcttcgaaagtattaagtgtcccacgaccaatgattgcattgtaggggtattccatgtcaacaatatcaaacacaacttgttcagtccttgtgttgtgaacaaatctgaaagtcactggcattgtgatcttgccaagtgctacgatctgccttcctccgaagccacaaagaggatgtgtagcatcatgaatcttgtcctctggctcttgcatctgtctgaaggccttagcaaatatgatgttagctgcactgcctgtatcaaccaaaacattgtggaccagaaatcccttgatgacacaagatatgaccatagcatcattatgatgataatccttgagctg

SEQ ID NO: 26479 - DNA, 448 bp, Zea mays
  unsure (1)..(448): unsure at all n locations
agctnttagtgtcttatttatggactctcttgtcaaaagttggcttcttgtggggagaagtatcgattatgggaaatagggggagtttttgaaatctttgatcaatctcttttggaatgactctctttatgcttcaacatgtgtgtttgacttaaagatagagatttgagtttgatttgcaaaaacaaaccaagtggtggcaaaggatgatccatatatgccaaaattgaatcaaaaccaatttgagtttttatttgaagtgattttgcacttgtgctatctactttatgttgtgttggcatanatcaccaaaaagggggagattgaaagggaaatgtgcctctgggccatttctaagtattttggtgattgaatgccaacacacgtgcttaaatgtgaaaatatgcccaacgatgatcaaagtgcagatcacaagtaaaggatgttc

SEQ ID NO: 26480 - DNA, 479 bp, Zea mays
  unsure (1)..(479): unsure at all n locations
tcagctccatctatgttatggattgctttcgagtctgtccttttttcttcggcccttctggcagctttctgacttccatgaatagcaatgggcccttggtccgaaggtatcttcatgcaaagataagctgggtgaagaattgcttcgaaggcattgagagtaccacgaccaatgattgcattgtaagggtattccatatcaacaatatcaaatacaacttgctcagtccttgtgttgttaatgaattcgaaggttattggcattgtgatttttccaagtgctacgatctgccttccaccgaagccacaaaggggatgtgtggcatcatgtaatttgtcttcgggctcttgcatctgcctaaaggccttagcaaatatgatatcagctgcgctgcctgtatcaaccaanacattatggaccagagattcttttgatcacacagagataaccatagcatcattgtgtgggtaatccttgag

SEQ ID NO: 26481 - DNA, 432 bp, Zea mays
  unsure (1)..(432): unsure at all n locations
agcttctanagggagaacacattntatgactttccaatgntcattttgagaaagacaggatttgtatcgcatgccaagccgggaagcacgttggcactcatcatccacacaagaacatcatgactagtgacaggccactggagcttctacacatggacctattcggcccgatcgcttatataagcatcggcgggagtaagtactgtctagttattgcggatgattattctcgcttcacttgggtgttctttgtgcacgaaaaatcttatacccaagagaccttaaagggattcttgagacgagctcaaaatgagttcggcttaaggatcaagaaaattagaaacgacaacgggacggagttcaagaactctcagttgaaagcttcctgagaggatggataagcatggttctttcttctacacccacaacaaa

SEQ ID NO: 26482 - DNA, 502 bp, Zea mays
  unsure (1)..(502): unsure at all n locations
ggacctatgatactcagcttgaagaagatctaaagatataaaaagataagcctctttgattanaaccaaccgggacgtcaagatcacaaaggaacgaattgaagaaaaaggtctcgaaacgtcagaccgaggcatcctaaacaaagtcctaaactaacctaaatttctttcaactacaaaaactacaataaaatctttaataaggggcatataaaccatacaatcgccaaaccattctggatacctgaaaatatagtagatgcatttttgataggttggatgtcggatacctgaatcgaccatatcataatcctctctctatatatatatactaggtagtcgtccgtccgtaaaatactacagtttctttatattatataggtagatnttgttacataatgcatccaattattaggatatttatattataatatctcttctctatataaaacaaaatgtgcgcatgttgtggtgtagaggtcactcattcgagctgaacacc

SEQ ID NO: 26483 - DNA, 447 bp, Zea mays
  unsure (1)..(447): unsure at all n locations
agcttacctgtaagggaccctacgttccaactacctacatggatcctagtcgactcaactagcnttcttacccctcgcacccattcagaaagatgcgaagacccttgcacatttgtcactacacccaggcaccgatgtagcgcgccactaaggaagcgatgacctgatccttgctcacttgacaccgcatccagatcacgacatgacgcgccaccaaggggtggcgtcctgcccttcccttgcccatttaacaccatacccgggttgtcgcaaaacctcccaagttatcgggcccacatgcacatgtccttgtctcaaagacctcagacggctatgcatgtgcaccaaacaacttaataggatctatctgagtgcttcgaggaccccggataaacgacttaccgccaagaccgtatgattaagtgaacataaatcacatacaaacac

SEQ ID NO: 26484 - DNA, 485 bp, Zea mays
  unsure (1)..(485): unsure at all n locations
tcattgataaatgaaggggtgggacccttgcgccttaattatcgttttctggttcctcccccaacatgatatctggaagtcattgccaccgacatcgatgtccacaatcggcttcattctcttctagactctcacggtagtggatgggtctggcacaacgtcacagtgatcctccacacggaagctatagcttcatctgcatttgacgtcttcaactcatcgaccaatgacattccctcgtgttgttgcagccgccatttgattatttgagagatngagcagaccccacctcaacacccgattcaccctcatccatattggatctgcttcatctacattgcatgtgaagagaaagagtgggggaaacgacatgggacacgaagcatangatggcgatatgcacattgtgaagccgatagatgcaatttgaaggggtgcaagcctattattggtcatccaaatgcgggcgtgtggctagaaataaa

SEQ ID NO: 26485 - DNA, 420 bp, Zea mays
  unsure (1)..(420): unsure at all n locations
agctttgcctcaggcagactaataccagaattgccaacacgcaatgtgagtggagagatggcgagagtagcgtgtaccctccgtggcaaaagactggacagtggtgtatctgtgctctcggntggcgtgaacccggtctggtcttaagaaccccggtggcgagttgacatatgcaagggttaagtgctacatatgtcgtgtgattggagatccccagctgggtattaatcgattcgaatcaccgttacttctcggatatgaagatttggtcactgacttacacgtagcagtctagtgaactcaagggttgataaaaagatggctagtatgccaagtgcttgaactatggtagaaagaactctatatgcaggtaactttacttaacctgacaagtaaaaatggatttaaggatccactcat

SEQ ID NO: 26486 - DNA, 476 bp, Zea mays
  unsure (1)..(476): unsure at all n locations
tctatacggagagcacattttgggactaacanatgtcattttgataaagacaggatttgtagcgcatgtcaagcagggaagcatgttggtgttcatcatccacacaagaatatcatgacgactgacaggccgcttgagctactccacatggacctattcggcccgatagcctacataagcatcggcgggagtaagtactgtctagatattggggatgattattctcgcttcacttgggtgttctttttgcaggaaaaatcacaaacccaagagacattgaagggattcttaagacgggctcaaaatgagttcggattgaggatcaaaaagattagaagcgacaacgggacggagttcaagaactcacaaatagaaggctttcttgagaatgagggcatcaagcatgagttctcttctcactacacaccacaacaaaatggtgtagtggagaggaagaatagaactctacttgacat

SEQ ID NO: 26487 - DNA, 444 bp, Zea mays
  unsure (1)..(444): unsure at all n locations
agcttgctcnttgtctcttgttcatcctaccatacaaaagggggcaaacatcaacaaaccaactatagtttaattttggttggatggcagaaagagtatntgacaattgacataacgatgcggtcaagtctttagtaatggacaatgaacattgattgtcaaacatatcctctaaaatcacttatttggtgcaagcgtgcaaccaaactattaagagcatccaatctagatccaaccattaagcatacctttttccaatatatgcaataggtatgttttgaattgtcgaacaccacgtccacttgagtttgtgtccatagcatgaacgttctccaggagcagcggccaacaaatcaaaacaacataaggtaactggatgtggtgatgaattttgggacaagaaaatagaataagttgcggaacaatatataaagaagctcgatg

SEQ ID NO: 26488 - DNA, 455 bp, Zea mays
  unsure (1)..(455): unsure at all n locations
tcacgggctactggcggagctagccgaagcactggctcttcttgatggtggctggagtgggctggccacggtggccgaagctctggcggcaatggcgagaggaattgagctcgccggagctaaggaaagggggctggccggtgagggtgagtgcggtgcgaagtgaggtgcgcccggtgaggctttatatgcgcgggcgggcacagccganggcgtgggtgcgcggcggacttgaccggacgccggtgtgagcgcgcgcgcgggttgggcgagctctggcgtgccgaccagggtcgaacacgtgtgcccgtgcgttctgcccaagctctggcgcgtgtggtcgctcatccgagcctgctctcgccttggtcagtgcacaaaacctcttctcctccctacaagctaccattcttgtgtgggggtcataggaatttgcctactggttgcagagatat

SEQ ID NO: 26489 - DNA, 433 bp, Zea mays
  unsure (1)..(433): unsure at all n locations
agcnttgtttgctaatacttaaggaatatctcatgaccgagtatgcagcacatcagttgaagagacccatatggatatggtggtctcgttaccgcaccacctaccctgaaaatgctcaagtcgcttggcaacaattcactgcagctttcagagggagctatattctgcctagtctaatggcaatgaaggtgtcagaattcatgatattaacttaggtcacccagtcagtgatagagtatctgcatgcttttaacaacttgtcttgctacacgcatgactatgttgacatggaagccaaaaagattgctagtttcaagagggctntgagcccaaagttgatgaagagtatgggaatntcttctcatacctctttcaatgatttcgtcagtgattgcttgactcaagagaacaacaacaacctctacactatatc

SEQ ID NO: 26490 - DNA, 443 bp, Zea mays
  unsure (1)..(443): unsure at all n locations
taaagccatggtaagtagcatagacaagtaatatgtgaattgactcaagcctagctacgggtgcataggtttcaccgaaatccaaaccttccacttgtgaataccccttggccacaagtcgtgctttgttccttgtcaccacaccatgctcatcttgcttgttgcggaatacccacttggttcctacaacattttggttaggacgtggaataagatgccatacctcattcctcgtgaagttgttgagctcctcttgcattgccaacacccaatccgaatatcttaatgagtcttccaccctgtatggctcaatagaagacacaaaagagtaatgttcacaaaaatgagtgacacgagatcgagttgttacccccttatgaatatcgccgaggatggaattcacggngtgatctctntgtatcgcttggtggactctcgggtat

SEQ ID NO: 26491 - DNA, 254 bp, Zea mays
  unsure (1)..(254): unsure at all n locations
agcttctgctacatgtctcccgaccgcgaccacctcgacttcggctacctcggcgtctacaggctatcgtcttcttggagcacacaccggtctctactccagccgcaacattcgcaccatcacgacgttgcgactgcggggggatttcaacccgtcggctcgtaccttcggactctactccagtctcatcgtgtgtggtgcccccgttgcgactgcggngggatgttagactatgtgtgtgtgagtgtgtgtgg

SEQ ID NO: 26492 - DNA, 478 bp, Zea mays
actcagcttgcaagccctcggacccgaccgaacttcaccggaggcccgagatcgacctcaccggacttcggtcttccgccgccgcgcgtggaccgagctatccagtgagtctccgcccaattcctttcgctcatgtcttctctggcatcccgtggacctccctgacctatttgattgaagtatctcgccgtgaccaggctggtctcctcgccgccgacgagcatccccgcctgcgcgcgtggaccgaccgacttcggccatctccgatggcgttccgcacaccgttgtgatccccgcgacctccccttcaccctcgaccacttcaccggaacagtctcgccgccggtaagcccctccgcccttttcttcgccgcggctactgtttaaggtagaagaaggacctcgggttaggttctgtagaacccgaggggttttctgtaatgtcagcgactcatgtgaatagtaacctaaggactga

SEQ ID NO: 26493 - DNA, 460 bp, Zea mays
  unsure (1)..(460): unsure at all n locations
agctngcatgaagtattgtacataatgaatatataaaatcaatgtaataagcaaattttattttgtaggatgagcataacaccatgactggatgtgaacatgcgttaacaataataacaactggtaaccaggtacatattaaaataatattgttcatttgtctaaaatgaaaatatatatttatgctgcatgtaaatgttgatgtatttgggttgggctctaaaggaggacaacatgagaatttcacatgagattggtgatacaagttctccatgtcacgtagcacatgaacaaatgaaacatattgctgcatcctcagaagctaaaaaggtcagcattgataaatgattntactgattggtataaatatatgtaaatatgcgtatactaaatattaacttctattattatgcagaggttgaatggtaatgtggatgtataaatctgatatgccggatcg

SEQ ID NO: 26494 - DNA, 499 bp, Zea mays
  unsure (1)..(499): unsure at all n locations
ctaagcttctaagggagagncacatttgtgactaaccaatgttcattttgataaagacagggaatgtagcgcatgtcaagcagggaagcaagttggtgctcatcatccacacaagaacatcatgacgactgacaggccacttgagctactccacatggacctattcggcctgatagcttacataagcatcggcgggagtaagtactgtctagttattgtggatgattattcttgattcacttgggtgttctttttgcaggataaatctcaaacccaagagaccttaaagggattcttgagacgggctcaaaatgagttcggcttaaggataaaaaagattagaagcgacaacgggacggagttcaagaactcacaaatagaaggcttccttgaggatgagggcatcaagcatgagttctcttctccctacacgccacaacanaatggtgtagtggagaggaagaatacaactctacttgacatggcgaggaccatgctt

SEQ ID NO: 26495 - DNA, 467 bp, Zea mays
  unsure (1)..(467): unsure at all n locations
agctgtgaagattcttcatcccaacatgggctagtcggcggtgccagagccaacccatgttagtcttagcaattaagcaagtgtcgagttcagctctatcaaaatctaccaagtatagctgaccctctaacactcccttaaatgctattgaatcatcacttcttctaaagacagtgacacctacatcagtgaatagacagttgtagcccattntgcataattgagatacagaaagcaaattgtaatctaatgagtcaacaagaaaaacattggaaatggagtggtcaggagatatggcaattttacccaaacctttgaccaaaccttgatttccatccccgaatgtgatagctcgttggggatcttggtttttctcatatgaggagaacatcctttntctccctggcatatggtttgtgcacccgctatcgagtatccaacttgagcccccagatgcataaacctac

SEQ ID NO: 26496 - DNA, 477 bp, Zea mays
  unsure (1)..(477): unsure at all n locations
gaccttgatactcagctgaaggtggcttgtgcctgacaaggacgatcttgcatatattctctcatataacagnctaaaggtacaaaattgtacatttggaagtttatgaattttgaattattttttgctcttatactaattcttttcatatagggtttaatactgagcaacgccttaagggcgcaaaagaatgccgaagacgagagctgcactattgctctcaacaaccttcgaacagaggttattaagctgaggaacgaagctttgggaaaagataaaattttacttacattggtagacaaggtgaagggggatgaagctaactacaagacccaatctgaagtccaaaggaacgagattgaaaacctccaaaagcaactggccgaggccaaattgaaatgcactattgccgaagctgaccaagatgccagtgattactggaaaaattattgggagaaaacagttgtagaacttcgc

SEQ ID NO: 26497 - DNA, 397 bp, Zea mays
  unsure (1)..(397): unsure at all n locations
agctggattcaagtgcatccctttcatttgcaagactaactatagaggtntttacattagtcattgctttttctttatcctctataagtattttggctaaagatatttccttagtcaaaacatcaagcatctcatctttattggaaagcaattcttgaagctctaggtttctctcattttcaaggatgagcaagtcttcttgagcatcaagagttgcttttcttttatctagcttctccattagtttagtaatcacattgtatccatttaaaccaaattctttaatcatcttatntttcatagcaaggtgttcttcatcatcattaataaagtcatcattaaacaaatgtaccttgtctncttttgccatgagtcaagttggagtataggagtcatc

SEQ ID NO: 26498 - DNA, 467 bp, Zea mays
  unsure (1)..(467): unsure at all n locations
ntctcaatctatcttgttgcttatcaaatatactctaacttatattattggctcaactcaaaattttaaacttttcattcccttntgcttattttcttgaattttgttcatggggttcacttagggttcttaattagggttgcacattattatcctttaagagactcaattgttttgatcatgacactcttaagcatatacttggtgaactctttcttacttaagttattttgatgctcatgcttactttggtttacatgaaataatggttcttggtttggctttttaagagaaaccctangtgacactggngtgtcacagccttccccccttaaaggaatctcgtcccgagattcgggccagagtccttccgaggtgaagcgaagggtgagactgataggaaaagggtggggattgttattattatggcaaaactgctcttcgaatgtcattctctttgcaacttc

SEQ ID NO: 26499 - DNA, 427 bp, Zea mays
  unsure (1)..(427): unsure at all n locations
agcttgcttacttggtaagatgaccattgctctcttcacgggtttaccggagaggacgttagatntattggaactcatacatactgatgtgtgcggaccaatgagtacgacagctaggggaggattccaatacttcataaccttcactgatgattttagtagatatgggtatgtctacttaatgaaacacaagtccgaatccttagaaaagttcanagagtttcacaatgaagtagaaaatcagcgtggcaagaaaattaaagcactgcgatcggatcgtggaggtgaatatttgagtcatgagtttagcaatcatctaaggagttgtggaattgttccacagcttacgccgcctggaacgcctcataggaatggcgtgtctgagcgacgtaatcggactttattggatatggttcgatcaatgatg

SEQ ID NO: 26500 - DNA, 486 bp, Zea mays
  unsure (1)..(486): unsure at all n locations
tatacctgttacgggtcgctcatctagatccggatattattaactnttccctcatcctcttctttagcactggccatagctccatccatcgagggatgctagaagtcaatcgattctcgcaacataagagaaccaagtctacgagcacacagcacagggcttcacccaatctgtttctcatcctgtcctgttcctgtttgattgaaagcactggcctggatataaggatggttagatgaaagccaagcccaaaacacaaggtgacttagagagatatccagaagaaccaataacattaaacggaacaagcaagggaagcttagatctatcctggacttgacttgtttcttaggttgctgtttcctttccgtaaggttcgatcatgtcacttatcccggcgaaatcctaattcgtatgcttctaaggataggtgtaatcgacggtaaagacacatcacgagaagaatctntcaattgagactatgat

SEQ ID NO: 26501 - DNA, 428 bp, Zea mays
  unsure (1)..(428): unsure at all n locations
agcttgtgaaggttcttcattcccacatgtgctaagcggcgatgccacagccagcccatgctagtcttagcaattaagcatgcatctagaccggcctcctctnttgcaaaatcaactaagtaaagtttgtcgtctaatacacccttaaaagctagtgaaccatcacttcttctaaagacatacacatctacatttgtgaatagacaattatatcccatattgcataattgactaacagataacaaattatatccaagagactcaactaaaaacacattagatatagagtgctcggatgaaatagcaattttacctaacccttttaccttgccttgatttccatcactgaatattattgaatcttgngaatccttgtttttgacgtaggaggtgaacatcttcttttcccccgtcatatggtttgtgca

SEQ ID NO: 26502 - DNA, 464 bp, Zea mays
  unsure (1)..(464): unsure at all n locations
accttgaaactcagcttgaaccgatattcgtgcanaattataaatcttacgtatgctttatactgctcgtctgaacaaatgcaaattttgaaattcaataaaaccttgtcatattgctcaaacaactttatatcaactctacaacaaaagttattaagggttcatgtagagaaaatgccaagaaaatgtcgagaaaataccccgattgccttaaaaatatagtttgaagctttataataatgctaccttgaccaaagtaaaactttaatttatattcaagatatgaggtttgacttttaataaaagttggagaacaagtgttatacaacaaatattatatttaaatcaagtcttgattcaacatctaagtatctcaaacagtgccatcaaaacagaataaaaatctgatttcagaattagaattcttctaagtctgaaatcagcatcgttcgggtcgacgtctc

SEQ ID NO: 26503 - DNA, 431 bp, Zea mays
  unsure (1)..(431): unsure at all n locations
agctngtcaaagttgtgagctcaaatatgttctacttgagtgattcaaatgttgtagcctgctcaagaccctaagtgaagtccttggctccgcgtaaagttttgaggaaggggagacttcgttcggcggaccatgttttttggaagcctatctcaaaacaatctctgggttaagtgcgcttggcctaaagcaattttaagattggtgactcatagaaagttttctccaatgtgcacaagtgaggacaaagtgtgaaaactcatgttggttagagtgtgccaggaataactacctctggcccgggagttgctggggtattacaagcgctccccttagtccgtgcaaggaccaaatgctctctatgagttggttcttctctacttcggcatggtaaactacacaaccatgtacaagctcaagtcagatcacct

SEQ ID NO: 26504 - DNA, 459 bp, Zea mays
  unsure (1)..(459): unsure at all n locations
tgtgaaggttcttcatccccacatgtgctaagcggtatgttcctcncgcccatgctagtcttagcaattaagcatgcatctagaccggcctcttcttttgcaaaatcaactaagtagagcttgccgtctaatacacccttaaaagctagtgaaccatcacttcttctaaagacagacacatctacatttgtaaatagacagttatatcccatatgacataattgactaacagatagcaaattatatccaagactctccactaaaaacacattagagatagaatgctcattggaaattgcaattttacctaacccttttaccttgccttgattcccatcaccgaatataattgaatcttgggaatccttattcttgacgtaggaggtgaacattttcttctcccccgtcatatggtttgtgcatccgctgtcgataatccagctggaacccncggatgca

SEQ ID NO: 26505 - DNA, 411 bp, Zea mays
agctttcctgctcacaccttcggcgctgtatcaaccttcgtattattctggtctactgtgatgccgacttgagtctgaagatactgttggggacttgttcttaaatgctatgagttaagaacaaggcaacacagagaatgttaaacgataaagtccttcgtcctttgaggcattatttcccttaggatataacgattccggacgaaggtcatgaaggatgaaccttcatcatcacagtatacattaatgaaagacgaagcatatgaaacataaaagatagcacgaataatcatataacatcattcatttaactttattatatcatcatagagaaatagagacaatatcgaattataaatgtaccttcggcttggaaggagatgaaaatacaagtgtgacgcaaaagcaaat

SEQ ID NO: 26506 - DNA, 477 bp, Zea mays
  unsure (1)..(477): unsure at all n locations
tctaaagggggaacacattntgngactaaccgatgttcactttgataaagacaggatttgtagcgcatgtcaagccgggaagcaagttggtgttcctcatccacacaaaaacatcatgactaccgacaggccactggagcttcttcacatagatttattcggcccgatcactttcataagcatcggcggtagtaagtattgtcttgtaattgtggatgattattctcgcttcacttgggtattctttttacaggaaaaatctcacacccaagataacttataaggattcttaagacgggctcaaaatgagtttggcttaaggatcaagaaaataagaagcgacaacgggacggagttcaagaactctcatattgaaagcttccttgaggaggagggcatcaagcatgagttctcttctccctacacgccacaacaaaacggtgtagtggagaggatgaatcgaactctgctggacat

SEQ ID NO: 26507 - DNA, 444 bp, Zea mays
  unsure (1)..(444): unsure at all n locations
agcttcactaatcatgcaggtacaagaagctcttgcagataatcgatcttagaaaagacttctttnttagtcactcatatcatataatgagaagtctccaaaagaactttaatgatccacaagaagggtgggaactatatgacacaatgttcgtgtggaatgaattcctaactcgaggggttcgtgacattctgaaaactacactctggacagttgcattagtctatggtttttttaagcaggtacatatgaaacttgtatcctgttgtcctgttatttcatttaataagatgacagtagcatccaaaaagatgaatcctacactcctactttntacaccatgttcattatctttgccttctttgctctttancaaagctaaattatgttctatttttgcttgtgctagacaagtaagaaatcttttttccttttcttttcatc

SEQ ID NO: 26508 - DNA, 475 bp, Zea mays
  unsure (1)..(475): unsure at all n locations
tctagatntactggttccatgaatgaagaagcattttggaatgtggaacacaaagctgaggctgaagaaacagcatttagatcagcgagaaaagcagaaacttcacttccattactatcaattgaactagataaggcatgaggcagttctgaaagtccaggagtattcaactgcggatgaaaggccccaggtgttgaattgtgctgaagtacccctgngggcactaaattactcggtaggctgctgttattctgcagtcgttgaagctccagaagattctcacaaagcttatccctagatggagtctcgccaggtaatagatcagtctgcctagcgccagcataggtcaattggtcgtttggaagcatagtggaatcctgttcatgcacactcgaatttaaattgtgatctgatctggctgtcatgaagtagcttgaaggtggcatgattccttctncttcataggattcaactg

SEQ ID NO: 26509 - DNA, 461 bp, Zea mays
  unsure (1)..(461): unsure at all n locations
agcttcggtaaataacaacttcatttccctcatgagaaggagcagtgctgtctcctccaacactcacaatagacatgtcacgaaaatatctccatctcatggtgtcaatatgactttgtttagtggtcgattttcggaagatggtatgtgtggcggaactgcccgaattattccaacttaagtgcccaagtcccgcctcanaggctagaccacacttaaatgggaaaaacccgtcaatcccttgaatctagtccgacgaggccactaacaggatcaagtactacaatctcactcgatggtgagtcacagagcaaatacaataaattataaatccatacattaaggagtattaacttattacatcatcatcggagttgtagcanaagtagtcatcattggtcgaagtgcagcggaataaaactaacgataagtaaatagagagatggcgaagcctgtcacat

SEQ ID NO: 26510 - DNA, 481 bp, Zea mays
  unsure (1)..(481): unsure at all n locations
tggcatacaactgacaatctacgacctctgaagtactttctctcaatgttcctcacgttcttgttcattctgggaatatataagaatgtcatcaatgaacactactacgaacttgtcgaggtagtccttgaacacactgttcatcaagtacatgaagtaagctggcgcattcgtcaaacagaatgacatgaccgtgaactcatatagtccatacttggtgatgaatgctatcttcggtatatccgaacgtcggattctaagctgatggtagcctgacctcagatctatctttgagaacacactggctcctctcaatggatcgaataaatcttcaattctaggcaaggtgtacttgatcttgatagtaacctcattcaaggatctgtaatcaatgcacatnctctttgttccatccttcttctncacaaatagcactaaggcttgccaaggcgaggtacttagtctgatgaacctttctctg

SEQ ID NO: 26511 - DNA, 399 bp, Zea mays
  unsure (1)..(399): unsure at all n locations
agcttagagtgttttcacatgtaactcacgctacaagtggaagtaaaatgaaagaaacactgaaatgccaggcattttatagtctaaacatttttaggattatatatgtggatatgttgtgtcttcgtaattntttatgattntttaatgctatttgtgtattattaatttctttctgcaaaaattcatcanaatgcaattaaattcataaaatattctagtgtcgactgtaagttaccaagactaataaatattctataagaagataaccacaagtccacacatganaatgataaagtgaagtattgattatgttgaaacttagtgtcggcgtttcgaacccggngggtccctggaccgacgagtaanatatcgccacgtgccccagcccaaatgggt

SEQ ID NO: 26512 - DNA, 474 bp, Zea mays
  unsure (1)..(474): unsure at all n locations
tcggcttcgtctatgttatggataggggtngaatccgtccagttcccttcggccttcctggcagcttcctgacttccgtgaacaacaatgggcccttgttccgaaggtatcttcatgcataaatatgctggatgaagaattgcttcgaaggcattgagtgtccctcgaccaatgaatgcattgtagggtactccatatcaatgatgtcaaagacaacttgtttagttctcgtgttatggatgtacccgaaggtaactgacattgctattttactaagtgctacaatctgtcttcctctgaagccgcaaagagggtgtgttgcatcatgtatcttctcttctggctcttgcatctgtttgaaagcctttgaaaaaataatgtccgctgcactgcctgtgtcaaccagaacattgtggactagaaatccattgatgatacaagatataaccatggcatcattatgaggataatctt

SEQ ID NO: 26513 - DNA, 384 bp, Zea mays
gatgtgatagtaagagccacgccagcgtgatatacatatgctgcttcttgcaaagtatatgtgtggcatcatatggactactgcttgcgctgctatgatataattggcatccatagtgttctttctgaaatagatagcatgtcgataatggagcagtgtggtagatagtcatgtcgatcatggagcatgatgttaatggtgctttaagattgttataaattagaatcttagttgaacacggtattagcttgcaattggtatcttaatggagaatattggtaggttgacactcctgtgatatatccactaaatcgaatgatgtgtaactctgattacatgcatggatgtgtgatatcataagtggttagactctcgacacaatgc

SEQ ID NO: 26514 - DNA, 475 bp, Zea mays
  unsure (1)..(475): unsure at all n locations
ntacactaagcacttgttcaacacttaacacatctgtcagttcttttattgtgttgtcatccgaaccactaaaccccataggagagctctcaagcccaccttgtacgcatgttgaaccatgtggcgatggttcgggcacggcgcctcaagcaatatttcgaagtagatagtggcctccttggtcggaatcttacttgcctttaggcctcctatggctactagcatttcgtcatgctaccgcatgtccttttcttcctcttatcacgatgtccgccaaagccctcgtcgggatcttggtgcgtatggctttttgcttacagtggttgaagatcgcccacaccgcgccgacacccaacacgtgattagtcacgatatcgacgagctactttgtagattgcaggctcttttgccccaacttgtgtaccatggactcgctcatggatcctaagatgaaggcgctaataatgttgacatc

SEQ ID NO: 26515 - DNA, 464 bp, Zea mays
  unsure (1)..(464): unsure at all n locations
agcttcttcttgtcgtcgatgagcgacgccaacgctagcaccacctgctagtggtggttgtttggggtttacatgtaaaaaacatggattcatcattggcattggtttgtgaaaatgactcacaagttagatccatggaaaaaatattacggagaataaatgccacgcatgcaaaaaaggaatttaagttaaaaacattattcaaacaaaagaaattgcatgcaagacttttctttaaatactactccctccatcgaaaatataattcaagaatttcggtgatatttatctactactacgtattatgcaagggtagcaggtgggcttgtagagagatgtagtagatgttnttctgttatagatgtatgcataaacacacatgtggtgtagcagtagctactgctcgcattngcctgangggtcatgggtttgaatccccttanggccatttgtgtntttaattt

SEQ ID NO: 26516 - DNA, 486 bp, Zea mays
gctatatacaatgcgcataagttcaacacctagcggcactagataatttgttcgtctaattgagcttatgtcttaatagcacgaccggctatcctaaatctggttatgaactttactatgtcttgatcgacaaaacaaaatgttctagctataactttgtcttgagccctcgcatttggctattctctttgctcttgcctctttccatattgagcacttgatttttctttgtgtctatcaccatcctttttatggatgtcagtcttgttcaatcctaaaaacagtgtcatcctaaatgctaaacagtgaatagttgttcatcctcatgttagcatttattctgactacacgggcgtttaaacagactaaaaatggattatatacgattaactggattaaatggcataaatgacctagacgattagctaccgagtagcatataaatggtgttaaacagtcttaacgatcgttaggatacaatgcata

SEQ ID NO: 26517 - DNA, 405 bp, Zea mays
agcttgtgaatggcttgctgaagcaacagaagctgcatgttggttgcccacatattctggcatatagggagagtggcacgaagcagtatgtaggacttgtttcggctgattctaccgagcttctgcttcggcaatctctttttgcttcagaatagtaatctggcacgttcttgtagtgtggcctttgtcctcaccacagaataagcaataaatttttctaggctgatccccatatcttcctctgaagcccctgccgcctctgccccttggagatggtggcctgaaggagctttgttgctgtcccgaagactgtgaggtgtgctgtggcctctgaagctggcttcctttgtcatcattctggctagagctgtgaattgatctgacatgcctatggtggattctctc

SEQ ID NO: 26518 - DNA, 497 bp, Zea mays
  unsure (1)..(497): unsure at all n locations
actcagctactcctcctgngaagggcctttcatcatcgccaagaatttgaagcccgggacatacaagctggccaacgatcaaggcgaagtctacatcaacgcttggaatccaacagctatgtcgcttttacccttaaaaatgtttcaagtcgttcatgtatatcgcttttttttacatgcacaaataaagtctaaccgtcaaggaaggatcaggcttgcctcggcaaagcccgaccctccctcgggggctagaaggggaaaccccctctgcgtcaaaattttcctcgagaaagtcttttactagaacgtctttcgtgcttttcgactgcgtcgataacagaatcctaacgacgggcgagagagaccttgaacggcaaggccgaccgagccgagggacttctacgcctctaggatatggatacctcactcatcaccttccgcganaagtagctcacgctcggataagcgattctgctatcgaacaagtcctaacgctc

SEQ ID NO: 26519 - DNA, 392 bp, Zea mays
  unsure (1)..(392): unsure at all n locations
agcttataataaaagaatagaggcaagagctcgttcgtatatcattatagaaggggagttatacaagcatggagtttgtgccccgttgctcaagtgcttgtctagagccgaaggtatagagttgatgaaggagatacatgcaggcctttgtggatcccacatcggatccaggccgttacttggaaaagtgttccgtcaaggattttattggccgaaggcagcttcngatgcagctgagttagttcgaaagtgcgaaggttgtcagaaatgtgcaagagatcaaaaacaaccttcgtctttgacacagctaatacaacccatctggccattgcaaaggtggggcctcgatctgctgggcccattaccaccggctcagggcaatctgaaatatg

SEQ ID NO: 26520 - DNA, 335 bp, Zea mays
  unsure (1)..(335): unsure at all n locations
cctcgggtggctctggcgggtcgcggggaggtcgccagagctatgggcgagcccggtggagttaggcgtggtacggaggaggcaacggggaagacagccgggctctaggacgggctttatatccgtggcgcgggtgtggtcacnggcggccgcgggcgcgcgggggtttgcgcacgggcgtgctctgagcgcgcccccgagtgtcagcccgcgtcgaacatgtgggagctcgcttctgccatggttcaacgacgggattgagcaccttagcgtgcgtatcttggcaaaaccactgtgtatggtctcttacctgctgcatatcctacctctttgct

SEQ ID NO: 26521 - DNA, 421 bp, Zea mays
  unsure (1)..(421): unsure at all n locations
agcttgtgaaggttcttcatccacacatgtgctaattcggcgatgccacagccagcccatgctagtcttagctattaagcatgcatctagaccggcttcttcttttgcaaaatcaactaaataaagtttgccgtctaatacacccttaaaagctagtgaaccatcacttcttctaaagacagacacatctacattngtaaatagacagttatatcccatattgcataattgactaaccgatagcaaattatatcctagagactctactaaaaacacattagagatagagtgctcattagaaattgcaattttacctaacccttttaccttgccttgattcccatcaccgaatatgattgaatcttgggaatccttattcttgacgtaggaggtgaacatcttcttcttccccgtcatatgg

SEQ ID NO: 26522 - DNA, 481 bp, Zea mays
  unsure (1)..(481): unsure at all n locations
ntgtgcagcagctncattagtctccatcaagcttcgaattattgttctcggcatcgncatcctgtacaccacgaagcagtattaggtgaaaaagtaatctcaaaagaaggtgagcaaacaagaacaaggttaatatcggcttaagatgactttgagctttgtcaccagctaagtcccgcccaccctttgtccaaatctattcccgatacttcaggctacgctggggatatcggctatgtccgctggagataagctaaagttcggtcagttgacaatctttccgtgcgtgcaaccagccttcataaaagctacagctgtgccgcgagaagctagcatggcacagaagtcatcgtgcccagctattacttcgtcaagcgcctcaacttcgctctcaatatgttcgaaggtgcttggcaggtcttcaactcgagggtctaatcttgcagagctggctccactgagttgatacctgttcagtact

SEQ ID NO: 26523 - DNA, 401 bp, Zea mays
  unsure (1)..(401): unsure at all n locations
agcttagagtangagaatccagcanatatgctactttagagtgaaagataagaattgaaaaatagtagcatacttcatgaaaaactcattctcatgcaagagactatatgaaattactaagataaagtgatagtctcaacataatcaaggtatagaaagaggctccccctaaagatatgcatcaagtatttgaatgaattgaatggatgaatttactctaaagacaaatagggagaagcattatacatcttgatcaaggctcataaaatttgcaataaacaacttaagcccggtgttcttcactatgaaaggatttagaatcctcacaaccttaccattgattgttttgaagatcttatngtccaagtaagtgttggtgtactggatgtcttctctttcat

SEQ ID NO: 26524 - DNA, 482 bp, Zea mays
  unsure (1)..(482): unsure at all n locations
tcngcagataagagtagcagtcttttatgtttgggtatgtatataatagcttcngcagataagagtagcagtcttttatgttttgttatgtaaataaaagcttcggcagataagagtagcagtcttttatgttttgttatgtaaggaaaggcttcggcaaaaagaggaagcggctttttatgcttcgttgtgtacgaaaagaagggaaggtgttttttcgccttcggctcaaaaaactgatttcgtccacatcaaagcacctcaatcgaagggtaagaatatattacaaggtatgtacaaagttccttgaagaacagtttaattctatttacaagagttgttacaaaattatcctgagtttttctaagcacacttctgctagtcttcattaagcttcagcttcgacgacaacttcggcgacatatcctaggcattatcttcaccttcgtcatcctacatgagtcaaggaatcataagaatca

SEQ ID NO: 26525 - DNA, 405 bp, Zea mays
  unsure (1)..(405): unsure at all n locations
agcttatgggtgcagggttcatcanagaggtattccatcctgaatggttagccaaacctgtgcttgtgaaaaagaaaggtgggaagtggaggatgtgtgtaaactacactggtctaaacaaagcatgttcgaaggttccctaccctctacctcgcatcgatcaaattgtggactccactgctgggtacgaaaccctatcattcctcgacgcctactcagggtatcaccaaatcaagatgaaaagtccgactagctcgtgacttatttcatcacaccttttggcatgtactgctatactacgatgctatttggcttgaggaatgcaggtgcaacataccagaggtgcatgaaccacgtgtttggagagcacaccggctgaacggtcgatgcttacgtcgatgacat

SEQ ID NO: 26526 - DNA, 396 bp, Zea mays
agtcatatgcgaattgtctcttacctagctacaggtgcataggtttcaccgaaatccaaaccttcgacttgtgaatacccgttggccacaagtcgggctttgttccttgtcaccacaccatgctcatcttgcttgttgtggaagacccacttggttcctacaacattctgattatgacgtggaactaaatgccatacctcgttcctagtgaaattgttgagctcctcttgcatcgccaccacccaatccgaatcttgtagtgcctcctctaacctgtgtggctcaatagaggaaacaaaagagtaatgctcatactaatgtgcaacacgagatctagttggtaccctcttatgaatatcgtcgaggatggtgtcgacggtgtgatcatcttggatt

SEQ ID NO: 26527 - DNA, 377 bp, Zea mays
  unsure (1)..(377): unsure at all n locations
agctntatcaaatggacgtaanaagtgcttttctcaacggaccaatcaaggaagaagtctatgttgagcaacctcccggctttgaagacagtgagtaccctaaccatgtctataggctctctaaggcgctttatgggctcaagcaagccccaagagcatggtatgaatgccttaaagatttccttattactaatggcttcaaagtcggcaaggccgatcctacactctttactaaaactcttgaaaatgacttgtttgtatgccaaaattatgttgatgatattatatttgggtctactaacgagtctacatgtgaagagtttagtacgatcatgacacacaaattcgagatgtctatgatgagcggagtgaagtat

SEQ ID NO: 26528 - DNA, 478 bp, Zea mays
tctccagaatcttgagggtaactgtgaacctcgctcttatctatcttctttggtactctgtgtaagcgcataatccaagccatatataactcaaccaattgagatcacttataagtagtcttgacaggaatgaagtgagccactttagtcaatctatccacaatcacccatatagcatcatatcctttctgggtgcgaggcaatccagtaataaaatccataccaatctcttcccacttccactcgggtatctttagtgggtgtaatattctagctagtctttggtgttcggccttaactctttgacacacattgcacatagccacatgtgcagccatatctctcttcagtccataccaccagcacttctgcttcaaatcctgatacatcttggtactcctaggatgaatagaataatccaagtcatgggccgtctttttaatagtttcacgaaggctatcaatctcaggaacacata

SEQ ID NO: 26529 - DNA, 323 bp, Zea mays
  unsure (1)..(323): unsure at all n locations
agcttgaatttgtacacttgacacaatgtctaaatttgtattcaaaaattcaaatntgaattcaaaatagttaagaacaaaagataacatgataagaataaatagaaaagggaaaagagcttacctgggccaacaaacctgttttcggcccacttctaattccataccgcgcggcccatctggccgggctcccgcacgcgcgcgcccttgcgctcactggcaggtgggccaaggttggcggcgctcaccgttgggtggaccgagtcgctgaccggctgggcctccttgtcagcgagttcttttccacccgccgcgacacaaac

SEQ ID NO: 26530 - DNA, 432 bp, Zea mays
  unsure (1)..(432): unsure at all n locations
taatgatgagtnggctagtcttaatgctcaacttatgtcttgcaagaatgatttcgataagctaagatttgcaagggatgcctacacgattggtagacacccctcaattaaggatggacttggcttcaagagggaagccaagaacttaacaagccataaggctcctatctccaccaaggagaaagggaaggctcctatggctagtagtactaaaaggaaccatgcttttatgtatcatgataggagacaaactagaaatgcttataggagttataatgcttataatgatcttgactctcatgcaatgtttgcttctagttcttcctacatgcatggtagaaatatgtctaggagaaatactattcatcatgtgcctagaaagaatattattcatactcctaggaaagtagtgaatgaaccctctacaattta

SEQ ID NO: 26531 - DNA, 452 bp, Zea mays
  unsure (1)..(452): unsure at all n locations
agcttgtggtaatttaccaacccttctttcctttgtaagattctatacatgaatgtcacgctcgagggataatgaggatgcacaattaatgcacctaggttctcggtatcccctgggatgttgacactgaagggttacgagagtacatggccaagtttggacccctagacgattgtgtcgtcatgaaggtttgccataattcacatttagattgaatggcaggtgctatactgtttatgttttcttacccttagttntgtgccattacaattcctgaagtacttgtccttatattccaataattttgaaaagtattgattgtttattttctccaagaatagtttgcttatgaatagaaaattatgtgtggccatatgcctgtgtcctcttagctattntttatcttgtattttttgactggctcngaaattactantttatttntaatattt

SEQ ID NO: 26532 - DNA, 375 bp, Zea mays
  unsure (1)..(375): unsure at all n locations
tgttgtcaacaacagtaaggttatctctagtaagagtgttctatggttcagcnaacnccaccgctgaacttacaaccttcagtgttgcttcacccacgctgatacgaacctcacatctccggctgattcaactcttctatctcgacggactgctggcttatatgacataacgttctcacgactagttctatacctagcatagtgaccctcactaccaccatttgtggcaaatttgtgttgcactctgggtgttggatgcttgcctctaacctatcttctaatctctttaatggaatatctgctcttccaattcgcgacgtccactcggaatttacgaagtattccacaactccctttcataccaagttccgatcc

SEQ ID NO: 26533 - DNA, 343 bp, Zea mays
agcttcttgatggctttatttggtgggatttcatttcctgcaatatctttagaaacatgcccttgcgagccattagattcatcaaatgtcacgtctatcgctatttcaacaagaccggtggtattgctgaaaacacgatacccatgcgcatttgatgcataacatagcaagaaaccctcgtccactctgggagcaaactttgatctcttgactttcttgttaagaataaatcatttacaaccaaatactctaaagtaatcaactttaggtttgttaccagtgagaagctcgtaggcagtcttcttgtacatcttgtgaagataaagtcggttgattgcatgac

SEQ ID NO: 26534 - DNA, 467 bp, Zea mays
  unsure (1)..(467): unsure at all n locations
tcngatctttagccttgcaactcttgtcgatatattctgtaacaacctgggaatcagttttaagaatggcccttctgattcccattgcttttaacttccgaagacccaaaagcatggcttcgtaatcagtaatattgtttgtacaactaaaatcgagtcttgccgcataacaagttttaactttggatggtgagaccaacacaacggctgctcctgctccgaaggttccccaagacccatcgcagaacactatccatacttcggcatctttatttgtttcttcatcctgagcccctggcgtccaatcggcgataaaatctgccaatgcttgagactggatcgaagatctatgcacataatcaatgcacaattcattgagctctgcagcccattttccatccgcctagtagcttctcttatcttataatattcttcaacggttgaaagaaaagaacaacatatgtatg

SEQ ID NO: 26535 - DNA, 376 bp, Zea mays
agcttctaaagggagaacatgtgatagatctaaccaatgttcatttcgaaaaagatagaccttgtgcagcttgtcaagcagggaaacaggtgggaggagcgcatcacagcaagaatgtgatgaccacttcaagacccctggagctgctgcatatggacctcttcggacccgtcacctatctgagcatagggggaagtaagtatggtctagttattgttgatgacttttcccgcttcacttgagtgttctttttgcaggataagtctgaaacccaagggaccctcaagcgcttcctcaggagagctcaaaatgagtttgagctcaaggtgaagaagataaggagcgacaacgggtccgagttcaagaaaccttcagt

SEQ ID NO: 26536 - DNA, 474 bp, Zea mays
tcagctccatctatgttatggattggctttgagtcagtccaattaccttcggcctttctggcagcttcctgacttccatgtatagcgatgggtccttgatccgaaggtatcttcatgcaaagataggcaggatgaagaattgcttcgaaagcattgagggtgccacgaccaataattgcattgtaagggtattccatatcaacaatgtcaaacacaacttgctcagttctagtgttgttgatgaacccgaaggttactgacatggtgatcttgcccaatgctacaatctgtctccctccgaagccacagagaggatgtgtggcatcatgaatcttatcttctggctcttgcatttgtctgaaggccttagcaaatatgatatccgctgcactgcctgtgtgggtaatccttgagatgaagatcctcttgggagaagaatcctcttgatgaacccgaaggtactgacattatgga

SEQ ID NO: 26537 - DNA, 467 bp, Zea mays
  unsure (1)..(467): unsure at all n locations
agcttatganaatgcaataatagaaaagatacacctagttgtatcttgaatacaacttttctttatggtgcacgaaggaaactagggttttcggagtcagtacttcattttcataaggcagatactacctgggagactaaggttttgggtttgggaatcaaacaatgttcaaaacaagtcaaacttcactcatgggatctaaacatcatattangcttatccaaaaagtttggtgatttttggatttattaaataatttataaaattccaaaagtataggttttggccttcttaaatactaaataattcctggtttgggctaaaaatcttggaaccatttttattaattactagaaaaatttaggaatccaacaaaattggtctcatatttttaccattnttctatgattntctatgaatttcctaagtctggcaaaaaaagaaaaaggaaaaaggagaatagtact

SEQ ID NO: 26538 - DNA, 502 bp, Zea mays
  unsure (1)..(502): unsure at all n locations
tactaagcttctaagggagaacacattntaggattaacaaatgttcattttgagaaagacaggatttgtagcgcatgccaggcaggaaagcaagttggagcccatcatccacacaagaacattatgacgaccgataggccgcttgagcttctccacatggatcttttcggcccgattgcttacataagtatcggcgggagtaagtattgtcttgtaatagtggatgattattctcgcttcacttgggtattatttttacaggaaaaatctcaaacccaagagaccttaaagggattcttgagacgggctcaaaatgagtttgccttaaggatcaagaaaataagaagcgacaacgggacggagttcaagaactctcaaatagaaggcttccttgaggaggagggcatcaagcatgagttctcttctccctacactccacaacaaaatggtgtagtggagaggaagaatagaactctattggacatnggcaggaccatgcttg

SEQ ID NO: 26539 - DNA, 464 bp, Zea mays
  unsure (1)..(464): unsure at all n locations
tgcagctttaataaatagggatacaggagtactcagacataggatacactgacataggagagggtatagggtcccaagacggtggaaagttgtcttctccaactcgaactggtgtagggataatctagaaatataataggtttttggtagaaatacatctagataagtataagtaaagatatatactctatgaagaatgtggtcgttgcctgaacacttttcagtgttagtgttaagcgaattgactaaactaatcttgagcgatcctctcctattttttataatgggatgcttgctagattagcatgacagacaacaatcatggaaattgttagggtggtgtatattgtagccggacacaaagcanagtcaccacctgccacctattctatcccccaccttcaccataatattttgcaactggttaattgctctaaaatatctacagaacatnggttgtggtc

SEQ ID NO: 26540 - DNA, 491 bp, Zea mays
  unsure (1)..(491): unsure at all n locations
tctccgccgacgagaccgtcagcactacccgcggaccgacctccgtgctctttggctctaatatctggttctcgtcccttgagtggggacgcgaatgagagccttccggcggcagcgtccatcctatgaccatcgctgccgctgcagaggtcgctgtcaagtcgcccggcgtttgtcgtcccgcaggctctccgatgtcgaggttgttcatacccgcgggagtggaaccggagttccgtttgtaatggcaccttgagtgccggtgtcttgttcattgcggctgtcggngcctgaacatctgtgtatttgggcgtgaagccatgtttcttcctcatttcgagcaccaggtctcgcctgtcggctagctgaaccgcttaaccaagtgtgagttgccctgtgcggaaggtgacgagtgaggtatccgtatcccagaggcgtaggagtccctcggctcggtcggccttgccgctcgaggcttctcttggccccgt

SEQ ID NO: 26541 - DNA, 466 bp, Zea mays
  unsure (1)..(466): unsure at all n locations
agcttgtgaagattcttcatcccaacatgggctagtcggcgatgccagagccaacccatgttagtcttagcaattaagcatgtgtcgagttcagctctattaaaatccactaagtatagctgaccctctaacacacccttaaatgctattgaatcatcacttcttctaaagacagtgacacctatatcagtaaaaagacagttgtagcccatttgacataattgggaaacagaaagcaagttgtaatctaatgaatcaacaagaaaaacattggaaatggaatggtcaggtgaaataagcaatttacccaaacctttgaccaacccttgatttccatccccgaatgtgatagctcgctggggatctttgtttttctcatatgaggagaacatccttttctccccggtcatgtggtttggcacccgctgtcgagtaccaacctgagcccncggatgcataaactaca

SEQ ID NO: 26542 - DNA, 485 bp, Zea mays
  unsure (1)..(485): unsure at all n locations
tcatattcagacaatgaacgagatgcagaacaagattgagcttattacatttttagaaatgaaattagtcgacccatttgatgacatggtaagacacactacaccaataaaatgtatatttaaaattattgttacaaaacttatataattacttaataatcgttacatttacagagcaaacgtttcgaatgcaccatgattgtaacaagaattgctgacaatgagccctggttctatcaaggatgcacaaaatgcaatacatcaacaaaatatgaaggaaaaacacatttgtaaacaaggccacatctcctctcagatggtccacaggtatactctctgtacaatcatttttatacacaaaacttcttgtattttatcaatgtctataacctatactctaaataggtataaaatatctctatatgccactgatggcacctatgagctagaattcgtgctctntgatgagagagcgacatcactta

SEQ ID NO: 26543 - DNA, 455 bp, Zea mays
  unsure (1)..(455): unsure at all n locations
agcttctaaagggagaacnatatttgggactaacatatgttcattttgagaaagacaggatntgtagcgcatgtcaggcagggaagcaagttggtgttcatcatccgcacaagaacatcatgatgactgacaggccactcgagctcctacacatggacctattcgacacgatagcttacataagcatcggcggaagtaagtactgtctagttattgtggatgattattctcgcttcacttgggtgttctttttgcaggaaaaaatctcatacccaagagaccttaaagggattcttgagacaggctcaaaacgagttcggcttaaggatcaagaaaattagaagcgacaacgggacggagttcaagaactctcaaatcaaaggctttattgaggaggagggcatcaagcatgagttctcctctccgtacacgccacaacaaaatggtgtagtgga

SEQ ID NO: 26544 - DNA, 441 bp, Zea mays
  unsure (1)..(441): unsure at all n locations
tcatcatcaatctcaacattatcatcttcaatttcctaccaagagggtcttttggtaaagttttaataagtaattacaaataattaaaacttaagcctaacacagggcttaaactactagcttcatctttggccagcttttgagactcttttattgcttcggctcttttagtagcctctacaacctgagaaccataagtgctcaaaagtatttaatgtatggtgcatatatataagtttaatctttagaataaacattgttcatgttttccatcgcttgagctctgaccaattccttcccctttactccaaatgagtgtaaagaatctctntatcacattggagacatcagtcgaaggtttcttaatgtcatccaatgatatcccaaagttcgggtgtccgatggtcttcaaatgtgtacatctagctttctccaacattg

SEQ ID NO: 26545 - DNA, 441 bp, Zea mays
  unsure (1)..(441): unsure at all n locations
acttaatgtgtgccattatcaccaaataggggagaatgaagctctcttgtgagtattggtggttggatggcaactcaattaaaggactaacaagtgtactaagtgttgaacaggtgcttaaagtaaagcctacagggttcaacacaagtgaacaaatgtgatggtccaagaactggattatggatacattatggacatcacaagtaagatggacattgcanaagtgatactcgggtgcgtagctcggagacaactgatcaagccaaggacggaggcaagaaaagctttaggtaccaagtgcacgggagaaggtcaaggaggctgaggaacccaaagccaagggtgaagaagaatgcttgccaagtaagggtgataagttaaaacagctacngacataaggatactacatatgacgtgcttacaccaatgatgtacaactac

SEQ ID NO: 26546 - DNA, 387 bp, Zea mays
  unsure (1)..(387): unsure at all n locations
ccttgtgcagcttgtctagcacggaaacaggtgggaagctctcatcatgccaaaaatgtgatgacaacatcaagacccctggagttacttcatatggacctctttcgacccgttgcctatctaagcatatgaggaagtaagtatgggcttgttatacgtgatgacttttcccgcttcacttgggtattctttctgcaagatatatctgaaacccaagggaccctcaagcgcttcctcatgagagctcaaaacgagtttgagctcaaggtgaaaaagataacgagcgacaatgggtccgagttcaagaaccttcaagtggaggagtaccctgaggaggaaagaatnaagcacgagttcttcgctccctacacaccacagcanaatggt

SEQ ID NO: 26547 - DNA, 468 bp, Zea mays
  unsure (1)..(468): unsure at all n locations
agcttanggccatgggaataagaagagtatttcttatatctgactctcaagtaatcacatgataggtngacaaaagcagtaaggcaagggacccaagcttgaaaaatatcttgacacagtccgaagaatggaagcctccttcgaaggattctcagtgaaaaatatcccaagaggaggcaatgaataggcagacttgctagccaaatcagtggcataggggcttccacttcccctagaagtattctttgaaaatctcaaagcacctttggtggaactcatggaaaggacggtgcttacaatttcacttgtgcatagcgaagattggagaacagaaattgtatcgtttctccagggcaattatccttcggatgatgaagcttacataaaaaggatgcatgccanaancagggccataaatggtggtctctcattattatttaatttaaatcaaagtctatactcaagcta

SEQ ID NO: 26548 - DNA, 501 bp, Zea mays
  unsure (1)..(501): unsure at all n locations
gacctataaaactcagcttggagtaaacttgngatacataaataaagagaaaagtctttttaaaagaanagaacacctgttcacccggcccatctccacttctctctcctcggcccacctctgtttcatcaggccggcccactctcgcccgtgccctctccatcatctcactggcatgtgggccccgttgccactccttagccgcagcatgctctcatgttcttgagaccgaccgatggggcccatctgtcatcacttcgtgctgcccgtcaatagaggacgcaagatccgcgacgagcttcttccaccttttccgtcggtgtcgtttctgactggtccacctcatcctgngcataaaacctagccacggctcctcttctatttcgctntgcggcacccgagaatcaccccaacgccgctgcgacatctangcaaatctgtgagagggaaagtgttgagccaccgtatgtggaggagagcagttgggcggcccgcgcgatg

SEQ ID NO: 26549 - DNA, 468 bp, Zea mays
  unsure (1)..(468): unsure at all n locations
agctngcttgcttcaaagattcctgtcctcaaaccatggctgcaaatgacaagaattgaaatttatagcctacaaaaaaattgcatataaacctatgaaataccacataccttgaaaactggccgagaattgctgggatagaacctcgatacaatcctcgaagcccaatttgtggaagctttgaaatgagctcaggaaatgagagtgtagatgcttggacacgtgtctgatacagcaaaaaaaataaagcaattggattttgagtactttggtcagcaggcgaaactttntttatcccatactaattcgtgaggccacatataatgctttggcatacaacattcatattgattnttgatgggaaattggagacataataaagtaagatctcaaaatggattgctatacatataaagtgcctagtccaatatcatgtgctttatttgaatcgttgttgaactaaacggt

SEQ ID NO: 26550 - DNA, 488 bp, Zea mays
  unsure (1)..(488): unsure at all n locations
actcagcttaccttgtacgaggataagatgcctttgttccaaaggtggatggtccttaagcctctntgaattccttaagggaaaatgcttaagatacatataacagtgctttcataagtgcataaactgtcatgagcatcacacttatactatgacacaatgcacttcacattctgtatggtatagatatgttctcattaacctcattatgtgcaattggcatttcaagaccaaaatatgtattcctatcaaggcacatatttagggggagcaatctatattatatagaactatgatcatgcttaattgacatatcttttgatcatatctctntcattntggtacaaatgcatatatcttattattcttgtaccatgactacgactaatatgtttccaagtatatttctatattaagtcgtagattgaaagggaaatggagtctttggcgaagacaaggcttccactcaactctatcggtactatgta

SEQ ID NO: 26551 - DNA, 407 bp, Zea mays
agcttccttcgaaggatattctggtaagaatatccctcgagggcaaaatgagcatgctgatttgttagccaagtctgcagcacaggggctgccgctaccttcggatgtattcttcgaaacaataaaggcaccttcagtggagttacttgaaagagcagttcttactatttctcctgtgtacagtgaagattggagaactgaaataatttcttaccttcagggcaatttcctatcagatgacgaagcttataataaaagaatagaggcaagagctcgaccgtatatcattatagaaggggagttatacaagcatggagtttgtgcaccgctgctcaagtgcttgtctagagccgaaggtatagagttgatgaaggagatacatgcacgtctttgtggatcccacatcg

SEQ ID NO: 26552 - DNA, 275 bp, Zea mays
cttcttaaatgtttagacaaatagcttgtgatatgcacttgtatacatcttagacgaatttaaaatcaagaaaatgtccggcattgacaggaaaggggttcctattttcttatcatagaagttcatgtcgagaacattcccatctagctagagtaacactgatcccagcctagcaaggcgacatggagcaaatgtgatttctattccaaataagtatttctagccaactcacaatgaaaaaacaggcaataaaaatagttagggctagtttggga

SEQ ID NO: 26553 - DNA, 416 bp, Zea mays
  unsure (1)..(416): unsure at all n locations
agctngaagccatggtaagtagcatatgctattaaaatgcgaattgattctagcctagctacgggtgcataggtttcaccgaaatctaaacctttgacttgagaatatcccttggccacgagtcgagctttgttccttgtcaccacaccatgctcgtcttgcttgttgcggaagacccacttggttcctacaaaattttggttaggacgtggaactaaatgccatacctcgtttctagtgaagttgttgagctcctcttgcattgccatcacccaatccgaatcttgtagtgcttcctctaccctgtgtgtctcaatagaggaaacaaaatagtaatgttcacaataatgagcaacacgagatcgagtatgtacccccttnttaatgtcaccgaggatggtgttcacggggtgatc

SEQ ID NO: 26554 - DNA, 484 bp, Zea mays
  unsure (1)..(484): unsure at all n locations
tgccatgcctatatatgaagggtgtcacttggcgagcactgttatgcatntcttaaactctccaatttccccaatttcttcaagcatgaggtccaaacagtgagcagcacatggagtctaaaacaagtgagggatctttctctaaaagtcttccaacaaccttgaagttagcctcattatctgtagcaatctgcactaccttgtctctaccaatggcataattcttttctccagtagtgcagctaacatctgagcatctactgtctcacttgaggaattgtgtaatacccaaagtgtatataatgagaatatagttgatctctttatttctgtggcatctattcattataatatgagaataactatatttaagaatgaataattaaacaaatgacatctaaataatgtatgaatcatgttggaagttgtgtatttttgcatctaatggtaatgataataaaaactcattaatgaagagaatgag

SEQ ID NO: 26555 - DNA, 212 bp, Zea mays
  unsure (1)..(212): unsure at all n locations
agcttgcgatggtgccgtctatagttntcgtaagacgttctatttttgtttttatttttccaatgcttggaattttctctctaagtctcgaaaacttaagagctaatttggtaaccatgaataattaatccgaagataaaatccacaccatataggatccctggacacaaccataataatctagggaagatatcactgctaggggctagttt

SEQ ID NO: 26556 - DNA, 457 bp, Zea mays
  unsure (1)..(457): unsure at all n locations
actaagcttctaaggtggacctgctaccgaaggtgagcatgttgatgttgaanaaggtgaaactgaagatgagtacggcgccctgccatctaaacccaaccatctggagtttgggaattctactgttaccgaagatgatatgcctaagttgataaagctaggttatttcagggaagccaagaagaaattgattcattttggcggaaaagaaattactccgaagccagaaaaggatgagatggtagtctttaaaagtttctttaaagcaggattgagatttcctttgcatgacatgattgcagatgttttggagaagtttgggatttatcttcatcagctaactcctaacgccattgttaggcttagcatttatatttgggctctccgaagccaggggggcggagcctcttgccgaaggcttctgccgggcacttgagcttcattatcagacaaaagc

SEQ ID NO: 26557 - DNA, 439 bp, Zea mays
  unsure (1)..(439): unsure at all n locations
agctggtcattntattgctaactgtcccgaatatgatagtgaccaggagcaagggaaaaatgggaagagagagaacaagaaggtttacaagaaggccaaaggcgaagcacaccttggaaaggagtgggattcggattgctcttcgtccgactccgacgacgaaggactcgccgccactgccttcaacaaatcggctctcttccccaacgagcatcacacttgcctcatggcaagggaaaagaaggtaatcactcgtaatgctaatacttatgattcttctagtgatgatgaatctagtgaggatgaaattgattactctagtttattcaagggattggatagaactaagatagctaagattaactgagtgattgatgccttaaatgaaaaggatagaatcttagagaaacaagaagaacctttatatgaagaacatgat

SEQ ID NO: 26558 - DNA, 483 bp, Zea mays
ctggtcactctattgctaactatcccgacaatgattgtgattatgatcaagggaacaagatggagaagaagaagaactattagaaggcaaacggcgaggcgcatctatgctaagaatgggactcggactgctcctcttacgactccgacaatgaatgactcgccgccaccgccttcaacaagtcatacgtatatcccaacgaacgtcacacaagccttatggcaatggagaataaagtgagtactcgagactccacttatgcttcttctattgataacgaatctagtgatgatgatgacatagactattcatacttattcaagggcttagatagatctaagatagataatactaatgaattgattgatgccttgaatgataaaaatacgctattataacagcacgaggacttgttgtatgaagaacatgacacatttgttaagcacaaaaatcacttgcattctagaataagagaaatggaat

SEQ ID NO: 26559 - DNA, 454 bp, Zea mays
  unsure (1)..(454): unsure at all n locations
agctntgccaaatagggcgcataattatacctttgatatcttctcgtgctttcagatcattgttcacataaaaccattctgtcatccagtcgtcgggtcatctcttccgaaaggttggcacgggacagcttgacccagaccgagaaacaaaattgtagcagccaaagttattgtgatactgttccttaccccaaggttttgtctcgtatgataattcgtgtatgttgcagaagcttttcgcatcaggttccagaccttggcttctcacggcccatacgaagatattcagccttataattgcttcgggggtaagttgatgaagatagatttcaaacattttcagcacctccacgacgaagctgctcaagggaaatcacagcccagctttcaaaaagcttcggtacactacgacttcattctcttcagggtgtggacaagtcttctncccttcgtc

SEQ ID NO: 26560 - DNA, 466 bp, Zea mays
  unsure (1)..(466): unsure at all n locations
tgatgcttcgccttcgtgctcttactataaccagttgcaccttgcttcaggcgaaggtattcttcagtaatcgccatgttaagcctaaaacgaacttcgaaatagttgttaaattaatgttttgaggaccttcggctaaggaaggcccctaacaattgttgtgtacgtgatttggatcctggcacgtacatagttcgcatttgatttgccttctaaaatcgggtgtgatagaatagtagcacaatatgaagggcacgagtaggcttgatgggggcaatggcgatgtangcccaatgggagtgcgggctcggaggttatgttgtggaaagaagaagagagtgagaatggcatggtgaatactgtagatataggcaagactctttagtacttgttgttataacgaaccgataccaaaggaccctcaccccatttttttgaaagcaaaattattatttaatgaagttct

SEQ ID NO: 26561 - DNA, 330 bp, Zea mays
agcttgtgaagattcttcatcccaacatgggctagtcggcgatgccagagccaacccatattagtcttagtaattaagcaagtatcgagtctagctctgttaaaatcaactaagtatagctgaccctttaatactcccttaaatgctactgaatcatcacttcttctaaagatagtagcacatatatctgtaaaaagacagttgtaacctattttgtataattgagaaattgaaagcaagttataatctaaagaatctacaagaaaaacattggaaatggaatggtcaggtgatatagcaattttaccaagtcctttgaccaaaccttga

SEQ ID NO: 26562 - DNA, 330 bp, Zea mays
agcttcatatcttggtacccaatttgaattgggtcctttgagattagtaggaagagccttgagtacccacacaatccttattgtaacctttctctttgtgtaggcacccacatatacttgacaaccatcttacatggtttcaagtcaatatttaatcacatagataaaagctagagttaagaataggagccttttctccttttcttgatacatcattgtgttgccttcttgatgatgaacctagcttgaccttgggtgcacctagcttatcaaggttagtcgcataagcattcataacatgaagacaagttatgcatggaatttacaact

SEQ ID NO: 26563 - DNA, 325 bp, Zea mays
ttttatgttaatgtcactatagcagcgaccggcttaccacttatgcccaacaataatatgatgaatgactcggccatgttactacactggaactcatatctccatccacctaagtagcgagcttctcgtcacttttccaaatccggcattaatccattcaaccaatctctaccttcggcatatgttgctactttgagcttttcttacttttctcttaagaacaagtagttgctcgtacccagactcccagtcccatatatcaatctccacgcacagagcttagccctcctagccttaccatatgttatgttgaacccatcaaaca

SEQ ID NO: 26564 - DNA, 334 bp, Zea mays
agcttcacatctctggactaactcggctgcatcactctttgtcgtcggcctgtagaaactagacctgaagaccttcccaaccagagttctagatgctacgtgtatcccgcactgtccggcgtgaatctcatctagcagttgcttcccagtaaccgaaggaatgcacttcatgaggactcctgttgcaccccttctgtacagtgcttcccctatgagggtgttgtgggctgactgccttgcgaggcgttccgctgtggctttatcatccggttcctcttcattttttatatacctgatgataggctccctccagtcattagagtctgactctggc

SEQ ID NO: 26565 - DNA, 329 bp, Zea mays
agctttaacagtcttcttcggagttatgcttgaagatttaattgtttccaaaacatctagcacgttaaccatcctttttcttttcggggttgctgctggacccttttggatttttgtggcctcaatttttgttgaaggacttaaaatttctaatgtttttgcttcttcagttttcggttcttctgttttctctgttgctggtacttcggccatttcctcgatttttgccactggagctggttctctggcttcggtggccgaagaggcctcaccaataaactcaagcattgtggccggctcaatataacatggagggtgtgtgagcactt

SEQ ID NO: 26566 - DNA, 323 bp, Zea mays
agtcttgtctgtcggaatcgaacgaagcttctgtttgaaacctgcttccgaggaagaaagtattaaagttactcaagttcataattaaatggccagagtgcgctctaccgtcagggttgaacgtgagggggacgaaactgaagcttcggagactgttcccatttctgaagctatgcaacgatccggactagtgacatcggaaaagatccctagtgaagatgcagaacaagcaatcgctgaaacagaggaagaagatattgaggaaactgatcccgaagatgattatcgcattgctatgccaagcaaacccagccatttggact

SEQ ID NO: 26567 - DNA, 328 bp, Zea mays
agcttatagcaatggtgggcaataaggcaagagttgaaggatgtattgcggaacaatttaaacttaaggaggtagcacacttcacaagttgttactttgcagaagaacataatgtatttgctcgaaagaaaaggtaccatgatgatgaacgagagatgcctccttgtagtgatcttttgatttttcagacaaacggcaaagccgttggtccacccaaggcatatcacctcagtatggaagaacagaagtttactttactgtacatgttcacgaatatgcctgaagtggagaaatattttgtgtaagacttattttcttaaactgttca

SEQ ID NO: 26568 - DNA, 329 bp, Zea mays
agcttgcacagtcaacagtactgtgccagaatcgaagcacatctactaggagatatcctacctctaaaatagtttttgcattcgtcatcattttctttttaataaacaatcattgaaagcctagtttttttttgttattttcaatttcttgtaatatcttcgtaattgtcatgatataataaaccttcttcatagactcacgaagttccaaaagtcggtgaaccacgaaagtcgttctcaagagcgtggggttcacaattatattacaagttgtgctgaagcaacaaaaagtcgttctaaggaacgcaacgtaagtttgaccgaagcaa

SEQ ID NO: 26569 - DNA, 328 bp, Zea mays
atcttataatgccttcaagattaagaagcctgtgcataatatgccttttagaaaattagccacgtgaacgaaattggcaaatattgcctctgcttacttccctttcagtggaataactatttcattcatattttgcactcgatctacaaaataatagttggactcacaattcaaagatctcatgctctatatgcattctttgaaggacggcaaccatctttacagtctctatcacctgaacctgccacaaaatctttttgttaaccctgattagcgaggatttacccacaccacccaataacattatagtggctaaattaaaataaag

SEQ ID NO: 26570 - DNA, 328 bp, Zea mays
agcttgtcatgcgcttccttggtccatgcgttaatcctgcaaaagtagaagtccacttattcataactcataagagagatgaactagatggaatcgttggtaaggaatacatgatatttgaggatcacctttcatcaaatgcttaaaccagatcttcaactcagatttaaattcggatcgaagcaatacatatcaactacctgttatatctggaagtcaacccaacactcctaatcacaaccaaaatatataagctatcatattttggggtgcaatttgaaaaactatgttcctatagaaaacaaaattgtctacatctaagcaaaac

SEQ ID NO: 26571 - DNA, 324 bp, Zea mays
agcttgtgaaggttcttcatccctacatgtgctaagcggcgatgccacagccagcccatgctagtcttagcaattaagcatgcatctagaccggcctcctcttttgcaaaatcaactaaataaagtttgtcgtctaatacacccttaaaagctaatgaaccatcacttcttctaaagacagacacatctacatttgtgaataaacagttatatcccatattacaaagttgactaacagacaacaagttatatccaagcgactcaactaaaaacacattagaaatagagtgctcggaagaaatagcaatttttcctaaccctttc

SEQ ID NO: 26572 - DNA, 336 bp, Zea mays
agcttttggacggcgaaactgtggtttgtaagctgtcacaaggaaggccacaagtctttcaaatgcaaagcaaagaccggggataagcaaaagctcaagcaaaagccaacaagcaaagtctccaacacctacatcaacaaggtggacaaaaagactgctacaccatatttgatcaagaagataaagaatggaaaggtgatagcaatcaaggccaacaagcaagccaataaaggaaaaggggccaactgcatctgggtgccaaaagagattatttcaaccatgaaaagcaccaagaaggtttggatcccgagagggaagtgagatgttcgaaggaca

SEQ ID NO: 26573 - DNA, 332 bp, Zea mays
agcttgtgttcgccccttggggaggagtgcggtgcatttaggaaacctaacgggcggctatagccccggggaatctttgtaaaggctacatagtgatgccctgctaggccaactaggtagtggtcaatggggagtagctctctctgggcggaaagggaatcacggcttgtgggtaaagtgcacaacctctgcagagtgtttgaaaactgatatatcagccgtgctcgcgattatgagcggccaagggagctcgagtgattagtggtacttgatcagagatgtttggtttgcaggtggcaatgagattgatggttcttggtattggctctggt

SEQ ID NO: 26574 - DNA, 335 bp, Zea mays
agtctttatgggctcacagaatatctaaacatagtgctactaaagtatctccttttgagcttgtctatgggcaggaagcagtgttgctgtggaaataagtttgaatgctgtcaagttcgccagacaaaattatctaaccgtcatggattattataattcaatgatggataatattgatgaggtgaccgattaaagggtgatagctttgggagcaatagaaaaggacaagatcatagtatccagggcatacaacaagaaggtcagagcaaagtcatttcaagtagaggacctggtgtggaagaccatcctgcctctaagaaataaagaccgaaagt

SEQ ID NO: 26575 - DNA, 335 bp, Zea mays
agcttcgatgatctggtcctccacaaacttgctacaggcctccttcttttctccatagcaggaaccttactggaacactaccccacttaaaaggaatgaggtagaattcttgaatcttggggatttgaaatccttgaagtaccacataacaagggtgttacgggtccttctgctgctgttgctgcttgagcaggctgcggagagatgactcgcacagggttgattctgggagaaccttcttcttatcttctcttcactaacttcttttctcttcccacttttcacttttcactgcctctttctttctctttgctcttcccactggaggattctat

SEQ ID NO: 26576 - DNA, 333 bp, Zea mays
agcttcggcgatggttaaaaattttggcagcagaacagtgcaaatagcaatgaatgctgtgataacttcacacctactcgtctgtttatatagtactgcaggtaagaaggcgaagcgccagaatttttacaccaggcggacacccgcttgctctcgctgtgcggtggaccgcagaaaccaaacagtaactctgcaaggtgggaccgctacgcgttgggaaattgaatcgtttctcgacaacgagctcagggaaggtgttttttggaccttcggctccccgaagcttaaagagacttttttcacggatcaagctcgttacgaaaaacgatctag

SEQ ID NO: 26577 - DNA, 327 bp, Zea mays
tgcttgtatggtccagcatccattagagatttgggctgtttcatctttatatgaaggggaaaaaagggaggttgtggacaagtaaattaagttttatggtcgtctgtgtatcctgttagattccgttgcaacatatgaatagccggaatttctacttgctctcgcgttcgtcgaaccatactccgtgaatgagctgcggttgatacagttgcttcccaattttctttaacacaacgctgtagtactccctctgtcccaaagaataagacaaatttcttctataatggtcttgatggtatttgactcgctcactgcagcagtacccaa

SEQ ID NO: 26578 - DNA, 323 bp, Zea mays
agcttcttcaaagttggacttcggttcctgttgagcagatttgtggttgaagttttaaagacataccagattttacttcaccagatcactcccgaagcagttattagaatggggatcttcgtctgggctgtgaggagtcagggtctagagccaagtgtaagatgtttttgcagtatgcatgaactttcatatgagacgaaggcctggggtaaagaacaatatcataataatttcggttgttatagcttcgttgctcgctctggcgcaagctacccagtgccaacgtttcggaagagatggcccggggcctggatggaagagtg

SEQ ID NO: 26579 - DNA, 326 bp, Zea mays
agcttcaaatggtgacatcttcagactggcctgattattattattattataagagaactcgacatatggtagactcttgtcccaactgcctttatgctaaagggcacaagctctcaacatatcttccagtacttgattagtccttttagtctgaccatcagtttgaggatgacaggccggactgaagctcaactttgtatccatattctcatgaaagcttttccaaaatctggaggtaaaccgtgagcctctatcataaatgatcttctttggtacaccgtgcaaacacacaattcaagcttatgctccgtcgggctcagaatatt

SEQ ID NO: 26580 - DNA, 329 bp, Zea mays
agcttggacagtgttctgcgatggttcttggggaaccttctgtgcaggagcggctgcagtcttagtggcaccttcaaaggtcaaaacatgttatgcagccaagcttgacttcagttgcacaaataatattgctgagtacgaagcacttctgttggggcttcggaagttaagggcaatgagaataagaagggccatcctgaaaactgattctcaagttatttctggccatgtagacaaaagtagcaaggcaagagatccgaagcttgaaaagtatctggatacagtttgaaggttggaggcttctttcgaaggtttttctgtcaagaata

SEQ ID NO: 26581 - DNA, 328 bp, Zea mays
agctttgcctcgggcagactaaggccagaataagataccacacaatgggagtgaagagatagcgagagtagcgtgtaccctccgtggcaagaggctagacggtggtgtatctatgctctcggttggcgtgaacctaatctggtcttaagaaccccggtggcgggttgacatatgcaagggttaagtgctacatatgtcgtgtgattggagatcctcagctgagtataatcgattcggatcgtcgtaccttcgcggttatgaagacttggtcactgccctatacgtataactccagtaaagatgaagggattgttaagaaattggctag

SEQ ID NO: 26582 - DNA, 286 bp, Zea mays
  unsure (1)..(286): unsure at all n locations
agcttcagaccgtcggaggtaggttatgtccgacggcattatcctatctctgacggttttaagccgtcaaggataaggcgtcggaaatagcgttatgtccgacggctgccgtcggacataagctatgtccgacggccccatcggaccgtcggaggtaaggtgtggcaaccgttttacccgtcgcctggggcccactgctgttatgtccgacngnttgaagcccgttgacataacatataccttacctccgacgggttaaagccttcggacataacatataccttat

SEQ ID NO: 26583 - DNA, 326 bp, Zea mays
agcttctaaagggagaacacgtgataggtctaactaatgttactttcgaaaaagatagaccttgtgcagcttgtcaagcagggaaacaggtgggaagctctcatcatgccaaaaatgtgatgacaacatcaagacccctagagttacttcatatggacctcttcggacccgtcgcctatctaagcataggaggaagtaagtatggtcttgttatagttgatgattttcccgtttcacttgggtattctttttgcagtataaaagggaccctcaagcgcttcctaaggagagctcaaaacgagtttgagctcaaggtgaagaagata

SEQ ID NO: 26584 - DNA, 330 bp, Zea mays
agcttgtttttacttattcatatattgtgtttgtgttgtttctctagtaccacttagcttgtgtagctaaattattgttgctctctactttagcttgtgtagtttccaagttaagtagtgttagtgtactagctcttagcacgcttagagtactagttgcatatgactttatcaactataattgtttaactaaactgaatactcttaatttcgtattgtttctgattgcgacacaattagctttagaaagtacttgttggggacttgttctcaaatgctaagaattaagaacaaggcaacacaaaaaatgttaagtgttaagatccttcg

SEQ ID NO: 26585 - DNA, 330 bp, Zea mays
agcttgttattactgttagatgccaacaaaaatgacccttatgacagaacccacccctagttaagagttgtagtgcaaagtgacccctttgcccaacttttgttgtttttgtccaaggcatagtctttttattctgaacttcaaattcctagaacagactatagtgacccatggcaacccactttaatttttacagaatttttggaaaaagttaaaccactgttgtagttcaaacccacactagaattcataattagaaaatgaaaaaggggaaattgataatggaaacttgtgtcaccctagcccaactagcaaaaccctttttaaatt

SEQ ID NO: 26586 - DNA, 332 bp, Zea mays
agcttgtagcggttgtgatgacggcacttacttgatgctaacaagacatttccttcaccaaagccatcttcaacacttcgcctataaaaaagatcaattctctttttcaattgcctgtctgcaagacaagtgataattgcaataagtaacattgttgagatttatattaacgaatggattcacaagcggatagcatcagaatgtacaagatgggtcttgcctttgagcttttcagagtttgttcacaaatgcaaaccgatccaaggaacaagcacatatgcacaaatgttcaaccataaacacgcaattcagcctccctgtgccttctggta

SEQ ID NO: 26587 - DNA, 333 bp, Zea mays
agctttgccggaaacatgtcagcaaagtcacacaccacacagatgtcttgcacccgcaaagcagcctcactctccaccaccatggagaaaagaattcccgacttccttgaccaacgatccagaagcaattgcgacaacaaggataacatgaactttggagaacttcccaagaataccacctccctacccgatggctcctgtaataacgctgtcttccaaaaacaggatataactatgcgatactgagataatcaatccatacccaagataacatcaaatgccccaaggaaatcacaataagattagctgaaaagacctcatcagaaagaatga

SEQ ID NO: 26588 - DNA, 324 bp, Zea mays
agcttagaggcgtctattggttgtcgacttggggtagacgcctccatcttttcttccgtcgccttgaatgcgacgggttgagcttcggatgtggatggatcatcaagctcgttgatcttcctcgagccttcgatcatgcactcaaaacttacaaaattcccgataacttcctcgagggtcattttagtatatctaggattaccatgaattaattgaacttgagtagggttaaggaaaataagtgatcttagaataaccttaaccacctcgtggtcgtcccactttatactctcgaggttgcgcacttggttcaccaaggtcttg

SEQ ID NO: 26589 - DNA, 330 bp, Zea mays
agcttctccttgtcgtcatcaaccttgacatagaaccactccgacttatagcctgctgcccatttgcttcggtagctgattacaggaaactttgtagttttccgataagcaaaattatagcaaccaaaattgtcatgcaatccatcctttctagccttcgtctgatagtgcagctcgtgaactcgacaaaagctgtccgcaaacggctccaccgcttggcttcggagggcccagatataaacgctaagcctaacgatagtgttaggagtcagctgatgaaagtagataccaaacctcttcagtacctctgcaataatcccatgtaggggg

SEQ ID NO: 26590 - DNA, 225 bp, Zea mays
ccaactttatatatagaaatggacctcggctccaaaactattgggccgaactccgtgccacgttcgggccaccacgtttggttgtgccaacgcagcacgtaccttgggggcatagtcttttgcgcctcactttttatacttcgcgccatatgtttatgtgtcgatcaaagtgccaaaattgacattacattttttagggtttatacatgagttattttttcatga

SEQ ID NO: 26591 - DNA, 329 bp, Zea mays
agcttctaaagggagaacacattttaggattaacaaatgttcattttgagaaagacaggatttgtagcgcatgccaagcagggaagcaagttggcactcatcatccgcataagaacataatgacgaccgacaggccactggagctcctgcacatggatctattcggcccgatcgcttacataagcatcggcgggagtaagtactgtcttgttattgtggatgattattctcgcttcacttgggtattctttttacaggaaaaatctcaaacccaagagaccttaaagggattcttgagacgagctcaaaatgagttcggcttgaggatc

SEQ ID NO: 26592 - DNA, 327 bp, Zea mays
agcttaacaacagggttaatagcctcatgtgttttgcaagataaaagttcattttcaacaagaagattgtcatgatcaaatttaatttgagtatagtcttccttgatctttactagtctattttgcaactccctattagcttcatttaatttgtcatatttttccttagcatcttttagggagtttgtgagctcatttacagttgatgacatagttttattttcttcttttatttcatcactagcctttataactatgtcatacttggcatttaaagattcattttcatttttcaacctatcacatttagcttttgactttctaatg

SEQ ID NO: 26593 - DNA, 323 bp, Zea mays
agcttgtatagctgttgtaataaagaagtaacccccacatcacccctgtcttgtaccaaaaataaggaaataaaaatgtgatgcgtttcctttaccattacctaccctaggattttaatctcgggacgagattcttttatggggggaaggatgtaacacccctggtgttactataactaaaacttgagcatggcatcatgagcattggcattgcatatgtttgacacacctagagtgcattcactaggcaaaagtttcaaacaagttgtattgttttactgtttttgcaaatggaaccctggttaatggacttaaccctaaat

SEQ ID NO: 26594 - DNA, 326 bp, Zea mays
agcttataaacattaagtgtagtaaaatatcatatataaacggttatgcatgaaccggggcttgccttccaaagttgtggcagacagatcctcgatggcaggctctcgtgctggctcctagactacctcctgagcaactccttgctccggaacgaggatgtactctccgtcagcgagattacaatctatcgaatgcaatgaataagatacatgtatattaatgatatgccaatttagtaaatactatatatggtgaaaccattatgaaaacagtgggtacactagggtttgtttatcggatggtgtcttaagtgttccatacacac

SEQ ID NO: 26595 - DNA, 334 bp, Zea mays
agcttctagtctgacaaccatactttggggatgttttactccataatccaaatggatttaggtctaggtcacataatcaaatttgcacaactatagtatccctataactttgtcatagtgacttatagcaaaacccttatgtattcaaaactacaagtgtccaaagttggctcaatatcattctttttcaaagtttcccattcttgagcacttgtgaacttttgcactttactccaatttgctccacaatccttggacatatccaaatacgaaaaatgttaggctctcaaaactctaccactttggtatacccactttttgcaaaagtggttat

SEQ ID NO: 26596 - DNA, 332 bp, Zea mays
agcttgtgtgattaataatgtgtgttacatgagttcacctctattctaaattttacgtcacaataaaataagttgaactatgtttatgtacttgtaagtaacacttatgggaaatagtaatctattttcaaataaagttaatgtatgttatagtttatgttatactttgaatccattatcccttatgtagtattgtgtccttttaagatgtgttcctagggatggcacgtggacccgtgggtatggatacccgcgggttttgtacccaccggatatggatacgggtacaaaaactcacccgtgggttttatctggtcggatacccgaaatac

SEQ ID NO: 26597 - DNA, 334 bp, Zea mays
agcttttgctggaaatttccagggcacatacgtgcgccctgggaattcctgggaccttcgaagctgccgacagcagccgggagagtctctccgagactacatccggcgattctcgaagcagcgcaccgagctgcccaacatcaccgactctgatgtcatcggcgcgttcctcgccggcaccacttgccgcgacctgttgagcaagctgggtcgcaagacccccaccagggcgagcgagctgatggacatcgccaccaagttcgcctccggccaggaggcggtcgaggctatcttccggaaggacaagcagccccagggccgcccttcggaagat

SEQ ID NO: 26598 - DNA, 336 bp, Zea mays
agcttgcagcactaggattagcgcggcatggtggaaactggcaaatacatgacaaaatagcaagagaataactatacgtagttcatccgtctggggagatttatgcctgctcgtgcaaggaggtcgttcgctcttttcacagctgaagaaattacctcctcctggacaacaaagaaacagacgtgtgatatcatcagtggtagtggtatgtctacaggggcatctacgggtgtctcacaaagaaaggagggaaacaaggggtacaggcatagcctgcggtcctgaaaaacaataataaatgtttagtcaacaaaaatggctgagatttgaagtttt

SEQ ID NO: 26599 - DNA, 332 bp, Zea mays
agctttatcaaatggacgtgaaaagtgccttcctcaacggaccaatcaaggaagaggtctatgttgagcaacctcctggctttgaagatagtgagtatcttaaccatgtctataggctctctaaggcgctttatgggctcaagcaagccccaagagcatggtatgaatgcctaagagatttccttattgctaatggcttcaaagtcggcaaggccgatcctactttatttactaaaactcttgcaaatgatttgttcgtatgccaaatttatgttgatgatattatatttgggtctacatgtgaagaatttagtaggatcatgacacagaaa

SEQ ID NO: 26600 - DNA, 329 bp, Zea mays
agcttgtgctttcaaatgtgtatgcatattctttccttaaacgatgaagcttgtgacaaggccaagcaagcctgcaagagaagattacaaaattcttcaaatttaggacaaattccatttgttatgtgaattgcatgtttccaaactcaataattcaaaagctttttatcgtcttttagagaaaatgggtaggttgagaaaaaagaaaggggtggaaactttaccttcattaatatccccattgacaagaatactttgatctttgagagtcatggccatgaagaaccttgagaccagataagtggttggttttttgcaaaacaaaaaac

SEQ ID NO: 26601 - DNA, 329 bp, Zea mays
agcttgtcgaaggtggtcgaatgagttcaccggaggtgggcgccaatgttggggacttgttctcaaatgctatgaattaaaaataaagcaacacaaaatgttaatggttaaagtccttcgtcactcgaagcattatctcccttaggatataatgatcttcagacgaaagtcatgaaggacgtaccttcatcatcgcagcatatattaatgaaagaagaagcatatgaaatatgagaaataacatgaataaccatatgacattgttaatatatctttattatatcatcatgaataaacatgaataatattgaattacatttgtaccttcg

SEQ ID NO: 26602 - DNA, 324 bp, Zea mays
agctttatcaaatggacgtgaaaagtgctttcctcaacggaccaatcaaggaagaggtatatgttgagcaacctcccgactttgaagatagtgagtatcataaccatgtctataggctctctaaggtgctttatgggctcaagcaagccccaagagcatggtatgaatgcctaaaagatttccttattgctaatggcttcaaagtcggaaaagccgatcctactctatttactaaaactcttgacaatgatttgtttgtatgccaaatttatgttgatgacattatctttgggtctactaacgaatctacatgtgaagaattta

SEQ ID NO: 26603 - DNA, 321 bp, Zea mays
agcttgtgaaggttcttcatccccacatgtgctaagcggcgatgccacagccagcccatgctagtcttagcaattaagcatgcatctagaccggcctcctcttttgcaaaatcaactaaatagagtttggcgtctaatacgcccttaaaagctaatgaaccatcacttcttctaaaaacagacacatctacattagtgaatagacaattatatcccatattgcataattgactaacagacaacaagttatatgcaagcgactcaactaaaaacacattagaaatagagtgctcggaagaaatagcaattttttctaaccct

SEQ ID NO: 26604 - DNA, 333 bp, Zea mays
agcttgttgtgtagctctcggagttgctcgagttgagccatgtggctcccaggaggagtctgggccccgctcggctcctgaacgtgcggtggaagctggtcaccttcccgcggcatgccaaggcgatctctctcgttggggatatccgagtcgaggtagaggcattcttggttcagatcgtagccttccccaccggagctataaccctttgagctttccgagagcatctcgttacaaacatacagaaactgcaacatggacacgggatctctcaacccgaagaagtctagggtgaagctcgaactgtcctcttccttggagtctagacacccc

SEQ ID NO: 26605 - DNA, 333 bp, Zea mays
agcttctaaagggagagcacattttaggactaaccaatgttcattttgagaaagacagggtttgtagcgcatgccaagcaggaaagcaagttggtgtccaccatccacacaagaacatcatgactaccgacaggccactggagctcctacacatggacctattcggcccgatcgcttacataagcatcggcgggagtaagtactgtctagttattgtggatgattattctcgcttcacttgggtgttctttttgcaggaaaaatctcatacccaagagaccttaaagggattcttaagacgggctcaaaatgagttcggcttgaggatcaaga

SEQ ID NO: 26606 - DNA, 332 bp, Zea mays
agcttcttttgcatcttatttatctcgaaacaaagccaaagagtggaagtgcactagcttagtagaaaaaagttctaagactacagtaatgtctaatttttttataaattgatcatgatgaaatatcatgtcatagaagtcccaccctaccaagtagttccgctcctgcaaccgtgaagcatgcatcctcctccatctgcactccttagcttattgtcactacccttggtcccttgcaataccctctctacctagattcattgtaaagagctgcaatttcaaactcatttaggattatgtattgccatattgtcctcttaaaatgtatcacc

SEQ ID NO: 26607 - DNA, 329 bp, Zea mays
tctttcttgtgcttaaaggagaaacattcttttaagtattgctgtgtgacagcttctgcatagagaatacttagcttctatgttcttgctatgtgaagaaaaccttggccaaaataggaagcggccgtttcagcttatctgtataccaaaagattggaaggcgttttttcgcctctggctcagacaactgatctcgttctcatgaacgcgacttccttcataggtcataatctataaccttgtgtgtaccaccttccttgtgaaccgttcacctgtatggacagaacttgacacactagtatcctgatccttgatctatcgtacatgtc

SEQ ID NO: 26608 - DNA, 328 bp, Zea mays
tgcttctgcgcgtcgatccgtcctccgtccgagcaggtgctgcgcccttccacgggatcatccctgggaagcgcgtccagcccctcgggcgactcgatctcccagtctgctttgggacaccctccaacttccgaagggagaccctgacgttcgaagtggtcgggttccgaggaacctaccacgccgtgttagggaggccatgctacgcgaagttcatggccgtccccaactacacctacctgaagctcaagatgccgggccccaacggggtcatcaccgtcggccccacgtacaaacacgcgttcgaatgcgacgtggagtgcgtgga

SEQ ID NO: 26609 - DNA, 329 bp, Zea mays
agcttgatgtttacaatgacatcagcttctcccaaatctttcatttcgaaattgctcgatagaagatttttaacttcctcaatcacatttagatttgatccaaagatcaagatgtcatcaacataaaggcacagcataacagactcacccccaccataccgatagtatacacacgtgtcagattcatttacaacaaagccagcagctgtaagagtattatcaaacttttcatgccattgcttaagtgcttgttttaggccatacaatgattttatcaacctgcacaccttgttctcttgaccatctgcgatgaacccttctggcttatc

SEQ ID NO: 26610 - DNA, 326 bp, Zea mays
agcttatgaaattatctacaacttctcttactaactaaaatttcaattctattgatagaattgtctaaatctcatgagaacagattctacacagaattatgagactggaaaactgttataatcaaactgcaattactctctaacctgatgtccgattgaggcgttctttgcagccacggaaagatatctaaattatctacaactcaaaaatagactttttattttttgaggcctctaagaccacgaaaaactggcatgaacaaaaactatcgaatctgtcattctgcagagactaatttcgagatcaaaaatctaatcccccatct

SEQ ID NO: 26611 - DNA, 327 bp, Zea mays
agcttctaaagggagagcacattttaggactaaccaatgttcattttgagaaagacaggatttgtagcgcatgccaagcaggaaagcaagttggctctcatcatccacataagaacataatgacgaccgacaggccactggagctcctacacatggatctattcggcccgatcgcttgcataagcatcggcgggagtaagtactatctagttattgtggatgattattctcgcttcacttgggtattctttttgcaggaaaaatctcaaacccaagagaccttaaagggattcttgagacgggctcaaaatgagttcggcttaagga

SEQ ID NO: 26612 - DNA, 323 bp, Zea mays
agcttgctgttgctccttcagttgccctccgtgctcagcttgttggccggccgccggcgctgtcagcgtcttgcatccgccgcaaggtacgctccagcatgtccacacgctcggccagcgcttcgatcaacgcgcactgctgcgcgctctgctcgcacagcgtcgccaccatctgcatcaacttcctcgcgtccacaacgtcggaggcggcgccagcaactgcagtcagggccggtgaagtgtgttcgttttcttcagccaatatctccgaaccctcaggctcgtcgacaccaacattggtattgctctcctctgctatctcg

SEQ ID NO: 26613 - DNA, 321 bp, Zea mays
agcttcataactcctactggtaccttttattaccttcggatgcctaaggggctcaagaatgctggaggaagcttcagtagaatgactgccaaggttcttcactctcaaattggcaggaatgtgctgacttatgtcgatgacatcatagtgaagagcacaaagcaagaaaatcatgttgccgatttgcaagaaacatttgccaatttcaggcaaactagtctcaagttaaatccagaaaatgtgtctttggaatgaagaatggcaaatttcttggctgcctggtatcaacaaaaggcatcgaagctaatccaagcaaaatcg

SEQ ID NO: 26614 - DNA, 378 bp, Zea mays
tgcgagctctgtactccgggatacgattcagtcgacacggatgcattctagcgtgatctgacatccgagctcaggagtgtgtgtctgacaccctctgctcgtattcaacccctattcctctgtctagttgcaagtcttgacgaaactgcatcattcggggtgctacatcgtgttacctctgataccttgatgatcactaaatctatgcatgatgcttatcttgcgcgctcctttggaataatcaactgttccatctcgacctgagaataggtgcacatctaccctacaccttggaagaattctatctcagaacgaactatccttgctggaacctcacctttattagcccatgcccctatctctacgtgtatgagtata

SEQ ID NO: 26615 - DNA, 335 bp, Zea mays
agcttatgaagattcttcatcccaacatgagctagtcggcggtgccagagccaacccatgttagtcttagcaattaagcaagtgtcgagttcagctctatcaaaatctaccaagtatagctgaccctctaacactcccttaaatgctattgaatcatcacttcttctaaagacagtgacacctatatcagtgaatagacagttgtagcccatttgacataattgggaaacagaaagcaaattgtaatctagagaatctacaagaaaaacattggaaatggaatggtcaggagatatagcaactttaccaagacccttgaccaaaccttgatttcc

SEQ ID NO: 26616 - DNA, 375 bp, Zea mays
tgcgagctctgatcctcgggatgctattcagtcgagccggatgcttgcgagcttgtcaagggagaactccttatagggttgactagcgtacaattcgaagaatataaccttgtgcatttgtgagtatgtcaacaggtgggacgggcacatccctgctggaatgttatgaccacatcaaagcccctggaactgctgcctatagacctattgcgacccgtgccctatcttatgattggaggaagtgagcattgtctacctattgataatgacacttaactctgaccttgtgtgaactttgatgtagatactcatgtagcgctttggaccatcaaacgcttcatccagacagctgcatgtgtatatgtacacgaattg

SEQ ID NO: 26617 - DNA, 330 bp, Zea mays
agcttgaaaataatgccgaagcttcctggaggccatcaaaacagcatacagtactttctccaattctgtataatttttctttgataaactaagaacttcggatacaaaatatattggggcctgcttcttgacttggctttcaagcttctcctggacaagtgctgcacttaccgctgagtgcgaagctgccacatataataacaaaggagcccctggcgttggtggagttagtgttgttagatctatcaaatattgcttcagttcttcgaaggctctctgctggactggtccccattgaaaaacttcggctgacttcagcacttcgaaaaa

SEQ ID NO: 26618 - DNA, 333 bp, Zea mays
agcttgtatgggttgtgatgtcgccacttacttgatgctaacaagacatttccttcaccaaagccatcttcaacacttcgcccataaaaaagatcaattctcattttcaattgcctgtctgcaagacaagtgataattacaataagtaaattataatctacatttatataatctagactaccaaacagctacatatagtagattataatctggattatataatttagattataatccaacgacaagactgttcgacgaaaatgttatagtgattgtaggcttaaatgtagtcatatgcttttacagatgatccaagcaaggagagttagctga

SEQ ID NO: 26619 - DNA, 328 bp, Zea mays
atcttatagaataatggttgaccaactatgttatatcgatggttatcatagaaaaaaaataaactgctgagaatgtggtatgaaaaaaatacacttttaagtcaattggaacaccggttcgaattgtatgttctcacttaaaaatatcctatgtccatccataacgtttcttgtcgtaggcaaccttatatttctttgaggccatgataatcacttatgtgaaactcttgtatggcatgtgcttacaccaatcttgagtcagtgtaaagtcaataaaagtcacgtgcttcttaacatgatcgattatgaaaagagcgttgaaagtcgc

SEQ ID NO: 26620 - DNA, 330 bp, Zea mays
atcttgtcaacaatataaacacaaaagagagaaggctgcttcggcagattagccaaagcctatgctcctatgtgaagatatagcagatcaaagggtactgttggggtcttaattatctgttgagcaagaaaaaactctgataaggtttttgttcaacaacaaagatgtctttgcttggacaccaatgatctttacattgggacgttggacactcgagcacctataaatatccccgtacagtgcccttgagaggccggatgaacagagcaattgaagtcttgagctaaaccttgcttgcattctttccactcccccgttggatcaacttgc

SEQ ID NO: 26621 - DNA, 418 bp, Zea mays
  unsure (1)..(418): unsure at all n locations
gcatgtcaagtcttggtccttcgcattcagtctattcatcgcgcatgtccacacggggggtctgtggagcccgtgccatnacgggaaatatatcttcaccgctggtcacagatagatgcnntctctcgatgataaaataaagggcagtatgtggaccgtatttattttatccggagagggcagttctgtgtgcgttatatacactnaatctgagttggcaggggcataccccgggnnttcactctcnntttccgcnncttctatacngnngatcggagagcgaatgggaccccccaagaaaataatagcatgtgnngtccccgcgtaccagttcccgtcagccccgtccccgactgtggacgaaagccaacttcataaagatctcattcgacgggagaccgtgtcttcgccctatagg

SEQ ID NO: 26622 - DNA, 363 bp, Zea mays
agctctgatccgctggatgctattcaatggggacggatgattgctatcttgtcagaggagaacacgttatagggtggacaggcgtaccatgcgaagatgataaaccttagtgcaatttgtctggtcactgtcaacataatgggacgagctcgatccattgagatgtgttaaactacttcaggaaccctgaagctgctgcatatgaacctgatcggacacaatgcctatttgcacgtatgagggaataagtctgttatagggaaatgagaccttgagccatctctatgtattttggagattgaatgccaacacatgtgctttgctgtgagtatctgtaccacgatgaacaacatgtgcatgact

SEQ ID NO: 26623 - DNA, 327 bp, Zea mays
agcttaatgatgaattggctagtcttaatgctcaacttaagactagcaagaatgaatttgacaagctaaaatttgcaagggatgcctacacgatcggtagacacccctcaattaaggatggacttggctacaaaagggaagccaagaacttaacaagccataaggctcctatctccgccaaggagaaagggaaggctcctatggctagtagtactaaaaggaaccatgcttttatgtatcatgataggagacaaactagaaatgcttataggagttataatgcttatgatgattttgactctcatgccatgtttgcttctagttctt

SEQ ID NO: 26624 - DNA, 328 bp, Zea mays
agcttaccgtacactcacacgaaccatatgactctatcgcaactcctgcgcttgggagacacacagaccagctttatcatcaacaatgtacaccttacaatgccctgaccattgcaccgatcttacgcgtgctaacaccttgcaaaccagctgccactctgacgcgacaccgatacggccgatgactttataattagcctcaactggcctacccatatcacctaatcatatcgaagcctggaatgctaacatgattggatacccatcggagtcttatatgactgagaatgacgaatacactgtgtgccgaactcatcaacagaatttt

SEQ ID NO: 26625 - DNA, 324 bp, Zea mays
agcttataaagattcttcattccaacatgggctagtcggcggtgccagagccaacccaagttagtcttagcaattaagcaagtgtcgagttcagctttatcaaaatctaccaagtatagctgaccctctaacactcccttaaatgctattgaatcatcacttcttctaaagacagtgacacctacatcagtaaataaacagttgtagcccatttgacaaagttgtgaaacggaaagcaaattgtaatctaaagaatctacaagaaaaacattggaaatagtatggtcaggtgatatagcaattttacccaattctttgaccaaa

SEQ ID NO: 26626 - DNA, 332 bp, Zea mays
agcttatgaagattcttcattccaacgtgggctagtcggtgatgccagagccaacccatgttagtcttagcaattaagcaattgtcgagtttagctctattaaaatcaactaagtatagctgaccctctaacactcccttaaatgctactgaatcatcacttcttctaaagacagtaacacctatatccgtaaaaagacaattgtatcccattttatataattgataaactaaaagcaagttataatctaaagaatctacaagaaaaacattggaaatagaatggtcaggtgatatagcaattttaccaagtcctttgaccaaaccttgatt

SEQ ID NO: 26627 - DNA, 333 bp, Zea mays
  unsure (1)..(333): unsure at all n locations
agtcttttctgatcaannctgatgtgtggctgcgttctgcagatgtccgcaaacacgcgtatatgatgaaggcgtgctcatcaggagcgagccgctccgcatgatgaagtgccccaacaacatcagctgccgcccccgcccccgatgtcgattgagcagatgtttctgatgcacactcatgcagttcaagccatcggtctgactctggccgccattcagcagcagcagcagcagcaacagcagcaagcaccaccccagcctcagatgcctcagatgcctatagacaagcgtgctgaattcatgagaggccatgccccaacgttcgctcactct

SEQ ID NO: 26628 - DNA, 334 bp, Zea mays
agcttccaaagctcctccaactcaagttcggtcaacaatccaaagaaatcatccagtggatcagattttgggtgatatcagcaagggagtaaccactcgctcacgtctagctaatttttgtgagcattactcatttgtttcttctattgagccttttagggtagaagaagccttgcaggatccggactgggtgttggccatgcatgaagagctcaataacttcaaaagaaatgaagtttggagcctggtgccacgttcgaagcaaaatacaaaaggggtagatttcaatccgaccctaaggagtgtctccttgtggccgttaagagaattctta

SEQ ID NO: 26629 - DNA, 332 bp, Zea mays
atcttgttattgtatgcattattatgcctactgagcatttccaagagtttccaaaaactaatcctgatcttgagtttttttggtaagattgaaaataactgctctcaactcccaatcttgggaaaatggattcaattcaacgtgtaggtggatgtgggaagggaataagcaagacagggttcccaatgcaaatgtaaagagagaaaggaagtacaaaagcgtgatgatgtttaccttttccaattgcatgccattgagcaattaaagcaaccgggggtatctaattagagctgaccctctccccacttgaagcacatttaatcatccctttt

SEQ ID NO: 26630 - DNA, 331 bp, Zea mays
gagcttgatcgttgatctgacggtgaagatttgtaccgcttcgcttaaatgagtggtgtaatctggggcgcataatcctaatccaacggcctggatagatctataccccttcgtgggtctaattttcacttgagcccctcggtttatgtcaaaacaacccgcggtccacatataggagattctgagtctagagatttattacaccagggcccctggactttccagatattgacgcccactccagagctcatgaaaatcaaataaataaattcagaaatggatttttaatataaaaacaattccgagaacttatttaatccatagaaaatcc

SEQ ID NO: 26631 - DNA, 334 bp, Zea mays
tctatcttctaaccaatcctttgcctacgatgaaacaactccatcgtcatctccctaattttctcagccaaatcacacataggaaggtctttgtggtctttaacccagttattaaaaacctcagccatgttatttgtgatgtaatcacatttgatatctttgttgaaaccactcatgtaccaaaggaatttgtgatgttggtctaagtactcagctatcttatgaacacttctgacctggctaatgtggtgttaaaatacctccctcctatatgccctaactgctggatacatgtgctctgaaccagcatggtgcttgcatagttacccattaa

SEQ ID NO: 26632 - DNA, 330 bp, Zea mays
agcttctaaaaggagaacacattgtgggactaacaaatgttcattttgagaaagacaggatttgtagcgcatgtcaggcagggaagcaagttggggttcgtcatccacacaagaatatcatgacgactgacaggccactcgagcttctacacatggacctattcggcctgaaagcttacataagcatcggcaggagtaagtactgtctagttattgtggatgattattctcgcttcacttgggtattctttttgcaggaaaaatctcacacccaagaaactttgaaaggattcttgagacgagctcaaaatgagttcggcctgaagatca

SEQ ID NO: 26633 - DNA, 326 bp, Zea mays
atcttgccttcgcctcagtctatcacccgcagtccaacggagttgtggaacgcgccaatggaaaaatcttcacagctgtcaaaaagttgctcctcgacgaaaaaagggcaggtgggccgatttgttacccgaggcggtctgggcgctaaacacgactgagtgcagggcgaccgagttcactcctttccgccttctatatggatcagaggctatgaccccacaagaaataaaacatgggtccccgcgaacagttccgtcagccgtccccgacgtggacgagcctacttcgaaggatctcatcgatggagaccgagtcttcgccctac

SEQ ID NO: 26634 - DNA, 318 bp, Zea mays
agcttgtgaaggttcttcatccccacatgtgctaagcggcgatgccacagccagcccatgccagtcttagcaattaagcatgcatctagaccggcctcctcttttgcaaaatcaactaaataaagtttgccgtctaatacacccttaaatgctagtgaaccatcacttcttctaaagacagacacatctacatttgtaaaaagacaattatatcccatattgcataggtgactaacatatagcaaattatatccaagagactctactaaaaacacattagagatagagtgctcaattgagattgcacatttacctaac

SEQ ID NO: 26635 - DNA, 323 bp, Zea mays
tcaatcttaatgcccctaaaaaattgtctaactttgttaagggcaaagctcccatgtctcaagataaccagggttacattttatatcctgctgggtatcccgagcacaaaattatgagaattcgttctaggaagtctcactctggctctcatcatgctttcatgtataaaagtgaagcatctagctctatgcaatccactcatgttaaattgcctaaaaagaaatctcctattgcatcaaatgagcctatcatttcatttaatacttttgatgcttcatatgttttaactaacaaattaagcaaagtagttgccaaatatgtt

SEQ ID NO: 26636 - DNA, 313 bp, Zea mays
caactaataatatgatactatctcactactaatgcttgggtaacacaccaatcagatagatcatgaacatggtccacctagccatgcaatgaacattgcaccaatctcaagcaagcaagcaccaagcaaacccgcagccacgctgacgcaacaccgatgcaacagatgacatagtttctagcctcaactgggcaacccatattacctcatcattataaaatctggaatgcaaacatcattggaaaactcatcaatccataaaagactgaaatttgccaaagcagtgttttccgaattcttcaactgtattttt

SEQ ID NO: 26637 - DNA, 323 bp, Zea mays
agcttgtgaaggttcttcatccccacatgtgctaagcgacgatgccacagccagcccatgctagtcttagcaattaagcatgcatctagaccggcctcctcttttgcaaaatcaactaaataaagtttgtcgtctaatacacccttaaaagctaatgaaccatcacttcttctaaagacagacacatctacatttgtgaatagacaattatatcccattttgcataattgactaacagataacaaattatatccaagagactcaactaaaaacacattagatatagagtgctcggatgatatagcaattttacctaacccttt

SEQ ID NO: 26638 - DNA, 333 bp, Zea mays
agcttccgtcccagtcccagtcccagtcccagtcccagtcccagagagctaggctccgcggtcgcctcatcgagtcgtcggcaccccccatgcatgctgcacacatgagttcaccctgtgagttttaagttggtatatcttgcctcttttgtgatagatcgaggtggagagtaccgtttcggtttagtctctgttgtgttcctcagctaaatttgagtgcgtgctcatcggtcatcacccaaaatatccggcaaaataattagcacgtctttgacgagctttagttttctagagatttgcctgtgctcaagggttaattctccgaaagaaaat

SEQ ID NO: 26639 - DNA, 331 bp, Zea mays
atctttctcttctaagtccgggacagggcctcatggatgggtgaaaatacacgtaaaccgcaaggccgaccgagccgagggattcccacgcctctgggatacggatacctcactcgtcccttccgcgaaaagcaactctggctcacacaaacatccctgttaccgactgagtccaaatgctcaaaacaagatgaaaaaagacgcagcttcacaagtgcggcgagggtgtgtttttctggcctcggcggccgcagaaaacacacgctacaagatgatctgatcctgcatgctcgggtcttcacgctgaaaggagccgtggcacccttggcat

SEQ ID NO: 26640 - DNA, 364 bp, Zea mays
gagctctgaccgtggcccgaatcaatggggacggatgatatctgtcgggacaggactgcccccgccatgttgtgtgtataagtttagcctgcaagggtaaaaactcgattcgaatcagctgctgctctcacctaatgagactgcttgatccatgctgctccattgagtaacaagttggacgatgcagaaatgatccgtgatctggatcgctctgaagcttgcgactttggatgactatataatagatttgtagcctcaagacagtcacacttcactatgcctataccgacgacctcgattcagaagctgagcaagtgctttcggcaaccaagcgacccactcttacagtgacttgtatagaggt

SEQ ID NO: 26641 - DNA, 331 bp, Zea mays
agcttacattagatttgataaataagattttgaatcctatgatatagtttcctccccctaaatatgtgcatttcagaaaataccaattttgtactcaaatgccaaaagcacatatttgggtcaaagagtgaagacaacttatatcatactattcatagggtgctttgtgtcataaaataaatgtgatgctcatggcatagaatgcactaatcaactttctacatcttatgtttttcttatgattcccccttttgttaattatatatccccttcttaaaagtcttctaacacttagttacataagactgaaggtaagctataatgcaaaatt

SEQ ID NO: 26642 - DNA, 325 bp, Zea mays
agcttgcatatgtaccatgcttaaagaaaatgcaggctgcgacaaaataggtggtatactgcatgcccacgtagaccgggcaaacgaacggcactgcatgctacacttttttttacttttctagatatgtttttacctatatatgaacgtataataaaaactgtgtatctaaaaggccaaaacaatccataatttaggtagagagcatggacattacatggcataaaaaatcaacaattagtctatgcacgatctcctccccagtaccaagatagacgggcgaataataaaatcgcatgcttccattatggttcaggtaaccttg

SEQ ID NO: 26643 - DNA, 330 bp, Zea mays
atcttctaaagggagagcacattttgggactaacaaatgttcattttgagaaagacagggtttgtagcgcatgtcaggtaggaaagcaagttggtgttcatcatccacacaagaacatcatgacgactgacaggccacttgagctcctacatatggacctattcggcccgatagcttacataagcatcggcgggagtaagtactgtctagttattgtggatgactattctcgcttcacttgggtgttctttttgcaggaaaaatctcatacccaagaaaccttaaagggattcttgagacggctcaaaatgagttcggcttaaggatcaa

SEQ ID NO: 26644 - DNA, 331 bp, Zea mays
agcttgtgattttaccaattgaaagaccacaatctctacttatgaatttccatgaaatatcttaaaagagattgtattagtaacacaagcaattgtttcctatttagcaacctctagtatatgaatgacaagaaggttactaaaacaaggaaacctcatgatatgaactaaattacccttacaagcatcatgcataacatcaattgtaaaaaaatgaaagtagcatgattatttaattaagtttacatggcaagtttaattcatagcatggtaagtgattaatgtagaagactcaaaaccaatttaaacaagaatgaatacttcacatagt

SEQ ID NO: 26645 - DNA, 325 bp, Zea mays
  unsure (1)..(325): unsure at all n locations
agcttgagcggtaaccagcttcgttggaacccttggaagctggtgatcagcatatccttcagcttctgccatgatgtgattgttcctggtagaagggaggagtaccagatttgtgcaacattcctgacagtcatgacgaaagactttgccatgactgcagtattgccaccataggaagatatcgttgcttcatagctcatcagaaactgcttcggatctgaatggccgtcgtacatggggagctgaggtggcttgtangacggaggccaaggcgtagcctgcagttctgctgataggggagaagcatcatcaaaggcaaaatttc

SEQ ID NO: 26646 - DNA, 326 bp, Zea mays
tgttttgttccagtgcacgcaagatcacgaagaatacctctaggcgtatgtccgaagattcttgcgtctgagggcacaagcaccaacagtgcccaatgaaattttcattgaggccatgatcaaggggcttcgtccaggacctacagcccaatacttcgccaggaaacctcctcagaccctggagaaattgcttcaaaaaatggacgaatacatccgcgttgataatgactttcatcaaagaagggaggaagcctacaggttctctgagatgaccaggggctttggagggagaatccacccaaggcatgtcagatcaatccactcct

SEQ ID NO: 26647 - DNA, 324 bp, Zea mays
agcttctaaagggagaacacgtgataggtctaactaattttaccttcgaaaaagatagaccttgtgcagcttgtcaagcagggaaacaagtgggaagctctcatcatgccaaaaatgtgatgacaacatcaagacccctggagttacttcatatggacctcttcggacccgtcgcctatctaagcataggaggaagtaagtatggtcttgttatagttgatgatttttcccgcttcacttgggtattctttttgcaggataaatctgaaacccaagggaccctcaagcgcttcctaaggagagctcaaaacgagtttgagctca

SEQ ID NO: 26648 - DNA, 321 bp, Zea mays
agcttctaaaaggagagcacattttaggattaacaaatgttcattttgagaaagacaggatttgtagcgcatgccaagcagggaagcaagttggtgctcatcatccacataagaacatcatgacgactgacaggccactggagctcctacacatggacctattcggcctgatagcttatataagcatcggcgggagtaagtactgtctagttattgtggatgattattctcgcttcacttgggtattctttttgcaggaaaaatctcatacccaagatactttaaaggggttcttaagacgagctcaaaacgagttcggct

SEQ ID NO: 26649 - DNA, 323 bp, Zea mays
agcttagaaaagtctggtataaatctgcggtaatatccagccagtccaaggaaacttcggacctgatgaacagtggtcgggggtttccactccaaaatgtccttgactttgctggggtcgaccgcaatccctctggcagatagaacatgtcccagaaattgaatttcctccagccaaaacgcgcacttgctgaacttagcatataactaatgttccctcaggcgcgttaatacgatccgtaaatgttgggcgtgctcctcttcattcttggaatatatcaaaatgtcatcaatgaagaccaccacaaacttgtctagctcggg

SEQ ID NO: 26650 - DNA, 323 bp, Zea mays
  unsure (1)..(323): unsure at all n locations
tcggacccgggatcctcttagtcacctgangctgcaagcttgggggatgtctncctttatttttatcgccgngacgccactcccagagcttcacaggtaggccagtgtacttctgcgggacacccacgaatcatatgtggacctctgggacaccgggatcaatcggattgccaggaattcctcatcggagacacttctctgccacgggccgcaccgctccgagggtggagcacgttaatacaccattgtatgtaataagcctctagatcgggtcactctattcaccatagtgcgtagcacataataactgactgggttagtct

SEQ ID NO: 26651 - DNA, 159 bp, Zea mays
acatgaaatgatatgagaagttctaaaaatattgatatatatcttcatcagttgacacccaatgccatcgttagactcatgtgttacatatgggctcttcgaagccagggtatgagtgctaatgctaaagctatatgccgagtgcatgagttacactac

SEQ ID NO: 26652 - DNA, 213 bp, Zea mays
gaaatcggatgggcattgtagactatatatattaagaaatagctcacatccttatgcgtttatatatgccatcccaatagcgcatgggaataactaagcatctcttattatgtatttgtaacatatacctgagtggaaactcctaaattatgattatcttttaggaaaggtgttttgagttaaatcattgagaattttctctgtttcacaaga

SEQ ID NO: 26653 - DNA, 222 bp, Zea mays
  unsure (1)..(222): unsure at all n locations
cacactataaatactaagcttatttcggagtcgtgctcaggcctcanttgtctgnccgtgcgccatgggcgaactccttattttctgcccagacgcaaggccgaacagccatgcctgccgtcgacttgcgcctcgtgccgtttccctccgttccgccatgcccttcacccaagacatacatattaccttcggtgtctttccacacgcttggacttagcttat

SEQ ID NO: 26654 - DNA, 500 bp, Zea mays
  unsure (1)..(500): unsure at all n locations
agcttngtgattgtctgctttcttgtcattgtagaaatcttagcaacaacaatatcggtggaagcataccggaagatctacctgtcacactgcagaatatgtatgtggttatgcttacgcttcganattntctttagttctgggtagatgatgggatattatgttccttgctactgcagctttctctcagataaccaactaactggaagcattccaatgtcattatcanaacatcataggctaacagccatgtaattccttgtttccttttcttttccctcctagacgacaatggcatagattactgctttctactgtcatcaattaactgattcaagagtcaagattctctcttaccacgtcactgaatgataaccatctagatgggaaactaccagatacattttgatccctcacagaacttgaaatctgtatgtctccctccttcttccctccacccttcatgcnactgttgatatatctgacttgatcacagtgta

SEQ ID NO: 26655 - DNA, 199 bp, Zea mays
  unsure (1)..(199): unsure at all n locations
gaagacagngagtattctaaccatgtctataagctctcttaggcactctatgggcttctagcagccccaagagcgtggtatgaattgcttagagaatttcttattgccaatggattcatagtcggaaaagccgatcctacactctttactaaaactcttggaatgacttgttgatgccaattatgtgagatataatttg

SEQ ID NO: 26656 - DNA, 376 bp, Zea mays
  unsure (1)..(376): unsure at all n locations
agcttgcccttaattattttatctaatcttaattggtggttatccttatcttctttagtcgagctaatgcttatgcctgcgttgatatcgctttcccaggaaagtatcgacaacactgccacattgaatggttgaatgaaaattatgaatattaaatatactctaattataaatctaaatacacagatgaagactaaaaacaagacgttcaatgtaacacgaactaaactntagtgagtggaactaaacaccccctaaccagtgcaccctacaagtgatggacttcataaatatatactcctctgtcctataatatagttnttctagcccacttttttttgtcacattcattcgaataataatctctactaatatg

SEQ ID NO: 26657 - DNA, 308 bp, Zea mays
  unsure (1)..(308): unsure at all n locations
taagcttgaaaaagtcgcggtcgcctcgacttcattctttgttacagatgttgatcctanggcgatatatcttgccatgaaaatcgccgaaaggatattcctcanaatgaaggaagatgaggcgaagaacaatattgaagaagaaaatgatcgatggagaccaaacgacgaatccacctcttcacaaggttcgtctttcaaaatcacttctcatatgtgctttattgctaatgggagtgatagtgaaagcgaaagcgacgatgaggaggagcgagaaagtgatagtgaagatgaggatgatcttcaac

SEQ ID NO: 26658 - DNA, 432 bp, Zea mays
  unsure (1)..(432): unsure at all n locations
agctttgtgttcagntctgntattttagcttcggcctccgccaataaaccttcagttgcttggagctcaaaattcttcttctcaacagcagcctgtttgctcccttctattttgctttctcaaattntcaacttataacctctcgtgtttcttggtcttcaacaatcttgntggcattattcaagagctnttgcttcaacagcatatctctgcaccganaacaacctctcgttagacatgtnttcacaataaaagttaagtgaaaaagagttcacctttgaaattggataaaataaactaccaacgatatgttgtcgtcngtagcggctaatgtccgtttctagcttcngaaaaccgatactctttgacagagtaccgataactttggctccaggttgatctcgaatacaatctaacttttcatcatcaata

SEQ ID NO: 26659 - DNA, 276 bp, Zea mays
  unsure (1)..(276): unsure at all n locations
agcttccttctgttctctttgtggccgngcaccacaaagtagctgatgggtctttgttccttttccttgtaatcgcgccattcttttgtggatgaggtggacaacgggattcttcgggtgaatgaattttccattcctggcttgcacgaggtagtcttcgctcggagcgctggagggtgcgctatatcctgcttcgttcccgcttttccggagtttatcgaggaanggtttctctccggccaatccgctatgcgatgtagagtttcttcttcgtct

SEQ ID NO: 26660 - DNA, 324 bp, Zea mays
  unsure (1)..(324): unsure at all n locations
tcatcactttttctaaagtcagtaacacctatatcccgtaaaaagacaattgtagcccattttgataattgaaaacagaaagcnattgtatctaagaatctcaagaaaacattggaatagaatggggagtgatatncaatttaccaagtctttgacaaccttatttcattcccgatgtgaactcttgggatcttgtttctcgagagagacatctttctcctgcatgggttgtgcccgtataatatcagctgaccccgatgctaactacaacagttagcctgtcttagaccaacgcttggtcttccatagaacagactttggact

SEQ ID NO: 26661 - DNA, 483 bp, Zea mays
  unsure (1)..(483): unsure at all n locations
taagaagagttgggactaatnggctcatctgtattgtgttgttcttgacgagagaatgattaaacgttaaaggctggctggtgggagatacacacgtagtcgatgatgtcttcatctatgctctagagggtaagagacttctgctagtgtcacatgtgaaaaggaacagatctcgccgaanacaatactcatgtgaacttctcttgattatttctcgcgtctacttcattcaaaaggaaacttcatgattgcagatcttcattagaaatgttcgagatataaatcacatatgcagcattaagctaacattgtggaactctacatccttgtgtgtgctcataaatttgttgaaactgctcctgcgaacanacattttcaataatgaaggctctacctctttctcttggagagatcagttgcagaagcacctgtcctaacagaccattcttttctatttactctagttgctgattcaattcactt

SEQ ID NO: 26662 - DNA, 85 bp, Zea mays
  unsure (1)..(85): unsure at all n locations
agcttcactgccttaccagtaatctatctgaatgcttggaaccaatggaggaggacgggagaagngctggccacggtggttgctc

SEQ ID NO: 26663 - DNA, 289 bp, Zea mays
gcttaccctgtagtctggactataagttggttacgttaggtgtgctctatgcagttttgatcatttcagcatttgcataatgaggactctagggataagcctcttagtgagaccctatccattcacctctggagtgaatacaggtctagctaacccgggctagaacggaatcttgactcataggttaagatgcgccaccttcgcatagtgtataactgatatatcataccggctcactggtatagacagcctggaatccttacatgataattgaccttgagattgaaat

SEQ ID NO: 26664 - DNA, 237 bp, Zea mays
agcttcagctccatctatgttatggattgctcttgagtctgtccaatttccttcggcccttctgacagctttctgacttccatgaatagcaatgggcccttggtccaaaggtatcttcatgcacagataagctggatgaagaattgcttctaaagcattgagagtaccacgaccaatgattgcattgtaagggtattccatatcaacaacatcaaatacaacttgttcagtccttgt

SEQ ID NO: 26665 - DNA, 362 bp, Zea mays
  unsure (1)..(362): unsure at all n locations
tggtatgacgatntccatcatgacaacattngctttgatgactcttcactgtagctacagaatngcatgctaccccatggccacctttgtacaaaccgccacagcttcccatgtatgacatgaatttggaccccaatcagcttctcatgagttacgaagcaaccatatcatcatatggtggcaatactgttgtcatggcgacatcctttgtcatggcagtcatgagtgttgctcatactatgtattcttctcttcggtcaggaataatcacattgtggcagaagttaaaggatatgctagtcaccagtttccanggcttccaacgaagcaagtgactacacaagccttatttcattgcacat

SEQ ID NO: 26666 - DNA, 233 bp, Zea mays
  unsure (1)..(233): unsure at all n locations
tctcgtatnagtgatgatggacacagtgcaccccgcagcacgggcgctctgntttacaatggactggacaggcacgccatctgcangatggccttggcgccgcctgtcagcggagtggacaggacgcattaaatgcttaggggcacatcgcctgtcagcaatgtggacaggcggcgttgagagcacctagagggggggtgaataggtgatccttgtaaacttataacttaaca

SEQ ID NO: 26667 - DNA, 141 bp, Zea mays
ttgtacttttgctataatgagagcgaactgtgtcctcggggtgggctatcttcttcggaacaccatgcaaacaaacaatttgggacatgtataactctgctaacgttgctccattgtatgttggctttactagtatgaaat

SEQ ID NO: 26668 - DNA, 391 bp, Zea mays
  unsure (1)..(391): unsure at all n locations
tgatttcttcttaatgtcttaatgagagcttattaagattcctagttgaattcattggagtgagatatattattcccctctttctattctatttcttttatgctcttaaggtgggtttgaactacaagatagcttaataaacttccacaaattctgccgacattacagtggcttcatactggtgtataagtctctgtctcacaatntgtggcttacaaagtgagtggttctatctgtataaaattatcaaacattatggccgaacgggtgttttgaactacaaccttcttttacacgtggtattttctgagacttattttgctggcatcacatgtatagcatgactctgtcaantttcaaccctaatattattagaatctattatgattct

SEQ ID NO: 26669 - DNA, 485 bp, Zea mays
  unsure (1)..(485): unsure at all n locations
tactcagcttctcctccttgccaaagtattatctgctcggatatattcatccatcttctgaagcagtttctccagggtctgagggggtttcctggcgaagtattgngctgtaggtcctggccgaagccccttaatcatggcctcgataacaatttcattaggcactgttggtgcctgcgccctcagtcgtaagaaccttcggacatacgcctgaaggtattctttatgatcttgagtgcactggaacaaagcttgagcagtgaccggcttcgtctgaaacccttgaaagctggtgatgagcatgtccttcagctnttgccacgatgtgattgttcctggctgaagagaagagtaccangtctgtgcaacattnttgactgccatgacgaaggacttcgccaagactgcagtattgccaccatatgaagatatggttgcttcgtagctcatcagaaattgcttcggatctgaatgtccgtcataca

SEQ ID NO: 26670 - DNA, 208 bp, Zea mays
  unsure (1)..(208): unsure at all n locations
tgtccttcttgagatatgcatgtggtacttgacttanggggagtattcaaaactcaaggcattcatgaaacccctagtgcaaagccgcaatgcaaatctcaccatttgactattttctctaanaactttgtagcctatgtgcaaatattttgaaaaatattagagaatatgtgagggtaccaatatctatcccaacaagtgttctttt

SEQ ID NO: 26671 - DNA, 144 bp, Zea mays
  unsure (1)..(144): unsure at all n locations
catcattcacacaagaacatcatgactactgacagggcactggagcttctacacatggatctattctgcccgatagcttatataagcatccgcgggaagtagtattgtctagntattgtggatgattattctcgcttcacttgg

SEQ ID NO: 26672 - DNA, 355 bp, Zea mays
  unsure (1)..(355): unsure at all n locations
gcgtcaccggaatagcgaaactgtgctcgccggagttcatcatcccgccggcgcacgtgtgaccggtaaatcactgcgccaattttcgattcaatgcacagatagcctctacatcaccccaggaagctcaaccgtgccgtggattggactangtcgccgtgggttggctggcacacccgccgtcgacgaggccacccgcctgtgcacgtggaccggacgattccggtcattcccgccgtcgagccatacatcgttgtgaccgccagaaccttcccgagccaaccctgcccctcgccggacttctctcgccgccggtaagccgcaccgccttttctttccgcggatactgttacat

SEQ ID NO: 26673 - DNA, 314 bp, Zea mays
  unsure (1)..(314): unsure at all n locations
gctatacaggagaatagaagcaagagctcgaccttatgttataatagaaggggagttatactagcgctgggtctgttccccattactcaagtgcttatccagatccgaaggatagagttatgaggacatacatgcaggtctgtgtggatctcacattggatctaggcccttgcttgggaaaagtnttcgccaaagattntattggccaaaggcagcttcngacgcagcggatttagttcaaaagtgcgaagggtgcagaaatgtgcaagagatcanaaccaccttcgtctttaactcaattaatacaacccact

SEQ ID NO: 26674 - DNA, 284 bp, Zea mays
agcttgtctaaaaaagttggagaatttttggattatataatactctataaaattccagaagtatggattctggctattttaaatgttccaaaatttcctattggaactaagaatcatgaaactacttttattaaatactatagaaaattaggagcctagtcaaattgtgttggcattttagcatttctctatgaatttctggaaattctcagagtccagaagaaaaatataaggacaacatgctacacgattgtgctgaaactggcctctgtcgagccatttac

SEQ ID NO: 26675 - DNA, 210 bp, Zea mays
  unsure (1)..(210): unsure at all n locations
ctcagcttccatgtgtgctngacattccaatccgagcccgcatctgaccgtggtgaccgtcacaagttggtgttcttctgcagtccgaatccagcatgttcaaatccttttccctttcgggtcttctcctgattcctaagcaaaacaagagtgcacgggtctccatggtctaaatatgatggacatgaactcaagagtgtaatcacctga

SEQ ID NO: 26676 - DNA, 452 bp, Zea mays
  unsure (1)..(452): unsure at all n locations
gcgaagatgcaggctatctgctgctaatgttgctaccgaagaaatgaacttcatacttttatgtagaggccacacttactaatatgatgctcgaatttgtgatgaatgatgtgtgtgtgtgtgtgctatttttggaccagtatttaaaacttgaccaccatgaagtttggtacacatgaatcccaagcactttgtgtaacatatggctaaacaaanacattgatgtctgatttgtgatccagtttattttgatgtcaattattatacatgtatatatctntgcaatgacttcttatgtatatggctatattgcaaatactattggctctttattggtctccgatagggcgcccgaatgggtgccttctcttctagtgaaatggttcattcgcaagttgttccggatccgccagactgctttccgttctgaantatgttgatcagtctaaatg

SEQ ID NO: 26677 - DNA, 304 bp, Zea mays
  unsure (1)..(304): unsure at all n locations
tgtgaagattcttcatcccaacatgggctagtcggcggtgccagagccaacccatgttagtcttagcaattaagcaagtgtcgagttcagctctatcaaaatctaccaagtatagctgaccctctaacactcctttnaaagctattgaatcatcacttcttctaaagacagtgacacctatatcagtaaaaagacagttgtagcccatttgacataattgggaaacagaaagcaagtngtaatctaaggaatcaacaagaaaaacattggaaatagaatggtcaggagatatatgcaatttacc

SEQ ID NO: 26678 - DNA, 282 bp, Zea mays
  unsure (1)..(282): unsure at all n locations
agcttccatacaaattttctaatatgtgaaatcgtcaccatctaacacgggaggaggttccatccccaccggacatcgctactctagcggttaagctaatctaagaacaacaatgctccgataccaattgaaaggatcatgatgcccaatatgggggtgaattgcgcttttctaanaatcaacaacaattaaaccctaatcaagagcctaacttcacccaacaactagcaataagagagaacttctagaaatacaacaatactaagacaatacttctactac

SEQ ID NO: 26679 - DNA, 400 bp, Zea mays
  unsure (1)..(400): unsure at all n locations
ctaagcttggagatcttatccaacatgggctagtcggcggtgccatagccaacccatgttagtcttagcaattaagcaagtatcaagttcagctctatcaaaatctaccaagtatagctgaccctctaacactcccttaaatgctattgaatcatcacttcttctaaagacagtgacacctacatcagtaaatagacagttgtagcccaatttgcataattgagaaacggaaagcaaattgtaatctaatgaatctacaagaaaaacatnggaanagaatggttatgtgatatagcaatntacccaatcctttgacaaaccttgantccatcccgaatgtgatagctcgtgggatcttggttttctcataggaggagaacatcnttttctcccctgtcat

SEQ ID NO: 26680 - DNA, 250 bp, Zea mays
tagcttctaaagggagaacacgttatatgtctcaccaatgttcatttcgaaacagatagaccttgtgcagcttgtcaagcacgtaaacaagtgggaggagcacatcacagcaagaatgtgatgaccacttcaagacctctggagctgctgcatatggacctcttcggacccgtcgcctatctgagcatatgaggaagtaagtatgggctagttattgttgatgacttttcccgcttcacttgggagttct

SEQ ID NO: 26681 - DNA, 468 bp, Zea mays
  unsure (1)..(468): unsure at all n locations
tctanagggagaagcacatttaggattaacanatgttcattntgagaaagacatgtattgtattgcttgccaagcanggaagcaagttggtgatcaccatccacacaagaacataatgacgaccgacaggccactggagctcctacacatggacctattctgcccgatagcttatataagcatcgacgggagtaagtactatctagttattgtggatgattattctcgcttcacttgggtgttctttttgcagganaaatctcatacccaagagaccttaaagggatttttgagacgggctcanaacgagttcggcttaaggatcaagaaaantagaagcgacaactggacggagttcaagaactcacanatngaaggctgtctngaggaggagggcatcaagcatgagttctcttctcttacacccacaacaaatggtgtatggaaggaagataaacttatggacat

SEQ ID NO: 26682 - DNA, 439 bp, Zea mays
tagcttattaatagattatctgttatgctaattaattaattatcttctactgtcattgagaaccgtatgttctacattttcacataaattctatttaagagagctatacttaaacatctataatgaatattattaaattataaaaacatgatatctattgaaaaagtcatcttaatatttctttcgtaacaaccgcgattctagtgaaaatacgtgaactattggaaacactaattaaaaatacttatcacataagtgtgaaactaacaaaaccatttctatttgattaggttccaaaaatacatttataattaactgtaccagactaaacattattaagatgactatgagaggtgattatattttatgtcattatcatataacattatcttttattatttaaacataacgtataatattctaaattctaatttgtgac

SEQ ID NO: 26683 - DNA, 326 bp, Zea mays
  unsure (1)..(326): unsure at all n locations
cacaagatactcagcttctaagggagaacacgtgataggtntaactaatgtgcatntcgaaanagatagttcttgtgcagcttgtcaagcaggtgggaggagtgcatcacagcaagaatgtgatgaccacatcaagaaccttggagatgcttcacatggacctattcggacctgtcacctatctaagcatangaggaagtaagtatggactagttattgttgatgacttttcccgcttcacttgggtattctctttgcacgataaaactaanacccaagggtccctcaagcgcttcctaaggagagctcanaacgagtttgagctc

SEQ ID NO: 26684 - DNA, 282 bp, Zea mays
  unsure (1)..(282): unsure at all n locations
tatacttcgtctccgaagttcttagtttatcaaagaacaactatacagaattggagaacgtgttgtatgctgttttgatggcttccacgaaacttcgacattattntcaagcataccatataattgttccttcttcacagcctttgaaggatattatgagaaatatagaagctactggaaggattgggaagtgaggtgcggaactcaatgagttctacatagattatgtgcatagatcttcgattcggtcacaggcgttagcagacttcattgctgactgga

SEQ ID NO: 26685 - DNA, 414 bp, Zea mays
  unsure (1)..(414): unsure at all n locations
agcttatcaagtctactttcatatggatccggaattatagtcatatctgttctgaggccgccgtaatcataggtttcttaccgagacattttctgccttttctgcccatggtgctgcgtcaccctattttgtgccaatgggtcgtgtatcaagttatgtgcattagggacgcatcctacggttgcagcacgaccccaatacccttgaggtcgtcctcccatgtttattaacaccctaaccgccaccaagaacagcgggttgtgttatatcaagattagctctcgtacttgcttgcaagcgcgcgtgctatttcaacctgccgtcttcttgtctcggaacacaccatattgtagttgatctctatactacatttagacctgtaattcagacttgtctacctgntttgcaaatctt

SEQ ID NO: 26686 - DNA, 409 bp, Zea mays
  unsure (1)..(409): unsure at all n locations
agcttgtncaagcatatttggtacccatcgcttgatgggtccatcatggttagtcaacaaaaatctatgaacccaagagtcctttgtgtagcacttggtaaactcattacccttctttcggcatatgtagcataggcgatcctcaagtcttgaagatttctttcttgctacatgggtagtgaatattttcttttctaacattatgtctttntggttcaaatgaggacaagatttaataaagtgtcccttctttgaacatttaaaacaaaagttatcatccttggtaataagtcagccttttttaatatagggacatgatctaatcaagtgcccctcttcaaagcattcactacacttctttattttattgtatgaagtgaactcgattataccttggatgtacctttat

SEQ ID NO: 26687 - DNA, 534 bp, Zea mays
  unsure (1)..(534): unsure at all n locations
taatntgagagttcttgaactccgtcccattgtcgcttcttatnttcttgatccttaagccgaactcattntgagcccgtctcaagaatccttttaaagtctcttgggtttgagaattttcctgtaaaaagaatacccaagtgaagcgagaataatcatccacaataactagacagtacttactcccgccgatgcttatgtaagcgatcgggccgaatagatccatgtgtaggagctccagtggcctgtcagtcgtcattatgttcttgtgtggatgatgagtgccaacttggcttcctgcttggcatgcgctacanatcctgtctttctcanaatgaacattggttagtccctaaatgtgctctccctttagaangctatgaagattcttcatcccaacatgggctagtcggcggtgccagagccaacccatgttagtcttagcaattaaacatgtgtcgagctcagctctatcaaaatctactaagtatagctgaccctctaacacacncttanatgctattgaatcatcac

SEQ ID NO: 26688 - DNA, 255 bp, Zea mays
cactcgccggtccttaatcacgagctgcacttatacagtgtttttttgatcggcgggtcttctgaagattgttctgtccaacatttctcttactgcggtgatgcataaaaatggcttctgagcgggggcagcctgagatcttactacgatacttgcagatgaggccataattaacttcttctgctctgacgatgggctttgtctaatagagaatcaattaggtccctaacaggttacaatctcattccctgctcc

SEQ ID NO: 26689 - DNA, 472 bp, Zea mays
  unsure (1)..(472): unsure at all n locations
agcttgtanggaatggatcatgtgtctctcctatgtagtttggagcgtcaggactcaacctagtcgggcactacaatgaaacacccctctcttcatagtgtatggatcagaagcagtgctacctgtagacccggcattctgggcacccagattgactttcaaatgcatcgcaagagcagaagcaaccatgcttgttgaaattgatacgttggaagaagaatgattgagcgtagtcatctagtcaagcagataccaacaaaccctaaggcgctaacatgacaaggcaatcccgtccctcatcgtcacagatggggatctggtgattctcagatactattaggggaatggacgtacacgctatcaccacnctgagaaggacctgttattgtcatggaagtcactcgactaggctcgtaccggctatctaagattgatggtactcaatatgaaacttctgaatatcaacattccg

SEQ ID NO: 26690 - DNA, 454 bp, Zea mays
  unsure (1)..(454): unsure at all n locations
tcagcttctattaaatctgactgcgcctaagcagcgttattatgagagtaaggtggatgtacttctactttccacttccctggatgacaacaatcacctgcattgagtaatgtaagagtgagataaacatctcagcaagcgaaatggtttgacgagatatttaaaccaccaatttgattaatcaacattntaaaaagaatcacaattaagatcagaaatacttgtagatatagaactcagtagtcccaatataaccaataccatctcatttcctcgaacaaccacaataggttctattacacttccctgcgtcaacanaacctgcaaatatcacttcaatgtatgcatacgagtgcannagttaggtactctgtcttcatacctctgagggtataaaccacatcatctgcanatatcacttcaattagtgcatataaatgcaatgcatatgtcc

SEQ ID NO: 26691 - DNA, 415 bp, Zea mays
  unsure (1)..(415): unsure at all n locations
agcttgtangggtagtgatgtcttctcttacttgatgctaacaagacattntcttcaccaaagccatcttcaacatttcgcccataaaaaagatcaattctctctttcaattgtttgtctgcaagacaagtgataatttcaataagtaacatgatatgttaaccacaagtgtctgtctgcaagagaagtatctcgtgttcacctattgataacaggtatgagactgcctaattgcacacataatatntatccctttatagactgttggttgttaaacctccctccctctcctctctgttctaaaatacaatctgagactttcttgttcaatgcgcttaacagcaaaagcaattatccctccttgtctaagtaattggatgttgtcacaagccagtcatcaaacgtgtctccattc

SEQ ID NO: 26692 - DNA, 456 bp, Zea mays
tgatatgaagtctcttgggtgcttgagagagttcattctattcttatcaacctaagccatcaatcttcaatgatctatatacatgattgacccaaggttatttttcaaattgttgtgtcttaaactcatatcatctcgaggaaaatattatatgttgtatgaagtgaacagatatcatatgcgaataatcaatgcctacagcatggaggaaagccaaaggatggtaacacttatcttctaagtatctaaaatatcatctcttatgtgtcttgtgtagccacatagaacaaatgaagcacttcacatgtctctaaattgatattaccattccttgaagaattcctctcatatggtagttgcacatcatcatgtcatactatggcatctacatgtgtacattaattgtagtatgtcatggcatatacttcctctaattatctcgtattgccatgatct

SEQ ID NO: 26693 - DNA, 73 bp, Zea mays
agctttgctcacaattattttcttctttaacaaaggacgagcacgttatgataagaaaatctacaacataata

SEQ ID NO: 26694 - DNA, 517 bp, Zea mays
  unsure (1)..(517): unsure at all n locations
tgcctttgcctcagtgtaccacccacaattcaacggcgtcgtggagcgctctaattgtctagatttcacggcgatcaagagaatgatcctctgcgacaagaatggcatatgggccgacctgctacctgaagcagtctgggcactgaacacgaccgagtgtctggcgaccggattcaccctctttcgcctgctatactgatcggaggccatgaccccgcaggaaatcaaacatgggtccncgcggacaagcacttcagcagtacccgacgtcgacgagccaacttccaaagacctcattgacggagaccatgtcttcgccctgcatgccctcgacaaatatcaagccacaacgaatgcgtggtgcgaccacgcatacgtcccaagagaatacaacgaaggggacctcgtacttgtctgcacaacccagacagagtcacacggtaagctggaaccaaagtgtgaaggaccatctatctgcaagacgaagtcatctactagcgcgtacagactgactaca

SEQ ID NO: 26695 - DNA, 340 bp, Zea mays
agcttaaacaattctatattatatatattgcgtcccctaaatatgtgcatagagaggaaaacacattattggtctaaaatgccaagcgcgcataattaagttcatgagatcatatctatatcataaagagtgtgaagtgcattgtgccaccgtataagtgtgatgctcatgacagttatgccatatgaagcatctggaaattcagatttccttagattaaaagcttaggcctccctttgataagagtatctgtcaagtaactagtttacataatctcccattacagagaaatgagtaaatacagaaacagtaactggtgctttctttcaatcagagagaa

SEQ ID NO: 26696 - DNA, 493 bp, Zea mays
  unsure (1)..(493): unsure at all n locations
tcttttcccgtaccgagggatgctngccaatcacaacatcttgattcaccaccctctgattagctntngaagttttcttttaaaaaatgtcaacatatctaccgtaaagtcacggagactattatataaatataaatatgcacaaacaattaaagataaagtcacagcaaaatcctttacgttttgcacaaatccacatcatggtcaaatgcgatcactcaccaccccactactccactaccaccacctacctaaccaaaagctacaagccttgagagaatccanacgcanatgccatgtctgcgttcccggctttgcttgcgaatggngcgaaatgagctgggggcncagcgcagccgcaacgcggtgcaagtcaaccagaggcaggcggccatgtcatgtcaccatggacgtgtgacttccaaggcaatcctnnctccacttctcatcagtccttccccgccaacaacaacatctgaaagcgtctactact

SEQ ID NO: 26697 - DNA, 217 bp, Zea mays
  unsure (1)..(217): unsure at all n locations
agcttcaggcgtgatcttcttctcttcttggtgcgacgaagaagtgcatgccacggtcatatgccaaacttgtcatggacttgaaattttggagagccattacctcgaaatcatcaaccgtcgcagatgaattntgtgtcaccgtcaccaaagaagcttttgtcggtgattcaccatttgcgggatacattgatgttgattcttccgcgattcacca

SEQ ID NO: 26698 - DNA, 270 bp, Zea mays
  unsure (1)..(270): unsure at all n locations
tgttggggaattgttctcaaatgttatgagttaagaacaaggcaacacnagaaatgttaaacattatagtcattcgtccttcgaagcattattttccttgagagataatgattttctgacgaagggtatggaggacttaccttcgtcaatataacatataaatgacgaaggangcatatganatacaataagttatataaacaattatgtattaccatcaactcatgtctatttcattattatgggaacatagaaatgataataaggtac

SEQ ID NO: 26699 - DNA, 159 bp, Zea mays
agctctggctatagctaatatcttggcatctaatcagagcaatatggatgaatgcttgtggaacttcacacctacccgttcgttatatactgccacaggtgggaatgtgaatcgtcaaggtctctcacacccaacaaacagtcacccacactctttgaa

SEQ ID NO: 26700 - DNA, 438 bp, Zea mays
  unsure (1)..(438): unsure at all n locations
gcttcgtcacttganagacaatntccttgaagganagatattatttcagttctccaatcttcactgtgcactggagaaatagtgagcactgctctttccatgagctcaaccgaaggtgcttntattgnttcaaaaaatacttctgagggtaaagggagcccctgagccgctgatttggctagcaaatctgcatgctcattntcacctcttggaatatntttgacagaaaacccttcgaaagaagcttccaaccttcggactgcatccagatatttttctagcttcgggtctcgtgccctgctgctcttatccacatggccagcaataacttgagaatcagtatttangatggcccttctttttccattgccttantttcgaagcccaaagaagtgttctactagcatatatttggcactgaagtcattgactgaaaca

SEQ ID NO: 26701 - DNA, 253 bp, Zea mays
agcttgtaggtttgtatcttccatatatgtggcatcaagccaaaccgcttgggtgctctgtggcttaacacagaagaaagggaggaaggaccgaacgggagagacttaaccggtggtgggtgctcgttgcctgcccacaaattccagttagaaccgattggaccaaggatgaaacatggcattcacttgatctggattttgatgtggaacttgagatcttgtgactgggtacaaagtgggcggccaccgtatg

SEQ ID NO: 26702 - DNA, 302 bp, Zea mays
gtgtcaagaatccatcattctcttgtaaggatcacccggttgatcaagttgtgggtgacatgcatatgggtggtcaaactcactctcgtattggttcattttgtgaacatttctcttttatatcttgtgttgaacctaaccgtgtagatgaagctctacttcatgtggattgggtgaatgcaatgcatgacgaattaaacaacttcacctgtaataaagtttgggagcttgttgacccaaagatcacaatgttattgataccaaatgggtgtttcgcaacacgcaataatgaaaatggattg

SEQ ID NO: 26703 - DNA, 266 bp, Zea mays
  unsure (1)..(266): unsure at all n locations
agcttgatggtgtttattatgtggcatcccacaagaagccgaaagcgaagcaccacttgcttgtgaataaggcacgcgactctctacagagttactcgaccgtgtgctttgctctcacatgggcttccctttgcgttggagcacccacgaggattaatcacaaccctgtgtggttctatacacctcaataaaaataccaatgcgtccacacgagtttgcngtctctacctttgctcttgggccttcacatttacattgattactta

SEQ ID NO: 26704 - DNA, 441 bp, Zea mays
  unsure (1)..(441): unsure at all n locations
tggacgtgaaaagtgccttcctcaatggaccaatcaatgaagaggtctatgttgagcaacctcctggctctgaagatagtgagtaccctaaccatgtntataaactctctaaggcgctctatgggctcaagcaagccccaagagcatggtatgaatgtctaagagattntcttattgctaatggcttcaaagtcggcaaagtcgatcctactctctntactaaaacaattgccaatgatttgtttgtatgccaaatttatgttgatgatattatatntgggtctactaacaaatctacatgtgaagagtttagtaggatcatggtacanaaattcnagatgtctatgaatggggcagtgaagtatttcttaagatntcaagtcaagcaacttcaagaggggcaccttcttagccaaacgaagtacattcaatacattctta

SEQ ID NO: 26705 - DNA, 184 bp, Zea mays
  unsure (1)..(184): unsure at all n locations
cactgcctctgctctgaactattccgagaacactgccgctggtgtcacctcagatgtaccaactacgactgcatatgtgagccacctacgctcgcatcttgttgatagatcagacacgaccatgtncttgtagatcgaattctgacttccatccgagcagcccaccggccacatgtctagggcg

SEQ ID NO: 26706 - DNA, 461 bp, Zea mays
  unsure (1)..(461): unsure at all n locations
ctcagcttgaaagtatntggatatggttcgaagagttgaagcttctttcgagggattntctgtcaaaaatatccctcgaggacaaaatgagcatgctgatntgttagctaagtcagcagcgcangggctgcctttaccttcggatgtgttcttcgaaacaataaaagcaccttcggtggaacttcttgaaagagcagtcctcagtatatctcctgttacagcgaagattggagaactgagatcatctcttaccttcagggtaaattcctttcagatgacgaagtttataacaagagaatagagggcagagctcgtccatatgtcataatagaaggggagtngtacangcatggagtttgtgctcccgctactcaatgttatccagagccgaggtatagagtaatgaagaaatacatgccgcctatgtggattacatcgatctggccatacttggaaatttc

SEQ ID NO: 26707 - DNA, 202 bp, Zea mays
  unsure (1)..(202): unsure at all n locations
cacacatagctcatttgtttatccttgatcatatctcctttatatgctatgactaatgtgttntcaagtctatttcaaaccaagtcatatgtatattgaaagggaattggagtcttcngcgaagacaaaggctctcactccgtaactcatgcttcgccatcactccgagcaactctctattccttgaggagaaatgagcatc

SEQ ID NO: 26708 - DNA, 392 bp, Zea mays
  unsure (1)..(392): unsure at all n locations
gcttgnagactgactgggctntctatntctaattaatctagcgacctacngtcacattgctttgataccacttctgtcacacccgtttctaaagggcagagtcgggtacatagcatatgtgtgccacgatctatttccacacatatgttgacgtcacaagtgtaatatatcaaaagaacaatgcataaaagcgtagataacgattatattaacatattacacttcgaacagacataatgtcttaacctttattcatcaaagtacatcgaacatggacatccatccacaggaagatgaccggnggatcactagactagcatccatggagatcagcatcataacttcatctacaaacttctgatcanaattaagcangggtgagctcacttatg

SEQ ID NO: 26709 - DNA, 110 bp, Zea mays
agctcgtcccgggatcctctaagtcacctgggctgcacttagaaataaaaatattttgaagggttgtgataaaaatatcaaactattaatcataaaattctttttactct

SEQ ID NO: 26710 - DNA, 423 bp, Zea mays
  unsure (1)..(423): unsure at all n locations
agcttgtgaatattcttcattccaacatgtgctattcggcgatgccagagccagcccatgttagtcttagcaattaagcaagtgtcgagttcagctctatcaaaatctaccaagtatagctgaccctctaacactcccttaaatgctactgaatcatcacttcttctaaagacagtaacacctacatccgtaaaaagacacttgtagcccattntgcataattgcgaaactgagagcaagttgtaatctaaagaatctacaagaaaaacatttgaaatggaatggtcacgtgatatagcaatcttacccagtgctttgaccaaaccttgattccatcccnaatgtgaagctcatagggacttggtttctcgtagggagaacattcttctcctgtatatggtgtgccccgtatcgatgatcaac

SEQ ID NO: 26711 - DNA, 488 bp, Zea mays
  unsure (1)..(488): unsure at all n locations
tctggaagcagtcctacgtgggtgcatgtgccgctgttatggtaagctccggcgcagtcgccgcttggacgcggtccagagtggctgcaccgcactatccattgtcaaacagagggacctcatggtcgtcgccaacgccggcgatagggatggcaattntacccgcgtgttcggatattctgacngacatccgatccgacaggttcggattcnggcatggaatttggtccgtggggctcgcccgtacccaacccgcgataaaatcaggtcnggtacgagttttatctcctacccgcgggtatncngtggatacccgaaactaatgaaactaattttaagctactaaaaaaacgggccaacggcccaagctccatccgtcattctaacctagcgcaaataccctccctgatccctacttggcggcggtacagctccangtaacgccacacccaatctccacccctatgagccactcctcctctagtctc

SEQ ID NO: 26712 - DNA, 79 bp, Zea mays
ggagacttgtgtattataagcttctgcgactggaaccatacaaacggatgataacctaatcgcacggatcagcactgtc

SEQ ID NO: 26713 - DNA, 445 bp, Zea mays
tgccccgtgtaccacctagtgcctcaagaatcaccaatggatgcaaatgctctatgatactctaatctctcactagaatgcaatcacaagcaatgagtgtgagagaatgagtgggaggatcacaaatgagctcaatgtgtgcaaggaatggccaagagaaccctcacacacgagctcctcttctatttatagcccacctcagaattctaactgttatgtgtaactagcacgaattttgcgcacacgcggactgtccacgctcttatgccggatggtccgctgtacaagtaacgactagttttcccgtatgatatctgtcagagctgtcagataagcgaggtccggacagtccgccaaccttggcccgaccatccgagacctggcaactttgagcaccatagctctgatcatgaatgtgtaacacacgctgactatcagccataca

SEQ ID NO: 26714 - DNA, 257 bp, Zea mays
  unsure (1)..(257): unsure at all n locations
agccttctatctcgcttggntggtgtanatatgtgctaacgggtggttagaacttatccaaattgatgaactatcgatatgtttgtcttctctaaagatcacccctggttggctagaaattagcttgttatggacttataacctcttgtgatgatgtgaaccatgaacttagcaagctggttattccatatgggtgtgatggtcacgtagcaccagaacagatatagaaatggatttatggccattttcctttcatc

SEQ ID NO: 26715 - DNA, 396 bp, Zea mays
  unsure (1)..(396): unsure at all n locations
acatgtgctaagcggcgatgccacagccagcccatgctagtcttagcaattaagcatgcatctagaccgacctcctcttttgcaaaatcaactcaatagagtttgccgtctagtacacccttaaaagctaatgaaccatcacttcttctaaagacagacacatctacattngtaaatagacaattatatcccatattacataattgactaacagatagtaaattatatccaagagactcaactaaaaacacattagagataaagtgttcatttgatattgcaatctngcctaagcctttcaccttgccttggttcccatcaccgaatacgattgaatcttgngaatcctttatcttgatgtangaggtgaacatcttcttctcccccgtcatatgg

SEQ ID NO: 26716 - DNA, 418 bp, Zea mays
  unsure (1)..(418): unsure at all n locations
ctgcgtccaggcgttgagcctcgcatatgagatcttctatatttgtctttacttccaagccaccgttgtctcccagacatgcatttagttgagctgattcttnctttcaatcttccagaaangttgttcccttaaccccgaaagtttccggctgagggcgtctgctactacattggccttcccggcgtggtagtggatatgaggtcgaatccttgatcaattgagccacctttttgacgagtgagtccgtgctaaatgacttaactttggacagtgaatggcattgtctatcaatatgctcaatttaggctcctaggtgcattcaatctggtgatgttgtctgcgttatatggatctacatgatttatttgataacccctaactgttgaactacaaatacaatctggatgtgaagcaa

SEQ ID NO: 26717 - DNA, 212 bp, Zea mays
agcttaaacaattctatactatatttattgcttccgctaaatatgtgcatagagaggaaaacaaattattggtcttaaatgccaagtgcacataattatgtttatgagatcatatctatatcatatagagtgtggagtgcattgtgccagcgtatatgtgtgatgctcatgacagtttatgcacatatgatagcatgctgtgaatatctcaa

SEQ ID NO: 26718 - DNA, 266 bp, Zea mays
  unsure (1)..(266): unsure at all n locations
tctnttcccgtaccgagggatgctngccaatcacaacatctngattcaccaccctctgattagcttttgaagttntcttttaaaaaatgtcaacatatctaccgtaaagtcacggagactattatataaatataaatatgcacaaacaattaaagaataagtcacagcaaaatcctttacgttntgcacaaatccacatcatggtcaaatgcgatcactcaccaccccactactccactaccaccacctacctaaccaaaagctac

SEQ ID NO: 26719 - DNA, 539 bp, Zea mays
  unsure (1)..(539): unsure at all n locations
tgtaccacctagtgcctcaagaatcaccaatggatgcaaatgctctattaactctcaatctctcactagaatgcaatcacaagcaaggagtgtgagagaatgagtgtgaggatcacaaatgagctcaatgtgtgcaaggaatggccaagagaaccctcacacacgagctcctcttctatntatagcccacctcaaaattctaactgttatgtgtaactagcacgatatttgcgcacacgcggacggtccacgcccttatgccggatggtccgctgtacaagtaacgactatgtttcccgtatgagatctgtcagagctgtcagagaagcgaggtccggacagtccgccaaccttggccggaccatccgagacctggcaacttggagcaccagagctctgaccatgaatgggtaacacacgcggactatcggccatacaaggtcggacagtccgcgacctgngagtcagtattgtccgggctatgccctgagagtcatatacaagtgccaaaacacatgtcctgccaaccaattggacct

SEQ ID NO: 26720 - DNA, 434 bp, Zea mays
  unsure (1)..(434): unsure at all n locations
agcttgcattgcatatttatatttcttgtatagcatctanggcgctgctaacctagttgagataaccgccaacatagcgagtgataaagcttaactcggatcaaacttgactagtcttagttttaaacttttagcacttaaattcttacttgttatgcaattgttgagtcttgacatatgcatgaggctctgcacttatggggagtattcaaaactcagatcactcatgaaaacctctattgctatgccaaagtgcaaatatcaccatntgcctattctctctaagaattatctagcctatggcaaatatgttgacaatattagaaatatatgagggtgccaatcctgtcccaacagtgtattttggggataatagtaggatctgttggtgaaactaatagaaantctaaaatcaaatttccttgctggctacg

SEQ ID NO: 26721 - DNA, 183 bp, Zea mays
agcttcgtcttgaccatactcttgtatactcgtaacctgattccgaagacacctgttcacatatttcacttggagaacattgtcgaatcatgtttttgaggaccttctgaagccgaaggcccccaacagtagcccctcgcaatattaatttgctggaatgatgaattcatattgcgacatgga

SEQ ID NO: 26722 - DNA, 282 bp, Zea mays
  unsure (1)..(282): unsure at all n locations
agcttatgaagattcttcattctacatgggctaatcggcggtgccagagccaacccatgttagtcttagcaattaaacatgtgtcgagctcagctctatcaagatctactaagtatagctgagcctctaacacactcttaaatgctattgaatcatcacttcttctaaagacagtgacacctatattatgtaaaagacaagtgtggcccatttgacataatnnggaaacagaaagcaagttgtaatctaatgaatcaacaacaagaacattggaaatgggat

SEQ ID NO: 26723 - DNA, 453 bp, Zea mays
  unsure (1)..(453): unsure at all n locations
tctagaaagagcaagagagcaaggcgaagctcgtcaaggctagaaagtattctctcaatgaagatgcaatgctntgacgagttgactaaagaacatgaggagctaanatgctctcantgttgattggtccaaaggtatgaaactatttcaattgagcaagataacgctntacattgtatcgctcaattagtaaatagaaataccttgcttaaggaccaagtagaaaaagctaaaggttgaaaatctagctnttcaagagaaatatgatatgctcctatgctctcatgagaatcttagagatgatcatatcatattagacattgctcatganggtgtgataganaacttaaaatccaacaacctcactcatgcacatgtatttcaaatgatactatattaccatgtgctaatgcttgttgtccgcaacaagcatatcttcttttgagctagaac

SEQ ID NO: 26724 - DNA, 342 bp, Zea mays
  unsure (1)..(342): unsure at all n locations
agcttagcaaaagatatttctataatctagaatattgagctcatgcctaaggctggttatagattgttcatcaagtggcttggtnaagatatcggctaattgatctttattggtgatgtaagaaatctcgatatcccccttctgttggtgatccctaagaaaatgataccgaatggctatgtgcttagtgcggctatgctcgaccggattgtctgccattttgattgcactctcattatcacatagcanagggactttggttaatttgtaaccgtagtcccgcagggtttgcctcatccatagcaattgccccaacagtgacctgcggcaatatactcagct

SEQ ID NO: 26725 - DNA, 291 bp, Zea mays
  unsure (1)..(291): unsure at all n locations
ntccatgttgtgctngaacattccaatccgagcccgcatctgaccgtggngaccgtcacaagttggtgttcttctgtagtccgaatccagcatgttcaaatccttttccctttcngtcttctccctggntcctaagcaaaacaagagtgcacgggtctccatggtctaaatatgatggacatgaacccaagagtgtaatcacttgatggtngagttgacgagcacgagcgtgaggtatgggacccagaaatggtacttgtatttgcatagatgtatcagtagtgtggatgt

SEQ ID NO: 26726 - DNA, 161 bp, Zea mays
  unsure (1)..(161): unsure at all n locations
agagtgtgatgaccacttcaagacccctggagctgctgcatatggacctcttctgacccgtcgcctatctgagcataggaaggagtaagtatgggctagttattggtgatgacttttcccgtntcacttgggtgttctttttgcaggataagtctgaaacc

SEQ ID NO: 26727 - DNA, 454 bp, Zea mays
  unsure (1)..(454): unsure at all n locations
tactaagctgtaagctatttggtaccatcgcttgatgggtccatcaaggttagtcaacatatatctatatattccaaagnccttggtgttagcgcttggtaaactcattacctttctagcacaagttgcaattttgggttgcctagttacatgtgaaataattgacatgctagaagcgggggtgttaccaatgggacaatccttgcattgatgtcccttctttcagcatatgtagcanaggcgatcttcaagtcttgaagaatttttctttccttgttgcttgcttgctacatcggtagataataatttcttttctacactatgccttttgctttatataaggacaaaacttattaagtgtgcctttcttgagcattaaacaaagttatatccttgtataatcaaccattttatataggactgacctatgagtgtctttcaagattactcacgt

SEQ ID NO: 26728 - DNA, 255 bp, Zea mays
  unsure (1)..(255): unsure at all n locations
agcttggatattctntatcagaacactacggatattgctgtgataaatgaaaattcttcacgaagcatgaaaagaaaggaanggtgtttttcntcaaagactcaaaaaccgtacgtatgtaaaatctcatgcatcgtacagaattgaaccatacaaacaagtatattatattcacggttacaagatgttacacatattacatttcagaagttttacaatatcacttaatcttctctaagtacaactttcgcagct

SEQ ID NO: 26729 - DNA, 155 bp, Zea mays
  unsure (1)..(155): unsure at all n locations
catcatncacataagaacatcatgacgactgacaggccactcgagcttctacacatggatctatttggcccgatagcttacataagcatccgcgggagtaagtactgtctagctattgcggaagattattctcgcttcacttgggtggtcttttt

SEQ ID NO: 26730 - DNA, 376 bp, Zea mays
agcttatgcctccctgcgaatgatctgttcgttatctccaaagttttgaagcccgggatgtacaagctggccaacagtcaaagcgaggtctacaacaacgcttggaacatccgacaactacgtcgcttctacccttaagatgttttcaagccgttcatatacctcgtttacatatgaagtctaaccatcaaggaagggtcggccttgcctcagcaaagcctgaccctcccttgtgggctagaagggggaaccccctctgcgtcaaaatttctctgaaaaggtcttctgtacaacgtcttcgtgctttcgactactctaaagtggatcataaacgacggagacacgtagcaacaaggccaccgactgaggactctac

SEQ ID NO: 26731 - DNA, 280 bp, Zea mays
  unsure (1)..(280): unsure at all n locations
ctcagctgtgaagttcttatcccactgtgctagcggcgatgccacaccgcccatgttttcttatctataagcatgcatctagaccggcctctgtctttggcaaatctactacataaagattgccgtctaatacacccttaaaagctagtgaaccatcacttcttctaaagacagacacatctacatttgtaaatagacangtgtacnccatgttgcataactgactaacagatagcaaattataacctagagactctacttanaacacattagagataga

SEQ ID NO: 26732 - DNA, 253 bp, Zea mays
  unsure (1)..(253): unsure at all n locations
agcttctaaagggagagcacattttatgtctaacaaatgttcantttgagaaagaacaggattgtagcgcatgctcaagccggaagcaagttggcactcatcatccacacaaaaacatcatgacaagtgacaggccactggagctcctacacatggatttattctgcccgatcgcttacataagcatcggcgagagtaagtactgtctagttattgtggatgaatattctcgcttcactcgggtgttcttttt

SEQ ID NO: 26733 - DNA, 386 bp, Zea mays
  unsure (1)..(386): unsure at all n locations
gaacttgaagcanacatgtcatttgaatcataaccttacaactnctatcatggtgaacatttctagaaaattttctatcatagataaatgcatgattcttttgactactattagccataggagccttcccctttttcttgttgaaatgggagctctttggcttgtaagttcttggttctctcttgaagcagcccatcttaatgagngtgttacaatggtgtggcatccttgcaatgtagttatcaaatattctgctagctaagtggcataagacaccactcacattaatttgaataaattagtgtcactcagctcacttaaatcgtccctatgaatacacatgtctccagattgatatactatttactagattaatacatatcttt

SEQ ID NO: 26734 - DNA, 237 bp, Zea mays
agcttcacatctgcactaactctgttgtgtggttctctgctagtggcccatagaaaccagacctaaataccttccctactagagttctggatactgcacgtattccacattgtccagcgtggatttcatccaacagctgagttccagaatttgatgaaatgcactctatgagtactcctgtcgcatgccttctgtagagtgcacccactatgaaggtgtagtgggccgactgtctct

SEQ ID NO: 26735 - DNA, 250 bp, Zea mays
tcaccaaaaagtgagagattgaagctcccttgtggctctttggtggttggatgccaacacaaataaaagtatgatatggtgttaagtgtttaacatgtgtataacgcagagcttatatatgtcaacataagtgatcaagtgtgatgatcccaagggctaagatgactatggataatggacatcacaagctaagtgaaagatggacatttgatatgtgagaatcaatgacttggagtcaactgatcgaatc

SEQ ID NO: 26736 - DNA, 293 bp, Zea mays
  unsure (1)..(293): unsure at all n locations
tgctacctcgaacctcaggaactcggttctgtagttttccggagttccatttgtgatatgcatgtaaatgtgcccaagctgggtattctccttcggncggcacaatgtcgaaataaggaatgtctgactcatggagctctttgagtgcgactcccaagcctaagagtgtccggaggaaggtgacgttgatgctgcttcctccgtccaccaacaccttctttaccctgttctctcggatcaccgatctacaagagatgtgtcttgcccgatgatcgaagtgagccattgatccg

SEQ ID NO: 26737 - DNA, 271 bp, Zea mays
gaaatagaagtctacacaagaaggcggtatgccatgtttgcggaatggatctcacaaagttagcactctcaacacaggacccgcaaattgtcgtccaaggactcttttccaatgcgccacagtgcctatgcacagccgcaaaggagaagaaatcagaacctcctcatataaactctttgatgaatgcttcgatagagatacttgctcctttcctatctaactgcccaaagaaaataatgattattgtgtttcttaaagatactttggatcc

SEQ ID NO: 26738 - DNA, 112 bp, Zea mays
ctacttcatttctctagaagttgtgtgtttaggggggtcacgaacacttaccttcttctacttggccatgaggcaagtgtgttcttcgttggggaagatagatgacttgttg

SEQ ID NO: 26739 - DNA, 446 bp, Zea mays
  unsure (1)..(446): unsure at all n locations
tgaagctaacactggtgttggaaatggaaataattcattctcagtacaaagttgaactattgaactaaaagcaaagcanagcaaataatgtacctctttaagttatcattgtcagctatcttgttccagaattgcaatcgcaattctttatcacccataatctaggtgcaattatcttctttcttgaaaggggaggctgagcagtctcctttgaatactcatctgatttttggtttacaattcaaagcagctaagacacttcttatatgcatatttgtctttttccctatatattctgataacacgagttgattcctctccttgtcgttgccccatcagtgatccattctcctcctctcacatcttcacctatatgcttctattctcctctcgtctcaaatctccacctattagtttgttcttccttgtctcaccttggaccatag

SEQ ID NO: 26740 - DNA, 370 bp, Zea mays
  unsure (1)..(370): unsure at all n locations
acgcaattcactcgacccgggatctctaagcacctgagctgcaacttgccaancactgtgttgtattacaccaaagcaaaggaatcttgggctcactcttcacggagcatacgagtttccatcttcaagaaagcaaattccttcgtctctcgctctcccatccgcatatacccggatacctcgtttgtctagagaaatcaatgcaacatatagattgcgtaatgatcaaggcgacatagtgcaccaatgcaacaaggtagtatctaggacgaacagcaatgttgtctgtactagcctcatcaatagcacagctgctgccagccaaattctgcgtagccttccctttaaacacgacctgcatagtagtagt

SEQ ID NO: 26741 - DNA, 384 bp, Zea mays
  unsure (1)..(384): unsure at all n locations
agctntatcaaatggacgtgattagtgccttcctcaatggaccaatcaaggaagaggtaaatgttgagcaacctcccggctctgaagatattgagtaccctaaccatgattacaaactctctaaagcgctttatgggctcaagcaagccccaagagcatggtatgaatgcctcagagatattcttatcgctaatggcgttaaggtcggaaaagccgatcctacacttttcactataacaatatgcaatgatgtgtntgtatgccaacgttatgtttatgatattatatttgggtctactaacacatctacttgtgaagaagttagtaggatcatgattcannaattccagatgtctatgatgtgagagttgaagtgatttctat

SEQ ID NO: 26742 - DNA, 467 bp, Zea mays
  unsure (1)..(467): unsure at all n locations
gaacacgtgatanggttgactaacgtgcaattcgaaatagatagaccttgtgcagcttgtcaagcaggtaaacaagcgggaggagcgcatcacagcaagaatgtgatgaccacttcaagacccctggagctgctgcatatggaccttttcggacctgtcgcctatctgagcataggagggagtaagtatggtctagttattggtgatgacttttcccgcttcacttgngtgttctttntgcaggataagtctgaaacccaagggaccctcaagcgcttcctcaggagagctcanaatgagtttgagctcaaggtgaagaagataaggagcgacaacggatccgagttcaagaaccttcaagtggaggagttctttgaggaggaagggatcaagcacgagttctccgctccctacacaccacaacanaatgctgtggtagagaggaanaacaggacactcattgatat

SEQ ID NO: 26743 - DNA, 342 bp, Zea mays
  unsure (1)..(342): unsure at all n locations
agcttatctcaacctgagaagaaagcttattctcaagggtgatgtgttagtttgagctttgccagtgtgatattcatatgcttcttacagtattatatgtgttgcatcatatgaactaatgttttcgctgcgatgcgatgaattattaattggcttctatagtgtaatagatagtcatgtgggtaatggtgctttaagattgctttaaatcggtatcataagttaaattggtatcttaaacgtgaatagtggtaggctgatattcctgtgatatatccactcaatttgaatggcggtgtaactctgattatgtgcattngttgtgtataacatcatgggttg

SEQ ID NO: 26744 - DNA, 225 bp, Zea mays
  unsure (1)..(225): unsure at all n locations
gatggggtagtagatgttaagaagctangagatagaatcatcctagtcaaactggtcattanggacttggttctcaatgttatcagcgcgtatgctcctcaagtaggccttaatgagaactcaaaaagggagttctgggaaggcctggaggaaatggttagtagtgtgccagttggcgagaagctcttcatatgaggagatctcaatggccatgtgggtacatct

SEQ ID NO: 26745 - DNA, 303 bp, Zea mays
  unsure (1)..(303): unsure at all n locations
tagctttgtgcacgcatctgaatttcaatttatcttatcatccgcagacagatggccagaccgaaaggaccaacctaattctcgaagacatgttgagagcctgtgcgtttcaagatcagtcctgatgggataagagattgncatatgcatgaatttcctataacaacagttaccaggccagcttgaagatgtcaccatttcatgcgctctatggtagggagtgcagaacttcgttgcattgggatcagcctggagagaagctagtgtgtgtgccagacattctacttgaagctggagataaca

SEQ ID NO: 26746 - DNA, 289 bp, Zea mays
  unsure (1)..(289): unsure at all n locations
gctgtatacaccttaacggatcatgccttntaatntgacaaaagtaggagaaaccggtctctcatgctccaccacctaggcacctacgttntgaactggtagttctttttgactactttnntgcctcaagtacccgtttttattgtgtgaaacggaattntcggccaatgtgctgcagcttcttatntatgtttcgtgcatcgactgatgaacgatggattcatgctacctaaccgtgatcatttctttgtttgaaggcctgaccacaaccttcaagatatcagaaata

SEQ ID NO: 26747 - DNA, 62 bp, Zea mays
gctggaaagcaagatgctaatacacatcctactaaagctttcatgtcaacatctatgccact

SEQ ID NO: 26748 - DNA, 132 bp, Zea mays
  unsure (1)..(132): unsure at all n locations
tattatagnnngattttagccgtctatgatgatttcatgaaactntaaataatttctagaattatcatctcttgccatacttatggtgtgtgatattgtagaacaataattaagtacgtagagtacttaaaa

SEQ ID NO: 26749 - DNA, 358 bp, Zea mays
agcttcttctatctgaccccatgtggatatgtggactcctatgccgcgattatttagtactgcggaccttcgttcactaaaataattactctcacaagcctgccactgtgtcacgattatggaataatagcttatattgattgctacaaaacctgactatagaatagcatatggcctcaagtgctatgatcgatgtctgtgttaagtgctcaataccatgcatgtgcgatccgcatttgtgtcatgctcatgaacactagcatgcacatgtatgggaatattgcgtcgtggataagcctgtctgttcactatattccaatgctgcactctgcatttatcttgtattgtcgtcgtatat

SEQ ID NO: 26750 - DNA, 159 bp, Zea mays
ctacaaccttgtccttaatgaggttagtgcccacttcaagtcactatgtgtttgtttatcaacacgcacagagtgggacgcatctcaatgaactcgacagtatgagtgtatactcatgaagtgctctgtgggggagtcctaattcattcacagctgctg

SEQ ID NO: 26751 - DNA, 445 bp, Zea mays
  unsure (1)..(445): unsure at all n locations
agcttgcccacaatgtcttccataaatatctcacaaacttcacatctcggtcagatacgatggtcttgggcactccatgtagtctcacgatntctctgaanaacaaattagcaacatgtgaagcatcgtcgctcttgttgcatggaataaaatgagccatttttgaaaatctatcaaccacaacaaaaatagaatctctcttttttcgagtcatcggcagtcctaanacaaaatccatgcttatgtcttccaaggaatttatgagcgggtaaggagtatataaccatgagggtcaatttgactagcttttgaccgtgaacaacgctccaaactgagatgctctctcatctggccatagaatatactgacattctaagcttcttgtcaaagactgtaaccgctcatggatcgcataaacattaccgaaattgtccaagtgtactta

SEQ ID NO: 26752 - DNA, 78 bp, Zea mays
ctctgtctgacactatcttctttggcacaccatgaagaccaacgatccgatacatataccattctgccataccgcact

SEQ ID NO: 26753 - DNA, 343 bp, Zea mays
  unsure (1)..(343): unsure at all n locations
agcttcacaaccatgtggtctgtttcttatagcctctnngattgtccttcacactagcaacctgatccatcgtagccaagtcatatcttttgattntctccacctaaccacatgataccatgaaatgtctcatatgcaatgagctccttcatcacactagttgagcatagcagcaaatccaagtcatttcaccacaatggctcatatttctctcatactagtgtacctgtgtacttaccggctgtgtatctcaacataaatacatattagtccacttagtttgtcactcaattaccaaaaccaaactanggttgtactgcttcatgtngggcatgtagaaagc

SEQ ID NO: 26754 - DNA, 411 bp, Zea mays
ctcacttcttacttttattttcagttatcatagggccgctacttagacacactaaattctcaaatctggtggctggggtgtgatgggatcaaaatactataatcctccctcttttcatcagcattctcttcctcaataccagcctgttcagcttctgcagcaggtgtatcttcgtcaatggctccctctttcacatctatgcccgactgtctcatgacttccgaaatctgagctgtctcggtggcctctgtcttcccttcttcacgagtcacccctgcagtcgagcgtactctaaccatctgatggattattgcgggtttacaaactgatgtctttccatttttgacaaattctctctttgacaaaacttctcaaatgatgggcacccagagtgtgcgaaaaagctcggtt

SEQ ID NO: 26755 - DNA, 306 bp, Zea mays
  unsure (1)..(306): unsure at all n locations
tattccataacgtgaaaatgaacatgcttattntctatccaaatcagcggctcagggagctcacctaccctctgaagtatatattgaagcaataacagcaccttctgtagagcttatggagagaacagtgcttactatttctccagtacacagttgaagactggagaacttaaataatatctttccttcaacgcaataggctttcaagtgacgaaacttataacaaaagtcatggatgcaatatcaaataccatatgtgatattagaatgcgaattgtatatacatggagtttgctcacacccctc

SEQ ID NO: 26756 - DNA, 418 bp, Zea mays
  unsure (1)..(418): unsure at all n locations
agcttatctttaacctctcattttcttatntgagctnttgatatgtatcatcttttgatcctgcaaaatctatctcacacgaagatntgcttgttgacgagcaacaagcattaacacatggtgatatatgttcaatttgattacatgtgcatgagtgaggttgtatgaatattatagttctctatcacaacctcatgagcaatgtataacatgatatggtcattcataagattttcatgagaacatataagcatatcatgtgtttcttgaaaagctatattatcaattttagctttctacttggtcttaagcaaggattcctattaccaattgaccataccatgtaagagtatctgctcatcgaaaagttataccttggaccaataacatagacatntactctatgtcttatcactat

SEQ ID NO: 26757 - DNA, 403 bp, Zea mays
  unsure (1)..(403): unsure at all n locations
tgaatcccaatactattttacatggagacacaggtggcactggctattcctgattaagacaactgcataaccatctattcctcgacgccaattgttgagatcacacaagatgtagttgcaaggtgccttggcattccgtngcacaacgtccgtgtgatcacaagaagagtctgcggaggctttggtggaaaggcaatgaaagcaatacacgtaagtcataactaactagagcttttctttgctaaacatcgtctatttgtattgccatccaaagtggatgatgtgagatgccaagaatctnnctcttgtcagaatgcatgtgcattgcgccgtgccgcattcaagctacagcgtcctgtaatgatgtccttgatcgcangacggacatgataatagcgggtgg

SEQ ID NO: 26758 - DNA, 375 bp, Zea mays
  unsure (1)..(375): unsure at all n locations
agctctccttgacccctttcttgttacacccctcattggtgaaactctcaagtanacataatctccaaccggagagtataatggcatccgtcgcttggctgcatagctcttctgacgaacttgagctctctttcaaatatgaattattcttcgaaccttttcttctgtctcttttaccatatcatgcactgagaagtacctttcaccaggttcataccaatttagcggagtacgacatcgttccccatataaagcttaaaaaggtgccctcttaatgctttcttgatagctattattattatgagaattccgctaacggcaaacattcgttccatatctgtgggaattctagaacacatgcccncagcatatctt

SEQ ID NO: 26759 - DNA, 490 bp, Zea mays
  unsure (1)..(490): unsure at all n locations
tacaacgttgtagtattaccttggttgttgttcatgcaacgggcataaaaagagcatcccccatactctctacacctaattatggtcgtggcagagtactttccctttttagcacacgagtcacaaaaacttgtgtgaactcccttccaagaggaacatctcccaccttagtggttgggtcggttgagataatatttgctattgcaacaggaacttcagatctcatcatagaatataatatcacttctttaccaacataatagaatatgtgaagtaagattacaaatgttaaataatgaaacataaatatgaagtgatagatgagaaaattacaggattatcatctgcattttgagatgatccatgnnattcttgaggtaccattgntgcaatgtctcgcctgcgactatgctctccaatagtaataacatcttcacgaatccttggacgacccacagtgcttgaactcgcctagtaagttgcaagtcat

SEQ ID NO: 26760 - DNA, 461 bp, Zea mays
  unsure (1)..(461): unsure at all n locations
ttcccgggtaatacgtagaggctgcttcgtacctgcgaccattggatcgaaaatacacatgttatcgnnttcatcatgacatgaataaacttacatctgttttgtaatcaagcaagctgtatgggaaacccctacagcatagaaaaaatattattatatacttacatgtgtggaatacataacttctgaatgcttgttcagnggtagccaaaagttatatttgtcttttggattaagatcagctatctgaaatcctcataatattggacgtattactgacctcctaagctttatatacagaatctgatgtacacaattacctcttctgtacatgctgtattaacattataagatgtatatatattaatatgaactctatggctaaagtaatgagaaataatctgaaggtataagtttgtcttaatgatacaaaattgctctactgtgatgttttttttgtt

SEQ ID NO: 26761 - DNA, 417 bp, Zea mays
  unsure (1)..(417): unsure at all n locations
tatctngagcaacttatacctttttttgatgcaaactctgaaaaatatttccaacatggttctttaatctgatgcaacatctacttgttcacctaccatacgaagcttatgtaagaggtcctgttcaacttatatggatgtatcacattgaataggacactaaagaaactacctgctatggttggtaataagagacgagttgaaaggtgcatcgctgataaattccaataccaagagatagcagtcgtcatgggcctgtactctgcagaagaatgcaatgtcaatgcccctacattgtgtgatcatgtcgacaggccccctatcattgatattgaaatttttcaatggaggggtgaactgttgactcacacaacatatatgttacatatgacaatggaagactgcttactgtctatg

SEQ ID NO: 26762 - DNA, 468 bp, Zea mays
  unsure (1)..(468): unsure at all n locations
tataacaagaggatagaggcaagagctcgtccatatgtcatgatataatgggagttgtacaaacatggagtttgtgctccgctactcaaatgtntatccagaaccgaacgtatagagttaatgaaagagatacatgcaggcctgtgtggatctcacatcggatctaggcgcgtacttggagaagtnttccgtcaagggtnttactggccgaaggcagcttctgatgcagcagaattggttcaaaagtgcgaaggttgtcagaaatgtgcaagagatcataaacaaccttcgtncttaacacagctcatacaacccacttggncattgcaaaggtggggccttgacttgttaggtccatataccaccggccaacggaacctgaggtatgttgtatagctgtggaatatttttctaaatggattgaggcgaagcctttagccacaatatcttcngctaccgtccaaaagt

SEQ ID NO: 26763 - DNA, 316 bp, Zea mays
  unsure (1)..(316): unsure at all n locations
atatgcgaatngactcaagcctagctacaggtgcataggtttcaccgaaatcccaccttcgacttgtgaatataccttggccacaagtcgggctttgttccttgtcaccacaccatgctcatcttgcttgttgcggaaaacccactttgttcctacaacattntggttacgatgttgaacaagatgccatacctcattcctcgtgaagtagttgagtcctcttgcgttggcacacccaatccaaatccttaatgcatctctacctgtatggctcatagaagacaccaagagtaatggtcacaaatgaacacacgag

SEQ ID NO: 26764 - DNA, 547 bp, Zea mays
  unsure (1)..(547): unsure at all n locations
ctctcatggtttcaatccactccactcaccaagcttgccaagttgagcgtcactctgaggcctataagcaaagcctattcctggtccaccagttcccctcttgaactggctgagcaccatgcccaattgnggctcattccatgacacccagctcaagaccgaccgaaggtatgtgttttcttccttgattcgggtcttgtcgtatgtgcaagactcaagagctgattgcaaaccctcacaaagtgcacattgcgcangtgtagcagcactcactgagctagcattctcaagcaaggctatcctagctnttctctctgctagctcaatctacaagccaggacaagaagtacatgcacctaacaagctagatctgcatctcaactcatcgcgctcatctagcaanggtggtgtacttgtctgcannagtgtgatgttcgacatgtgtagagagcactcatcacattntgtctcatcagacaccacaactgaatagaagaactcaagctcctaagcatgctctcgtacttggatntnactctctcatcta

SEQ ID NO: 26765 - DNA, 347 bp, Zea mays
  unsure (1)..(347): unsure at all n locations
tggccaanataactcanataataccnctaatcaagcttctcatgtggcgacttaattgtatattctgaattcacaactctgaaattcagaccttgagccagagatcacggatgttcaccttgatccctaactctaatcctaatggccccattaacaaaaatgtgcctaattaacctctctgtcatgtgccatgagatggcattgggacgcgttcctcggacacgtcataccagagatcttttccctgtgtgtggcagtgagacaaacaggatttctcccctctctatctcttaatccagtcagctaaactagctagtctcctcatacaaacgacatagggacctgat

SEQ ID NO: 26766 - DNA, 255 bp, Zea mays
  unsure (1)..(255): unsure at all n locations
ttggctntggacttgcttggctgtcccttgctacccttaagcgtccgctagaatcttttgatgatgagggccatctcttcatcattaagtccggccgcctcaattagtgccaccttgctaggtagcgcctccttgcttcttgttgcttgagagcagggtttgcggctcgttatcggaccattcaaggcgtctccacgtacttcccttcttgatcatattctccaccaactaatttccaagacttttcggcgacat

SEQ ID NO: 26767 - DNA, 205 bp, Zea mays
  unsure (1)..(205): unsure at all n locations
agcttcgtcatctgaaaggaatttaccctgtatgtaagaaatgatctcngttctgcaatcttcgctaaaaacaggagatatgttaaggactgctctttcaagaagctccaccgaaggtgctnttattgtttcgaagaacacatcccgaggtagaggcagaccctgtgctgctgacttagctagcaaatcagcatgctcattttgt

SEQ ID NO: 26768 - DNA, 348 bp, Zea mays
  unsure (1)..(348): unsure at all n locations
tgctggaagtgcgtgttgcaactgcacgcagtctaagacaaacaagcaagggagatatttccaatggtgagatattgcacgcncccctgctccacatgtntttccagccccgacgaccacaattccgatccattatctcgctagtactggtgcctggacaccgatggggcagtcatctagcgctagccgtactgacgctacaagtgaaccaatgcggcgccttcgtnttcttctaggaattagaggataggaagtcatgagctgtattggtcatggggagaggcaacagcattgcagcaagatatttgacatggacgtagacatttgtcttgcgaaacgtcaaacatg

SEQ ID NO: 26769 - DNA, 333 bp, Zea mays
  unsure (1)..(333): unsure at all n locations
aactatntcaattgagcaagataactctttacattgtatcgctcaattaataaataggaataccttgcttaatgaccgagtagaaaagcttaaagttgaaatctatttttcaagaaaatatgatatgcttctatattctagaaaatcttatggatgacatatcatttaaacatgctcataggttgaataaaaacttanatccaacaactcatcatgccatgtataaataaacttattgctggctatgctgtgtcgcgacacaatttccttactaaattgatgacaaaatatcatataaagctaagataaatggagctaaatgactgcacacta

SEQ ID NO: 26770 - DNA, 403 bp, Zea mays
gctttattgtttcgaaaatacattcgaaggtatatgcagcccctgtgctgctgacttagctagcaaatcagcatgtacattttgtcctccagggatatgtttgacagaaaacccttcgaaggaagcttcaactcttcgaaccatatccagatattcttcaagcttcggatccttaaccttgcgaactttgtcattatgatccgaaacaacctgagaatcaatttaagtatggctctctgattccatttgcttaactaccaagacctgaacaatcttcgactagcaatgttgttgtgcattaaacaagcttgccgctacaagtttgacttgaacgcgaacaacacgcaccgctctgctccaagcccctaatcatccatacactgccagctcgtgcatatcgtcg

SEQ ID NO: 26771 - DNA, 355 bp, Zea mays
agctcggattcggcggtcttttgtttgcccgtggtcttcgtgcaagagagtgtgcacccgagtatctcaatggatcagacacaagaatgcaacatcatagaccaacccgagtcagactctgatgactggagaccgccgattattaagtatatgaggaatgaagaacaaccagatgactttaactcggcagaccgcatggtcagacaatcagctcactatacacttcatggcgaggtattgtacaagacgggcgcgtcaagcgtctcatgaagagcgttcttcccgtcaccgggaggcaacttctggaggaagtccatgcgaagcagtgtggagtacatgcagcatccagaacact

SEQ ID NO: 26772 - DNA, 470 bp, Zea mays
tcttgaggtaaactgcgaacctcgatcagacacgatcttctttggtactccatgtaaacacacaatccgagccgtatataactctgctagctgagaaccttcatatgtagtcttcacaggaacaaagtgagccactttagtcaatctatccacaatcacccatatagcatcatatcctttctgagtgcgaggcaatccagtaatgaaatccataccaatctcttcccacttccactcgtgtatcttcagtggatgcaatagtccagctggcctttggtgttcagccttaactctttgacatacattgcacatagccacatgtgcagccacatctcgtttcaatccataccaccaatacttgcgtgtcagatcctgatacatcttggtactaccaggatgaatagaataatccgagtcatgggcctccgtcaatatagtctcacgaatgctttctatatcatgaacacaca

SEQ ID NO: 26773 - DNA, 313 bp, Zea mays
  unsure (1)..(313): unsure at all n locations
agccttctttgcaacattcgtgtgtgatccaaccaaagacacttcaggagacctattcaccatcatatggtcgttaattcctgtatatattctacagacacaaacctcatggagtatacactactgagctgcacatacagctatatatactgaaatcttaggttcanttcactagttccaatctaaagacttcagaagtctgacaacctcactttggatcaccgtttctcctagctagatattattccagcgcttgcacacttaataataggttctactctggacttattctactatggatctataatggtca

SEQ ID NO: 26774 - DNA, 160 bp, Zea mays
tgaacatgctgatatgtttaccacgtgtgcttcacatgagctgacgataccttccgatgtattattcgcaacaataaatgcacctctcagggagttacttgaaagagcagttcttactatttctcctgtgtcaaggaagatggagaactgaaataattct

SEQ ID NO: 26775 - DNA, 493 bp, Zea mays
  unsure (1)..(493): unsure at all n locations
ctgacaccattcttacttcctctaggcttgcttgcattggcttcgattatctggtgctttcctggtctaggattagacctcaactctcctaattccgtctataggtggttcaatcttataagtttagcttacgtacatcgattcaatcctgccccatgcgtacctgagacaacccttatcttacccgagaattgcatttccgcttcaactatcagcgcatacaactttttctggatctatgcaacgcacctcattcctatagacagataagaatcttagtcattagatatgctccctgcccgngggaaattcggaacatatgttttccacaatgatccactgataaatgtatttaggactccaaacaatataaatctgctctcatcctctgagcactttttctcaaatcgatacacatgattcctcttttccaaagacacggcctctgatactcgaaactggatcttctgagaacgggcaaccttttcaaatc

SEQ ID NO: 26776 - DNA, 405 bp, Zea mays
agcttaagaaaagcacttctatgtttgtataactactaaagactgattctaagtttaacttattcaaacgaggctatcttcgaaatctgtacataatttggacagattcagagtctggacttgagaaaagcataacttccaaactacttgatctatggtcaggaacttttagcacaagcaagattaagaagtgagctacaacctttctatacaacactctcatagaaaacatgatttacttcactaaactatttgcataactgagactagacatgtagtccaaacaacaagcattcaatatagctgctaattagcttctacgatgatcatgtgcttgatacctgtaacaccccgtccaatcgcggaccggaagtactactcatggagctctctaggagatatatt

SEQ ID NO: 26777 - DNA, 370 bp, Zea mays
  unsure (1)..(370): unsure at all n locations
gcatgtcaagcaaggaagcatgatggagctcatcattcacacaagaacatcatgacgaccgaaaggtcgcttgagctactccacatggatctattctgcccgatcgcttacatatggatcggcgagagcaatattgtcctgggattatggatgattattatcacttcacctgggtattctatntgcaggagaaatctcaaactcaagagatcttatagagattcttgagactggctcataatgagtcctgataacgataaacaagatacaagcaacaatggacggagttcaatactcttaaatcaaagattcttgtagagatggcatcagcatgacttctctcttcctacaaccttaacaaatcgtgtat

SEQ ID NO: 26778 - DNA, 367 bp, Zea mays
gaagcaccacaagaccaatcaagaaacgaatccatgtgggaagttgctagagaaaggtttgtgtgttggcatctatgcttcctcaataagctagctgccaagcgaaacctataagcctgaagatgatctttgagtagacagaaacagcgtttgcaatctgcaaccagatgcttctctatggcagatcttgttgaaggtccatctcctctgagagttgcatagtgaagatatgtagctgaagtaaagctatactcataacccttctaagccgaatctctaggacgagattccttttaagtggggtagatttgtagcatcccataaattcacatatcgaaatgttctcaaactcgctctagattcaaaa

SEQ ID NO: 26779 - DNA, 411 bp, Zea mays
ttgtcactagcttatacgatgatacgactttgatgatggtgatgtatcagaaattgttgtaccggtacattactaaattgcttctttgatactgcataaaatcagtattaatacaatttctaaccattaatagaactattatgacaaatgcatgacgaaccaatggaccaacatgcgtttgtgttacattacctaacctttcatggcaacaacaggggttaccccttccctgcaaactaatgcctttcaatatgtccaatgacacgacgttgttaaagccaaggttactatcatactgacatcatgccgatggatctacatatgctatctacttctatgaccttatgtcaaggttcaatgtctggctattctatgaactatgtaaggtgcaaggttatgtactctatctac

SEQ ID NO: 26780 - DNA, 266 bp, Zea mays
  unsure (1)..(266): unsure at all n locations
agctcgtgcccgggatccttagagtcacccgctgcatgctagcttgagctatcttttcttgctttggcatcacantttatagctgatactctctccatttgtaatacggtggccgctttagttatagtacaataccaaacactctctgttctgttaaccactccatctgtagaagttntgtacgatttaccatcataccatatcttttctgtttatattaaccagagatgatttcggatatagctcatacgctgctatacgatata

SEQ ID NO: 26781 - DNA, 349 bp, Zea mays
  unsure (1)..(349): unsure at all n locations
gccttcttangggagagcacattctaggactaacacatgctcattttgttatatacatgatttgtancgcatgtcaagcactgaaagaagttggctcccaccatccacacatgaacataatgacgacggatangccactctaactactccacatggatctattcggcccgatagcttatataagcatcgacaggagtaagtactgtctagtaattgtggatgactattctcgcttcacttgggtattctttttgcaggaataatcacaaactcaagagactctaaagagattcttgagacggtctcaaaatgaagtcggattgataataaaaatatatgaagcgacaac

SEQ ID NO: 26782 - DNA, 425 bp, Zea mays
  unsure (1)..(425): unsure at all n locations
agcttcgaattaactctaatattntagcctcagtttcagccaccaagccttcggtcgattggagctcgaagtctttcttttcaatgattgcagattgctcttttattttgctttccaagttttcaattatagcttcgtgctttttgtccttcaagtctttgtgcatcttcagagctttgctcagtagcatgctctgaacagaagcaacttatgttaaataatattttcattgttaacggcaataaagaccagagaanaaggntgttaccttgaagctagaataaaacaagctgccgacgatatgtngtcgtcggtagcggctgatgtctgtctctagcttcnngaaaccgatactcttcgatagagtaccgattaccttagcttcagtctggtctcgaatacagcctagtttttcatcatctaca

SEQ ID NO: 26783 - DNA, 459 bp, Zea mays
  unsure (1)..(459): unsure at all n locations
gagcatgacactntcccttcaaacgagttaagctccttcttagcattccaacttcttccttgagctctttattttcttgtgtgatagaaatataactaattcctgaaatttctagctcaatggaagattggcttgcttgataacaacaatttgtagcacatggtaatatagtttcaatttcaacacatgtgcacatgtgaggttgatatgatttcaaattagttaacacaacctcatgagccatttctaacatgatatgtgaatccatacattattatgagagcatacagcatatcatgttttcttgtaagctatatttcaatgttagcttttctaccgtgtcttgacatacattttatttctaattgagcatatacatgaatgataacaactntaattgctcatgaatgcttctactttgaccaatatatgaagccttactctatgttttgcaatctt

SEQ ID NO: 26784 - DNA, 277 bp, Zea mays
tatgtctggcatgatgaactatgtttgggttggatctttgaatgattgtcaccacaagtgtgggtatcccctgcatcttggtttacatattatgttaatgaagctagttatatagttgggaaaccttttattccactcttctctcgatctgagaagctgtgtggtctgttgtggagatcagtgaagatgctcacctgctcagtgctggtgaagaatctatactctcttcttatgctgcagattgccagatcagttctgatgtgtggtgcattctgca

SEQ ID NO: 26785 - DNA, 62 bp, Zea mays
gatgtgggaccacttggaccttactaagggtgcttgtacaccaacatgatgcactcttctct

SEQ ID NO: 26786 - DNA, 488 bp, Zea mays
  unsure (1)..(488): unsure at all n locations
ccttagatctcagctcgcgcgaggcgaaggggaccactttagataaaagacttcngggccttgacagatttccataagccgctaacaaatgtgatgggcatggatgtaattatacgtgagctgcgtcccgcgtctataaatagatgaacagtactcccgtactgttcacgctgacttggcatttgctttcggcatcacgcctcgacttttcaccttctntcangaccgaaggtacattcgtgattagaatcatttctgttttccnngnnnaaaaatagaaatgatccatggggatgctaaatcatattcatgcttatgtgaaccttcgcattacttgtatgttacgaagtatgttctcatgaccttcgtcggactcatatatttcgaatgacatatgcttccaggacaaggatttaacactacacttttatgtgcgtgtctaactctacacttggacaagtcccacagcttaccataacatttatgtg

SEQ ID NO: 26787 - DNA, 466 bp, Zea mays
agcttatgaagattcttcatcctaacatgggctattcagcggcgccagagccaacccatgctaatcttatcaattaagcatgtgtcgagttcagctctatcaaaatctaccaagtatagctgaccctctaacacacccttaaatgctattgaatcatcacttcttctaaagacagtgacacctacatcagtgaagagacagttgtagcccattctgcataagtgagatacagaaagcaaactgctatctaatgaatctacgagataaacattggaatagaatggtcatgagagtatagctatttaccaagacctttgaccaaccttgacttcatcctcgatgtgaagctcgtggggactggttttctctacgagagaaacttatctccctgcataggtggtgcccctgcgatatcactgagccccgtgataactacaacagttatttgcttagaccaaacgttggc

SEQ ID NO: 26788 - DNA, 210 bp, Zea mays
  unsure (1)..(210): unsure at all n locations
ctggctgtggcatcgccgcttagcacatgtggggatgaagaacctncacaagcttctaaagggagaacacgtgataggtctaccaatgttcatttcgaanaagatagaccttgtgcaacttgtcaagcatggaaacaagtgggaggctctcatcacacccaaaatggtgatgacacattcagaaccctggagctgctacatatggatctc

SEQ ID NO: 26789 - DNA, 426 bp, Zea mays
  unsure (1)..(426): unsure at all n locations
tagctttaccaaatggttgttaatagtgtcctcctcaatggaccaatcaacgaagaggtctatgtttagcaacctcccggctctgaagacagcgagtattctaaccatgtctattagctctctaaagcgctgtatgggctcaagcaagccccaagagcatggtatgaatgccttagagatttccttatcgctaatggcttcaaagtcggaaaggccgatcctacactctttactaagactcttgaaaatgacttcgtcgtatgccagatatatgttgatgatattatatttggggtctactaacgaggctacatgtgaagaaattatgaggatcatgacacataaagtctagacgtctatgatgggggagtcgaagtatttcttatgaattcaagtgaagcaactncaagagggcaccttcttaag

SEQ ID NO: 26790 - DNA, 316 bp, Zea mays
  unsure (1)..(316): unsure at all n locations
cgacacttagaaactcagcttgtgagattcttattccaacatgggctagtcggcggtgccagagccaacccatgttagtcttagcaattaagcaagtatcgagttcagctctattgaaatcaactaagtatagctggccctctaatactcccttnaaagctattgaatcatcacttcttctaaagacagtaacacctgtatccgtaaaaagacagttgtaacccatnttgcataattgagtaaacagaaagcaagtgtattctaaagaatctacaagaaaaacattggaaatggaatggtcaggtgatatagcaat

SEQ ID NO: 26791 - DNA, 366 bp, Zea mays
  unsure (1)..(366): unsure at all n locations
atcaagacagcgggagtaccttctccaactctgtataatatttctntgataaactaagaacctcggatacaaaatatattggggcctgcctcttgacttgaccatcaagcttctcctggacaagcgctgcacttaccgctgagtgcgaagctgccacatataataataaaggagcccctggcattggtggagtcaacgttgttagatctatcaaatactgtttcagctcttcgaaagccttctgctggattggtccccattgaaagacttcngctgacttcagcacttctaagaatggtaaatttctctctgctgatctggatatgaatctattgagagatgctcaatcttcttgtcatctttgag

SEQ ID NO: 26792 - DNA, 283 bp, Zea mays
  unsure (1)..(283): unsure at all n locations
tctaaggggagaacacgtgataggtttgactaacgtgcaattcgaaatagatatatcttgtgcagcttgtcaagcaggtaaacaagtgggaggagcgcatcacagcaagaatgtgatgaccactttaagacccctggagctactacatatggacctcttcggacccgtcgcctatctaagtataggaggaagtaagtatggtctagttattggtgatgacttttcccgcttcacttgggtatactntttgcaggataaatctgaaacccaagggaccctcaag

SEQ ID NO: 26793 - DNA, 212 bp, Zea mays
  unsure (1)..(212): unsure at all n locations
caatcgactcgacccggatcttgagtactgagctgcagctttttcaacctactgttgttttatgctagagatcttgttgttaaggaatgttatgaaacgaatgtatgatgtaatgcatcgtgcagatgaatgtttgaagattcatatgaaaccataataacaaatctttgccatttatttatcagcttcaccgcttatatntctggtgtatc

SEQ ID NO: 26794 - DNA, 444 bp, Zea mays
  unsure (1)..(444): unsure at all n locations
agcatcttgttanctgctgccatatatgatatgtgaactgcgttcctcgatctgacactatcttcttcggcacaccatgaaagcagactatccgtgacatgtattactcatctaacgttgctcccgtgtatgctgtctttaccggtatgtaatgggccacctttgttaaacggtccacaaccactcatatggaatcatatgcggcccttgttctaagaggccaactatataatacatctctatctcatgccactatcactgaggaattcgcattggctgtgacaatccgacaggcctctgatgctctgctttggtctctgacactatacagatggaacatattctggagtctctttattgctaccccaaatctcttgttatctgatctctctccttgcagggtatgagtagctgttcatagcttctcagatatctccaatagtt

SEQ ID NO: 26795 - DNA, 204 bp, Zea mays
catgaccaattctttgtgatttttctacaacagaagctgtggttgtctaatgagtcatcatgtgggccaaatcttcattttctatcacaaattaccatcactaattggttagtggtcaagacttatggctctcactacccgagacgcctaactattcgttggccgaaaacccaccgaaataagctgtaaccgaccgaaatagca

SEQ ID NO: 26796 - DNA, 362 bp, Zea mays
  unsure (1)..(362): unsure at all n locations
aacttgcattngtgttcctattgatattgtgactaaccttgtcggacccaacaagagttgtgtacctaagacccaagcctcaaattgccttgcacgtttatgcatcttggggctcaagttggattatcgaccacggatgctcaaaccatatgacgagggagaagaagatgttcacctcctacgtcaagaataatgattcccaagattcaatcatattcggtgatgggaaccaatgcaaggtgaaaggttatgccagattgcaatatcaaatgagcactctatctctaatgtgtcttaattgaatctcttagatataatttactatgtgccaggcaatatgtaatatgggatattattgtcta

SEQ ID NO: 26797 - DNA, 262 bp, Zea mays
  unsure (1)..(262): unsure at all n locations
tagcgaccttnaatctcagctttcttgggtgctgcacattttgagttgtggaagtacttgtatcactgtctccctatgatgggctgggggcaacatcagctggttggtggtgctagtttaaagatgcctcgccggatgaagactgaatatcttgaaatccctctcatagatagtatcaaaggatggcgcttggagtggtttattgttgagaaccatggaaattctcttcccctatgtcgggaagacagccggatgttcgtac

SEQ ID NO: 26798 - DNA, 115 bp, Zea mays
tgatgtgtagagcgggcttctttctaccccctctgggtgtgaatcactttattcttacatgagatgacacgcgtccctactccgtccttctataaaaacaaatgtgctacaatat

SEQ ID NO: 26799 - DNA, 469 bp, Zea mays
  unsure (1)..(469): unsure at all n locations
tactcttgattgcactttgtccatccatgggcatagattcacatttaatcacttgtgttggcactcaatcaccaaaatacttagaaatggcccaagagcacatntccctttcacttcctcctctgagcaataggaagtcctaatcnacccagggtttttcatctggtagacgaaaagaaaggtctattaatatcggggaaaaggggaaagagtgtttcttggaggtaagaggtgttttcttgttgaggcaacttttaaggtcagggctgtggtctacngccagtcctataggctctgataccacctgaagcgtcccgatcctttgggactcagatgtgattataatactagtcctangaggctagtaaccacattcattacttcaaatangtacagagtctgaataaagttattacaatacctgggatacaagctcganagtgagccgaaaaacatatagcgcagtgga

SEQ ID NO: 26800 - DNA, 203 bp, Zea mays
agcttactcctccctgtgaagggccattcatcatcgccaagattatgaagcccggaacatacaagctggccaacgatcaaagcgaggtctacagcaacgcttggaatatacaacaacttcgtcgcttctacccttaagatagttcaagacggtcatatacctcgttctctttacatacataaataaagtctaaccgtcaagga

SEQ ID NO: 26801 - DNA, 339 bp, Zea mays
  unsure (1)..(339): unsure at all n locations
tcagtagaaccttcatcaacatcaacactcttatgtgagattgtacttgaagacttaatcgtctccaagacgtctagtacatataccattctnttcctttttggagtcactaatggcccctttaggtgttttgctgtcccaacgattgctgtatgactcaaaacttctaatgttttgtggccctcagttgcttctcttacttcctcaattatgtctgtgagcggcgcttcggttttctcttttgtttctggcaacaaaatgtttgattgttctgattcaatctttggtggcacttcngcctgttctgcgatctctggcaacaanggctgacttgattag

SEQ ID NO: 26802 - DNA, 411 bp, Zea mays
  unsure (1)..(411): unsure at all n locations
catgcaagcttgatgtgtgtgatgattcaattgtagtcttaaaaaagataatgccaatttaattgctaagattgacaaattgaatgcctctctttctagccttataattgaaaatgaaaattaattgctaaggctaaggatttagatgtttgcaatgcttctatttccaatcttagagatgaaaataatactttgcatgctaagattgttgaattaaatacttgcaaaccctctacatcttccgttgagcatgttactatttgcactagatgtagagatattaatgttgatgctattcatgatcacctagctntaattaaacaacgaaatgatcacatagctcaacttaataccaagattaatgagcatgacttagaaaatgagaaatttaaatttgctagaagcatgctc

SEQ ID NO: 26803 - DNA, 402 bp, Zea mays
tctactttagatgcttacattgcagaagaattgaatgtattttgtggtctgttattggcttgcactaatgaccggaacaaatcatgctgcagagactcgctgcatctgaagagatattgcctctcccagacatgactcgagattgcagctctaagattaccatggaaatcaggaattcaatcgaaacctctttatctaaggtaagtcgctggaccactatttttttctgtgttgttgtgaacttgtgactcgccatcattgagtggttttcattgcgtgttctctatacgaatagtagcttcttcgcttcacgcctctataaactttgtccgcgtactattagttgccttcttacccccagactaagggcctggtttgttacccccatggattatataatct

SEQ ID NO: 26804 - DNA, 354 bp, Zea mays
atggatgcagcttagaatggatatgcattatattgtgtatacaatggttccataaacttcaaatgagtcatgtgtgtataatatgggcaaagacggtagacgtgtcttatgttatgtcaatgacaacttggggatcaatgatgtctaaactggaatattgtaccccatgtgtttgatcttcatgtgtgttttcatgcatttaattctgccaattttctgtacatttttatgctgtcaacaacctcgtgttatgcttgttttgtctcacgtttatgatataattatcacagctatacagtcataagcttcacggtgtgaccaagttatgcaataaacaatgccgcgttatgcatt

SEQ ID NO: 26805 - DNA, 368 bp, Zea mays
tcgctgattgtattcaaccatcatctgaagcagttttccattgtctgaggggcctcctgctaagtattgggctaaagttccggccggaacctcttaataatggcatttatgaccatttcattgggcactattggcgcttgtgccctcaggcgcaagaaccttcggacatacgcctgaagatattcttcgtgatcttgggtgcactggaacaaagcttgagcggtgactggcttcttttgaaacccttggaaactggtgatcagcatatccttcaccttctaccatgatgtgaatgttcctggccgataggagaaatactaggtttgtgcaacatttttgacggccatgaccaaagactttcccatact

SEQ ID NO: 26806 - DNA, 368 bp, Zea mays
gacttgaagaattgtagcatacatcatgagagacttattcttatgcaagagactatatgaaataactaatataaagggatagtctcatcgcaatcaatatagtgacagaggctccccctaaagacatgcatcaagtatttgaatgagttgaatggatgcatttactttaaagacaaatagggagaagcattatacatcttgatcaaggctcataaaatttgcaatacacaacttacgccttgcatttctcatgaagaatgatttataatacttacaaccacaccattgatccaagtaggtgtgggtgctattgatgtcttactttatacttgagtggccttcattggagatgctttttttttttaaac

SEQ ID NO: 26807 - DNA, 376 bp, Zea mays
tagcttgtgaacagtacaagttcaggatggaaatatcagcttcggctgatcagccgaagcccatgctgctgtgtgaagatatagcacatcacaacgtgctattgggctcgcaattatctgaagatcaagaaaaaacctcgattatgttctattcaacaataaagatgttttgcatggccagccaatgatctctgtggagtgaatcgcgatgtcattgaacattctctcaatattgacccatccttctaaacccctaagcagaggcttttgaaaatgtcttatgacaaggtcgaacgggctctcaacgatagtaaaagactcctaagtgctagagatttcatagaagtgaaatatccagaatggcctgcttcacact

SEQ ID NO: 26808 - DNA, 396 bp, Zea mays
agccttgatacatggaatatacatcttcatatcactgggtgacaggagactgatggaatatggagattctctggctgtcatcacccaaaaaaacacggaatgggcatgttcaaggattcctgggaaaatactgcgccgtcgaccgaatactggaagataaatcccagggtctggagtatgatcatatagaatgagatctgaacacggcagtcgatgtactgtccaaactccgatcctggcggactcaagatccgccacgtgtcataatacaagatattctacaggcgagtatctctacggaccaaatagaacagtgcatcagtatacatcaaccgcgagcagacgctgacgattggagacagcgcgttcttaagtatctaaggattgaggactaac

SEQ ID NO: 26809 - DNA, 376 bp, Zea mays
  unsure (1)..(376): unsure at all n locations
agcataaatacaaggtttgtnacatatacaagtaatatgcgaactgactcaagcctagctacgggtgcataggtttcaccgaaatccaaaccttcgacttgtgaatatcccttggccacaagtcgggctttgttccttggcaccacaccatgctcatcttgcttggagcggaagatccacttggttcctacaacattttgattaggacgtggactaaaatgccatacctcattcctcgtgaagatgatgaggtcctcttgcattgccaacacccaatctgaatcttttagtgcatcttccaccctgtatggctcaatagaagacacaaaaagagtaatgttccacaaacatgagcaacacgaagatcgagttatta

SEQ ID NO: 26810 - DNA, 421 bp, Zea mays
tatgagagcgaaagtggatgtgctgctacttcccacttacctggatgagcaagaagcacctgcattgagtaatgcaagagcgagataacatctcgcatgcgaattgtttgatgagatatttaaaccacaaattgaattaatcaacattctaaaagaatcacacttaagatcagaaatacttgttgatatagaactcagtagtcctaatataacccataccatctcattttctcggacaaccaccataggttctataacacttgcctgcgtcaacaaaacctgcaaaatcacttcaatgtatgcataggaacacaaagtgtaagggctctgtctccatacctctgaatgtattaaaccacatcatctgtcaatatcacttcaatgaatgcatatgactgcaatgcatattgactctggcctc

SEQ ID NO: 26811 - DNA, 305 bp, Zea mays
gccacaaagctccaatgagaattgtattgaggccatgattaaaggacattggcccggaacttaagctcaatactttgccaggaaggcgacacacaacttggaaaagctgcttcagaagatggacgagtatatcctagctgacaatgactttcgcctaaaaagggaggagacatttacgttttcatgaatgaccacgggcttcagaagaagaattcttcctaggcacgtcaagttaattaataactccactcaaagcgatgatacacgagagcaacaccaaaggccacaatactattcgcaagctt

SEQ ID NO: 26812 - DNA, 224 bp, Zea mays
cagcgccagaggagcccccaacgatgcacagacccacgtcaccggaggaaacagcacagaagcagatctgatctcacagagatatatgatggtggctgtaccacgagcccctacggtgaaaaccagagtggcgaccagattctgccgatgaacaccctaagaacaatatagtcaatctcataccgcccgattacgcagaggaatcgaaacccgtcccgtaagac

SEQ ID NO: 26813 - DNA, 365 bp, Zea mays
tgactaacgtgcaattcgaaaaagaaagaccttgtgcagcttgtcaagcaggttaacaagtgggaggagtacatcacagcaagaatgtgatgaccacctcaagacctctggagctgctgcatatggaccttttcggacccgtcacctatctgagcataggaggaagtaagtatggtttagttattgttgatgacttttcctgcttcacttgggtgttctttttgcaggataagtctaaaacccaagggaccctcaagcgcttcctcaggagagctcaaaatgagtttgagctcaaggtgaagaagataagaagcgacaacgggtacgagttcaagaaccttcaagtggaggagttccttgaggag

SEQ ID NO: 26814 - DNA, 249 bp, Zea mays
agtgtcttggacgctgcgtgtactccacattgtccagcatgaaccctatccagaagttgcttcccagtagacgatagaatgcatttcatgaagatgcctgatgccgccccttctgtatagtgtctccccaatgagtgggtagtgagccgactgtctggcgatgcgctcggccgatttttatcgtcgggctctttcattcttatattttgatatcggcctctcctgtattagagcttgacttggttgatc

SEQ ID NO: 26815 - DNA, 410 bp, Zea mays
gcatgcaactagcaccctagcacattggttcttttcctatacacggaagatgtggaccagtggcgtaccgactccaatcaccccaaacattgtctactgtgcacaatgtgcttcacgcatcccaaatgaaaaagtgtcttctggttctaaatcgaaccgatgaagtaatggatgttgccttataaccagacttgacgtattcagaacatcctattcgagtctcggatcaaaaggacaggattactcgaaggagaactcttaagttttataagatacaatggaaccaacacacggaagatgaagctacttgggaaactcaagactttttacaaaaaatttcctaggctttctagcttcatgcagattgtgagatatgtacactttgttgtaacagaaaaatcaaccccata

SEQ ID NO: 26816 - DNA, 305 bp, Zea mays
ctcagatgcaccttgcctaacatggcccgattgttattacccgccgtttaacacggggctaacgcgcccactgtgagtccaccttctgtcacgttaactgccatatatatcttcgtggctgactgacccacagccccacgcctggtggattcattgggccacgcgcggggcgcctcgttgcttgtgcattggttttaaagattaccttttgtcttctggagcaaccccaaggaggcgcgctattgtgtgcgtctgttcgctctttctgcagcgaaatctagcacacaaacttgttgacttatgga

SEQ ID NO: 26817 - DNA, 372 bp, Zea mays
  unsure (1)..(372): unsure at all n locations
actttcggcgctgncgaagaacgatctggccgacagcctggcttacaatagtttaaaggtgcgacaaataaaaattctgtatatatatatatatatttttttcggttgacaaaacctggtggcgcacatatatgtctttttgcagggcttgatacttaacaatgccctcagggcacagaaagatgccgaagacgaagggtgcactatagccctgagcaaccttcgtttcgaagtaattgaactgaggaacgaaggtcttgaaaaagataaaatattatactcattgataaataaaataaaggaagacgaagctgcttttaaaagtcaagctgaagctcagaaacgcgaaaatgaagacctttggaaacaact

SEQ ID NO: 26818 - DNA, 338 bp, Zea mays
gtgccaatacctgtcagagcaacagctcatgtcttcacagcagctacagactataccagtaacttggcctttcgcatgctggggactggatatgattgggcctttcaagaaagcccaaggaggatatacccatgtattggtggcgatcgacaaaatcactaaatggatataagtccagcccattgcttctttaacctctgctaaagccgtagaattcatacaaagcataatatttagattcgggataccaaacagtatcatcactgacttgggatccaacttcaccagttcagaattctttgacttctgcgagcaaaagagcattcagatcaagtacg

SEQ ID NO: 26819 - DNA, 219 bp, Zea mays
aggaacgactgtttcaacggaagtatacactgagtaatgctcacagctcgacccatctttatgctgatatgcagatgttattcgcactatatatggcatagtgaacaaaaattttggcatcgacattgcttatcaaattgattttcaacccaaaagtgctacttgcatatgtaaatttttttgacatctctgcatatgcgctatctaaataatagttac

SEQ ID NO: 26820 - DNA, 392 bp, Zea mays
  unsure (1)..(392): unsure at all n locations
aagggagaacacgtgatttgttttctatgncccttcaaaaagaagaccttgtgcagcttgtcaaacagggaaacaagtgggaagctcgcatcatgcccagaatgtgatgacaacatcaagacccctggagttacttcatatggaccttttcggacccgtcgcctatctaagtataggaggaagtaagtatggtcttgttatagttgatgatttttcccgcttcacttgcgtattctttttgcaggataaatctgaaacccaagggaccctcaagcgcttcctaaggagagctcaaaacgagtttgagctcaaggtgaagaagttaaggagcgacaatgggtccgagttcaagaaccttcaaatggaagagtaccttgaggaggaaggaatca

SEQ ID NO: 26821 - DNA, 370 bp, Zea mays
tgtatatgggtgtgacacccctctgcatttctctttgcagcgaacatttatgtccccaccatggcacaaacctggcagagcacgcatagtgcttataagatgtccgctttcgattggagcaaactcaaactaagactaagaagatatatgatcgaggccatcatgccttatcctcccaggtgggtaattgggtgtggcttcacattcacaccatcattgggtgtctcatctaaaggcaagcaccgatagcgttaatatgagtcgtaccggacgataagactgggcgttcgggttacccgattagtttgggtcgggtagttcgggttttagtaaattcgggtaatagaaactagtacacgatcatagcttt

SEQ ID NO: 26822 - DNA, 334 bp, Zea mays
cagatttctgaaatttcacccctttgaacaaaaccgcgcgcgttcaacctgatccttatactctaatactaatgctctcattgacaaaatcgtgtctaactaacccctctgtcacaagccaagagatggcattgggacgccagccctatacatgacaaaaccaaggatttgcctcgagctcgggctatgagacagaccagacttcagagctccaaatctttgaaaccagtaggcaaaatcctatgacccccacacaagatcggtatcttatagagaggagaagaggttttgtgcactgaccatggcgagagcaggctcgaatgaatgaccacac

SEQ ID NO: 26823 - DNA, 311 bp, Zea mays
gcccatcacacattacttcagaagacttgtattgtgaaagaaagacagcaacacatctatttcattctccatccgtttcaaattatagtgcacttagctttgactcaagtcaaactgcaatgtacattatcagattagtttcattaaattctccataatatgtgtcttcgtagtacattgatttgaacttgtagatgttaatatatattgttctgaaaacctgggcaaagctagagaagcttggcacataggacaaagtaaatgaactataatttagaaggatatgtgactacctaatagcattacggcaa

SEQ ID NO: 26824 - DNA, 414 bp, Zea mays
atcgtcgtgctgctcatcctcatttgtgctttcgctatcatttgcagtaaccacgcaacacatgtgggaatcgaaatgggaagacaaaccttttagagaggtggattcatccgttggactccatcgatcattttcttcttcttccttgcaaggggtagtatcacaaatactaaaggaagtcaaaccatagaatgaactatcatgtttggactcatgaaatttgcttttaatgctagtccaaatatcatgcgcatcatgaataggttcatcatattttgatatgaaggcacgataatcttcattgctgagagaattagttaagatgtcaaaagctagatagtttaagcgatgacatctttgatcctcctcggaattaatttttccattgacattagaggataaaatactctttgc

SEQ ID NO: 26825 - DNA, 401 bp, Zea mays
cgcttatcaagtcagttttttcacgcatttagcctcacgtcatttgaagattcctagaagaagttattgtcaaaatactgaaggctgcgcagaagtcaaacagccacacggaaatcagttctgcagatctcccgaagaggctccttcacattagctcgcgaaaatacttttgctttgtgtttatacctcgctaaggttggttgttactagtataaatatccccctatgtctatgatgtaaggtagcttatgataatctaaaacagaacccctttgtttagctatgtgctaacaaatattgagagtgatctctacccctctgctcttgtgaattccttcgcgggattgcaaaagcggcggcttcatccgctcccaattggtgctcctacttccttcgaggtc

SEQ ID NO: 26826 - DNA, 352 bp, Zea mays
ctcacagccagtccacattatttcaaggaactcacatctggcccactattatggtgttagattttgatggtgtacttctcccaaaggctattaaaattggaatatcaaatagcatggatttttatgaatgggatttcttcaacagataagtacattctcgtgaaatattattcaacaatggttaggcctatttttacatctttccattctacctcataatgagatatctttacttaatgaaataatttgtaggtaactgaaacacgtgttttcataaaaatatgtttcatcccaattctatttccttatacatacacatccacttatattttttgtgggttgttctaaaaat

SEQ ID NO: 26827 - DNA, 400 bp, Zea mays
gagctgcaacttaaaaaggactgaaagtgcttcttaacgaccctcaagaagagtctatgtagagctacctcccggttttgaagattgcgagttccctaaccatgtttataaactctcttaagcgctttatgggctctagcaagccccaagagcatggtatgaatgccttaaagatttccttatcactaatggattcaaagtcggaaaggccgatcctacactctttaccaaaacacttgaaaatgatttgtttgtatgccaaatttacagtgatgatattatatttggatctactaacgaatctacatgtgaagagtttagtaggatcatgacacaaaaattcgagatgtctatgatgggggagatgaaatatttcttaggattgcaagttaagaaactc

SEQ ID NO: 26828 - DNA, 216 bp, Zea mays
cccaacgggggggggaatttcctaatcaccgccgccctcatttggggtccccacaaaacaaaaaatccacgctgtgcttgttgtgactaaaaatacgcaccaaatagaagtcgggaggcctcttcctcccccacactgtgggggagaggggtggcaaaaaaaatttaggcccgccgggggggggggaagcttaaaaaaacggggtcttcacccgag

SEQ ID NO: 26829 - DNA, 248 bp, Zea mays
acaaatatagttaagaatctaccaataaacatttgaaaggaatgttggtcaaaaaagaatttacccaaaacaatcaccttactctttgcactatctccaaacacaatatcttgtgcttcatgtagttaattgcaatgtaagaaacatgtctttttccccggtcatgtgattagtacattcactgtcaagcacccaacttgacccaccagaggagtagaccttgaaaacaagattaagctatgctttta

SEQ ID NO: 26830 - DNA, 273 bp, Zea mays
cggctatcttatttatacagcttcatccgaggatcgcttctctatataagaccttctgcgccgaagcgtatacccaacagtagcccctttctcggtgctagatcgtttttcggaacgagcttgatccgtgaaaaaagttttttaaacttctgagcgccgaaagtcttaaaaacaccctccctgagctcggtgtcgagaaacgattcaattttcctgtgcgtagcggccccaccttgcagagttactggtcgggctctgcggtgcaccgttcaa

SEQ ID NO: 26831 - DNA, 368 bp, Zea mays
cttgtctaacatcagcacatgttagcacagcaactacagaccataccatttacctggcctttcacatgctggggactggatatgattggacctttcaagaaagctcaagggggatatactcatgtattggtggcgattgacaaattcactaaatggatatagttcaagcccattgcttctttaacctctgctaaggtcgtggaatttatactagacataatattcatattcgggataccgaacagtatcatcactgacttaggatccaacttcaccagttcataattctttgacttctgggagcaaaagagcattcatatcaagtacgcatctgtagcacatccaagagccaacgggcaggttgagcg

SEQ ID NO: 26832 - DNA, 257 bp, Zea mays
catggccatcttgtgctgggactgtatatgattggacccttcaagaaagctcaacgaagatgcactcatgtactgggtggctttgacaaattcactaagtggatagagtacaaacctattgcttatctaacttcagctaacgcagtggaatttatacacgacataataattatggtcaagaaacacaacaacatcatatacgacccgtgatccaatttcactatttcgaagtttttgattttgccaacaaaatagca

SEQ ID NO: 26833 - DNA, 305 bp, Zea mays
caagtgtcgaattccactctatcaaaatctaccaagtatagctgaccctttaacacctccttaaatgctattgaatcattacattgttctaaagacagtgacacctacatcaaggaaaagacagtggtagcccatttgacatatttgtgaaacagaaagcaaaatggatattaaagaaaccacaagaaaaacattggaaatagaatggtcaggagatatagtaattttaccaagacctttgaccaaacctttgatttcatccgcgaatgtgatcgctacggtgggatcttaggttttctcatatg

SEQ ID NO: 26834 - DNA, 227 bp, Zea mays
gcctccatcatttttggatatgcaagtacacctaatcatacatctcatggattagataaaaatattagggccactatatttacatcatatgttcagttgggcgatacctgggagtattaaaagttatgtgcgatatcgcgctcacccagagggttcaatcatggagggatacactatacaaagaagtgattgagagctgtatatattacatcagtgacggaacaatg

SEQ ID NO: 26835 - DNA, 364 bp, Zea mays
taaaaatttcagcttccttcgaaaaacaagaaattcaatcatctgatgggcagagtatcgtccacagctagggttactcgcgacggagaggaaacccgaagggccgaaactgttcaaatctctaaaggtgatgaaacgttcacggctggtagtatcggaggatgcacctgccgtggaagctgagcaagctgatgctgatgaagttgagtcataagatgattacagcgcagcgccaactaaacccagccacctggagtttgggaaatccaccattttttgaagtgacatgccgaagctgatgaatatatgctatttcagtgaaaccaagaaggagctggttcgtttctgcggggaggagattact

SEQ ID NO: 26836 - DNA, 312 bp, Zea mays
gtggctacagccccggtgaatctttgtggaggctatgtagtgagatcctgcctactcaccttggtagtgtttaagggtttgatcggcccgaggcaagagggaatcacggcttgtgggtaaagtgtgcaacctctgcagagtgttttgaaacatatatatcagccatgctcgcggttatgagcggccaagggagctccattgattagagatacttgatcagagatgtatggtttacacgtggtgatgaggaggatggttatgattatgactatggtaatggtaagcggtattctttccgtttggaaagggtac

SEQ ID NO: 26837 - DNA, 364 bp, Zea mays
  unsure (1)..(364): unsure at all n locations
ntcactcttcttcgtcacacatagtgctggacagcctctatgcaattgctagggcgaatgatacccttatccagcaactcttgcaatgcttcttcaactctgccaactcaacgggtggcattccgtaaggcctcttataaattgtggccgatcccggttgcaactcaatggcgaatacaatatcccggtccggtggcattcctggcaattcatcaggaaagacatctgcatactcacagaccactgggatcttcttcaggggtaactctgtcatagaaaaagcacatgactgataagaaccctgactaggcagaatcaaagagaaattcccgcagaaaggagaatttacttgcacgggacgact

SEQ ID NO: 26838 - DNA, 361 bp, Zea mays
gactatcattacaaatcgtacccaaaggctctttcattgttaggcgccaaacaaaaactgattgacggtgtctataccgccctcttaacatatataacctaacatggtgcatacggccactgaagaagggtgttaaaacatacaaaagtccacccgtgactgtgaatggaaatgcacccaacttgaaagttggaatgaacttgagcaagctttttgggtgtagagaggccaattaccatctcataaaggctcagttaaaacaggaaagtacttaagatatgccacaataccaacgttacttgtcggcttcatttccatataacgagaaaggttcaatcagtcacagctgacaccgaggatg

SEQ ID NO: 26839 - DNA, 329 bp, Zea mays
tgcacgtcgaggctatatagatctctgtgtcaggcgcaagaagatcgctccaacagcaagtattagtagctagaaccgctatgttgccgggcccacatggtcgggctcaatactcttgacatgtccccctttagctataaaaggggaggcatgcgacattacaacactagctcaatccttaggcttagaccccagtcatccaagacaattcaagctctcaagcaatataacacacagtggagtagggtattacgctccggtggccccaaccactctaaactcttgcgtgctcttatgttcatcccttcatctcgcaacaagcagaacgc

SEQ ID NO: 26840 - DNA, 410 bp, Zea mays
  unsure (1)..(410): unsure at all n locations
agcttatgaagattcttcatcccaacgtgggctattcggcgatgccagagccaacccatattagtcttagcaattaagcaagtgtcgagttcagctctattaaaatcaactaagtatagctgaccctctaacactcccttaaatgctactgaatcatcacttcttctaaagatagtaacacctaaatccgtaaaaagacagttgtaactcattttacatagttgagaaactgaaagcaagttgtaatctaaagaatctacaagaaaaacattggaactagaatggtcaggagatatagcaattttaccaagtcctttgaccaaaccttgaattccatctccgaatgtgatagctctttggggatcatggtttttctcataggaggagaacatccttntctccccagtcat

SEQ ID NO: 26841 - DNA, 380 bp, Zea mays
  unsure (1)..(380): unsure at all n locations
tattaanaccaccatgagtttcaatacattctatccaattatactcatgtgaagcttctatcccatttaatgccgcaatatccctgaaattactaatgtgcttcataacttttttaccaccgtttttgtgttttatttgggggattgccacctgagaaggatcggatataaaagcaccctccttaaactttgaccttcggtacttctggacatgttcactgagcatcgcacggtagtgatccttcatcattttgttactataggcatctgcatgatcatcatcgccggcaccatcaaggtgcttttttcgcttccgatgcangccatgggaagcatcatgtacaccattgtactgatccaacaaggatccttgacctaaa

SEQ ID NO: 26842 - DNA, 384 bp, Zea mays
ttttgactaactaatgttcattttgagaaagacaggaattgtatcacatggtcagcacgaaagcatgttggaatgcctcatccacccaagaacataatgacgaccgacagtccacttgagctactccacatggacctattccgcccgatcgcttacaaaagcattggcggaagtagtactgtctagttattgtggatgattattcccgcttcacttgggtattatttttgcacgaaaaatcctcaacccaagagactttaagagattcttaagacgagctccacatgagttctgattgaggattaaaaagataagaagcgataatgggacggagttcaagaactcttaaatcgaaggatttcttgaggatgagggcatcaaaca

SEQ ID NO: 26843 - DNA, 420 bp, Zea mays
  unsure (1)..(420): unsure at all n locations
cccggacctataaacgactgcagcatgcaagcttgagcaactactttcaatgatcgaagaagacacaagtatcaaagaagtcatggcgtcagtcacttgcaataaagatcaccagtatatctatgagatactggtggcatctggtcttttgcataaagaatgtagtatcacggtattacctgctcaactccaaccataaaattattcaatcaatccggagctcttcctcattcttgagcaaacaaaaccagacttatttttcgcgttccaaaatgtcagtggaactaagaaaagtcgttagacttacacagggaagcttcaccaaagacttgtgttngacctacaactgggtattcgacaggcacattatttgttacaagtagtccagttagtaactaaatgcatagtcctacaaatata

SEQ ID NO: 26844 - DNA, 396 bp, Zea mays
agctttgagctctcggaagagaatttatgcatgacattgttactctatttatagacgagaggtacaactttgtatgaaattacaagcacgcccacgaagtttacacatatgatttacaagtatcacatgggaaatatcgtcattcctccttccttcttgctgaacaagacttctggttcatcctcttttctactttggttattgggtatttttcaatcgcgagaacaaatgaagcccatccacgacttgtttacaacacatgcataatttatagatagggataagatatatacgcaaaacttatttaatttggctcattattaaatagtggtagacgatgatctttgatgatctctgaggattctatatattcaaactgatagcaatgtttcagca

SEQ ID NO: 26845 - DNA, 416 bp, Zea mays
  unsure (1)..(416): unsure at all n locations
ttatttagctcagccttcgaagtacttttgttctatcacttgtatgaagccgaaggtatgtttgtaattgcttgttatattgcaaggagtgaaataataagtgtggaagcatgaagatgagtaacatgtcttgctcgtaattgtttacatttcatccttggtaatatataagcatttgtgccccttcttcttctctcttcaattaaccttcgaagaaggattaattgaagggagaagtttatgattcgataacttgtgttggcttgtttttgatgtcctgtagcaatcaaaagcaagcgaccaactgtgtctatggccagtgccatcggtctgtaccctatgtttgtgcgtgtgaatctcagtattgcaatttgtggagagantgcttgatggttgtaagtgcaatcaacaccatt

SEQ ID NO: 26846 - DNA, 403 bp, Zea mays
gagcattgatcaatcgaatgagagattgatgtcacctccagagctggctattctagacttacagaaaggatttgatagttattgtgatgcatgtggacaaagattgggatgtgtgctcatgcaagaaagacatgtgatcgcctatgcatctcgctagttgcgaaaacatgaattgaactaccccacgcatgatttagaactagcagctgttgtgcatgcactccaaatttggagacactacattatgggaactaagtgccaagtatacacagatcataggagtgtgaagtatatattcactcagaaggatctcaaccttatgcaacgccgttggttggagcttattaacgattatgatttggagattcactatcacccaagcaaggcgaatttgtgtgcagat

SEQ ID NO: 26847 - DNA, 252 bp, Zea mays
atttagaattcatacctttctaacatccccatattgggttccttcacaacatcatttccaacaagcggtcatttgcaattcagaatgatgatgttcatcaatatttaagccttcatcctactcattagtgcattatagtcaatattacaaataatgtataaatcatctcatttatttgcattaatacataaattatattgttttttgccataatattacctgttggcatgatgtactgcacatgcctctcgt

SEQ ID NO: 26848 - DNA, 297 bp, Zea mays
ctatgtactggggaaattgcaagcactgttctctccaaaattcaaccgaaggcgcttttatcgccttcaaaaacacttgcgacagtagcgggagcccctgtgccactgacttggctaacaaatcaacatgcgcattttcccctcttggaatattcttgacagaacatcctttgaaagaagctttcagccttagaactgtgtccaaatatatttgaagctataggactctatcctcgctactcttggcactatgaccagaaatgacttgagagtgagatataacgatgggcctcctta

SEQ ID NO: 26849 - DNA, 353 bp, Zea mays
cctcagctgcaacttaaaagaggagttctggatctaactaacacttttcttgggtcatattataaactgagatggactaactgtggatcccaagaaggtaacagccattctgttctataaaggcccaaaagatgttccaaaaatcaagagtttcattggaaaggccggctattatcaaccttatattgaaggttttttcaagattggcagaccaattacaaccttgctatccaaaaaagatgaggtcaaatggactccagcatgccaagaatcatttgagatgttgaagcaaaagttgacaacaacatctgtgtttgttttaacagaagctcacaagtcattctcagtatatt

SEQ ID NO: 26850 - DNA, 227 bp, Zea mays
gaggagcacattacagcaagaatgtgatgaccacatcaagacccctggagctgctacatatggacctctttggacccatcgcctatctaagcatatgaggaagtaagtatgggttagttattggtgatgacttttcccgcttcacttgggtgttctttttgcaggataagtctgaaacccaagggatccctcagcgccttttaaggagagctcaaaacgagtttgag

SEQ ID NO: 26851 - DNA, 224 bp, Zea mays
ataagcgtaagcattgaccgataagcatgcctcatagtggatacaaactcacagacttccattggtattatgaggggcatagcagctcctgcattgattgcaaagagggctgcgaagcataacgaggtcagccaagacgatgtgcatagatatctagtgtgagctacatagcggaaccaaatttcattgcggataggatgcccatggcgccagaagaagataca

SEQ ID NO: 26852 - DNA, 256 bp, Zea mays
caagcctaactacgggcgccgaggattgacagaaaatccaaccctctacttgggagtaacccatggccacaagacaagctatgtatcttgtcaccgcaccatgcacaccttgctagtggccgaacaccacaacggttcctacacacatttcgactatgacgtggaactaacagccatacctcactactagggaaggagccgagctacatttgcataaccaccacccaatcccgagcatgaagtgctgcctctatcc

SEQ ID NO: 26853 - DNA, 260 bp, Zea mays
ctggccttgaagatagagagtatcctaaccatgtttattagctctctaaagcgctttattggctcaatgcaagtccccaagaaccatgtggattagaatgcctcaagagaatttccttaactgctaatggcttcaaagactgcaaggccgaacctactttatttactaaaacctcttgcaaatgatttgatcgtatgccaaatttatgttgatgatattatatttgggtctacatgtgaggagattagatgatcatgacc

SEQ ID NO: 26854 - DNA, 310 bp, Zea mays
gatcaaccttccggctgtgaatatagcgagcattctaaccatgtatataaactctttaaggcggtctatgggctcacgcttgcccgctaagcatgcgttgaatgccttaaagacttactcatctctaatggcttacaaaccggaaaagccgatgccgctttatttactaacacatttgccaatgataccgatggacgccacaaatatcgcgatgataatatattggggactactaacagaactacttgctaagagttttacttgacttggttcccataatcgagacgattatgatgtgggagttcttatt

SEQ ID NO: 26855 - DNA, 258 bp, Zea mays
tgcgatcatcgcaagcccatgctcttatgccatgacttatcctagcatagagtgttattgggatcccaactgtccctataacaggacaataccttgatcacgattctgtgctacaacctagatgtttttcaatgctcatctcatgatctctgccgaggcggcaaggacgctattgaacactcgctcaatgttgatacatcctttatacccaaaacgcacaagcttcgatagatgtctgatgactgagtacaaggtgct

SEQ ID NO: 26856 - DNA, 402 bp, Zea mays
agcttgacattgtttccctgttggaagccaatgtcatccttaaagcttgggcgtctaccactatagagcatgcttctagcaaaactacaattttcattttataagtcatgctcattgatgttagcattaaattgagctatgtgatcattttgttgtttaattaaagctacgtgatcatgaatagcatcaacattaatatctctacatctagtggcatatagtaacatgctcaatggaagatgtaaagggtttgcaagtattaaattcaacaatcttatcatgtaaaatgtcattttcacttctaagattggaaatggaagcattgcgaacatctaagtctttagccttagcaattaatttttcattttcaattttaacgctagaaagagaagcattcaattt

SEQ ID NO: 26857 - DNA, 377 bp, Zea mays
atctttcatttcgaaaatgctcgataaaagaattttaactttctcaatcacattgagatttgatccaaagatcaagatgtcatcaacataaaggcacagcataacagactcacccccaccataccgatagtatacacacgtgtcagattcatttacaaccaatccagctgctgtaagagtattatcaaacttttcatgccattgcttaggtgcttgttttacgccatacaatgattttatcaacctgcacaccttgttctcttgaccatccgcaatgaacccttctggctgatccatatagatctcctcatccaactctccatttaagaaagttgtcttaacatccatctgatgaatgataaaaccataagaggctg

SEQ ID NO: 26858 - DNA, 408 bp, Zea mays
atagaatagttaagcttgactatagctaggtgtgcgtgctgctattgttgttggcactgttggcttcgctaatactgctgaatctattggaccgaagctataaatacttgcataagatgcatctgcgctgcgatgaactcatccatcgtgggatcgagtgggggtggtggtaactgttgtccacgctggatctggggattattgggacctgatcgagtgttcaccacctgttttgctagaaagtgcaatctcggggtaagtgaggagtagactagattctaaggcgaatagcttattattaatgttacaggtatggttatatagtgtgatgctcttatgggcatcattccgtaggaccattgctctcagagcaaagatcaactcatacatttctaacaacaccttcac

SEQ ID NO: 26859 - DNA, 319 bp, Zea mays
tgatggggtaaacttcacacctacccgtctggttatatactgccacaggtgggaaagtaaatcgtcaagtcttccgcaccggacaaacagtcaccccgcacccactgaacggtgggccacagagcccgaaaaggtgaatcgtcaagacgcgtgtaactgttgcatggcggggccacctcgcgctcggattatattaatcgtttgttggcaacgagctcacggaaggtgtttttcggatcttcggcatcccgaagtctaagagactttttcacggatcaagctcgttacgtaatatgatctaacaccgcgaaggggctac

SEQ ID NO: 26860 - DNA, 352 bp, Zea mays
cagtcttagcgttaatctcagtcttagttagtcttatatagacagggttgtgcgctatattctgtgcatttatgtttgtcatgatgaactatgtttgggttggactctttgtaatgattgtcaccagagtgtgggtattccctgcattatggtttacatattatgttaatggagttagtcatatagttgggaaaccttgtattccactttgctcttgatctgagaagctgagtggtctgtgttggagatcagtgaagatgcttacctgctcagcgctgtcgaagaatactatactcttttcttatgctgcaagatttgccacatcagttcttgatgtgtggatgcattctgc

SEQ ID NO: 26861 - DNA, 407 bp, Zea mays
cttccctttaacccccgaacgcgattcacccttcattggtgaaactttcaaggagacataatcgtctaccacaaaacataaggattgtcgtcgtcggtctgcataactcttttgtcgagtctgagctttcttcatattaagaataattttctgaatcttttcttcgacctcttttaccatatcaggcctaaagaaatatctttcttcaagttcaaaccaattaacggaattcgacaccgtctgccatataaagctttaaaaggtgccatcctgatactttcttgataactattgttatacgagaattccgcttagggcaaacattcatcccatttctgtgagaaattcagaacacatgcccgcagcatatcttccagtatttgggttaccctctcaggctgtccact

SEQ ID NO: 26862 - DNA, 182 bp, Zea mays
aactactgtattatgtatgccgatttattgaccctaagggacaaaggtatagagccccagaacctaggcgagccattagcaggagggattcgatgtctcttcatccacagatggacccctcacgctttaaatcgccctttcccaacagctttagtgctatggcaagaaaaagaagactcaaa

SEQ ID NO: 26863 - DNA, 283 bp, Zea mays
atgagcctgccccagagggcaccctctacacgctatggggtcatctggttggtaactatgactactggaaagaatatctcctttcacagcaataataataaaaggatatgctcaggagacgacattcgtggaagaataagagagagacgacaagacacaaaaaacgggtctgaaactgtacaaaccggcttataccacctaagctttgtgagcgagacatagcgtagaactaactcctatacccatagactgaagaggctgcggaggtgcttatagccaccag

SEQ ID NO: 26864 - DNA, 341 bp, Zea mays
  unsure (1)..(341): unsure at all n locations
gtggctcagagcttagaacctagcancatgaaacacacaacagaagcgtgaacaacggtaccacatgtgcgtgtgcaaggaccctacatcaaaaccaagtggtctcacaatcccattaaattttcctatgaggatatttggatcattgactacccacatagagacgccctggaaatctcgtgtatcaaaaatacaggcttcgtagcccataatgttatactgaacacaagcccggacaaacaagagatatgtgatggcntataaggaaaagcaggacccagaagtaaagattcatgactcagtctttcctctatatgctgtggaagacaacaactgaagct

SEQ ID NO: 26865 - DNA, 288 bp, Zea mays
tgagcagggctgttcgctggtaggattcatccagaaaatgtccgaattggctcttccaactatggagacttttgtagagggataaaacttcttacttactgtacaacctcatgatttttggacgagtggtttgtgagatatcaaactttgacgttaactacgctgctgcctgaaacagattcagtcaggtatcttgccacatgtattagaacttatagatggcgtaacttaaaaatccatcgcataccggaaaagtagggcattgtgtgtataaacttctagataata

SEQ ID NO: 26866 - DNA, 365 bp, Zea mays
gctggacatccacaaggcgaagtgcttgggcgaatgaatacccttatccagcaactcttgcaactgcttcttcaactctgccaactcagcgggtggcattcggtagggcctcttggaaattggggccgatcccgggtgcaactctatggcgaattcaatatcccggtccggtggcattcctggcaattcatcaggaaagacatctgcatactcacagaccactgggatcttcttcaggggtatctccgtcatagagaaagcacatgactgataagaaccctgactatgcagaatcaaagtgaaattcccgcagaatggaaattaacttccacggtacgactggctacatcaagcacaactttgtg

SEQ ID NO: 26867 - DNA, 315 bp, Zea mays
cactataaagcatactacgagcaacattatattttccattctctacataacgctcggcaattttatcactaagctgagctatgagagcatattgtttattaattaaagcttagtgaacatgaataccatcaacattaatatctctacatctagtgcgaatagagacatgctcaacggtcgatgtacaggatttgcaagtatttaactcaacaatcttaaattgtaaaatagcagtctcgactataagataggaaatagtagcatgagcaacatttaaatcattaaccttagcaactaagaaagcattttctatct

SEQ ID NO: 26868 - DNA, 354 bp, Zea mays
  unsure (1)..(354): unsure at all n locations
agtgcctttcttaatggaccaatcaacgaagaggtctatgttgatcaaccttccggctttgaagacagcgaggatcctaaccatgtctataggctctctaaggcgctttatgggctcaagcaagccccaagagcatggtatgaatgccttagagatttccttatcactaatggcttcagagttggaaaagccgatcctacactctttactaaaactcttgaaaatgacttgttcgtatgccaanattatgttgatgatattatatttgggtctacttaccagtctacatgtgaagaattaataggatcatgacacagaaattcgagatgctatgatgggggagttgaatatttc

SEQ ID NO: 26869 - DNA, 402 bp, Zea mays
  unsure (1)..(402): unsure at all n locations
agcttgcttacttggtaagatgaccatagcgcctttcacgggtntaccggagaggacattagatttattggaactcatacatactgatgtgtgcggaccaatgaatacgacagctaggggaagattccaatacttcataacctttactgatgattttagtagatatgggtatgtctacttaatgaaacacaagtctgaatccttagaaaagttcaaaaagtttcataatgaagtacaaaatcaccgtggcaagaaaattaaagcactgcgatcagatcgtggaggtgaatatttgagtcatgagtttagcagtcatctaaagagttgggaaatgttacacagcttacgaccgctggaacgcctcagaggaatggcgtgtttgagcgacctaatcggacttta

SEQ ID NO: 26870 - DNA, 341 bp, Zea mays
  unsure (1)..(341): unsure at all n locations
tgacattgtctccatgttggaaacttgaatggaaatgtgcccttgggcaatttctataagtatttnggggattagatgcccaacacatattaattgagtccttatgtgctaaatgtgggaaaagagcaaatcaaagtacaaggtatgtttctagacttagtatattattttgtatactaatgtgtttgtctaagtgctagaaacagggcccagaaaataagaaatgcaatggaaaagtcttggctgtgtgcagccaaacttcagctcggtctggcacaccggacagtgttcggtgccccaagcttggcgacggtgaaacaactgctctcgggaatcgacag

SEQ ID NO: 26871 - DNA, 407 bp, Zea mays
agcttctaaagggagagcacattttatgactaaccaatgctcattttgagaaagacaggatttgtagcgcatgccaagcagggaagcaagttggcactcatcatccacacaagaacataatgacgactgacaggccactggagctcctacacatggatctattcggcccgatcgcttacataagcatcggcgggagtaagtactgtctagttattgtggatgattattctcgcttcacttgggtattctttttacaggaaaaatctcaaacccaagagactttaaaaggattcttgagacgggctcaaaatgagttcggcttaaggatcaagaaaataagaagcgacaatgggacggagttcaagaactctcaaattgaaagcttccttgaggaggagggcatcaag

SEQ ID NO: 26872 - DNA, 362 bp, Zea mays
  unsure (1)..(362): unsure at all n locations
ctatcanatggacgtgaagagagcctttctcttcggaccaatcaaggaagagggttatgttgagcaacctcctggctttgaagatagtgagtaccctaaccatgtctataggctctctaatgcgctttataagctcaagcaagccccaagaacatggtatgaatgcctaagagatttctttattgctaatggcttcaaagtcagcaaagccgatcctactttattcactaaaactcttgacaatgatttgtttgtatgccaaatttatggtgatgatatcataattgggtctactaacgaatctacatgtgaagaatttaataggatcatgacaccaaaaatctagatgtctatgatggggg

SEQ ID NO: 26873 - DNA, 315 bp, Zea mays
ctaaaggcctaacattgtttgccgtcaagttaaactttatttgcacaaataacattgccgagtgctaagctcttcttaaagccttcagagactaaacgcattgggaataagaatggccatcctcacaactgattcacaagttatttctggccacgtggacaatagcagcaaggctcgggatccgaaacttgaaaataattggatgcagttcgaaaattggaagctccttttgagggactttctgtaaaaaatatcccaacggggaaaatgagcatgcggatttgctaccttagtagaggcacaggggctcccttt

SEQ ID NO: 26874 - DNA, 354 bp, Zea mays
ggaaatatatgtaactgagtttactttgaagataatctactttcctctgcgaaaaatgcttgggggacaaataaactttgagccatggggaaaacaccttccctttttgcgacacagcgaacataaaatgccttcttttggaccgaacatgtatgtcgcttgctgagaagatcctaggtcgctaaggaatgttatgaaaccaaatgcatgatgtatggatcgtgcaaataatgtcaaatcctattcgagccctatccccttgagatgactcgaacttctttgccgctattttacgcttgccgttatttttcgggatcagcctgactttcgcttgagcctccctagagctttttc

SEQ ID NO: 26875 - DNA, 321 bp, Zea mays
gtgacacttaaaactcaaggtcagctccatgtccgtgcgctcgcttagtttctgctgcccgtctttcggtctccgtggcaccgaagaaggcaagaacacttgctgtcgggggccgtaggactcgatttggctccagattctatacaaatcacttgctagaatttatctatacaaactaaggtatcttaaacttaacttattgcttaagcaatggaactggcctaccatatactaagatatctgcataatgctgctctatctcattcctttatggacttctctaaatgaaactctaccatgccgcgttaacaatgttgtatg

SEQ ID NO: 26876 - DNA, 371 bp, Zea mays
  unsure (1)..(371): unsure at all n locations
cttcatccccacatgtgctaagcggcgatgccacagccagcccatgctagtattaactattaaacatgcctctagaccggcctcttctttcgcaaaatcaactaaataaaggttgccgtctaatacacccttaaaggctagtgaaccatcacttcttctaaagacagacacatctacatttgtaaatagacagttataccccatgttgcataattgactaacagatagcanattataaccaagagactctactaaaaacacatttgagatagagtgctcattaaaaattgcaattttacctaacccttttaccttgccttgattcccatcaccgaatacaattgaatcttgggaatccttattcttgacgt

SEQ ID NO: 26877 - DNA, 416 bp, Zea mays
gcataaatgcttactaaagctcattctcactggatagtaggctgtacgtagagatggcaacagggatgtccctggcagggagtggtaccccgtccccggtgtgccctttatttaccccattccccaccccccatacccggcttggggctggctttttcctatccccaatagcagtcacgcgtccccggcggttaacgcaccctgattgcattgagaaaatttagaagcttgcagctacagcagccagcagaatcatgttcagattagcagaactgaagacaaaatcaaacactagatccttcaaggaaaaaaagctcattaaccaattacatgttacattccaaaaagaagatctcaaatacttatcctgcctatagagcttagaccttataagtagagagcaattggcatggtgc

SEQ ID NO: 26878 - DNA, 412 bp, Zea mays
  unsure (1)..(412): unsure at all n locations
tgcagctgcaagctggaaatgaactacgtgtcactacaatcattaatggcaaaattcttacacctagtacaaaattcaacatgttctacacaagaaatggatttatttgctacttctaatttagcatttaaatcattgttgacacctttaaaataaaaatggtttcatgacaagtagatagttcaaaagaaagcatttcatttcttttaacttctaaagcataagatttttgtgcctcaacaaatttatcatgctcttcatacaacaaatcctcttgcttttctaaaagtatattcttttcattcaaggcatcaattaactcattaattntgtctatcttagatctatctaagcccttgaacaaacatgaataatctacttcatcctcatcactagattcttcctcacttga

SEQ ID NO: 26879 - DNA, 461 bp, Zea mays
tgtgaagatgctttataccaacatgggctattcggtgatgccagagccaacccatgttagtcttagcaattaagcaagtatcgagttcagctctattgaaatcaactaagtatagctgaccctctaatactcccttaaaagctactgaatcatcacttcttctaaagacattaacacacgtatccgtaaaaagacagttgtaacccattttgcataattgagaaacagacagcaagttgttatctaaggaatctacaagaaaaacattggaaatggagtggtcaggtgatatcgcaattttacccaatcctttgaccaaaccttaatttccatccccaaatgtgatagctcgctggagatcttgggttttctcgaaagaggagaacattcttttctcacaattcatatgttagtgcacccgctgtcaagatccaacttgacccccaatgcataacctacaa

SEQ ID NO: 26880 - DNA, 313 bp, Zea mays
ttcgccttcgagtgcgaatgctgatatgtttgaatctgccgtttaatgccagcaggccttcggcgctatctgctcttttagtggaacgagatacttagtacaagagcatatcgccttcatggtttggccgcttgcggagaaatgggaaatgccgcaggaaaccataccagaggccgactaacgtggacttatcacgttgaagtacacttttcaatctggagattagttctttgagccagattatgactggttaaaaagcatagaagaattaagtgatgaactgcttggggcttattcgaaggccgaagacact

SEQ ID NO: 26881 - DNA, 359 bp, Zea mays
ctgccacaacagtggctgctctattaatggattgccttgaatctgtgcatttcctttggatcattaggaaacatattcgactgccatggacagcaataggcccttgctgccaaagaatcttcatgcatcattaagcatggacgaagtatcacttcgaaagcattaagtgtccctcgacacatgatcgccatatacgggtactccatgtcaacaatgcctaagacaacctgctcatccttgtgttatggacgaagcccgacgttactggcattgcgatttcgccgagtgctaaaatcatctctttcctcgaacccacacagagggcgtggagcctcctgcaccctatcctctaattcatg

SEQ ID NO: 26882 - DNA, 249 bp, Zea mays
aacatagttagctccaaaacaatgacgaagcgatgggaccatacccttgtcaccaatattctctatgatttgcgatatgcccgaaatagaggccaaatcgaactttctttgcaaactgagttaatagccaaaataaagtgttgaaacacatagtagggggtatgaaactcattcaacacttaaacctcgtgttatgttggattgctcaatattgcacttttggcccttgcatatagcttatatggactt

SEQ ID NO: 26883 - DNA, 249 bp, Zea mays
caccactctccaattgagatcgaacagatgatatttgtacatatatacctaagataaccattacggcctgatccataaattacacatgtaaaggagataacaaacataagtgcttaaaatatcgagctaagacaacacttgcaattggaaaggatacgatatgactaatggccaaataggtaaaatgacactcctcaactgaggtgcgagagaagcaatctttaaatatcaggcatgaagaaaagtacc

SEQ ID NO: 26884 - DNA, 393 bp, Zea mays
gcatgcatgccagcctatcctcttcagttaacttcattttatcaacagatctcttgtcttgagacatcttatcttcgaaaccgacgataatatgtccttaaattccaagcttaaaaaatttaagagactaaacaattgttgtgaacgcacgagctaagaatatcagccaagcaaaactcgcggtaccaaatgtgcttggggagaagtcttatttatacgcccagcacgcttcaacttggtaggccccgcctgtcatagattgattgctattttagcaaagggaaggtgtttggaccttcggcttatggccttcatccatattgcaatctgaaattgttattctaacaaataaatcttgcgaggtgcaattggtggtggccttctccttcccaa

SEQ ID NO: 26885 - DNA, 403 bp, Zea mays
agcttccactacatctgcatcggtattaattattccttgcctaactcagtacttgaattcatatctttcttgttaaatgccttgagatatcttcggttttggcgctcaatgccaaagaggggaaattaataagccaaagcaaaaggaccacaccaccaccctattttaaaaaacattttatcttccaaaattggggcgatcgcatttgcgaaaaccctcttgatagctaagaagagaataactatctatgccaaaagggagaacttattcatggagagttttaatttggccaaaagagaaaagcattcgaaaaagggagaattattcaaaattagaaaatggcttttaaaattccattcttacaccttaagccaattgccaatatttttttaaaagatcttac

SEQ ID NO: 26886 - DNA, 178 bp, Zea mays
ttgctctttgtaccggggaaaataaaaagctgttccatattatttttagaaagacaacgatcaagaaatgtgacttaaacacagtttcctataaatcgggtttgatatttcctataatcgggttggagtttgacgtcattaccaccacggggactactagttgcctattgtctttatc

SEQ ID NO: 26887 - DNA, 410 bp, Zea mays
ttatcttgttgatttcacaacaagtaaagttgttcctgagacttgattaccaacacagtccgacaagggttggctatggcatcagcgtctaactcatgtcggtatgaggaattaggcccaacttcaaaaggataatcacatcattggactaacacatgttgtatttgagaaagataggggatgaggcgcatgccaagcaggaaagcaacatggagtcccacattaatcacagaatgtggtcacaacaaagatgccattggagcttcttcacatggacctcttcagacctgtggcttacattaacattgagggtagacagaccgggttaaacattggtgatgacatttctcgcttaacctggttttcttcttgatgataaagggaaactcaagaatattgataaattcctg

SEQ ID NO: 26888 - DNA, 402 bp, Zea mays
  unsure (1)..(402): unsure at all n locations
accgcagcatgcaacctgcaaggcaaagacatttatattccanctgcataacataagtaaacagagcaataccaccactagcacatgggaagggaacaaaattacatgagatggaacatgttcactaccccggggatcagctcgtactcgcgcgctaacctcctgcgcccggcgtgtggctatctcccttcgcgcgacgaccatgggcgacccggccggcacccgtaaaccactaatgccggtgccttccccttttcccgctagccgcaatgtggaggtcgtgacatcgaacgcccccgctgcgtgcgccactggaagggcaggagcagggccaaatactatagcatggtgaggagctggcgtaacacgagcagtgccaatcttgcaatcgctgcatctgcc

SEQ ID NO: 26889 - DNA, 362 bp, Zea mays
gcatgtcaagcaagatagcaagatgactcttaccatccacacaagaacatcatgatgaccgacaagccggttgagctacttacatggatttatacggcccgatagtgtacataaacatcgaccggagtaagtattgtcttgcaaatagtggatgactattctcgcttcactggggtattctttttataggaaaaatctcaaacccaagaaactttaaagggattcttgagacgggctcaaaatgatgttggattaaggatcaagaaattaagaaactactaccggacggagtttaataacttctaaattgaacgctctcttgatgatgaaggcataaagcatgagctctcttctacctcaca

SEQ ID NO: 26890 - DNA, 375 bp, Zea mays
taacttatgctcattttgagaaagataggacttggagcgcatgccaagcaggatagcaagtcggtgttcatcatccacacaagaacatcatgacgactgacaggccactggaactcctacacatggatctattcggcccgatagcttacataagcatcagcgggagtaagtaatgtctagttattgaggatgactatactcgcttcacttgggtattctttttgcacgataaatctcatacccaatataccttaaagggattcttgagacgggctcaaaatgagttccgcttatggatcaagaaaataagaagcgacaatgggacggagttcaagaactctcaaattgaaggcttccttgaagaggaaggcatca

SEQ ID NO: 26891 - DNA, 264 bp, Zea mays
gcagctgaaatggagactgtcacctgatacttggcgttatctggacataacggacctgtgcgaatcgtatccggtacattccacacataccaccgagcaatatgtgaacccgggcgctgagagcgactactacatttttgcgtgcgctcactgaccctttccaggaggaaaactgtcgtgccatcggcattgatgaatctggctacgctaaccccttgttgtcgcacggaccatctcacaactattatacctgacagggattct

SEQ ID NO: 26892 - DNA, 412 bp, Zea mays
tgcagcatgcaagctagtcctacacgagaacatcacactccttgctccttctctggggctcgcctcgtgcattgccctggctgtcagtaaaaatgctctgtatttgcatggtctcacttatctgagcaacagcatcatgttcctttacaggagccgcgtgtggcacttccacactgttgtgttgctccacagatgggccactctctacgtgcgtggagacagacagcactttgaccctttcttggacatccttcaaccgctccttacatgagcgcagaagagatggctcgatctcgcatacctgtaaaacattattcacagttacatgtagtacaaataacaataaaagcttgatcggttaatcccgtcacctatggatcggacgggattggaaaaatattgataagaaatt

SEQ ID NO: 26893 - DNA, 230 bp, Zea mays
aaatgctaatgaaccatcaattcttctaaagacagacacatctacacttggtaatagtcaattatatccccataatacataattggctgacagatagtagattatatccaagagactcaacctaagacacattaaagatagtgtgctcattggatattgcaatcttgcctaacctttcacctcgccgtgtgtcccatcaccggatatgattggattttgggaatcctatt

SEQ ID NO: 26894 - DNA, 380 bp, Zea mays
cagcttctaaagggagaacacattttgtgactaactaatgttcattttgagatagacaggatatgttgcgcatgtcaagcagggaagcaacgtggtgttcatcatccacataagaacatcatgacgaccgacaggccacttcagctcctacacatagacctattcggcctgatagcttacataagcatcggcgggagtaagtactgtctaattattgcggatgattattcttgcttcacttgggtattctttttacaggtaaaatctcatacccaagagaccttatagggattcttgagacaagctcaaaatgaagttggcttaaggatcaagaaaattagaagcgacaacgggacgaagttcaagaactttcatattga

SEQ ID NO: 26895 - DNA, 343 bp, Zea mays
tcgattcccacactagaaacgggctctcttgttgtctaagaacaagctggctgacagcttagcgtacaatactttaagggaaatttggatccataccattaacagatcaccactttggatccataccattactatctcacttacatgtgtgtccacattagtcaatgacatgtggggtgcatggtatatattcaaagtttggatcttttaatgggatacattcaatagttccatagtttaaaggtgaaacaatgaaaactctgagttattcttgtaaccaaagcttttatttgctttaacttattaacaacacattattattagggtcttatcttatcattgc

SEQ ID NO: 26896 - DNA, 268 bp, Zea mays
taaaaaatttccactcacgaggagccagctttgaaaaattcaccccctcagctgaagatctacccaagaccttctaacatatcgagggtgagattgacgatctcgaccaattcataactgggcacggtgacttctgtgcctgggtggcttctcaaggcactgctgtagctttcctgaaagctggctgcgatcatggaaagagtgtcaataggccaaatttcactttaacaccttcaatcctggatgacattcctgatctcgcccgaag

SEQ ID NO: 26897 - DNA, 400 bp, Zea mays
agcttataaaaatctggtatgaatctgcgataatacccagctagtccaagaaaactccggacttggtgaacagtggttgggggttttcactccagaatatctctgaccttgctaggatctaccgcaattcctttagctgataacacgtgccccaaaaattgaatttcttccaaccagaacgcgcacttgctgaacttggcatacaactgatgttccctcaggcgcgtcaatacaatccgtagatgctgagcatggtcctcttcattcttagaatatatcaagatatcgtcgatgaagaccaccacgaacttgtccaattcaggcatgaacaccgagttcatcatatatgtgaagtgggcatgagcatttgtgagcccgaaagacattaccaggtattcaa

SEQ ID NO: 26898 - DNA, 360 bp, Zea mays
agaagaataattaatggctaagattgtcgactccacgattgccggcgaaccgatggcggatatcgagtagtggatgaagacacaacagaaatagataatcacctacgacgacgggcgtggtggtacggtgggtttgttttgcatcgcttatcagaatcgttgcaccgaaaccgttctgctagctcctcgatctctagtctcagtagagaccggccgagagccgggcatctgatcggatcgaacggaccatgtgttagcaattaattcaggaatctggagcagtggtaggacaggctcttgaacagtaacccaacataatagcttgcacgcacgcatgcatggcaagcgggcctggcgcct

SEQ ID NO: 26899 - DNA, 402 bp, Zea mays
  unsure (1)..(402): unsure at all n locations
tctcgggacacaccgacgctgactangtaggctgcctcgacacgtgccggtgcacctccggctatgccgagttcctgggcaccaacctcgtatcctatgccgacaagcggcagcccgtcgtctcccgctctagcgtataggccgagtaccgcggagtggccaacggcgtggcagaggcctactggatgcgccaacttctccacgagctccacaacccctttagtgcgccacactcgtctactgcgacaacgtcagcgccgtctacctctccaccaattcagtgcaacatcatcgtatgaagcatgtggagatcgacctgtacttcatttgggagtgtgtcgcttcatcctccaagggacatttgggttctcagcgttcccacaacgctgtactttgtcgaca

SEQ ID NO: 26900 - DNA, 283 bp, Zea mays
ttcttttgagaaagacccgatgtgtatcgcatataagactggaagcgcgttggggctcacctattccacaagaacatcctgaggaccgacaggccacttgagctatctccaccttgactctatacgaactccacacttacataagcatcatcgggagtgaaaactgactagatattggggatgacttttctcgctctactaggggggtctttttgcatgataaatattagacccaagggaccttaaatggattctttgaacgggctcctaatgagttcggctt

SEQ ID NO: 26901 - DNA, 412 bp, Zea mays
aagcttatgaagatacttcatcccaacatgggctagtcggcggtgccagagccaacccatgttagtcttagcaattaagcaagtggcgaggtcgactctatcaaaatctactaactatagctgaccctctaacactcccttaaatgctactgaagcatcacttcttctaaagaaagtaacacctatattcgtaaaaagacagttgtagcccattttgcataattgagaaaccgacagcaagttataatctaaagaatctaccagaaaaacattggaaatagaatggtcaggtgatatagcaattttacccaatcctttgaccaaaccttgatttccatcctcgaatgtgataactctttggggatctttggttttctcataagaggagaacatcttcttctcccctgtcatg

SEQ ID NO: 26902 - DNA, 202 bp, Zea mays
tgcccttgaagcctggaataagctacagaatatacctatccatctgctcactcaaaaggactgaccgtgagaatcaaagtactgccccttagtcaaagtcaacacgaaaagatgacacaacgagttattccatacacataagccaggttcttggaaccaaagaccacaaacattagggttattgaccccaccactcacccat

SEQ ID NO: 26903 - DNA, 363 bp, Zea mays
ttcagcttccgccaataaaccttcggttgcctggagctcaaagttcttgtttttgaaagcatctgattgctcctttattctgctttccaaattttcaattataacttcgcgctttctatcttcaaaaacttgctgcatttgcaaggctttgctcaacaacatactctgcacgaaaacaaccttcgtcagacatgtttttattattagaaacaataaaagttaacggacaagttttataccttgcagttggtactacataaactaccaacgacatgttgtccattgtagcggctgatgcctgttcataacttcgggaaaccgagcctcgttggactgagtactgataactctggctcctgtttg

SEQ ID NO: 26904 - DNA, 359 bp, Zea mays
aaccattattttcttgtctaacgcttagaggaataaacggatctcacggagggccattattttccattaaacgcaatggagggatggatcagagccgccggtgttcctttttttcacccgaagcaacattggcgagtgaaggctggccggcgctctggtaatgacggcggtttgatcctcacccggtgaacatgagtagattcaatatcataccatttgtttgtgtagggaatcgaaggttgtcgcgtaggacaagtcaactaggccgaaggacctgccggcttgacgaagaagtggtacagatccgatctcgtatcaacatcgaagaagagcatgctgataacgtgttgagaactatg

SEQ ID NO: 26905 - DNA, 310 bp, Zea mays
tgagataagaaagagaaatgtggtactcaatttgatcattggatcacttgagaggggtcgagtgcaacccatctccattgggacgacacaacgtggagtatgcaagcattttacgcttgaccgaaccacgggataaaaaatccatgtgccacttgtctaagttaatttaccttattgcgattctactctctctagcctttaacttaacttacaattttgctctaaagttaatactcaccttgtgagagcaattaagtgaaaaagttctcttctctcatacttcttattcgaacttggttttgatcttact

SEQ ID NO: 26906 - DNA, 387 bp, Zea mays
  unsure (1)..(387): unsure at all n locations
tagcatgtaagacgtttgctatccctacgtctatctgtgaaagacactaattacagccctggcgttgactctaaggcccaaaaataagctggggcaagagttactttggatacataggatgcaccacatactcatcctgactaccccattgatatcacaagatggacatattccaataagaggttctctatggctgagtattcctcccacaggatagttaaccaattgactcttccatgtgataccaattatcagtatttccatactcaattgcaatttgatgttttctaaggaactcttatggaccaccaaattcccataagcatcagcgtgattgactaangaatacatttattgggtcacttctgttcatggaacggcttaaat

SEQ ID NO: 26907 - DNA, 384 bp, Zea mays
  unsure (1)..(384): unsure at all n locations
gggtcatggtgaaccttnggccgtaagagcagccgccattctcatttcaccatctaggattacaccctgctatgcagcaaggcttgaattcaactgcacaaataacattgtggaatactaagcccttctcttggggcttcaaaagcttaaggcaatgggaataagaagggcaattctttaaaccgactcacaagtcattttgggtcacgttgacaaaagtagtacagcaagagacctgaagctcgagaagtatctggacactgtccgaatgatggaagcctctttcgaaagcttctctgtaaagaatatcccaagaggtgaaaatgaacatgcagacttattagctaagtcagcaacacaggggcttccgttacctttggaagt

SEQ ID NO: 26908 - DNA, 251 bp, Zea mays
cagcttcgcactctacggtacaggcggtccttgtccaagagaagctctgagggcaaacccataagcacgccctagtatacttcgtctgcgaagtccttagttccatcaataataactatacacgaattgggagaatgacgttggactgtggttattgaaggcctctcaccaaatgcttcctacatatattttcaagcataccatataattggttcttcttcccaggctttgaaggatattatgagaaataa

SEQ ID NO: 26909 - DNA, 411 bp, Zea mays
gcttatttaacatggatcagagatggtattatatatattatccttaagcatgaaacaaaccaacaatatcctaaagcatattcgaaactcttgctacaaataaccaaggtaatcatccattctttatttaatcctaactaagtaccatttcccacaagttgataagaatggatttataacaccaactaaaaagacttagtgttactaactttcataagaaggtgcatatcatagcatttacataaatatatttataacttatgcattgcattcgttagattgcaaccttgcgaacagagagtacatgttgattcaggctcaagggactgagcaaggagaagcccatgagctaactccggaacctatcatcgaagaactccccgctgcacaagcatctgaaggcaagccccg

SEQ ID NO: 26910 - DNA, 307 bp, Zea mays
atcattgcagggcctcaggcactacaactttctgacttgcacgggaccgcgatccaaaggtatcttcctgcaaatataaccatgatgaagaatcgcgtgaaaagcattgatggtgccaagaccacaaattgccttgaaagggaattccatgttatcaacgacaaacacaacttgctcatatctcgcgtggtcgatgaatccgaaagacaccgacatggtgaacatgcccagtgctcctatcacgcctcctccgaagccacagagaggaggcgtaacatcatggatcataactcaggctcttgcatcg

SEQ ID NO: 26911 - DNA, 413 bp, Zea mays
  unsure (1)..(413): unsure at all n locations
agcttgacatcaccatnttataattaagtaaaatttatgagatcaagaatattttactcattcctcaacatacaaaagcgggttcgtttaaaggctttgtgaaaatatccgctaattgatcttccgatctcactccttctaaaattatatctcctttagcaacatggtctctaaggaagtgatgacgaatatcaatgtgcttggtgcgagagtgttgtacacgattattagcaattttaacagcactatcgttatcacacaacagaggtacattttctagaactacaccatagtctagaagagtttgtttcatataaagaatttgtgtgcaacaagcacccgcggcaatgtattccgcttcngcggttgacaaggcaacactgttttgcttcttagaagtccatgaaattagt

SEQ ID NO: 26912 - DNA, 162 bp, Zea mays
tcaatcacattgggaactgaacccgagatcaagatgtcgtcatcatataagctcagcttaacagactcacccccaccatacccgttatacacacatgtgtcttattcatttacaacaaagccagcagctgtaaaagattaatcaaactttttatgccatcgc

SEQ ID NO: 26913 - DNA, 418 bp, Zea mays
  unsure (1)..(418): unsure at all n locations
cttcagcttggcatttattgctgactgtcccgacaatgatagngatcacgatcaagggaacatgaggaagaataagaagaactcttagaaggccaagggcgaagcacatctagaccatgagtgggattcggattgctcctcttcccactccgacaatgaaggactcgcccccaccgccttcaacaagttatccctttttcccaacgagcgtcacacatgccttatggcaagggagaagaaggtatgtactccaaactctacttatgcttcttccagtgaggacgaatctagtgatgaggatgaaatagattattcatgtttatttaagggcctagatagaaccaaggtagataaaattaatgaattgattgatgccttgaatgataaaaataggcttttagaaaagcaagaggatttg

SEQ ID NO: 26914 - DNA, 350 bp, Zea mays
gatccacaatgacagcgagcgagtatacaacgggtatttgcctaccagctttaagaaactcgggtttcataggcacaacaacatctctcatcggctcatcattttcacaagcaattaaatgtctatcaattgttgaaatatgatgcaacattgacagagatgtagggttataaacaccagacaatgcaacaatagactcatgaaacaacttatgaaaagctaacaattttttcagcaataatccagtgactgttgagtagtaaaggagtaccatcattatccaaaagatactgagttttgatgaaaacagagaaggtgctacgatgaggcagctcttactaaacataatg

SEQ ID NO: 26915 - DNA, 363 bp, Zea mays
atagagccacaggctgcaaacgcgtgcctttgctcgtatgcgtctctgactaccaccttatctggctaaagaaggaagatgtgaaaaaaacaaatttacaaaaccatttggtacatattgcttgaactgaatgcccaagacataataaatgcaatctcatccttcacatacctgaataatcaaagtccattcaactggttctaaaaattccacttagccttgttgccactcaaagaggaaccagtgccaccgtctccactgatgaaggcaagagaggcatcctctatgccttggacttcctgaggtactttttgtgcatccattgacaatttcctcttgaacttgtgttgctgacatcgactg

SEQ ID NO: 26916 - DNA, 390 bp, Zea mays
cttcatccccacatgtgctaaacggcgatgccacagccagcccatgctggtcttagcaattaagcatgcatctagaccggcctcctcttttgcaaaatcaactaaataaagtttgccgtctagtacacccttaaaagctaatgaaccatcacttcttctaaagacagacacatctacatttgtgaataaacagttatatcccatattacaaagttgactcacagataacaagttatatccaagcgactcaactaagaatacattacaaatagagtgctcggatgaaatagcaatttttcctaaccctttcaccttgccttggttcccatcaccgaatatgattgaatcttgggatccttgcttttgacgtaggaagagaacattctcttt

SEQ ID NO: 26917 - DNA, 220 bp, Zea mays
tacctcttaaatttcttctacttcagcagcagaaggcgttgaaagagttttctcctctatctcagctgcttttggcttcggagctgaagtctttctcttcttcgaagcagccaccttcggctcaagactagaatttctctttttcaaaacttcttcatcttctttcaccatcctaaccgcctgtctgctcaaaacactaacaaatcttttttcttttttg

SEQ ID NO: 26918 - DNA, 384 bp, Zea mays
agcctggaggcgtctattggttgtctacttggggtagacacctccttctttatttccgtcgccttgaatgcgacgggttgagcctccgatgtaaatggatcatctaactggttgatctatctcgagccttctatcatgctctctaaacttacaacatgcccgattacgtcttgagggggcatattaatgtatcttggactaccacgaattaattgaacttgagtacggttaacgaaaatgagagattttaggatcacctgaaccacttattggacatcgcactttacgctaacaaggttgcgcacttggttaaccaaagggctagaaccagctgtacatgtgttgtggctcctccgctttgaaaaggtggaaccgaacgagctc

SEQ ID NO: 26919 - DNA, 421 bp, Zea mays
gacacataaaactcagctgtgcaactattagtccaattatatgtgttgggcaactcaaccaccaaaaccaatatatgacataggtgtaagcctaattccctttcaatctccacctctttggtgattgatgcctacacaaaccaaagcaaatatagaagtgcagaattgaactaattcgcaaaatgttagtgcataagttacttaaaaatgagccaataaatattactttctagatatgcatggatcgagtcttaacattttggaccacattttgaccactaaatttgttttgcaaaactgttgaaaatctttcaagactttttgcagattgccaaaggaatgattaaattggaagaacattttcaaattgaaattttcccttgttaaaagctttcctttataacaaaaaccccctaagaat

SEQ ID NO: 26920 - DNA, 321 bp, Zea mays
cttagcgattaagcaagcctctatatctttattcccaaaaattttgtattctgggcaccacctgacatgaacagtggctgatctctttacttctttggcgaagccgaaagttgagcgctcagtccccttggcaaatccgacacttgccggtgcggactaatgaaccgtggctcgggccacgtgacgcccgttgatcgtgctgctgaccggtggcgcgggcgttgatggctcaccggataatacagagaattatattcactgcgctctcagaaagttccgagaacagagagttcgccgctaaccagcctgtgcatagacact

SEQ ID NO: 26921 - DNA, 363 bp, Zea mays
tgcacccatgatgccccgggggctgaagaatgccggaagaggcttagcatcaagactggcagaatcctcagctcttatattgacagaaaagtcctaacatatgctcatgacatcatactcgaaagtccaacctaaaaatgacatcgtctattactatacacattcgccaatttatgaatgccggcctcaagctcaaccctaaaaaagtgttcttgagcgaacaaagcgaaatttcttgggtgtcttttgttcccaaacgaattgcagcttacccatactagatataagatatactttagatggagccaccaaaatcaataataagtgcccataaattgaccggaaagttggcatcattgaaaa

SEQ ID NO: 26922 - DNA, 284 bp, Zea mays
  unsure (1)..(284): unsure at all n locations
tgacatatattgatgatatcataagtcaaagcacgaagccagaanagtcacattactgatttgcaggaaacatttactaatttcagaagagctagtctcaagctaaatttagaaaaatgtgttttcggggtgaaaagggaaaatttcttggttgcctggtatcaacaaaggggatcgaagccaattcaagtaagatagaagctataattcggatggagccaccaaagtcacgaaaaggtgcctaaaggctgacaggaaggctgacatcattgaatagatttatt

SEQ ID NO: 26923 - DNA, 418 bp, Zea mays
actaagcttatcaatggacgtgaagagggccttcctcaatggtaccatctatgtaagaggtctatgaggagcaacctcccggctctgaagacagtgagtaccctaatcatgtgtataggctctctaaggcgctttatgggctcaagcaagccccaagagcatggtatgaatgtcttagagatttccttattgcaaatggcttcaaagtcggcaaggccgatcctacactctttactaaaactcttgaaaatgacttgtttgtatgccaaatttatgttgatgatattatatttgggtctactaacgagtctacatgtgaagagtttatgtggattatgacacagaaattcaagatgtcgatgatggcggagttgaagtattttctatgatttcaaggcagccactccaagaggcacct

SEQ ID NO: 26924 - DNA, 399 bp, Zea mays
tacttgtcgaagcaacaacatctaccagcacagcaattgcagaccataccggtgacttggcccttcgcatgcgggggactggatatgattggacctttcaaaaaagctcaaggaggatacactcatgtactggtagcaatcgacaaattcaccaaatggatagagttcaaacccattgcttctttaacctcagctaaggccgtggaattcatacaagacataatattcagattcgggataccaaacagcatcataactgacctaggatccaacttcacaagttcagagttcttcgatttctgcgagcaaaaaagcattcagatcaagtatgcttctgtagcacacccaagagccaacgggcaggttgagcgagccaacaggatgatactggaggcactc

SEQ ID NO: 26925 - DNA, 394 bp, Zea mays
  unsure (1)..(394): unsure at all n locations
tcttcaccatgtgatcacggttatcttgagaatgttgatcaatgcacttccctcttagttgtgtccagctcacttttagcctctcattttcttctttgagcttctgatatgaatcatcatttgttcctgcaacttctagctcaaaggaagatttgcttgttgacggacaacaagcattagcacatgataatataatatcaatttgaatacatgtgcatgagtgaggttgntgggattctaagttatctatcacaacctcatgagcaatgtttaatatgatatgatcatctctaagaatttcatgaaagcataggagcatatcatatttatcttgaaagctagattctcaattttaactttctacttggcctaagcaagatatccattactaatg

SEQ ID NO: 26926 - DNA, 330 bp, Zea mays
tataaaactcagctttggctcacatttgaagtttagtgcagattatcttccgtagtccgacgggcatactgagagaacttatatgattttggaagacatgttgagagcccgtgcattgtcagattattcagggggtgataagaagttgccttatgcgaatttctcttataactgatagtcgcctagagggggggctgtatagggcgagactgttattcccaaatattaacactactacaatccgggtttcgtcttaaatataaccagtccgccaagatggtgccaacaaatctcagcgaattttgagtgagacaccgggtttgtttactg

SEQ ID NO: 26927 - DNA, 409 bp, Zea mays
  unsure (1)..(409): unsure at all n locations
gcttatacatgctctagatcaaagtgattgggaagtaaaagtctcggcgatcatcgagtcacccaattatgaaactctcaccgtggacgagctcttcagcatgctcaagtccacaaaatcgatcactagacgcgggcaaagtttgagaacccttgtgcacccaccatggccctggtctctggaagtggctcttcttctaacccttcacctgcattgttcgctttgtttattttgttctccatcatagaggagcaagtggagtgccttggggatgaggagctggcacttgttgctagccaattcacgcggntccacaacaaccgcatgaatcctctgcgtggcaggtccatggatggatgctttaattgtagcaaccctgaccacttcatcatcagatgccctaatatga

SEQ ID NO: 26928 - DNA, 384 bp, Zea mays
gcaccacataatgatattctacattatggaagtgcagcgaatgatgcgggtgagacaatgactataaatctaagctcacccaaagaagagactcagggtacatcaccaacctgctcttgctggtctatttcattgccgcaaggacctgcgagatactcatattgcagtgaagacactctggtcagtcatgaagctgcttgatatgcagtccaacaaaatactaacgggggcctcatgttgccttgctgccgcttttctttcgatcaaggaaaataaagaggttgctggaattgggcgggatgccttaaacccacttgtttacatggcaaatcttcagtatagaagtgcgtaacatgcgactaagcttggcaatctttccttgac

SEQ ID NO: 26929 - DNA, 356 bp, Zea mays
aataatatgcgaaatgactccagcctatctaccggtgcataggttttacccaaatcccaacctttcacttgggagtatcccttggccacaagtcgagctttgttccttgtcaccacaccatgctcatcttgcttgttgcggaagacccatttagttcctacaacattttgattagggcgtggaaccaaatgccataccttattcctaatgaaagtgttgagctcctcttgcattgccaccacccaatccgaatcttgtagtgcttcctctaccctgtgtggctcaatagaggaaacaaaagagtaatgttcacaaaaatgtgcaatacgagatctagtagttacccccttttgaat

SEQ ID NO: 26930 - DNA, 378 bp, Zea mays
gacattttgagacatgatcttctattccactgcaacctactcgaagggtcttcactccactgcgttctagtcttcgagtagagtgagaatttaagttttaaagctataagttttattcgcctattcaccccccctctaggcgacatccagatcctgttcccgggccaaagggaacttttagaatgcaggcgccacttaccagaggtgcatgaaccacatattcggagaacacatcggcagaacggtcgaggcttacatcgacgacatcgttgtcaagacgaagagagcctccgacctcctcttcgaccttgaaacgacattcaagtgtctgagagcgaaaggcgtgaaactcaatcctgagacgtgtgtcttcggagt

SEQ ID NO: 26931 - DNA, 434 bp, Zea mays
tgtagactgccgttcaagctcaagtcttccacatttggctgctccagcaaagtttgcagccatgaacatgaagactgataatgtcaatcctcgtcgaccagctcaagtcagacgaagtagatgggctcttggtgatgtaaccgaggtgttggatcataattcgtggaggcttgggaagattacagaagtactgaagaatgactatcttgtccttaggctagtgggttgcatccaaccaagagaattccacatatcttgcttgaggattccacatgatcgccagcagctgactgttggaggcagggtgagattctggatataatttatatttctaggtaatatctgtaaagtatatttctttcatattctcgatatcgctaaatgaacataggtgctgtttgttccaaaatgtacacaaagggtatagtatggtt

SEQ ID NO: 26932 - DNA, 426 bp, Zea mays
  unsure (1)..(426): unsure at all n locations
ggatcttaagcgactgagctgcagcttatagaaaaatcatcttagtttgtgatcgccgntcttgattcgcttggtagctgctactatacccttaagggtaccacgctcctcctttttgaagactccatcgttatctacatatataccgataacatatgaatgggtagaaatatccaaagtacaagattgcaccatttgaataaaaaacactctaagtaaaacatatcaggatctctttttctatgacgtctaccatgagatggccaatcagccgtaggtttgttgctgccatgaatttcttcatcatttaatctttggtcatcattgcttcgtcattcatacaatactaaggatagcatacgcatcagttatgtctctaacaatgtgtgaaaatatacactatatgtcagtacgctgtgaataaaa

SEQ ID NO: 26933 - DNA, 319 bp, Zea mays
ttaaccataactatataagggaggattctactatcggagcaagcagaccaagatggatatggagacgccgctaatgccaacccctggctatgccaccgacttgtcttcttagcatggctctgggtctcttcattatatgtgggttcttcgtttggctaaatatcatcgtgggggcagctgcctagcggggaatttcttgccggagtgtggggattccgccgtatggactcttcaccgtggtcatgttctgcgtccccgtggagggaagggaggtacgcacttaggtcctctggcttccccgatgtgtgtctaacttatt

SEQ ID NO: 26934 - DNA, 394 bp, Zea mays
  unsure (1)..(394): unsure at all n locations
aagggagagcacatnttatgactaacaaatgttcattttgagaaagacaggatttgtagcgcatgccaggcagggaagcaagttggagtccataattcacacaagaacatcatgacgaccgacaagccgcttgagctactccacatggatctattcggcccgattgcttacataagcatcggcgggagtaagtattgtcttgtaatagaggatgattattctcgcttcacttgggtattcttcttacaggaaaaatctcatacccaagagaccttaaaaggattcttgagacgggctcaaaatgagttcggcttaaggatcaagaaaattagaagcgacaacgggacggagttcaagaactcacaaatcgaaagcttccttgaggaggagggca

SEQ ID NO: 26935 - DNA, 372 bp, Zea mays
aggacacttaaaactaagcttggaaggatcttcattcccacttgtgctatgcggcgatgccacagccagcccatgctagtcttagctattaagcatgcatctagaccggcctcttcttttgcaaaatctactaaataaagtttaccgtctaatacacccttaaaagctagtgaaccatcacttcttctaaagacagacacatctatatttgtaaatagacagttgtaccccatgttgcataactgactaacagatagcaaattataacctagagactctactaaaaacacattagagatagagtgctcattagaaattgcagatttacctaacccttgtacgttgccttgattgccattcaccgatatgaat

SEQ ID NO: 26936 - DNA, 327 bp, Zea mays
tattaagcatgcatctaaaccgggctcttcttttgcacaaatctactaaataaaggttgccctctaatacacccttaaaagctagtgaaccatcacttcttttaaagacagacacatttacatttgtaaatagacagttatatcccatattgcataattgactcacatgtagcagattatatccaagagactcaactaaaaacacattagatatggagtgctcattaaaaattgcaattttacctaaaccttttaccttgccttgattcccatcaccgaatataattgaatcttgggaatctttattcttgacgtaagaggtgaaca

SEQ ID NO: 26937 - DNA, 405 bp, Zea mays
cagcttaacttatgtcggatatggatgaaaaggcttgttgtataaaatcttgaatctattcttcaaggcaccgaaagctctctcaattgttactcggaggaaagaatgccttagattgaagaggtctcttggattgagtggatgatttcctccaccaaattctcttaaatgatatcttgtgctacggtatggaggtagaaatccaggtctaacagcataaccagcgtcaactaaatagaattttcctagttcaaagaattctagttagtttaattgtgaagtaatttaaaagcatattcaaacatgttatggaattacctggtggcacaatgaggccatcagatctttccaatgcatccgatagaatcaaggcatcatgagctgaaccttcccagccagcaagaa

SEQ ID NO: 26938 - DNA, 379 bp, Zea mays
  unsure (1)..(379): unsure at all n locations
gtcaaacacattaaacccttacccttggtttagcgagaagattacattagaaaggttgctccaaacattgcaagtagaaagaaattgtacgtgttgcacattgatatcatgactttccatgttcttttgcaaatctaagggctaacaaggtcgtgcagttgttgtataaactagatataaacaagttaggaatgaaatcaatgttgttttttgttcataatgtcagctgaataatacatattctatngctatctaaatcagcacagaactgtgagtatgttntctgatattctgttcttgtacagttggtaggataaatttcttttacattttccagtggtcaagcctactatgtgtatcanacagataccaacatact

SEQ ID NO: 26939 - DNA, 354 bp, Zea mays
  unsure (1)..(354): unsure at all n locations
ctattgctgcaatgtttgnttcattttcatgcacatcaattcgtttcatgttttatggatgaattcaattaattaatgagtttattgatgttaatcaatataaggataggtaatggaccgaggttggatgtacaatgtgccaagaccacatctgtcgtacattcgaaatttgagaagctgtattgaagcgaccaacaagcacgccaatttgcgaaagaccaaggagatattatgtccgtgcatcgattgtgataataagatagcttggagagataccggagtaattccatcacatctgctataaaaacgggttaaaaacaattacacgatatggtcaaaacatggtgagttgga

SEQ ID NO: 26940 - DNA, 338 bp, Zea mays
  unsure (1)..(338): unsure at all n locations
agcttgagggctacacccaatgaatcctcaatctctaaggactttatgctgatctctaaagcataagctggtaaccgagcactaatttctgaaatacatagtgaagaccgctgatagagctgaagaaggataacagacngtttgttttaccggattgatcagagtttagaagcaacaactcgacaggtgcactttcagagcatccgtgatctaaaatcaaaactgcaagctggacctaaaatctttgggccgattgttttaaaatcaactcacagaattggggcttgtgggagacagatatcccncggatccactagaaggctataagggcctcgcaa

SEQ ID NO: 26941 - DNA, 238 bp, Zea mays
aacagggcccaatagcggcatgcccatgcgttgctacagagtaaatatgttatgataacgttagcatcttttataggttaagatgtatactccaccatgcattctttaaaggttaagatatatactccgccatgacaaaaaactatcatgaaatgtttttatgcagaagcaatggagaaaaatagtgcaacaatctctcgcacgttttaataccctgttataatggttgggccatgct

SEQ ID NO: 26942 - DNA, 280 bp, Zea mays
atgctcttatgtgatgacatagcatagcacaaggtgctattgagatcccaactgtgcgaagaacatgagataaccttgataaggtttctgttcaacaacaaagatgtgtttgtctggatagctaatgatctctgcggagtcaacagggatgtcattgaacacttgctcaatgttgatccatccctcagacccacaaagcataggcttctgaagatgtctgatgataatgccgaatgtgctcggaatgaagtgaaaagactcctcagtgccggagttatca

SEQ ID NO: 26943 - DNA, 360 bp, Zea mays
  unsure (1)..(360): unsure at all n locations
aagacatngtggaagagtccggtgcctatcaatggaccggatgctgccccatgtactctctcatgtagtcatgtgctgcgttaacaaaacatgtggtgtgtgtggtgatggtacaaggaagcacgcaacggaataccatgctgcgtgtgccgacgaagcaggacccgattcgatccgctgatgaacgggcacacggcaagatacggcgtcgnattntaatttcctcgtttcatattttttttaaaaaaaattaattataatttcgcttttatatgctctgatggattgaaacaacagttcggtcaacgcgaaccgtaccgatattgcatagggtcccactgtgtagcacaatgctcatgc

SEQ ID NO: 26944 - DNA, 332 bp, Zea mays
  unsure (1)..(332): unsure at all n locations
agcatgaaagttgtctggatgaaacggcccttgatgaacgcgctctgcctaagagaaacaagatcatgcagtcgttgggacaatctgttggccatcaactgggtgacaagtttagcaatgctgtgtaccagactgatatgtcgaaagtcttttacttcctcagccccctccttcttagggataagagtaacanatgcagtgttaagtctttcaaactgctggaattttctgcaccaaattgcagcaataacagccatcacatccgtcttgataattggccaacaaactttataaaatctgcctgtgtaaccatcaagccccggagccttatc

SEQ ID NO: 26945 - DNA, 301 bp, Zea mays
  unsure (1)..(301): unsure at all n locations
tagcagactacttcttccttctgtcgaagcttntatatatctgaacatataagactacttcttccttctgccgaagattttgcatagcgtaacataaaagacgacttcttccttctgccgaagctattactatgacacatcgatacatgaacaaccaattctctctttttttttttgccgaagcaaccactttcgcacataaatgctaagaatgaatgctaatgtatgcaaatgccatgatgaaatgaaatgtgcacatgaatgaccgaatcgtatatccgaatgcacactcatgcatcat

SEQ ID NO: 26946 - DNA, 357 bp, Zea mays
gcacaggatactgcttgtatctccgaacattcaatgcacatcatacagaaaccacgggccacgggcttggtaaatttgagaagaaagtgaggttcatatctagatgtctgcacatgtgcacttgaatgtctcagaacaggttggcttggacgactagaagtagaatatcgtttcacattttgaaatggatccagatacttttctaccggcttcaagttattttggtacgctaaacattcaaaactgaaaaacatagcacttacttctttgtcgcgttccagcttctcgatgttgcacgtgctccgggtggaggtgtcagagggttgttggggcctgcagtctgaaggactgtatgcc

SEQ ID NO: 26947 - DNA, 326 bp, Zea mays
  unsure (1)..(326): unsure at all n locations
tgcagcttgactactactctattttaatngcatatctatgangttcgaaatattgcatatgcattatgttattcgactatatctataggaaaataacaatatttatgatactaatttgagtctaaaatcataaaccttgtgatagatgtggttcgactacttgtatatatgatgtccaatgcattgcatatatgtcatagtgtcgatgatatacctgtgaatatcagccatcgcgctgctagtgttatatgcaggttttggaaacctcctcgtgcaagggaggtgctgccgatcttcttgtcgatatatgttagatagcggtagat

SEQ ID NO: 26948 - DNA, 318 bp, Zea mays
tcgacagtcaagcttcgtcgaccaagtgatttatctcctcgagctttacgagattgaagattgaagattctgagcatctgtttggtgaaggcaagtgtcctctgacccattatgtcctatctacttataattcactgtcccgcattacttaattgaaacctaaggattgactagctctctatttaccttatccctggttaccttttgggttatcatgagtagcttcacgctattgctttactttaatcaatgaacatgatgtgaatattatgatacgatgatgttattcctatgagggtcttgtgattactttaaggg

SEQ ID NO: 26949 - DNA, 458 bp, Zea mays
  unsure (1)..(458): unsure at all n locations
gcttgcacgtcttcatgagttcgtctagcatctgcatacaaaggaaaccatgctaacttttgtgatgttctaaacattaactatactggaccattgcacaatacatggatggacgcaaagcatgcatgctatctccagctgagatacttacaccaggatgctgctgcaaggtacgagagtaatgatcgagagctaaatatatctttcggagaacgctcaactatgtggtgatcttatcgcccaataccataacctggccacctagaataactttcagaagtcctacatgatcgatttatataatcatatatcatgtgctgttcttgtagtcaanaacaaaattcaattctagaactacctctggttcagccttatggagctcagaacgcctcgcttcatcaattgtttataccacaactctatctttgtaataccatgcttgtctgaccatgtggtga

SEQ ID NO: 26950 - DNA, 355 bp, Zea mays
agcagttggatactgtaaatatgataatgatagcaatggatgcttttaagatctggtctgatttgccaacacgagttgtggtcaaagatgatttatttattccaaaatgtgtttatttcattaaaaaagggtccagtttaaatgtataaaggcattaagtagatgatagctgacagaaccatttcctttttcctcaaaactgtgtcgcccttgttgggtttaatactataataatgctatcatagatgaccaccctgtgtttaaccttttcacgataacagagcaggcaggctgtgatagatcaggtctacaatgatatcggtttgtgtgaactgattcttctaacatgcaggac

SEQ ID NO: 26951 - DNA, 393 bp, Zea mays
  unsure (1)..(393): unsure at all n locations
agcttaactcattatctcaacgtctccactaggtcatgcatgcaattctcctaaaaaccagaatcacaggagtatatcantttcaaaggagaattcgaatgtccaaaagaaagtgctttcattacacattaaaatgtagcactagcaataaatatttcacattgtcatagacttaaatttaagatataattataagcagaagaataagtttttcctatccggagttattattgatattatattttacctttttgtcaaggtaattcttaaaagagccatgttttattgcttacagaaggaaatgcagatcgaatttttacaacatgatatatttnttcaagcattngggtggtgggtcttttacagaatgccaaataatctgaaacgttcaca

SEQ ID NO: 26952 - DNA, 377 bp, Zea mays
ttgaagaactgtagcttgcgatcttgttactaagattttatctccgttgtacggagaatcggaaattaaagggtgttcgattcaaggaatcactacatccacaatgaggtggtgcatcatacgtttattcctcaaatttggtgagatgaacttattcctcatattagtactaaataactaactatgaggaatgaggtggtgatggatcaactcattccattccacacaccagaccaaaatagtgagaagcgagaagataatgaattagctcattcctctaacaaacaccctatgaacatacacatcgcatccatggctcctaaggcgcattcacgcagtcaatgattctatattgcttcacccaatcttcaaatact

SEQ ID NO: 26953 - DNA, 347 bp, Zea mays
  unsure (1)..(347): unsure at all n locations
acccatgttagtcttaacaatttatcctgtgacaagttcatcttcatcacaatctaccaagtatagctgaccctctaacacacccttaaacgctatcgcatcatcactantactaaagactctgacacctacattgatgaatagacagtggtaacccatttgacataattgagaaacacacagctaacttgtatctaatgaatcaacaagaataacattcgaaatggaagggtcaggagatatatcaatcttacccaaacctttgaccaaccttgaattcattcgtgaacgtgatgctctttgagatcatggttttttatataagagacatcttttgtccggcatgt

SEQ ID NO: 26954 - DNA, 340 bp, Zea mays
  unsure (1)..(340): unsure at all n locations
agcttaccacatttgaagcatgagcgcttccctcttgtcttggtcttgcttggctgccccttgcgaccttttagcgtcgtcttgaatctcttgatgatgagagccatctcttcatcattaagtctgaccgcctcaatttgtgccaccttgctaggtagcgtctccttgcttcttgttgccttgagagcaagaggttgaggctcattgattggaccattcaatgcgtcgtccacgtatcttgcttccttgatcatcatttgcccgctcacgaactttccaagtatctcctcgggcgtcatctttgtgtacctangattctcacgaatattggttaccagat

SEQ ID NO: 26955 - DNA, 403 bp, Zea mays
tgtgagactgaagtacaccttcaaatgtggagataaatttattgagccagatgatgagtggttgaaaagcattgacaatttaagtgatgagctactcgggacctactcgaaggctgaagataatgcaatgtcagcagccttcggaggccgaaaaaagaagagactgaatcgggtatttgatgccattgggtttgtctaccctgattactgctatcccattcgaaggcagaagagaaaaaacacaatctctgcaaaagaagaagctgcagctgctcctagcgagccagaaccgaaaaggaaaaagataaaggttcttacgcaacggccgcgttatattgaaccagcttcggtgtcggagtttaccgggaaaacttcttcagccaccgaagcttgaaaactaatc

SEQ ID NO: 26956 - DNA, 175 bp, Zea mays
aaaatctcctagagaagctaaggaaacatattcatgctgtttgatagtatgaaagacaaaaaaaagtggaaaacttctaaagagtaactcgacagagggacaagaactattgatcacttaaaatacaccttgcttaacagaatgtctctttctcatgtcaacacatgtgccttat

SEQ ID NO: 26957 - DNA, 384 bp, Zea mays
gtgctgcatcaggcttcacaccttggcttctgacggtcttctctaagatattcagccttatgaatgcctcgagggttagttggagaagacagacttctaagatttgatcacctacacgacgaagctgctcaagggaaatcgcatcccagctttcactaagcttccgttcactactacttcattctcttcatggcggggacaagtcttctccccttcatgagccctcacaacggacaagagccggaaataccattcttttatgttgacaagaagattctctctgatagtagatttaccataaactgacatggttggtctgcacggacgatcttctgagtctacaccaccgttgtattaatcataactggcggtggcaccactatc

SEQ ID NO: 26958 - DNA, 418 bp, Zea mays
  unsure (1)..(418): unsure at all n locations
agcttctgtgccataaaccacataaagctaaggtatggntatttagttgtgattctccaaagtttaatgccaaaaaggcactttccactaccttgctatntgaaaaatgtcaaacaggagatttcatatttttcctatgtccttcataacaaaagatttactatcccaagggtaggggtgttttcaccttggggttatttttgtagggcttttctaagttntccttgttttcttaaaataaaaagtatcctatttatnttatactaaactagggtataatcaattnttctagtaacctacactgaataagtatactaacaaaaatataggggctccctggttctttatttaaatcacctttcctattntctttaaccttaaacataatggtaaataaatggcaaactctaccttaatg

SEQ ID NO: 26959 - DNA, 408 bp, Zea mays
  unsure (1)..(408): unsure at all n locations
agctccatcgatgttatggattgctcttgagtcagtcctattactcttcgcccttcttgcagcttcctgacttccatggatagcgatgggtccctgatccgaaggtatcttcatgcanagatacgcangatgaatgaatgcttcgaaggcattgagattaccacgaccaataattgcattgtaagggtattccatgtcgacaatgtcaaacacaacttgctcagttctagtgttgttgatgaacccgaatgtcactgacatggtgatcttgctcaatgctacaatatgtcttcctccgaagccacagagaggatgtgtagcatcatgaatcttatcttctggctcttgcatttgnctgaaggccttagcacatatgatgtcagctgcacttgctgtgtcaccaagaca

SEQ ID NO: 26960 - DNA, 380 bp, Zea mays
cagacagcctaaactctaaagcaagacgccaagaccctcgccgctggctcggtaaccatacgatggtttagcagtgagaaaaaatgagaatcgacactcattgtccagtcatggatgtaccttgtactgcttgtaaatagtttctatacagtgattcatgtgctcgcaagtcgcaaggtgttgtcccacgaaaattcgttgggtgtgctgagatcattcaagtagggaaaaggttcacagcgcgacaaatgtgtagggtaacggcatgtggctatgcttcaataatctcctttagagttggtttggtgaccaaagaattaaaagggatccattggaaagatatcttttattatgtagaattaatatcaagagatttctct

SEQ ID NO: 26961 - DNA, 232 bp, Zea mays
aagtccaagaaatacaacagccgatgacatctgcactttaagatccgcgatatcaacggcatgacctatcttcaccaagccccatcgatcaacctgggtaaattcagacaccttaatgcgaaataaagggcaaatgattctaaacacatggatgaacatgatggccgggggataaacacctggaggtctttctcaagcctgatcaatttattgtcctctaatacccaccttt

SEQ ID NO: 26962 - DNA, 428 bp, Zea mays
ttgatcttttagatgcctctgtctgtcattatttcctttggaatagcatgccccatctcggtgggcactgaaggcctagcttcggcatcagcttgagcttgtgtagctctggcttctgcttgcccagttatggcttcggcctgtgatttggcttcagtttgagcaactttcttagcaggagcagggctcagcgccttcgtagtttccagtacagcatccagcacattagccattcttctcctcttgggagttgcagcagaagtcttttgcaccttcggcagtgttgcctctgtcggagggctcacaatttttggcacttgcattatttttcagcctttgacccttcaatcgtatcaatcttatcttcgattaccttgactgtatgcgtcttcggcattacggtcggctcttcggtgctctgtgtaatc

SEQ ID NO: 26963 - DNA, 299 bp, Zea mays
aaagctcaagcacggcaaaagagttatgcatacaaacggcgaatgccattatattttcttgaaggagactatgtctacttgaaggtctcaccaattgaagggcgtatcgcgtttcgaagttaaaggacaacttgcaccacgatatattggtccttttcttattctggaaagatatgggccagaggcgtatcgactccaactccctgaaaccttgtctgctgtgcataatgtgttccacgtgtcacaattgaaaaatgtctttgcggttctgatcctaccgttgaagtgactgatgttat

SEQ ID NO: 26964 - DNA, 348 bp, Zea mays
  unsure (1)..(348): unsure at all n locations
tggaagccaatgtcatccttaatgccagggcgtctcccactataaagcatactacgagcaaatttaaatttttcattctctaattcatgctcggcaatattagcatctaattttgctatatgatcattttgttgtttaatcatagcaaggtgatcatgaatagcatctatattaacatctctacatctagtacaaatagaaacatgctcaatggtatatgtatagggttngcaatcatttaattcaacaatcttatcatgtaaaatggcattctcatttctaagactggaaatagaaacattgctaacatctaattccttagccttagcaattaatttatcactctca

SEQ ID NO: 26965 - DNA, 344 bp, Zea mays
  unsure (1)..(344): unsure at all n locations
catgggctatgttgtgacatcgncgtctaacacatgttataatgaataaccttcataaacttctaaaggggaatatgtgttaggacaaattgatgtatgtttttagaaagtcagaccttatgcaccttgtcaagcaggatagcaagttggtacaagtcatccaagcaagaacgtaatgactacatcaagacaactggagttagttcatatggacctctacgacctcgttgcttatcttagcacgaacagaggtaattatggtcttgtaattgtagatgactttactcacttcacttgtgtgtatatttgcaggataaatcagaaacccaagggaccctcaagca

SEQ ID NO: 26966 - DNA, 365 bp, Zea mays
ctggtgtgattgtatctgaaacataatcgccgatgtcaacgctgctcctgactctttgagtcggtcttcctcatcagctgctcctgtgaaaaacattactaagtatatacactgaatgcactgtgtatcaggtgtacatgctcgaatattctctgtagaaaatgctctcgatactgaatgctattattttgctggtctatgaaatcaacaggtgttatgattgcggaggtaagtgcagagtgatggctctgaagcttctttctatttcgcggggcttatagatcgccctaacaccagcgatctaatacatgcttatgcttaatcgagtatgctcgagcgtgccgtgccgatttagttctctaccg

SEQ ID NO: 26967 - DNA, 343 bp, Zea mays
gcttccgtatttctttatctccgacgttctgtcatgtctgcaacacaggtgagaccgtcctagtaccgtaaggaaagataccgaacttgtcaagtgacttatgggcacctacagggttgtctgaagtccgttggacaaggacaactgtacgtgggcctaattacttgggaggttctgtcacactagatcttcttatacgcatgatagagatatgtctaggagatatgttcatcatgtgcctacaaagaatattgttcatgtttctaggaaaattatggatggcccttctacaatatatcatgcgttaaatacttcctttgctatttgtagaaaggataagaag

SEQ ID NO: 26968 - DNA, 119 bp, Zea mays
gcttactttgtgccttaccacattttcattcttataaagccttctccgaagatcgacttcgtattcaatatcccgcattggtgcgatatgatgtgatgctctgcgagacgatgttatga

SEQ ID NO: 26969 - DNA, 146 bp, Zea mays
acctcactggatatctggcaaatggcttgtctgcacaacatgcattgctgtgggaaccatggtctaacattatagacggacaatcctcaaatctatgagtgtagtctttgtgcaacccatcaattgaggctcttcctggggtataa

SEQ ID NO: 26970 - DNA, 401 bp, Zea mays
tgggattaccatttattttctaataatccagaactaatgttttaagctactttaaatactccaaaattccttattttatctaaaaatcagtcaactatttttattaaattctatggaaaataagaagcctaggaaaattggtttcacaattttagggtttttctacaattttctatggatttctaaagttctactgaaaaagaaaaggaaaaagattgaataatgttgggctggttttagcccaggcggtccagctacacagagaaacggagcgcgcccatgcccgcgttagcaaccttgcaaaaaggtccttgtcttcttgaatatcctgacagagtccaaggcactatttaacacagtcgctgacagttacaaagacaccctcacacttctatctattc

SEQ ID NO: 26971 - DNA, 328 bp, Zea mays
  unsure (1)..(328): unsure at all n locations
catgcagcttctaagggagaacacgtgattggtctatccaatgtacactttcgaaagagatagaccttgngcagcttgtcaagcatggaaacaggtgggaagctctcatcacaccaaaaatgtgatgaccacatcaagaccctnggagatgcttcatatggacctcttcggacccgttgcctatctaagtataggaggaagtaagtatggccttgctatagttgatgattattcccgcttcacttgggtattctttttgcaagataaatctgaaacccaagggaccctcaagcgcttcctcaggagagctcaaaatgagtttgagctc

SEQ ID NO: 26972 - DNA, 304 bp, Zea mays
tgtgtttttgcaacaccgacctgcatagatcactgctcgtgccagcagaattcctatccgtccacgctgatgccgcgtataagtagagaactccgtgacggtggtagatgaatgcaaccaactgattgttgatgtccctcctattctgagatctccagaataattggagagcattgggcgttaatgcatgatgaagcctctgggaatggtgacacttgtcccgcaaacccaattcccgcttcttgcgtctgaccgtctgcgtatccctgcaaaaagaattgaattcacagagaaatgcgtgagt

SEQ ID NO: 26973 - DNA, 318 bp, Zea mays
agaacatgtgatacgtctatttaatgtacatttctacaaagatagaccttgtgcatcttgtcaggcaggtaaacaggagggatgagcgcatcacagcaagaatgtgatgaccacgtcaagacccctggagctactgcatatggacctctttggacccgtagcctatctaagcatagggggaagtaagtatggcatagctattgttgatgatatttcccgcttcacttgagtgatccttttgcatgataagtatgaaactccagggaccctcaaactcttcctcatgagagcttaaaatgagtttgagctcaaagtgaa

SEQ ID NO: 26974 - DNA, 287 bp, Zea mays
  unsure (1)..(287): unsure at all n locations
tcancaaaatgactagcaaggttctgcactctcaaatattcttaaatgtgctaacttatgttgatgacatgatagtaaaaagcacaaaacaagagaatcatgttgctgacttgcgagagacatttgccaatatcatgcaagctggtctcaagttgaatctagaaaagtgtgtcttctgagtgaagaagggcaagtttctttgctgtctggtatcaacaaaaggtatcgaagcctattcgagcaagatctaagctatccttctgatggaaccaccatattcataaaag

SEQ ID NO: 26975 - DNA, 382 bp, Zea mays
  unsure (1)..(382): unsure at all n locations
agcttatgaagagtctncatatctcacatgggcttgtcggcggggccagagccaacctangttagtcttagcaattaagcaagtgtcgagttcagctctatcagaatctaccaagtatagctgaccctctaacactcccttaaatgctattgaatcatcacttcttctaaagacagtgacacctacatcagtaaatggacagttgtagcccatttgacaagttgcgaaacggaaagcaaantggaatctaaagaatctacaagaaaaacattggaaatagtatggtcaagtgatatagcaatnttacccaattctgtgaccaaacctagatttccatccccgaatgtgatagcttcgtggggatcttggcttttctcatatg

SEQ ID NO: 26976 - DNA, 237 bp, Zea mays
gaaagacaggatatgtagcgcatgccaagcgggaaagcaagatggtgcccatcattcacacaagaacatcatgacgactgacaggccactagagctcctacacatggatctattcggcccgattgcttacataaacatcggcgggagtaaagactgtctagttattggggatgattattctcgcttcacttgggtattctttttgcaggaaaagtcttacactcaagagactttaaa

SEQ ID NO: 26977 - DNA, 435 bp, Zea mays
  unsure (1)..(435): unsure at all n locations
tcggcgacgacacagccgacccatattagtcttatcaattaaacaagtgtcgagctcaactgtggtttcattaaaaacaactaaatattgctgaccctctaacactcgcctcaaatgctattgagacatcacttccttctaaagacagcaacacctaaattcgtagaaagacagttgtggcccatcttgcataattgagatacagaaagcaaactataatattaagaatctacaagaaaaacattggaaatagaatggttaggtgatatataaattttaccaagtcctttgaccaaaccttgatttccatcacccaatgtgataactctttggggatcttcattcttcttgatgaggagaacattatttcaccacctgtcatgtggntggcgcatccgctatcatatatacaactagagctcccagatgcataaa

SEQ ID NO: 26978 - DNA, 449 bp, Zea mays
agcttcagttgatttaaggttccatgttggattattcccaggattaattcgtccatttcctggcataaggtaatgtcagaagtctctactgtaagacagcgatatgaagtcttacggctgagtgcatctgccactacattggccttgcctaggtgataatgaatctccaattcatagtccttaataagctcgagccatcgcctctgtctcatgttcaattctgactgcgtgaagatatacttcaagctgttatgatctgtataagtgtgacagatatttcccagcagataatgaagccagatttttagggcatgaaccaccgcagctaactccagatcatgagtgggatagtgttactcatgccggcgcaactgccttgaagcataagctatcaactcgccttctttgcattaaacacagtcgagaccactgcctgatgtgcacaatac

SEQ ID NO: 26979 - DNA, 249 bp, Zea mays
tgggaagctctcatcatgccaaaaatgtgatgacaacatccagacccctggaattacttcatatggacctcttcagacccgtcgcctatctgagcataagaggaagtaagtatggtctcgttatatgagaagattgttcccgcttcacttgagtattcttcttagcggataaatctgaaacccaacggaccctcaagcgcttcctaatgatagctcaaaaccaagttgaactcaatgtgatgaagataa

SEQ ID NO: 26980 - DNA, 227 bp, Zea mays
ttcggacaactgaagggttattggctgaagccgaactaaagtagcaaattgaattcgagctcttcgcaatctgacaatttgaacaggaaaaacaagaacttagagtgaaacttgaagcccgagttcaacaaagtcagattcgaagaaattattggcaaacctctaagaacaatgtttggaagttagcgaccaatgcattcaacgactgagagaaatgttccacacag

SEQ ID NO: 26981 - DNA, 418 bp, Zea mays
  unsure (1)..(418): unsure at all n locations
gctacgggtgcataggtttaaccgaaatccanaccttcgacttgtgaatatcccttggccacaagtcgggctctgtttcttgtcaccacaccatgctcatcttgcttgttgcgaaagacccacttggttcctacaacatnttggttaggacatggaacaagatgccatacctcattcctcgtaaaggttgagttcctcttgcattgccaacacccagtctgaatcccttaatgcgtcttccaccctgtatggctcaatagaagacacaaaggagtaatgttcacaaaaatgagcaacatgagatcgagtggttacccccttttgaatatcgccgaggatagtgttcatggggtgatactcgtgattgcttggggactctgtgtgtggggcttggacctataatctcctgtttgatatg

SEQ ID NO: 26982 - DNA, 420 bp, Zea mays
  unsure (1)..(420): unsure at all n locations
acctgaggcatgctagcagncagaagggtgccacacccgcacaactacgtgactttatggaggagtccgaagctcgtacgggcaacagcactgtaccagaatcaaagcacatatactgagcaatatcctacttatgaaatacttgtacattctacgccattntgctttctgtatgaggaacaagcaatgaaaacttagttttaatttcttgtaatgattctgcctgtaccagaatgaaatatatcttcttcacagatttacgaagctcaaaagtcgtttctaagggagcgcagcgtaagtnttttgctcanaagtcattcctaagggaatgcagagccaaaattgacgaagctacaaaaagtcattcataagggagcgcagtgtaagttttctgctcaaaagtcgttccaaagggaatgc

SEQ ID NO: 26983 - DNA, 378 bp, Zea mays
actgtccattacctgatgaagctatcctgagaggcccagtgcaatatggttggatgtaccccgtcgaaagacggttatttactttgaagcattctgtgaggaacatggcacggcctgaaggctcaattgctgaagcatatgttgctaatgaatgcttgactgcttgttcgcggtattttgatgatctcgacacacgacataattgggagggcaggaacagagagcgtgttgatatgagcaagggtgatttatcttgtttccaacatggagtcgatttactcggagggcataggattacataccaagaaaatatatatgacaagatggtttggtatgtgttaaacaattgtctggaggttgaacaatatatagagtatg

SEQ ID NO: 26984 - DNA, 436 bp, Zea mays
  unsure (1)..(436): unsure at all n locations
tgcacgcatgcaagcctatcanagaaaaattatacagaactggagattgtgttgtattctgtcttaatggcctccacgaagcttcggcattattttcaagcatttcatataattgttcctttgacacagcctctgaaggatatcatgaggaacatagaatctactgtaaggattggaaagtgggctgatgaactcaacaaattcagcattgattatgtgcatagatccttgattcagtcccacgcgctagcaaacttgatcgctgactggacgccaggggctcatgaataagaagcaaataaagatgccgaagctcggacagtattctgcgacgagtcctggggaacctacngggcacgggcagctgatgtcttagctgcaccttccaagatagaacatgctatgcaataacgcttgactctctctgcacaaatat

SEQ ID NO: 26985 - DNA, 311 bp, Zea mays
ctgggatgaactggcttgaagcgctgctcggttctgaatggaaacatgcttgtccgatattcagctctcttcctgttggcccaccatctgttgcatcaggtagcccctttgttaatgacaataaacaaaaatgttattgttcagatttacgtgtaggacatcagagacaaatatccttaactgaatcctcctgtatccacattagtgtgcagtgagacacatgacacaattgtccctggtatgaggatatcgtgagagagcatctacagcaaagtgcttagatcctttcttatagacgattctatatttta

SEQ ID NO: 26986 - DNA, 379 bp, Zea mays
  unsure (1)..(379): unsure at all n locations
gcctgatggggttgtatactcttggcgttgtcacttttgtaactttgtgttacaagttaactactatttgaggtatttcttaacgttgttatgtgttcactcttcgtttgtcacggcttgattctaaacaaggctctgaaggcccaagaagatgcagacgatgagagttcgcatatagcgcttataaaccttcgttcggaggtcataacattaagaaacacagctcttgagaaagataagatcctacactctctagtggaaagattaaaatctagcaaagccaggctttctgctcaaggtgaaacctatgaagccgatatgtaagagctaagaagatagtacctancaactgagactttaatgttgaatggtaaacaca

SEQ ID NO: 26987 - DNA, 366 bp, Zea mays
gtacaactgcacatgggactgggatgtttgttctaacatgtcggttcttggttcttctggatgcctcgtttaacaattacaaggccatagcatacaaatatcttctgacatacacaatctcctcgaatataacagtgaacatgcatacaaacatattcataaataacaatgtccgtggatatcccacttccaggaaccagcaaattgctggtgattcttgggtgcatcacttatcatccatttacctcctcgagctcatataatgacgcaaagggcgagcatgcccatgctgtgaatcttcttaaactagactaagcagtcgaccttaaccatgaaacaacgatattctacatccaatttctcatg

SEQ ID NO: 26988 - DNA, 396 bp, Zea mays
  unsure (1)..(396): unsure at all n locations
cctattcacactcgtatctcggagccagaaggacacacacgcgcatggtattagcatgataatctggaggaatccgatgctcgcacagtcaacagtactgtgccagattcgaagcatatatactgaagaatatcctactcttaatgcacctttatcttttatgccattttagttattgtatgagacacaaatcaccaaggactaaaatnggatttcttgcaataattgagcttgcatcaatgaagtagaaatgcccttcttacagctgtctggaactcataaaatgcttctaagggagagcagagaatatctcccagctgctaaagtcgttcctaaaggagtgcgacgtaagtttctgtcacaactcgcctatgtgatcagagccaaatttaggtt

SEQ ID NO: 26989 - DNA, 171 bp, Zea mays
tactgagtagaagtactgtacgcttacctgtaacctggcatctgcgtatataactttttatggatgtcggaggatgacagcttagctgaagaaggatcaaacgttatcccactaggactatgccaattggtcctacctgatgaatccacgtttagacacggtacccccgag

SEQ ID NO: 26990 - DNA, 286 bp, Zea mays
tctatattcttcatactcttttgccctttctatagaattcccgtgatagggctcaattatggtttttattaaggttgcacattttgcctttctgaaaaacccatttgctttgaacatgatactctttagtataagccttagggatcctttattcttaagtcaatttgatgctcatgctcaatattggttcccataagatgatgggtcttgggttatcacttgagagaaaccctatgtgacactggggtgtcacagagggcaccacgtcctatctggaaatcttgat

SEQ ID NO: 26991 - DNA, 167 bp, Zea mays
tatatgagaaccgccaagattttacactgaagagtgttgggacgcatatttcactacatcttgcaaaacatgcccctggcgtcggcgacggcaaggttctcagccaagggtgccctgaaggaactgaaaaccacgagtgcagacccgcgaaaccaaagacgcccccg

SEQ ID NO: 26992 - DNA, 330 bp, Zea mays
tgcacagccctcggacccggccagacttcaccggaggttttatatctacctcaccggacttcggtcttccgccgccgcgcgtggaccgagctatccagtgagtctccgtccaatcccttgcgctcatatcttccctggcatcccgtggacctccctgacccatctaattgaactatctcgccatgaccaggccggtctcctcgtcgtcgacgagcattcccggctgcgcgcgtggaccgaccgactccggacatcttcgacggcgttccgcacaccgttgtgatccccgagacttccccttcgtgctcgaccacttcaccggaacaatct

SEQ ID NO: 26993 - DNA, 367 bp, Zea mays
ctgcagcttagatggtggcatggtggttgaaaattatactagttctggcagaacattcttacatccagtctttgacggcttgcgctatcggcaccattgctgatcaatgctcatattaggggttacaagcggtcgagagagggaggagaggctcccaagtctcttgtggtggaggaggtggagttaaaggatgtatagtggtgtcctaactaaatcttggcttggcgaggaggctcctgcctctgggatctcgtcggtgcgtactccttcctccatctgtctgtaatgttctatgttcgcttgggcatcctttatatgtgtgatctcaaatgtgtcccttgttatttacgggccgacctctctttta

SEQ ID NO: 26994 - DNA, 252 bp, Zea mays
gctccacccagagggatctcagagagctatccgaagctcgtacagtcaatagcactgtgcccgagtccaagcacatctattgacaaatatcctaccttaatagcgatcattttcattcactgttatcttctataataaaggacatcgtttagatttcatgtcattacgttccgcgaatcctacaaggaaaatatattctcttcacacgcttatgataacaaagaggaccttcgaactatcgaatattcttcg

SEQ ID NO: 26995 - DNA, 391 bp, Zea mays
  unsure (1)..(391): unsure at all n locations
agctttaaacctctccatttcttacccattanctacccggccatattgaaactacactctataaacattataatctacaatgcaaaacgatgcaaaacattgtntttagtgaccatataggtgtaatgtataataattcacccatatggtctcaaaaacaccttttgcaccgttttgcactatgaattatattgtttgtagagcatattttaaatataagtatgcatggataagggtaagnagatcgagaatgtccaagggcttgctcatcttggattaatcctatagaatgagtgaattgagtcaattacatcaataacagtcaaagtgccctcaacctatctatctacttaatctatatgaaatggaataaccgaaaaacctaatgtat

SEQ ID NO: 26996 - DNA, 328 bp, Zea mays
  unsure (1)..(328): unsure at all n locations
tcgtcatctganagaaatttaccctgaaggtgagagatgttctcagttctccaatcttcactaaaaacaggagatatattaagaactgctctttcaaggagttccaccgaaggtgcttttattggttcaaagaacacattcgaaggtaaaggcagcccctgtgctgctgacttagctagcagatcagcatgctcattttgtcctcgagggatattcttgacagaaaacccttcgaaggaagcttcgattcttcgaaccatatccagatatttttcaagcttcggatccttagccttacaacttttggcaatatgacccgaaacaacct

SEQ ID NO: 26997 - DNA, 388 bp, Zea mays
  unsure (1)..(388): unsure at all n locations
agctntagtaatatccagcttgatcatcagactatgatgtctttgntggtgaagaaatttagccgtttgttgaaccaacatgaaattatcctggataaaacgacccttaatgaaggcattttggtttggagagaccaaatcattgagtcttgaagccaagcgagaagccaatatcttggtgattagttttgcaaagctgtgaacaaggctgataggtctaaaatctttgacctgatcagcactatctttctttgggattagagtgataaaagcagagttcagcttatggaaattatcaattnttttgttccanaccgcaatcaccgcagccataagttcatctttaataatggaccagcaagtcttataaaatctaccagtgaacccg

SEQ ID NO: 26998 - DNA, 438 bp, Zea mays
  unsure (1)..(438): unsure at all n locations
ctcagcttctaagggagaagcacatttaggactaactaatgttcattttgagaaagacaggatttgtagcgcatgtcaagcagggaagcaagttggcactcatcatccacataagaacatcttgacgactgacaggccactcgagctccttcacatggacctattcggcccgatcgcttacataagcatcagcgggagtaagtattgtctagttattgtggatgactattctcgcttcacttgggtattctttntacaggaaaaatctcaaacccaagagactttatagggattcttgagacaggctcaaaatgagttcggcttgaggatcaagaaaataagaagcaataatgggacggagttcaagaattcacaaattgaaggcttccttgaggagganggcatcaagcatgagttctctttccctacatccacaac

SEQ ID NO: 26999 - DNA, 349 bp, Zea mays
  unsure (1)..(349): unsure at all n locations
agcttacccatgacgaggcatgtgaccagttaaaggatcctcgatcatcaagcctacatgagacggtccttaatcgactcagacggagacactacaccaagactctcttctcgtgcaagtcacccacccggtctcagcttaatcatttcaaacccaaagtttgatacctggctgaggtacatctttttcgatgttgaacccatcatggccatgatggatccaccatcaagttntgtttttgaaaagcatcccacccactttgcaacatcatcttttgtgaaaacaaaacatnttgtttttctagaggagggctaagcataataaanacctttcataaaacagggattta

SEQ ID NO: 27000 - DNA, 333 bp, Zea mays
ctcgggcggctctagcgggtcgcggagaggtcgccggagctaggggcgagctccggggagtttggcgcgggacagaagatgcaacaaggaagatagccgggcactggggcgggctttatagccgtggcgcgggcgtggtcacgggcggccgcggacgcgagggggttcgcgcatgggcgtgctctgagcgcgccccgagtgttagcccgcgtcgaacacgtgtgtgtttgcttctgccatggttcaacggccaattggagcaccttatcatgcagatcttggcaaaaccactgtgtacgggctcttccctgcaccatatcctacactttttat

SEQ ID NO: 27001 - DNA, 412 bp, Zea mays
aaacccgccgcatgcaagcattactcaacagcatactctgtgccaggctttcttcgtttataacaccttcgttgtcaaagacaataaaaagtcgaagaaaagttttaccttgaaattagaatagaataaactactcgacacattctgtctgcggtagcggcttatgtcagtctcaagcttcgggaaaccaatactctttgatagagtaccgatgaccttctgctccggtttgatctctggaccaagctaacttcacattgtgcacacctccgaagagtagtgccccctgttgatattcgtaagatatggattaatcttttaactcttcttgctaagcttagacaaatcttgtgcaactaagtattgagaggtgtaaattccctcttctgagacgtgtctgctaattcttttc

SEQ ID NO: 27002 - DNA, 466 bp, Zea mays
  unsure (1)..(466): unsure at all n locations
ctgcagcttatccactgactcttactttctcagtgagagtagaagttcactactggaaaatcttcataaatcttctatagtatcctgccaatccaagaaaacttctgatcttggacgcatnctttggttgcttccaatccagtatctcacttatctttcctgggtccactttaattccaccatcggtaacgatatgccctaagaaagcaacttccttcagccaaaaatcacactttgagaactttgcgtacagttggttgtcacgaagcttttgtaggactagccttagatgatcttcatgtgtttcttcattcggagagtatatcagtatgtcgtcaatgaatacgaccacaaactgatccagatattccatgaatactttattcattaagttcataaagtatgccggtgcattagtcagtctaaacgacatgaccaanaactcatataatccatatctcgttat

SEQ ID NO: 27003 - DNA, 425 bp, Zea mays
  unsure (1)..(425): unsure at all n locations
gctgcatctttgatcttagccttgctctcctgtcttttgacccgatataacctgtgtaatcactgtaagaatggcccttctgattaccattgcttttagcttccaaagacccataagttgggcttcgtactcatcattattgtttgtacaactgaaatcgagtcttgcagcataacaagttttaactatggatggcgagaccaacacatcagctgcttctgtctcgaagatttcctatgacccatcgcanaacactgtccatactttggcatctttatttgctacttcatcctgagcccctgtcgtccaatcggagataaaatcttgcaacgcttgggactgaatcgacaatctatgcacataatcaatgcgagattcattgagctctgcagcccatttgtcaatccgcccagatgcttcactat

SEQ ID NO: 27004 - DNA, 336 bp, Zea mays
ctggaactgaccttctgggagactcgtttcttttgccacatgctaccagagggtccgactcaaaaagcaatgtatgaattctcaatacatgcacagaatatgactccgaagtacttgctacactaattcttgtctgtcacagtactacctagcgtaaaagagtgataaatgcccaagctggagggggataagaaagaacgtgaacttgtacgctagccttactacttcacatgtaagaaatactctaaaactccttgacaagagtgcgtggatactattgcagtgatgcgcaatgagatactttgcaatattcgaagaagaagaataattgatgac

SEQ ID NO: 27005 - DNA, 399 bp, Zea mays
catgcaagcttctcctggacaagtgctgcacataccgatgagtgcgaagctgtcacatataacaatagaggagcccctggcgttggtggaggtagtgttgttacgtctatcaaatattgcttcagctcttcgaaggctttctgttgaattggtccctattgaaaaacttcagctgacttcagcacttcgaaaaatggtaaatatctctctgctgatctagatataaatctgttgagagatgccagtcttcccgtcaatctttgagctcccttttttgtacttggtggctccattcgaaggatagcttcgatcttatatggattagcttcaatcccttttgttgagactagacagccaagaaatttcctttcttactccgaaacacattttctggttcac

SEQ ID NO: 27006 - DNA, 216 bp, Zea mays
caatgaaatctgcgtacgcctgagattgaattgaggatctgtgtacataatcaatggtgcaatcattaagctctgcaacccatgttccaatccttcatgtagcttatctgttgctcattatgtccttcagaggttgagatgaaggcactaatatatgatatgcttgataataatgcggaagcttgctggaggccatcaacacagcatacaatacct

SEQ ID NO: 27007 - DNA, 373 bp, Zea mays
tgcacgcatgcaagctttgaggtgacttgccgaagctacagaattcgcagggtggttgtctatgtattgtgggacataacgcggatgaaacgaagcagtatgcataacctgcttcgactgagcttgttgagatgcagcttcagctaattccttttgcttctggattgaaacatggcacgtcctaggggtgtggcccttgccctcttcacagaataagcaaaacagactccttggctgatctccgaatcttccgccgaagcccctggcgcctctgtctcttggagctggtggccgatagaaagtttgttgttgccccgaagcctgtgatgagcactgcggcctgttttgctgactcccccttatcatcattctg

SEQ ID NO: 27008 - DNA, 364 bp, Zea mays
  unsure (1)..(364): unsure at all n locations
ttggctcatactccttcttcatccannattgatgatagcctgaataacaatccagcagactcataagctctgatgaagctgctgcatcaactanggaatctatccttggtaatgggaactcatctttcggacaagccttgttgagatcggtaaaatcaatacacatcctccatttgccattggcctctntaaccataacagtgttggctagccattctgggtacttcacttctctgatgactccggcgctaaggagtctttntacttcattccgagcacctttggccttgtcatcagacattttccaaagcctcttgtttctggtctgaaggatggatcaacattgagcgagtgctcaataaca

SEQ ID NO: 27009 - DNA, 164 bp, Zea mays
tcttatggcagcctctaccctatttctgcttgatacatttgctgaatgactaagaatgctggcaccactaccaggattatattgatctgccatgaggggataatctttcccttactgtattatactctaatatgaactaactttttttgacaattatactttct

SEQ ID NO: 27010 - DNA, 271 bp, Zea mays
ctcatgatcgtgcacaaccaatcaaacagtattacgaatttatctattccccagcttctctggccatttagccgagattgaaaatgctacatacaaagcaagacatctgttttgagagaaccgaataggtcatgggtttacatcagaaggaacgcatattaggttgtggcccatactcaattgccacgtgtacgggagggtggtggtcactgctttggcgttatatgagagcgcataagaggtcactgtgccggtgctatatgccttatta

SEQ ID NO: 27011 - DNA, 435 bp, Zea mays
  unsure (1)..(435): unsure at all n locations
agctntagtgttaagcgagagagatttgntgtgtttctttgagctctcgcgcttggattgctttctttctcattgtttcttgagatcaaactcacttgtaattgaggcaagagacaccaatcgtgtggtgatccttgtgggaactctgtgttccaagtgattgagaagaaaagctcactcggtccgagggaccgtttgagagagggaaagggttgaaagagacccggtctttgtgaccacctcaactggagtaggtttgcaagaaccgaacctcggtaaaacaaatccgcgtgtcacactctttattcgcttgcgagttgtttccgccctctctctcggactcgtttctatttctaacgctaacccggcttgtagttgtgattaattttgtaatttcagattcgcctattaccccccctctagcgactttacccg

SEQ ID NO: 27012 - DNA, 358 bp, Zea mays
  unsure (1)..(358): unsure at all n locations
ctcacgctatgaagattcttcaatccaacatgagctagtccgcggtgttctatccaacccaagttagtcttagcaattaagcaagtgtcgagttcagctctatcaaaatctaccaagtatagttgcccctctaacactcccttaaatgcaattgaatcatcacttcttctaaagacagtgacacctatatcagtgaaaagacagctgtagcccatttgacataattganaaacagaaagcaagttgtaatctaaggaatccacaagaaagacattggaaatggaatggtcaagagatatagcaattttacccaaacctttgaccaaaccttgatttccatccccgaatgtgatcgctc

SEQ ID NO: 27013 - DNA, 458 bp, Zea mays
  unsure (1)..(458): unsure at all n locations
atcctctgagtcacctgcngcatcaagcttactctcggaatcaactaagctccatcttgaagcctgcttcgtccgaagaacaaacttcggaagaaaaaagtattaaacttccacaaattcataattaaatggccagagtgcgttctaccgccagggttgagcgtgaggggggcgaaactgaagcttcggagactgttcccatctccgaagcgatgcaaagatccggactggtaactttggaaaagatccccagcgatgatgcagaacaagcagaacaagcaattgccgaagcagaagaagaagatattgaggaaactgatcccgaagatgattctcatattgccgtgccaagtaagtccagccatttggacttcgaaaagtcgactgtctccaaggctgacttctccaagatggtgaaatccggttattttactgaanatgagaagaaggtacttctc

SEQ ID NO: 27014 - DNA, 304 bp, Zea mays
tgggcggccgcgggctcgctgcgcacgggcaaacggcgacgagttaactccggccaggtatggaaggtgtgcgggagggtgtatccgaagcctgtgagggctttataagctcgggcgcgggccacggcgcgggtttggctcgggcgcggcgcggggcatgctaaggcgcgcgcgaacgtgctctggcgcgggcagacggtgtctaacacgtggcagtgcgtttcttccaatgttcaaacgcttccagagatcgcaaacgtgcgaatctcgccatgaatccggcgcggacctctctctggcacct

SEQ ID NO: 27015 - DNA, 381 bp, Zea mays
agcttccctttatcccgagacgcgatacacctttcattagtgaaactctcaagtagacataatatcctacgagacagcataagggttgtcgtcgccggtctgcataactcttctaacgagcttgggctttcttcatattatgaattattttctgaactttgtcttcagtttctttcaccatatcacgcctgaagaagtacctttcaccaggttcagaccaatttagtggagtacgacatcgtcgtccatatgatgcttcgaagggtgccatcttgatactttcttgatagctattattatatgaaaactccgccaagggcaaacattcatcctcattttgggagaagtccagaacacatgctcgcaacatatcttctagta

SEQ ID NO: 27016 - DNA, 424 bp, Zea mays
  unsure (1)..(424): unsure at all n locations
tcctctcagtcacctgcggcatgcaagcttatcaccgctattatntataaactacccataatatgccatctaaggcaacacagcacatttacttcctttctcccccaaccctgctgttctgcccagatttcttgcagctagtgaatnttttttctcgaaagcgcaggagaactgcgccccataatatattaagaagaggaaaaaggggggccaaaaaaggccagtacaaaacagtctccttacggaggccagtaagaagcatacataaatgaatccattagaccctccttagctctcagctaaaggtacagctagatggcagagccccttggcaccagcaatcttccattgcgtcctttcctcattagcagctctaagattcatggtaacactgggggttacagccataaaacgcatttgtttc

SEQ ID NO: 27017 - DNA, 513 bp, Zea mays
  unsure (1)..(513): unsure at all n locations
tacggaccttgaaactcagctatatatctctttcctgcaagcttggcagcatattttggtacccatcgcttgatgggtccatcaagggtagtcaataaagatctatgaacccaaaagtcctttgtgttagcacttggtaaactcattacctttctagcacaagttgcaattntgggttgcctagttacatgtgaaataattgacaatctagaagtgggatagttaccaatgggacaatccttgcattgatgtcccttctttccgcatatgtagcaaaggtgatcttcaagtcttgaagatttcttctttccttggtttttgctttctacatggctagttaatattttcttttctaacattatgccttttttgttcaaatggggacaagacttaaataagtgtcccttctctgagcatttgaaacaaagttatcatccttgtanataatcaagccattttaatatagggacatgacctaatcgagtgtccttttcaaagcatcactacactttt

SEQ ID NO: 27018 - DNA, 377 bp, Zea mays
  unsure (1)..(377): unsure at all n locations
agcttctaaagggagagcacattntangactattctatgttcattttgagaaagacagggtttgtagcgcatgccaagcacgaaagcaagttggtgcccatcatccacacaagaacatcatgacgaccgacaggccgcttgagctactccacatggatctattcggcccgattgcttacataagcatcggcgggagtaagtattgtcttgtaatagtggatgattattctcgcttcacttgggtattctttttgcaggaaaaatctcaaacccaagaaaccttatagggattcttgagacgagctcaaaacgagttcggcttaaggatcaagaaaattagaagcgacaacgggacgggagtcaagaactctcaaatc

SEQ ID NO: 27019 - DNA, 456 bp, Zea mays
  unsure (1)..(456): unsure at all n locations
gaccataaaactcagctatccttgtatgaggataagctgcctttgttccaaatgtgtatggtccttaagccctcttgaaatccttaaaggtaaatgcttgagatgtttataacatgctttcataagtgcatcaattgtcatgagcatcacacttatactatgacacaatgcacttaacattctctatgatataaacatgacctcattaacctaattatgtgcacttggcgtttaagaccaaaaatttgtattcctctcaaagcacatatttagggggagcaatctatattatatagaattgtttaagcttaattgacatatcattntaatcatatctctttcctttggtacatttgcatatttcttatctctctttgtgccaaggctaagactaatatgttntcatgagcatctcatgtattaagtcttaaattgaaagggaaatggagtattcgg

SEQ ID NO: 27020 - DNA, 371 bp, Zea mays
  unsure (1)..(371): unsure at all n locations
agctntgttccaatgcactcatgatcatgaataataccttcaggcatatgtccgaaggttcttacgactgagggcacaagcgccaacggtgcctaatgaaattgttattgaggccatgattaaggggcttcggccaggacctacagcccaatacttcgccaggaaaccccctcagaccctggagaaactgcttcagaagatggatgaatatatctgagcagataatgactttcgacaaagaagggaggaagcttacaggttctctgaaatgaccaggggcttcggagggagaatccaccctaggcacgtcagatctatccattctactcagaatgatgataggggaagtcagcaacaaaggtcgcagtatt

SEQ ID NO: 27021 - DNA, 433 bp, Zea mays
  unsure (1)..(433): unsure at all n locations
tttagtatgctgtatggtgggctcccattgtagcagatattaatgtcgatatgttttcttatcatgatatctatttatactntgntgcttncccgtttatgcaattntcaaaggagatgctgtcgaaattttatatacgaatgttagaagtgtagtttagtagcattctggggtgtntgtggatcccggngtgttacagttggtatcaaagcttangctntagattcttggcaatttgaagataaatttgacacacttgcacatataggaagggtatgggttcaagtatctttgatatatattagtgactttgaagtgcagatgacaataatttcacccctcccgcttnctttacngtgatgtggtaagttggtatggctaatgcctgatatattatttctgaaaattgatatttttaattatgcgttgatat

SEQ ID NO: 27022 - DNA, 381 bp, Zea mays
  unsure (1)..(381): unsure at all n locations
cataccgacttcagntacccgacaccttgtctgctgcgcataatgtgttccacgtgtaccaattgtaaaaatgtctttccggtcctgatcgaactcgtgaagtgacatatgttgtccttgaaccggacttgacatattctgagcaccctattcgagtcttggatcaaaaggacaggattacctcgaaaaaaactctcaagttctacaagatacagtggaaccaacattccgaagatgatgctacatgggaaacttaagactttttagataagaatttcccaggctttctagccttcttctaatttgtaaagcatgtatagctggngtaattaaggagtgatatccaaaccacccctgccttgtaccaaaaataaggatata

SEQ ID NO: 27023 - DNA, 358 bp, Zea mays
  unsure (1)..(358): unsure at all n locations
caggtactctgagatggccaggggctacngacgaagatttcaccccaggcatgtcatgtcaatccataatgccagcccaagtgatgatatgagaagccaacctccataggcaacaacacagctcctaatcatcagggccgcaacatatttgcttcaagacaccacctccaataggcatagggggcacaagcttcggatgaagataccaagaccaacccatgagactgttttgtttggtctgcggctaagacaaaggccacaccacaagaacgtgccatgtcactattcataagcataaagagcttgcctaaactgaagcacgggctaaatacgcgaagcaagtcctacatactgcttc

SEQ ID NO: 27024 - DNA, 430 bp, Zea mays
  unsure (1)..(430): unsure at all n locations
gtatcatacgctattattatgcaaattgactcaagcctatctaccggtgcataggcttcaccgaaatccacaccttcgacttgngagtatcccttggccacaagtcgagctttgttccttgtcaccacaccatgctcatcatgcttgttgcggaagacccactgggctcctacaacatcttgggtaggacgtggaactaaatgtcatacctcgttcctcttgaaattgctgagctcctcttgcatcgccatcacccaatccgaatcttgaagtgcttcctctaccctgtgtggctcaataaaggaaacaaaaagtaatgttcacaatatggcacacgagagcagtggtaccccttatgaatgtcccaagatgtgcaacaagagacatcatgattgttgaggaccttgggagggcgacttggtgtcatcta

SEQ ID NO: 27025 - DNA, 442 bp, Zea mays
  unsure (1)..(442): unsure at all n locations
gctctctataggctatagcaagccccacacgctttgttttataagcttannggattcttgcttgttgaagactctaaaatagggaaggttgacactaccctatttactaatagaattggcaaagattagtgtttttgtcaaatttatgttgatgatattatttttggatctactaatgaattgttttgcgaggaatttggaagaatggtgtcaaaagaattcgaaatgtctatgataggagaattgagcttcttccttggtcttcaaatcatacaattgaaagatggaatctatataagtcaatcactatatttgaaagatatgctcaagaaagttgggttatagaatgcaaatcctatcaagactgctatggcaacaaatggtcatctacacttatatgagggaaggactatgggtgatcaaaacctctctgctcaataat

SEQ ID NO: 27026 - DNA, 349 bp, Zea mays
  unsure (1)..(349): unsure at all n locations
ctatattgtgttatgaatggtttatgcaacattatccctatggaatgtgattgggtacacaaggttctgcagtttcaagatggtggacaggaggtgaccttatatggcgatgatgtccacccgggttcaaccattcaggaggtatcagcacttcaagtgcagaaatggcttgctggacatgatatttgggccatggtgctagtggaatccactgctgattctggcagccaagttaatgaggctgatattcagtttgctgctgcaagagtttgctgaattggttaatgttcctacacatctaccaccaatgaggcaatttgatcactgcatacctntaatgcaactcttg

SEQ ID NO: 27027 - DNA, 326 bp, Zea mays
  unsure (1)..(326): unsure at all n locations
atgagccatngcttttgatctgacacctgcatagctgatcctaaatcaataccgaaatggttggagtatgatcgtagagtacctcacatggagaacgtccaatagttaaatggaaactggtgttgtaccaaaattatgcgactggtaaccactatcacttgttggacaagcgtgaatgaaacatctcaaataagtctccatgcattggttgacccgctctgtttgaccatccgattgagggtggtaagccgagctcatgctgtcaagggtagtgagcccgagggtctggggacctcagctacgtagatcgtagtcgctgtccatga

SEQ ID NO: 27028 - DNA, 335 bp, Zea mays
cccactgtgttagcggcgatttatagtcagcccatgctagacttagccattaagcatgcatctagacctgcctcttcttttgcaaaaacaactatagaaagcttgccgtttaatacacccttaacagctaacgaaccatcacttcttctaaagacagacacatatatagtggccaaaagacagctatatcccatattgcataattgactaacagataacacattatatccaagagactctactaactacacattatagatagaatgctcattataaattgcgatattacctaacccttttaccttgccttgattcccatcaccgaatataattga

SEQ ID NO: 27029 - DNA, 366 bp, Zea mays
acatgagctaggcggagatgttttatcccacccatgttagtcttagcaataaagcaagcgtctagttcagctctatcacagtctaccaagtatagctgaccctctaacactcgcttacatgctattgaatcatcacttcttctaaagacagtgacatttacatcagtgaatagacagttgtagcccatttgacataatcgcgaaacagaaagcaatgtgtaatctaatgaatcaacaagaaaaacattggaaatggaatggtcaggcgaaatagcaattgttcccatacctttgaccaacccttgatttccatccccgaatgtgatagcccgctggggatctttgttttctcatatgaagagaaca

SEQ ID NO: 27030 - DNA, 400 bp, Zea mays
  unsure (1)..(400): unsure at all n locations
acattgttccaacttgatgtaaatcaagactgttcgattgtcatggattcgatccacattgcacagaatatcctgcaaaagattcctgagcatgtcaaggttcagtttgaacccatgtgtgtacataaatacgcttnttggtctacaatcataatacataatgttttctaacaaatattaaaaatcacaaatgctacttgtcgctgatgcataatcttcaatctagacaccaatatcagggagatagcgagatgaaaataaacttgcctggctcgtctcactggtggttgacgggttgctacttatctctgatgattagtcacaccaccatggcaccaccacaacataaacgttgcagagcagatgtcgcactacagcctacctttcttcgagagcggac

SEQ ID NO: 27031 - DNA, 318 bp, Zea mays
atgacgtgtcccatgtgtctcatctgcggaaatgagtccgcctacccactaaagtgctacctgagccaggcattgagatagaaccagactcttcctatcaagagtaccccatcaaggtattggatcagaaggagagatcaacgcgggcaaggtcaatccgaatgtataaggtttagtggagtcaccattcaccagaagaagcaaccggggaggttgatgattttctacgctctcgcttccccgactttctgcccaaaggagtcggtacgtaaccccaaaactccacccccacctgccctttggataccattattagaa

SEQ ID NO: 27032 - DNA, 375 bp, Zea mays
  unsure (1)..(375): unsure at all n locations
ctactgccttaagttggcatgtgtttttcttagctaagctacctcacacaaagntgtattcattattctgatgatttccaccagcaaggtctggtaaacttggcattctccaacccacaacacattgtacaaaacaaccacatctttgacctgaatggcttcatctttttcaagcgtaacttgggccaacttctcttgtacttgggcttactctgcagcaagcgcttcctgagcctggacaactaagtcttagctgtggtgagggaactgttgaccctccccaaaaagcactttgtgttagtttatagctgcatcactgcaaacataacactggaagatgcagagtcgctttgctgatacttactggcaccttct

SEQ ID NO: 27033 - DNA, 164 bp, Zea mays
cgccaccggcccgcgaacgacatggcatcctgattcgaacgtgctagcaccatcagcgatctcgcgagtctcctgcaaaggggcgtaaaatgggccagctccagccttgtttaggacgaatgcccacacccactgatattaaaatgcaaatcagcactgattaa

SEQ ID NO: 27034 - DNA, 349 bp, Zea mays
  unsure (1)..(349): unsure at all n locations
catgcanctttataaagaaagatattctccttctttgttctttcaactgtgtaattctcgncgaatacgtcgcataagagaaccatcgtcgaaagcatgaaccctgtatgatatgctctctcattgagctttgtcgcagctggacttaacctcatgggttagccagaatatctgaagaagagactgcccttcctctttcactttttgggttaacgcataatgatgtatgatgcgatgtcatgcgatatgatgtgatggtatgatgcaaattatgttgatgcacaaaacataaaaattagactctttattcacttaagaacgaagttggagtctcttcaccttttactta

SEQ ID NO: 27035 - DNA, 384 bp, Zea mays
  unsure (1)..(384): unsure at all n locations
cagcttatgaagaacttcatttcacatgggctattcggcgatgctagagccaacccatattagtcttagcaattaagcaagtgtctagttcagccttgttatcattgaaatcaactaaatatagctgaccatctaacactcccttaaattctatagaatcatcacttcttctaaagacagtaacacctacatcaatgaataaacagctgtagcccattttgcataattgagaaactgaaagcaagttataatctaaagaatctactagaaaaacattagaaatgaaatggttaggagatatagcaatnttacccaagcctttgaccaaccttgattttcatcccgaaagtgataacatcttgtggatcttcatttttctcatat

SEQ ID NO: 27036 - DNA, 377 bp, Zea mays
  unsure (1)..(377): unsure at all n locations
tgagacgggaacaaccgtggcatgcactacatcccttgtttataatgtcaaggatttgaggattgccaagaggaagaaacaaaagatgaaattcaacacctcctccaaaagcctcaaccacgccttcacaaaaggtaacatccaaggtaatgatcaagccacacttcacattaagaggtgtagtgaatgctttaaagaggggtacttgattaagtcatgttcctacactaaaaatggcttgattattaacaaggatgatagactttgttttaagtgctccaagaagggacacttgcttagatcttgtccccatttaaaacaaaaaggcatagggttagaaaagaaaagttttactaaccatgtagcangcaacaaac

SEQ ID NO: 27037 - DNA, 464 bp, Zea mays
  unsure (1)..(464): unsure at all n locations
agcttagaaacatacctttacttgtgaattgttctttgttcatccatgggcatagattcacatgtaagcactcgtattggcactcaatcaccaaaatacttagaaatggcccacaggcacatttccctttcaatctccccctttttggtgatttatgccaacacaacatatagcaactagaacaaatgcaaaatcacttcaaataaaacaaattcgaagtntattcaatnttggcatatatggatcatcctttgccaccacttggtttggttctgcaaattaacctcatatctctatctctaagtcaagcacacatgttgaagcacaaagagagtcattccaaaagagattgatcaaagaattcaataactcaccctatgtccataaataacacttctccccacaagaagccaactttgacataatagacaatgcaagagttntgactaaacaaatagctctat

SEQ ID NO: 27038 - DNA, 260 bp, Zea mays
tttaagataatgaacaccctaaccatgtgtatatactcgtcaaggcgcttctatggactcaagcaagccccatgagcatggtatgaaactgcctgccgagaattctcttatcacttgaaggctgcaacagacggaaaagccgatcctacactctttactaaaactatttgacaaagattgtatgtatgccatactaatgctgatgataacacatatgggtctactaacaaacatacttgggaatagtttagcacgatcat

SEQ ID NO: 27039 - DNA, 345 bp, Zea mays
  unsure (1)..(345): unsure at all n locations
agcttacccatgacgaggcatgtgaccagnttatgggtcctcgatcatgaagcctacatcgagacggtccttaatcgactcaaatggagacactacaccgagactcctttctcgtgcaagtcacccgcccggtctcagcttaatcatttcaaacccaaagtttggtacctggcagaggtacatcattttcgatgttgaacccatcacggccatgatggatccaccatcaagttttaatttcgaaaacatcccacccacttttgccacatcatcttttgtaaaacaaaacattntatttttctaaagcaaggctaagcatcaaaatctttntgtaaaatgggtgat

SEQ ID NO: 27040 - DNA, 384 bp, Zea mays
  unsure (1)..(384): unsure at all n locations
gcgggaaaggggttggccccggtggttgcccttcggcggctctggcgggttgcggggaggtcgccggagctgcgggcgagctcgagagagttaggcgtggtacagaggaggcaacggggaagatggccgtgcactanggtgggttttatagccgcggcgcgggtgtgggcacggtgcggctgagggcgcgtggnggttcgcgtgcgtgcatgctctggacgcgcccccgagtgtcagcccacgtcgaacacgtgggggtttacttctgccagggttcaacggccgatttggttgacttatcgtgcagatcttatcacaaccctcgtgtacagtctcttctctgcaccaaatcctacctttntgatgtgagttcaagcaaagata

SEQ ID NO: 27041 - DNA, 459 bp, Zea mays
  unsure (1)..(459): unsure at all n locations
agcttngggaggtcttaatcccacatgtgctttcggcgatgtcatcaccagcccatgcaaggcttaagcattaagcatgcatctagaccgacctcttcttttgcaaaatcaactaaataaagtttgtcgtctagtacactcttaaaagctagtgaaccatcacatcttctaaagacagacacatctacatntgtgaatagacaattatatcccatattacataattgactgacagatagtanattatatccaagagactcaactaataacacattagagatagagtgctcattagataatgcaatcttgcctaaacctttcaccttgccttgtttcccatcaccgaatatgattgaatcttgggaatccttattcttgacgtatgaggtgaacatcttcttctcccccgcatatgggttgtgcatcgctgctataatccaacttgaacccccgatgcat

SEQ ID NO: 27042 - DNA, 441 bp, Zea mays
  unsure (1)..(441): unsure at all n locations
ccttaaatctcagctgactctttcgccttgagacaccggaatgtcacttcaattgtctgtagaggaggttgngagcctctcgtgtctagaccacgatgtcatcgacgtacgcctcgactgtgcgaccgatgtgttcgccgaacacatggttcatgcaccgctggtacgtcgcgcctgcattcctcaagccgaacggcatggtgacgtagcagtacatgccgaacggcgtgatgaaagaagtctcgagctggtcggctctttcattcggatctggtgatacccctagtaggcatcgacgaaggacagggtctcgcacccagcattggaatccacgatttggtccatgcgaggcatagggtatggaaccttcggacatgctttgttgagagcaatgtaatttacacacattcgccatttccaccctttgtttctccaagcaca

SEQ ID NO: 27043 - DNA, 209 bp, Zea mays
  unsure (1)..(209): unsure at all n locations
caaccttataactcctagtggcacctaccattatttttngatgctctgagggcncttatatgctagaagaagctccagcataatgactgcctatgtctttcacttccagattggtagaaatgtgctcacatatgttgatgatatcatagttaagagctcgatactatagaaccatgctactgtggtacctgagacatttgctaatttca

SEQ ID NO: 27044 - DNA, 359 bp, Zea mays
gttcattttgagaaagacaggatttgtagcgcatgccagcatggaagcatgttggagtccatcatccacacaagaacatcatgacgaccgacaggccgcttgagctactccacatggatctcttcggcccgattgcttacataagcatcggcgggagtaagtattgtcttgtaatagtggatgattattttcgcttcacttgcgtattctttttacaggagaaatctcaaacccaagagaccttatagggattcttgagacgggctctaaatgagttcggcttaaggatcaagaaaataagaagcgacaacgggacggagttcaagaactctcaaattgagggcttcttgaggaggagg

SEQ ID NO: 27045 - DNA, 310 bp, Zea mays
  unsure (1)..(310): unsure at all n locations
atgattaccccaacgctgaggagtctttgacttttactttgaatttagccttgtcatcagacatctcctaaagcttttattttcttggcttgatgttagggtccacattgagggcatgttaaataatgctattgtcaaccccacataagtaattagctgaccaagcaaagaaatcttcattgtggaataggaacttttcaagcttccatcctgctctgaagttaactgtgatccanagaagaccttctgaccacgacagtttgtgcttcatacttaactaaacgtatatgctacttaatgccaaagcatg

SEQ ID NO: 27046 - DNA, 484 bp, Zea mays
  unsure (1)..(484): unsure at all n locations
tgaggcatgcaagcttgtgagctagagtatggatcaataacgtttcttaaaatattagtgagaatacattgggcagcaagaacatttcttcacgttagcaccatcctaaattatagttcagctgttgaccaggtttatgtacatggtacacggagaagtcaataaaattgttttaaaaaaagtatcaatagagtgtctagattgttaatctatttgcaatatcaaatgcaccatcgcagctacactttnttttgcaggggctatacttttatatatatccaccattgaatattttggattaaagttcatcggaaagaaatatgatgatactcatgtgaatgatatggtaaaacaatcataactacaagtcaatgtgttgcagcctagcacctacatcaatggaactactacaactattttaatcaccacaaaaatgctgcagaaaacatagctactagggactacactacacgtcacatgaaca

SEQ ID NO: 27047 - DNA, 287 bp, Zea mays
  unsure (1)..(287): unsure at all n locations
ggaggagcgcatcacagcaagaatgtgatgaccacatcaagacccctggagctgctacatatggacctcttccgacccgtcgcctatctaagcatatgaggaggtaagtatggtttagttattgttgatgactnttcccgcttcacttgggtgttctttttgcaggataaggctgaaacccaagggaccctcaagcgcttcctcaggagagctcaaaatgagtttgagctcaaggtgaagaagataagaagcgacaacgggtccgagttcaagaaccttcaagtgga

SEQ ID NO: 27048 - DNA, 430 bp, Zea mays
  unsure (1)..(430): unsure at all n locations
tgcggcatgcaagcttgagaagatacttcatcctcacatgtgttatacggcgangccacagccagcccatgctagtcttagcaattaagcatgcatctagaccggcctcttcttttgcaaaatcaactaagtaaagcttgccgtctagtacacccttaaaggctagtgaaccatcacttcttctaaagacagacacatctacatttgtaaaaagacaattatatcccatattgcatagttgactaacagatagcaaatngtaaccaagagactcaactaataacacattggagatagagtgctcattagaaattgcaattttacctcaaccctttaccttgccttgattcccatcaccgaatataattgaatcttgggaatccctattctcgacgtaggaggtgaacaatcttctttctccccgtcatat

SEQ ID NO: 27049 - DNA, 293 bp, Zea mays
tatttaggtcattcctcaacatgcaaaagcgggtcttatcaagtggcttagtgaatatatccgctaattgatcttccgacctcactccttctaaaatgatatctcctttagcaacatgatctctaaggaagtgatgacggatatcaatgtgcttggtgcgagagtgttgtacacgattattagcacatttaacagcactctcattatcacacaacaaaggtactttttctataactacgccataggctagaagagtttgtttcatatattaaatctgtgtacaacaagcacct

SEQ ID NO: 27050 - DNA, 345 bp, Zea mays
  unsure (1)..(345): unsure at all n locations
agcttcgtcatctgaaagaatgttaccctgattgaaagagatgatctcagttctccagtcttcactataaacaggagatatattgaggactgctctttcaagaagttcaaccgaaggtgctnttattgtttcgaaaaatacttccgaaggtaagggcagcccctgtgctgctgacttggctagcaaatcagcatgttcattatctcctcgtggaatatttttgacagaaaacccttcaaaggaagcctcaatccttcggaccgtgtctaaatatttctcaagttttgggtctcttgctttacaactcttgtcaatatgaccagaaataacctgngaatcagtttt

SEQ ID NO: 27051 - DNA, 172 bp, Zea mays
gaatgggacccgcaagttccattgcggacctcgcgtaagatctgaatgccttcggtttgtgggacacattttaacatgggttgactgatctccttcttgtatagcttggccacaactaggacgaattccctgcttcggtgctttacgcgcttggcctcattgacgtcactcg

SEQ ID NO: 27052 - DNA, 363 bp, Zea mays
acctgaggcatgcagctcggaagatcttcatttcatctgggctttcggcgatgctagagcctgcccatattagtcttagcaattaagcaagtgtcgacgtcagctctgttattattaaaatcaactaaatatagctgaccctctaacactcccttaaatgctattgaatgatcacttcttctaaagacagtaacaccaatattactaaaaagacagttgtaacccattttgcacaattgagaaattgatagcaagttataatctaatgaatctataagaaagacattagaaatagaatggtcaggtgatatagcaattttaccagaacctttgaccaattcttgatattcattcctgaatgtg

SEQ ID NO: 27053 - DNA, 460 bp, Zea mays
  unsure (1)..(460): unsure at all n locations
agctttaactctcgcgagatttttccccatgtttttctaaccttggtaaggacattatcgcatgtgatattctatgcatatttactttattngttctttcgtaatggcgtactgtttgtttcctaatttgaatggatggatgtatgtatgcttgcaatcgcatatagaacgatccggtcgaagagcccgaataactcgtatgagaagcccctgaacaacaaatcggttggtggaagcaagtgtcctctgacctatctctgtcctattcattctctaattcacctcccgcattacacatttatacctaaggattgactagattttgtatccatgtcctcgtttacctatttgggtcagattattattgtttaactttatgctattgctcgactctaatcaatgaacatgatgagatcatatatgatacgctcgtttccctcttcttatatgaggttatact

SEQ ID NO: 27054 - DNA, 178 bp, Zea mays
  unsure (1)..(178): unsure at all n locations
agtactatatccccctcttgttccacatgcaatatgtggtatgatgcttatgttatgcaaaatgatgtgatgatgttatgttatgcaaaatgatatttgtgccgaaaatacacacatccctgcaataaagcacacaatggtntttatcagcgctgacttttcactgtaagcctccctt

SEQ ID NO: 27055 - DNA, 365 bp, Zea mays
  unsure (1)..(365): unsure at all n locations
agcttgaatatatcttaatatatacacatattatgttctaccaattagtatattataaaagtcatgtgtggttcataagatgataaaacacattataacattattaaacctttttaccgttttgaaaagatatatgctatatgtctatggttaatgagctatgaaacatattaaacattgatttatgaaacattacaaaacatattgtaaaacaattattgatgaaaagttattatatacgcctaatcgagttttatgtggaaggatgattaaaatgataattataattattttcattaagaanaatacatgacctagatagggttttattcaacagataattaatcaattatatatatttactt

SEQ ID NO: 27056 - DNA, 353 bp, Zea mays
  unsure (1)..(353): unsure at all n locations
atgaaaatctnatcccacatggctaggcggggttcagagccacccatgtagtttagcagtaagcaagtgtcgagttcagctctatcaaaatctaccaaggatagctgatcctttaacactcccttaaatgctattgaatcatcacttcttctaaagacagggacacctacatcagtaaatagacagttgtagcccatcttgcataattgagatacggaaagcaaattgtaatctaatgaatctacaagaacaacattggaaatagaatggtcaggtgatatatgcaatttacccaatccttngaccaaaccttgagttccatccccgaatgtgatagctcgctggggatcttg

SEQ ID NO: 27057 - DNA, 406 bp, Zea mays
  unsure (1)..(406): unsure at all n locations
agcttgtgttattagngttatgcattacatgaattcattnttggtttaactcttacgtcttaatgagataaatagaattaggtatgtaattatggataacacttaaaggataatcaaattcctaaatgagattagtccatcttataatttaatctttntctttgtttaaattattacttaacctttttgagatatgttccaaacacttagagagtaatcaatccccaattaagattagtccatcttacaacttaatcttattctcctttattttagtgttacctctttatgagttgtgttccaatgtttgtacatgtctgatgtgatgttcatntttaccttccaaatgtattgaatgtatgctcgctttacttagacaacgagcagctcgtggttcctgagtgtg

SEQ ID NO: 27058 - DNA, 476 bp, Zea mays
  unsure (1)..(476): unsure at all n locations
ctttccaacacagcanaactctatccatgagagtcatattttcatattaagtaaattgatacgcctgagccttctaagagtgcgtaagggcgagtataggagcatcgcagcctgagacagggaccggagagcgtatggtggagaagagcgagaggaagaaataggagcaagatcaccatcggccagtgtgaccgaggtaatcgccccacaaggagattgtatttccttcgatgcctaggtacatgctactggcttccctttataaaccagggtcggcaccaactgataagagataaacttgtttaacaactccctgctattatttagctaataactccctgctattatctagctaacaacctanctattatctatctaacaactccatgctattatctatctaacaacctagctattatttagctaatccttatctgctggaactcaagaaatatctgtttgacacttatctgcta

SEQ ID NO: 27059 - DNA, 443 bp, Zea mays
acatgtgctatgcggcgattctacagccagtccatgctagtcttagctattaagcatgcatctagaccggcctcttcttttgcaaaatcaactaaataaagtttgtcgtctaatacacccttaagagctagtgaaccatcacttcttctaaagacagacacatctacatttgtaaatagacagttatatcccatatgacataattgactaacagatagcaaattatatccaagactctccactaaaaacacattatagatagaatgctcattagaaattgcaagtttacctaacccttttaccttgccttgattcccatcaccgaatataattgaattctgtgaatccttattcttgacgttggaggtgaacatcttcttctcccccgtcatatgggtatgtgcatccgctatcaataattcagcttagacaccctgatgcat

SEQ ID NO: 27060 - DNA, 237 bp, Zea mays
ttactcatgctgtttgcattgatcatctctctatgtcatctaagatcataaagggaacatgaaaaaggaggtgcttcaagtgcaacgaattatggcacttaattgcgtcttgccacacatatacattgatgaaggattgaagagatagtttggatgctagataatgaccatatgtcatctcatgtcactcatgaataactaagatgtgacgctacacatgacttttaattataaaaa

SEQ ID NO: 27061 - DNA, 375 bp, Zea mays
gagttcctctgatcttaaagaaaaatgtgttagtctgttgataagacttatcatatgcttcttgttgtattatatggtaataatgcaaaattaaggcttccgttgatatgaatcaattggtatctactgtgtttatcctgtgatagatatgcatgtggtttatggcgcttaagattgctctaaattagtatctgagtttaacttggtatcttaatggtgaatagtggtaggttgatattcctgtgagatatccactaaattgaatggtgtgtaactctgattatgtgcatttgtgtgttatagcatccatggttgatctttgacacaatgcatttcaaaaagtgtaacgtgtaaaatgcttgaattgctaatatg

SEQ ID NO: 27062 - DNA, 287 bp, Zea mays
actctccactagaaacacattatagatagaatgctcattggaaattgcaattttacctagcccttataccttgccttgatttccatcaccgaatattattgaatcctgggaatctttattcttgacataggaggtgaacatcttcttctcccccgtcatatggtttgtgcatccgctgtcaataatccagcttgaacccccggatgcataaacctgcaaggcaaatttaggcttgggtcttaagtacccaactcatgttgggtcctacaaggttagcacaaatatcc

SEQ ID NO: 27063 - DNA, 349 bp, Zea mays
atgcaaactaaaaaaccccatgcttctagcctctctcgtaacggttattctcgttgccggaggcagtataagatgttatcttcgtctgtcccattgaacactagcgccctcttcggatatttcaaatgattatcttcaaaaatttcttcttcggataatttcttccccgaagcgagccgtacaatatatatcttatactttggaacgtgcttcggtggcaccactgttagttacttctaccaacattgcctctggtattttattttttcagctgcatctgcattgattgtttctttggtctcataaggatatacctcggctggctctaaatgcgcaacctcagtataaa

SEQ ID NO: 27064 - DNA, 353 bp, Zea mays
ttggcgaatcgcacggcttcaagtctgacatggtataagaaactgaagaataggttcaaaaaccaattcataatatgaagaacgccctatctcgtcagaatagttatgcataccggctacgacaacccttatgctatcttgtaggagattattgttctacttcgaaagtttcatccaatgaagggtgtatcgcgtatcggcgataaaggaaagcttgcaccacgatatattgcgccttgtcttattctaaaaagatatgggccagtggcataccgacttcagatacccgaaaccttgtctgtgcgcataatgtgtccacgtgtacaattgaaataggtcttcggggtctgatc

SEQ ID NO: 27065 - DNA, 424 bp, Zea mays
ctcagcttgaagaagggcacgagcctacacgtgataaatatatattatattaagactctcctgacttacttttctagatccattagaacctacttcattacacagatggacattaaactcattatttgttttcgaaacacatatcttgtcctgttattaggtgcctcaaatcttaagaaaaaaatatatcaagcacaaactaaataaaacattaatggtcaagagcggctgatatctaagtgtttgagcaactaagggtgaacatgggttgttgggattaggaaaagaaagttgtgaaggcaacacgcaagacgatttggctatattaagagctacagccatattctgaaatgtgttagccatgtttatcacatctcctccactctcttcttgagttgttatgtgctaaatacgataaaattat

SEQ ID NO: 27066 - DNA, 401 bp, Zea mays
acctgaggcatgcaagcttgccttcgcctcagtatatcacccgctgtttatcggagttttggaacgcgccaatgggagaattttcacagctgtcaaaaagatgctcctcgacgaataagggcaggtgggccgatttgttacccaaggcggtctgggtgctaaacacgactgagtgcatggctaccgggttcacccctttccgccttctatatggatcggaggccatgaccccacaagaaaaaaacatgggtcccgacgaacagtttcgtagccgtccccgacgtggacgagcccacttcgaaggatctcatcgatggagaccgagtcttcgccctacaggctctaaataaataccaagcccacacaaaagaatggcgcgaccacgaagtcatcccgaggga

SEQ ID NO: 27067 - DNA, 429 bp, Zea mays
  unsure (1)..(429): unsure at all n locations
actttatactcagctctaatctgctnttattcnggaaagatgctaatcattatgcacaaaaagcagagactactgatctaggaggttctacgaggactagctcacagtctccagatatgaaaaagaaccggaaggctgatgatggttctgaaggttcctcanaaaagtcgtgcatggacatggaacaggttgtagagatgttcagtgataaggaaggtgacatgttgaaaaactctatcaacatattcttactagaatggaactcagcaggtgtccgtcatgaggctaaatgtgttctatttggagtgtggtaccatgcaaaaaaccgacttatggagacaatgctatcgattctgctacagaaggtaatacatctttctttatatggacaaaacattgttgagtacactgacctcatcacctgtttac

SEQ ID NO: 27068 - DNA, 288 bp, Zea mays
gcctagaagagcgaactagattcgcttctacgatcttaataatgacttctgtactttttaggaaagaagtagtgtgacatctaatgacaaccgtagcgaatggagtttaagagaggcaagcgactatgagcatgttggtaggtcgcagtggcgcagtgagtgcactatttcgctacgcacctttccttcgtgtaataactccagctacttcctgtctagtgtcatcgtctactcgcgctgccagtcagccacagcaatgctcgcacgaccggcggtccgccgcctacc

SEQ ID NO: 27069 - DNA, 441 bp, Zea mays
tgcacacatagcacttttgaatacctttgatcatatctctcttacatgctatgactaatgtgtttcaagtcgatctcaaaccaagtcataggtatattgaaaggaaattggagtcttctgcgaagacaaaggcttccactccgtaactcatacttcgccaccactccgagcaactctctcttctttgggggagaaatgagcatcaatgaaaatgacttcatccttgggggagagaggattattactcatatgcaaaaggaccggatttcgcctttggtataatcttaactgatttacctttcaccgaaggggaacaacttacttatacggctctcatgattccgttttcgcgattcatgccagaagggggaaaatgacctcaagcgaatgcccgccaccccacaaattaaaaacctaagctccaaagcttttcatttgacc

SEQ ID NO: 27070 - DNA, 412 bp, Zea mays
  unsure (1)..(412): unsure at all n locations
tgcggcatgcangcttgcaggttgcgcatgtgatgcaagactttctatgnctatgccagggtgggaaactattcctggtcagcgagaggtacaacagggatctcaactccttgaagctctccggtatccccccacgagcatgttccttgtaagatacagtgtcctcaacttggtgcacacactgatgccaggagctataacgccactcagatagttggttcccacatcataagtattaaacttccgcagcaagctggagtcgatagcaatctcaccagagagcgagttgttcctcaagctgattaccctcagcagtggagaactttacagggaagcgggcaactcaccattcatcctattggtggcacgattacagactctagtctcctatcttttccaagacatcatggat

SEQ ID NO: 27071 - DNA, 333 bp, Zea mays
catacacacaaagaaatgtcggcatccaaacacaaatgattttgcgagtcgtagccaacacagaccaaccaaacatggagccgctgcattcctatatccaggctattgctatcctggcttacgagttagcctggtcagggtctacatgaaccaaacacacccattgttttctggatcttcttggttgagcctggattattttgggttctgtgctgcgttttggagctttttacctatgtggtgtgctggttatggtatttttgataccgatcctttattccttaatataatgataatgatgcacatatgttttaagtaatacaactgcgatta

SEQ ID NO: 27072 - DNA, 366 bp, Zea mays
  unsure (1)..(366): unsure at all n locations
cacctgangcatgcaagctaggacataaggctgtatcttgtggcaatctcaatcatnttttgcacagctgagttccgagcggctgtatgttgtctgcttggcactatcataccgctttgcgcacatagtacgtgctcatgcctcctgaaccattacttgtattactgagcgctctcgaagccagctacgaagggagactaacaatcactatgttaataacagaccaaccaagacatatgggctggcggccgtatataacctcttaaggtgttcgaccaaaggaagatcgaaaacgcgtatcatactagatttcaaccgcgcgcaaccaatctttacgcgttattggacactccctgataaagcacc

SEQ ID NO: 27073 - DNA, 363 bp, Zea mays
  unsure (1)..(363): unsure at all n locations
agcttgtatatgtattactctaccttgntgctcagcataagctctatcttgggcctgcggaatcagcctgttttacctacctgaaaatcatcgtagtaactttctcatgtgaggaactgaggatgatgcgagctgagcttaaagtcaaactattgctattcaactaaaagagcaggactagaagggtgcttgacagtgtttgtattgcatcttataatgatgccttaaatagattcgtgttcaaattgctacaagagtcatgagttntgacttacctttatggcttggttggaaacgcagcaatccccttcaatccatatgttttggaagggggtgatgtggaaaattagttcattttccact

SEQ ID NO: 27074 - DNA, 483 bp, Zea mays
  unsure (1)..(483): unsure at all n locations
tccctttatacccgaaacgcgatacacccttcatnggtgttactttcaagtagacataatcgccttccagaagcataagggttgtcgtcgtcggtctgcataactactttgtcgagtctgagctttcttcatagtatgaataattctctgaaccttttcttcgacctctttcaccataactggcctaaagaagtacctttccccaggttcagaccattttatcggagtacgacaccgtcgtccatacaaagcttcaaaggggtgccatcttaatgctttcttgatagctattattatgtgaaaactccgctaagggcaaacattcatcccatttctgtgggaattccagaacacatgcccgtagcatatcttccagtatttggtttaccctctcagtctgtccactggnttggggatgataggccgaactgtggagcaacttantacccacggatttatgaagcttcttccaaaagttggata

SEQ ID NO: 27075 - DNA, 215 bp, Zea mays
tatccagatcagctctattgaaatccactgaggtagctgccccctaaactcacttaaagctactgatcatacttcttctatagacagaacacttgttccgtgaaagacagttgaacccaattacataatggggaaacaaaaagcctggtgtaatttaaagaatctccagaaaaacattggaaatagagtggtcaggtgatatagcaattttatcg

SEQ ID NO: 27076 - DNA, 283 bp, Zea mays
  unsure (1)..(283): unsure at all n locations
agctngactttgtatgagatggcgctcgncatttatagcttccgccaaatcctcaaacaaaggagggggaaagactacaagtcccgctccaagaagggttgctacaaatgtggtaagcccggtcattttattgctaaatgtcctatgtctagtgacagtgaccgaggcgacgacaagaaggggagaagaaaggagaagaagaggtactacaggaagaagggcggcgatgcccatgnttgtcgcgagtgggactccgacgagagctcaagcgacttctccgacg

SEQ ID NO: 27077 - DNA, 426 bp, Zea mays
  unsure (1)..(426): unsure at all n locations
atggacgtgaagagtgccttcctcaacggacctttcaaagaagaggtcttgagcaacctcccggctctgaagatagtgagtaccctaaccatgtgtataaactctctaaggcgctttatgggctcaagcaagccccaagagcatggtatgaatgcctaagagatttccttatcactaatggtttcaaagtcggaaaggccgatcctacactctttaccaaaacactngaaaatgaattgtttgtatgccaaatttatgttgatgatattatatttgggtctactaacgaatctacatgtgaagagtttagtaggatcatgacacacacattcgagatgtcaatgatgggggagttgaagtacttcttgtgatttcaagtgaagcaactccaagagggcaccttcctaagccaaacgaagtatactc

SEQ ID NO: 27078 - DNA, 421 bp, Zea mays
gcagcatgcatgctctaagggagaaccagtttggactatctttgttcatttgagaaatacttgatttgttcgcatgtcaagcagggaagcaatgaggtgttcatcattcacacaagaacattatgacgactgacatgccacttgagctcctacacatggacctatatggcccgagtgctacattagcatgggatggagttagtactgtataacaattgtagaagatgattctcgcttcgctagggtagactttctgcctgaaaaatttcatacccagataccgtcatggattcttgagaccggctataatgagttggttcccgagcataagtatatagccatacgggacgggttaagatctacaaacgaatctccatgtgaggtggtttatcctgatggttttttctaacccacacaaatg

SEQ ID NO: 27079 - DNA, 473 bp, Zea mays
  unsure (1)..(473): unsure at all n locations
tgtagtaaaaccagtggtgaaacaaggtataaagataatcattatctatggtatcctattgggtcccagcaaaattaacctatgcagatcattatgattaataagaacatgaataggtaaaataagtgatcaagggcacaacttgccttccacgagctcctgctcagcagtctctaccaactgaaccccagaatcctctgtagcttgctcgtctactcgcatcaacacaatacatacatagtatagcaagaattaacattacaccaaccatgtgaacaaaatacacagcaataatctagacatgaaaataagatcatatgaactggaattattagttttggagttatatatcttaagttatgaagtttctaatgttntatgtgcttaatacaagattaagtgctagataatatttaaatcatctctcatcgtgaaacagaggtactaatgggtagacaataatattattaaaa

SEQ ID NO: 27080 - DNA, 301 bp, Zea mays
gacctgcgcgctgtcaacacgaaacatggggtgagcacatcacacaagaatggatgaccacttcagaccctgacctgctcatatggacctctcggaccgtccctatctgacataggaggagtagtatggctaacattgtgatactctcccgcttacttggggtcttttgccgataattgaacccacggacctcaagccttctcagagagctaaagagttgactccaggaaaagataggcacaacggtcagtcaaacctaagggagattcttgggagaggacaactgatgttcgtctaacac

SEQ ID NO: 27081 - DNA, 143 bp, Zea mays
tggcgctgtcgccgttacaggggagacgcataatcagatgtgagacactttagacctctggagctgttgatatggacctcttctgactcgtcgcctatctaatcatagaaggaagctagtatgtgctactcattggagatgac

SEQ ID NO: 27082 - DNA, 460 bp, Zea mays
  unsure (1)..(460): unsure at all n locations
agcttaaaggtgcaactaagagaacatcnngattttataaatcatgtgagaaagttaccttgccaagtccttgcacttttcctgttgaattgtctccaaatgtgattttatcttgaccatcaacattctcatccagtgaggcgaacatctcggggttgcctgtcatatgttgtgtgcatccactgtcaataacccaatggctcccactggtcttgtagttcacctacatccacagacaattcaagctcgtagtttgagggccctatattgcataggaccagtgactctctcaatcaaggactttgcaacccacatttgtctaggtctgctcttgtttggtggacctacgaatgttactatgacctttccatttgcaacctntcttaaaacataatgagcattgaaagcaaatggtcttgagtgcttacgcaacggagtaggcggtttggctttgcagttg

SEQ ID NO: 27083 - DNA, 325 bp, Zea mays
  unsure (1)..(325): unsure at all n locations
tcacactggaccatncaagctccagcttatgggtgtagtacttctcatcatcacactatatgcttaggcaaaaatattgaaatacttaaactgacaggttcgggccacaagagtaacaaagctaactaatagtgtaaggatagaaagcatatttgtacgtgagatatatccaaccatatattgacctaaatcgggcatgattcactaccattgacaagcaggcatctctttcttcccatactatgagaaaacagaaaaataaacttccagcttatacaaaacttgacgacattcaatntcatataactatatgaagggttgtctg

SEQ ID NO: 27084 - DNA, 380 bp, Zea mays
  unsure (1)..(380): unsure at all n locations
tccttacagncacctgaggcatgcagcttgagagcaggtagagaatgcanactctcgtggataacatcggtatntntaccgaggtattcggaaccgcgcaaggtcccgactaatcctcgttggtgcccctacgcaaaggtgagcccacgcgagggccaagcacctctgtcgagtaactccgtagagagccgcgagccttctgcacgcgcaagtggtgctccgcttccggcttgtctcggacgctccccgtcgtctccactatctatctcccggcgcgaacgccgcgggccttgttccctccgggacacagtggcggccgtgacacacacaccgttgtcacggtctcaccagactctcgtctgactcggtacaattacaac

SEQ ID NO: 27085 - DNA, 370 bp, Zea mays
  unsure (1)..(370): unsure at all n locations
tgaatgaagctgtcttataatgccacagagccttcgacgntatctgttcttttattggaactagagatttagtacaagagcatattgccttcatggtatggccgctcgcggagaaatgggaaatgccgcaagataccataatagatgccgacgaaggtggacttatcaggctgaagtacactttaaagttcggagatataattcgtgagccagatgatgactggttaaaaagcattgaaaatttaagtgatgaactgcttgtggcttattcgaaggccgaagatactgcactgtcagcagccttcggaggccgaaaaaagaagaagctgaatctgtgtgttgatgcaatcgggttcgtctaccctgacta

SEQ ID NO: 27086 - DNA, 439 bp, Zea mays
ggaagacgttcgtctacgtcgtacgcgctgatagtcgtctttctgtcatacatcggcctatcaggtctggtgttcttctgcaagcctgtggagacctgtgtgcacaacgtccaaggcacgctgcataggtacctgatactggagtcgtcatcatcacaggacccccgggcccggcttcgtgcagtgcaagaaaccgtcgaggccgaccagcttctacgcaagtctcgcatgtacctgcttctgctcgggatccttgcggcgagcgtcacgtaccaagccgggctcaacccgccgggcggattctggcaagcaagggccgccgacggtgtgcaccactacctgctcggcgacccagtgcttcacaacacctacaccgggagatactttgcttttttactgaacgcccagcgttcgtcgcgacttggtatactcatctgct

SEQ ID NO: 27087 - DNA, 292 bp, Zea mays
tcttctgctcccgtgctttgaatgcaacgggttgagcttcagatgtggtggcatcatcaagctcgttgatctttcttgagccttcgatcatgcattcaaagctcacaagattcccgataacttcctcgggggtcattatggtatatctaggattaccatggattaattgaactcgagtatggttaaggaaaataagtgatcttagaataaccttaaccacctcgtggtcatcccactttacgcctcccagggtgcgtggcttggtcaccaaggtctagaaccgattgtacat

SEQ ID NO: 27088 - DNA, 314 bp, Zea mays
agaaatgtctagaatcaagaatatgtagctcatgcctaagtctggtcaaagattgttcatcaagtggcttggtaaagatatcggctaattgatctttagtattaatgtaagaaatctcgatatctcccttttgttggtgatccctaagaaaatgataccgaatggctatgtgcttaatgcggctgtgctcgacgggattgtcggccatcttaattgcactctcattatcacatagcaaagggactttggtttatttgtaaccgtagtcccgcaaggtttgcctcattcaaagcaattgcgcgcaacaatgtcct

SEQ ID NO: 27089 - DNA, 432 bp, Zea mays
  unsure (1)..(432): unsure at all n locations
agaaagcattgtatacatcatccgttatgctnngggaaaaagactctctaaagaagaagagcgagaagctcaacattatgcccaaaaactgaaatatccgaagggggcattagtgttcaatggcagccggaaggaagatcttttgtactatcttccggatagcaaagagatatttgtttgtcgggagatgggtagaagcttcggatttccaacgttagaagatgggctctcagtactgtcaaaggatgaattggctgacagtttagcatatattagcatagaggtataaaagttaattttgtatttgacaacgaattgtttcttttgcttatactagatattgtccttctcttgcagggcctaatccttatcaatgcccttagagcacagaaaaacattgaagatgaanggtatacaatagctctgaacaac

SEQ ID NO: 27090 - DNA, 303 bp, Zea mays
  unsure (1)..(303): unsure at all n locations
cttggaaacaccacgttgtccatcatctcgcggcaaatatttatctccttaccgtctggcagacagtagaggaagtcgtctttgtcatttcctccgtataccaaggacccttcgggatatttcaagtccttggcatagcgttgcacttcgacaatttgttctaatgataactgctttcctaaagcatgtcgaacaatgtattccaaatcaccatggggaagtacttcaaagcangtgatgtagactttactggaagactctcttccaccagccctactagcgcagctttcgaaggtccaactt

SEQ ID NO: 27091 - DNA, 358 bp, Zea mays
tcacttatagctaatgtatggctatgtatttgtgattatccaaagaagaatgcctaacaggcactttccactatctagctatttgaaaaatgtcaagcagcagattgcatatttttcctatgttcttcataacaaaagattcgctatcccaaaggatggggtgtttccaccttggggttatgtttgtaagatgtttctaagcttttcttgttatcttaaaataaaaggtatcctatttactctatactaaaccacggtataatatagtttactagctaactacactggataagtgtactaacaaaaatatgggggctccctggttcttatttcaatcaccttcctattttctttacct

SEQ ID NO: 27092 - DNA, 307 bp, Zea mays
gcgcatgccaggcatgatagcaagttggaacccaacatccacacaagaacatcatgacgaccgacaggccgcttgagctactccacatggatctattcggcccgattgcttacataagcatcggcgggagtaagtattgtcttggtattgtggatgattattctcgcttcacttgggtattctttttataggaaaaatctcaaacccaagagaccttaaagagattcttgagaccggctcaaaatgagttcgccttaaggatcaagaaaataagaagcgacaacggaacggaggtcaagaactctca

SEQ ID NO: 27093 - DNA, 442 bp, Zea mays
  unsure (1)..(442): unsure at all n locations
agcttgactacatcaaattcttctntacagatattgagangacgnctcagaataacagccgcatcgatttcaccgtaccaatcagctaactctctacctcctccggcacatggcaacctcaaaatgagatgaaccgtatcttttggtatcttatagtctttgccagcccctgggcgtatggccatgtcatttggatctaatntgtccatcaaccacctgaaaaaagacnggcttccaatgcatcagttcgcaaatctaatatgctagaaaatcccaacctagcgacggcatcacgctgccgatcgctcattatccatgatgatacaataacatccaagggaatgcatcggatattcaatctctggatgcatatatgaatatacattaatacacaaagcatatatataggtagaactaatgatactataattattacaggctt

SEQ ID NO: 27094 - DNA, 305 bp, Zea mays
  unsure (1)..(305): unsure at all n locations
agcttgtgaagaatcttcattccaacatgggctattcggcgatgctagagccaacccatattagtcttagcaattaagcacgtatcgagttcagctctattgaaatcaactaagtatagctgaccctctaatactcccttaaatgctattgaatcatcacttcttctaaagatagtgacacctgtattcgtaaaaagacagttgtaactcatnttgcataattgagaaactgaaagcaagttgtaatctatagaatctacaagaaaaacattggaaatagaaatggcaggtgatatatgcatttt

SEQ ID NO: 27095 - DNA, 485 bp, Zea mays
  unsure (1)..(485): unsure at all n locations
gtgtttcacaatcagaaaattgtgaacaagaaaagctgtattcctgtgcanagcttgnaacctaagctcaaagatactcggaactgatagaatctcttgaaaatctttagaataagtgtttggagttcaacagtcgatgcattcatcagttaaagcaagtgttccattctgttggagccagtactgaagagtttactacttcagctgaagacctgcctggtgccttcgagcacattgaatgtgaaattaatgatcttgacgaagttatagctgggcatagcgacttctgtgccctagcagcttctcggtgcacagctgttgcctttttgaagtctggctgtaaacacggcaagattattaatagacccaacttcaacctgtcaccagccgacctagataatgattccaatatggctcggagtattcgaaactaaattataaccgtagtattgacaaagggtggtcggagcatagctgtgacaaac

SEQ ID NO: 27096 - DNA, 339 bp, Zea mays
  unsure (1)..(339): unsure at all n locations
agctngaatattcttcatcagagaagtatggttattcttgngatatataaaagaatttcttcacgaagcatgaaaagaagggaaggtgttttttcgccgaaggctcaaaaaatggtatgtatgcaaaatttcatgcatcataaagaatggaactataaatagattatatattacattcaaagttataatgtattacacatgttacattccaaatatttttacaatagcatctaatcttccctaagaactacttctgcagcttcgttcagtagctgatcgacaaccttgtccatgatggcttccgccattattctaatttcgtcgtccccctttgggtgt

SEQ ID NO: 27097 - DNA, 416 bp, Zea mays
gccatggtaagtagcataggctaataatatgcgatattgctcaagcctagctacgggtgcataggtttcaccgaaatccaaaccttcgacttgggaatatcccttggccacaagtcgagctttgttccttgtcaccacaccatgctcgtcttgcttggtgcggaagacccatttggttcctacaacattttggttaggacgtggaactaaatgccatacctcattcctagtgaagttggtgagctcctcttgcattgccaccacccaatctgagtcttgaagtgcttcctccaccctgtgtggctcaatagaggaaacaaacgagtaatgttcacaaaaatgtgcaacccgagatctagtagttacccccttatgaatgtcgccgaggatggtgtcgacggcgtgatctcgttgga

SEQ ID NO: 27098 - DNA, 351 bp, Zea mays
agcttgtgtcatgtgtgtcggatttatttgtctcgctgcgcgggaaagggaaaaaagagtgtgtatgacctaactaccttgctgcatgggagagagagagtgagcacgcatgtgtggcgccaactgcgttaagagagtttctatctgtcgtggtttcgtaaaccggtggacaataagatttgtgtttgtcggggaccataattaggggtaccctcaagacgcctaattctcagctggtaacccccatcagcataaagctgcagatagggatgaaaacgaacgggaatgggcgggaaactacctcttccgtttctcgtaccactattttttaccgaaaacgggagcgggagc

SEQ ID NO: 27099 - DNA, 159 bp, Zea mays
  unsure (1)..(159): unsure at all n locations
cttctttggcggaagtcattgtcagctcgaatgtattcgttcatcttctggagcagcttctccaacgtttgtggtggctttctggcaaagtactgtgctgaaggtcccggncgaagccccttaatcatggtctcaatgacaatttcattgggcactggt

SEQ ID NO: 27100 - DNA, 337 bp, Zea mays
agctcgaagaaatagaagcagcatgttaagtgtgtgcgtggccaccggacaaatctgtatgtctacgacgactactcgtgccacggcgttacctggtgatgtcacgctgctctgctcgcactggcgtgggcatggagagggctcatggcctctactaccgtcatgtctaagaccaccctccgcctggagagcgcgcaggtcgccttcacatactgagccctgctgctggccgccggccagacagccgcatgtacagggagtagcctctatgtcggagacacccatggcgaggaagagcttgtccggtcgatctgcggggacgaatcgacgccgggtg

SEQ ID NO: 27101 - DNA, 369 bp, Zea mays
  unsure (1)..(369): unsure at all n locations
agcgtgttctctctcatacatgggctatgttgatgtttacatttaacggagaatggtgttgattctgtgataagtttatattgcgttcgacgaatatgtcatgttgccacaaagataatatgttatttagcttctttcaatattgataaagcatgagggttcaacattntgtatttggaacttacatttgctattcatgtgatcatgtctactctaatggtaaccgggatgggtatcactacaccaaaatcatacacttcctacagcttttaactttctcaacttttatacaaaccgtaagaaactaataactttcgagaagaactggtactttatgaaataacataacttcttaggtttttataaagc

SEQ ID NO: 27102 - DNA, 454 bp, Zea mays
  unsure (1)..(454): unsure at all n locations
agctnggagcagaattctaattagcttacatatattatcacaccatanaagaactcatgaataaactcagattccataaaaaacaggatactcaactcgcaggtgctcagttaaagtaactctaccaattttacctaagcgaatcccgacatgccattanaaggtctatttttcatcatagtatcacatatatatcagatccactcgtccagatttatgtatttaaggaatctttgtgtgcgaaaacatgccagcgttgttttggcacatatgaacaacaaataaatgagtgctcatctctggcacaaatagctacagcttagatggtgatcaaactgtagctaaaatataacttagatatcagaatgcatgagctgattctagtttggttccatctacaaagcactcaccttatggaactggaacaactcacagtattttgttttggcctcta

SEQ ID NO: 27103 - DNA, 404 bp, Zea mays
  unsure (1)..(404): unsure at all n locations
tcggaccctaagcgactgagctgcnactgtatcttaacaagatttgtttacttggctggaacaaaaggagttgtgtttttaagaccttcggaaagagaagacccctacattatatagtcccaaaacgtacaagcacgttccatgataaaatccagcaggaaggtcaatacaacatttgtgcacactagattgacctgtaaaacaaatgttgaacaacattatgggcacggggttggctgcgcactggctttgtcagccatggtgcaacacgtggccatttgcctctgccctcgaccaaacacccgtttggcagctctagcgtgcatatcttggcaagaatcatgagtatggtctcttcactgtgccaacgccttctggtttgtgtgagttcccggtgtagatat

SEQ ID NO: 27104 - DNA, 469 bp, Zea mays
  unsure (1)..(469): unsure at all n locations
agcttgagacatgtgtgtcggatttaattgtctcgctgcgcgggagagggaaaaaagagtgtgtatgaccaaactaccttgctgcatggtagagagagagtgagcacgcatgtgtggcgccaactgcgttaagagagagtctatctgtcgagggttcggaaaccggtggacaataagatttgtgtttgtccgcgaccataattaggggtaccctcaagacgcctaattctcacctggtaacccccatcagcataaagctgcagatcgggatgaaaaccaacggtaatgggcgggaaactacctctcccgtttgcgtgaccatatntttgtaccgaacactggagcgggagcaggaaatgcggtagctaagactgttactgaatatatgggtatacgagcacgaacaaatacgaacgaatattcaacataaacggacagtagccggacacatgcggatgaacagcacaca

SEQ ID NO: 27105 - DNA, 451 bp, Zea mays
  unsure (1)..(451): unsure at all n locations
agcttcttcgttcataacaaatcattctcattcataacgaagcatcttagttcataacgaagcattttcacgttgaaggcaaaaaccttcccttcttttctgctagtgccttatgcgatatgtcatgatgcgatgaatctcgaaatgtctaatgtatgtctcatataaatgcacaagatgatgtaatgaagtgtgcaaatgtatgccaaagataaaaaactcacaccaatacacacctagactctgcattcccttaagaacaactttggagtctcttcacctctttcttaggtggtattcagcgccgcattctcttaagaatgactntggagctaatttctgtataagaacgactntggagcttcttcacctttgacttaagtggcattttaactctgcatccccttatgaatgactcttgagctaagctcttcattcacataagaacgac

SEQ ID NO: 27106 - DNA, 401 bp, Zea mays
catacagctaacaatcctatattctccgaagtactatctcaaaagcttctcatgctcttgctcattactgggatatacaataatatcatctatgaacacctctactaacttgtcgaggtaatccacgaacacgcttgttcatcaagtacatgaattaagctggtgcattctgtcaaccgaatgacatgaaccggaactcatacagtccatacttggtgataaaagttgtctatgggatatctgaaggatcggatctgaactgatagaatcctaaccttagactattcttgagaacacactggcttctctcactgatcgaaaaaatcttcaattctgggcaagaagtacttgttgttgggagataaccatttaaagatctataaccaatgacatcctttttg

SEQ ID NO: 27107 - DNA, 466 bp, Zea mays
  unsure (1)..(466): unsure at all n locations
ccgggatccttaagtcacctgcagctgcaactttagagagccgaattcattcgcggggaagnaaactagcccaagcctatgcagaactgggtgcagacacagcccccttctagtcgagcatagcagaaaagaagtcttcagctgctgaaaaacataaataaatctaggtgaatacactatgtattccacaagcccatcccgcccgtaaagagaaagggacctatataatacatgctttatatggagttgaagtcactcttcttttttagaaaaagacaattctttgatggttttccgcaaagaaggcagtaacacattttcccactcaaccaccactgagcttcctgctcccatggcattgtttatttccaaaaacacacccactcacacatttcctggttcgcggagggttcaaacactaattgtcataccacaccagactcgtccataccagtggacacggact

SEQ ID NO: 27108 - DNA, 505 bp, Zea mays
  unsure (1)..(505): unsure at all n locations
tactcaagcttctaagggagagcacatcttatgactaaccacaagctcatctttgatatatacacgatctgtagcgcatgccaagcagggaagcaagttggcactcatcatccacacacgaacataatgacgactgacaggccactggagcttctacacatggatctattgcgcccgatcgcttacataagcatcggccggagtaagtactgtctagttattgtggatgatgattctcgcttcacctgagcattctgtttacaggagaaatctcatacccaagataaccttacagggattcttgagacgagctcacaatgaggtcggctctatgatctagaccataataagcgacaatgggacggagttcaagaactctcatattgaagtttcttgagaggaggcatcaacatgattctctttcctcacgccacacanacggngagggaaggagaataactctatgacatggaaaacatgctgatgagacaacacagacggtttg

SEQ ID NO: 27109 - DNA, 423 bp, Zea mays
  unsure (1)..(423): unsure at all n locations
agcttaaccttgtaacaaggataatctacctttgtacaaaagtggaggttccttaagcttccttgaaccattaagggtaaatggatcaaatgtttataccatgctntcatcagtacatagtctgtcatgatcatcacatttatattatgacacattgcacttcacaatttctataataaatcttaactggcatatcttttgatcttatatatctctttcagttggtacctgctcttaatttatatttttgctataccaaagttcaatgtgtagaacttgcattctcagacctcacaagtcctaaagtgcattgatctacaagtattcatcacttgtatgcacaagtttagagggagaaaatctctacacattaaatccttgagactaaccattcttcgagaatatgttatgcttaatttcaat

SEQ ID NO: 27110 - DNA, 371 bp, Zea mays
  unsure (1)..(371): unsure at all n locations
gcttctaaaggggagaacacatttgggactaacanatgttcattntgagaaagacagggtttgtagcgcatgccaagcaggaaagcaagttggcgtccatcatccacacaaaaacatcatgatgacaaacatgccactcgagttactccacatggatctatttggcccgatagcttacataagcatcggcgggagtaagtactggcttgttattgtggatgattattctcgcttcacatgggtattatttntataggaaaaatctcagacccaagagaccttaaagggattcttgagacgagcccaaaatgagttcggattaaggatcaagaaaataagaagcgacaacgggacggagttcaagaactctc

SEQ ID NO: 27111 - DNA, 262 bp, Zea mays
  unsure (1)..(262): unsure at all n locations
agctggattttcttatagaactctattttattgtcgtgataaatgataaattcttcttcacgaagcatgaaaagaaaggaaggtgttttttcgccgaaagctcanaaatggtatgtacttaatgtgtcatgcatcgtaaagaattcaataatgaaacgagacttgtatattacattcaaatgtacaaagtggtacatagattacactttaaatgatttttccaaatagcatctattcttctttcaatactgcttccgcggcc

SEQ ID NO: 27112 - DNA, 423 bp, Zea mays
aaactaagcttctggggtcatgcacatacaaacagactctcaagtagcgagcatcttaagttttattcaccttaaattgatgcaacgcgttcacgcttacaaaactaatggtgcctattgaaccctactaatggagcgatcgacttcagttgggaacgccttaagtctgtgcaacatgctcacgcttacaaaactcagggtgcctgctacaccctactaacggagcgatcgacttaagtcaggaatgccttaagtcggtgcaacacactcatgcttacaaaactaagggtgcctactataccctactaacaaagcgatcatcttaagtcggataggccttaagtctgtgcaacatgctcgacacttacataacaagtggtgcttactataccctattaatagaaaaaatcggctgaatatgga

SEQ ID NO: 27113 - DNA, 404 bp, Zea mays
  unsure (1)..(404): unsure at all n locations
agcttgctacaagccttcttctttttcccatagcatgaaccttactggaacactaccccactttaaaagaatgacgtataactctctgatctcggggatttgaactccgagaagtacctcataacaaaggtgttacggagccttcttctactggtgatgcttgagcaagcacaaagagatgactggcacggcgttgattctgggagaaccttcttcttagcttctcttcactatcttctattcactgaccctttctttctctgtgctcttcccactggaggattctatcanagagtattatcatcatacagaggaggaagccatagactatgaaccatgtgcaacagtcttcaacccaaaatcaccaagcattgtgatctcaagggcgacggagtagaaaatgg

SEQ ID NO: 27114 - DNA, 435 bp, Zea mays
  unsure (1)..(435): unsure at all n locations
agcttgaccatcttatagacgtgtctgattctttctacgctagtgactacacgacaaaattgaacccctcttgctatatgttcaagaggacacaaccttcttgttctcgctcatggtcttgggcattacattcaactggggactactatatatgatgcgattggtgaggcatatgacaaatcatcaagatggttgggccttgatatgcggaaaggtggtggtcctgctcttgaatagcttgctctacaaagtgatccacatgctgntaagttcaaagtaagtctgtctgatagtttttatttttcagattaagatgtagttatattcctgaatcttgacttgtggcttctgttgagttcaactctagtataccaaaactagcttgggactaaaaatcttctattgttgtttacaaagtagtattatgttggtatc

SEQ ID NO: 27115 - DNA, 467 bp, Zea mays
  unsure (1)..(467): unsure at all n locations
agcttgcagggaaaagagatgatattaagttctgtatgtgctngagaagatcaattcaattcatattaactcaagctatcaatcttacaatgatctatatctctaagattgacccaaagttattttgagttattatatctactcatatcatctcaagcaagatattgaagttgtatgaattaaaggattatcctgtgtggaaaaaccaaagcctacaacatggaggaaagacaaaggatggtaacacttatgtttttaagtgcaagtatcttcatttaccatttctcttgtgtcttgtgtagtcacatagaaaaaggaagcacttaataatattatcacaatatgtcaccgttctcggagaaagttcctctcatatggtagatagannatttcatcattcaatattatggcgatctacatgctttaaattattgtaagtactatatggcatggtttacactaatcat

SEQ ID NO: 27116 - DNA, 406 bp, Zea mays
  unsure (1)..(406): unsure at all n locations
ccttcgcacgatcatgctcctcatcgtgtactctgttatctattaatacgaagatacctgtgcatataccgtacttggaagacattgttaaattatgtttttgaggaccttcggaggacgaatgcccccaacagtancccctcgcagtattaatctgtgttagataacgaattcagactgcgacatggacgaaggccttaatccgaatgtctgataaaacaccttccctctgctagaatagcatcaggcaatgatagatgggaccctccattttggagcgcgccgagcgtataaataagaactcaccctgaccacatctggtacgctggttgtgccactagctttgtntgctcattttatagctcttgctcagcgacgctcgcttagattctcaggttatctaagc

SEQ ID NO: 27117 - DNA, 106 bp, Zea mays
taagctttcttgaaccattaataggaaagggatgaaatgtttataccatgcctttatcaagacataacctgtcaggagcatcacattcatattatgacacattgca

SEQ ID NO: 27118 - DNA, 344 bp, Zea mays
aataaagattttctcacaaaatgaataactttctctaatgaaagatcaaatgaaaagataattaaggtatccctttgttgatctataactctttacagaaatttgaggtaaatcatatcttgatagctatacaatataatatatttctctaaaataaactatttatgtgtgaattacatagctagaagcaattgcttctctagaataataaataaatagaataataaaatattggtgcattattgttgggatattatagtttgaaactcaaaataatttggagttgaatatagaatctaaattcaagaaagaaggcgcacaatataaagaagagaagcatacct

SEQ ID NO: 27119 - DNA, 427 bp, Zea mays
tctaaaggcagaacacatttttagactaaccaatggtcattccgagaaacacatgaattgtatcgcatgcccaacacggaagcaagtgggagtccactctccacacaacaacatcatgacgacggacaagccgctcgaactactctacagggacctattcggcatagaacgcttatataagcatcggcgggagtaagtactgcctagttattgcggatgagtattctcgcttcacttgggtattcgttttgcaagacaaatctcacacccaagagaccttaaagagattcttaagatgggctcacaatgagttccgatcgagaatcaaaaagataggaaacgataatggaacagagttcaagaattcacaaatcgaacgatcccttgaggaagaaggcatccagcctgaatcctcttctctctacac

SEQ ID NO: 27120 - DNA, 402 bp, Zea mays
  unsure (1)..(402): unsure at all n locations
agctntctcccttnttgtgttatattcgcctgtgaccgatggcaatttgggccttatagtgcgaccctctgttgaagaagtcagtactttggttgcttcgcttggggagaatcctgatgatgaacggcaggtttattttgaagtgcccctgaaccctagtgatgcgaacataaatgacatgcttgatctgttagctgaggattcgtccgacgctgctcctgttggtacgttggcagtggtgccccttctagaggttgatacaactttggatgtcccgaaacctgtcagtattcgcccgaggcgccctagccgaaccagtcagcctgagccttctgctaacgagcaaaagaagaagagaagacgcctcggcgagtatccagttttgatgaagacgccagtacc

SEQ ID NO: 27121 - DNA, 506 bp, Zea mays
  unsure (1)..(506): unsure at all n locations
ccttaaatctcagctttaaaatcccgacttgctcacatccttgagcacttgtcgagagttgtgaactgttaacgcatggatgtctggggctcgtccccacaccaactcagccccagttactctctatggatgagacgacgatgacgacatgtttatgcccgctgcgaaacgcctcgcacgaatcgacaaggatgggaggtatggtagacgtcntatcattattctgaccagaccatgatccatttgctaagattatagtttctattccaccgttcatgggttcttatgatgctgaagctcacttagactgggagatgacggtagaacaaaaatttaattcccatcttattcctgagcagcatagggttagacaagccactagtgaatatagagactctgctatcatttggtggaatgaaactgtaacacacgtgctgcccacatacatggaatgcgttaaagaggagatgcagctcgcttgtccccttctataacgtgatctcaaa

SEQ ID NO: 27122 - DNA, 317 bp, Zea mays
  unsure (1)..(317): unsure at all n locations
cactctcccggatcttaagtcactgccgctgcactgatctttgcctcatcctgactaaaaactgatccgacggcagaggtcattggtgcatatttttccttctccgcttggtttatatctgctataaagctcttattccaattatgtaattagttgatcagaaagaagcaaatattcagacctcgttatttttctgttatataaatacatctgaaatgccatctatggggattagaatccttttgatttgtttgaataagtcacagattttcgtttgtaagagtccttatggaagaaagcatcancatttatccttt

SEQ ID NO: 27123 - DNA, 233 bp, Zea mays
tcatggatgtttaccttgatccctaactcgaatcctagtggccccatcgacaaaattgtgtctaactaacccctctatcgtgtgccagaagatggcattatgacgcgagccctagacacgacaaaaccttggatttgcctcgggtgtgggcagggagacagaccagatttcctggctccatatctctgcaaccattaggcaaaatcctatgacccccacacaagaatggtagc

SEQ ID NO: 27124 - DNA, 306 bp, Zea mays
  unsure (1)..(306): unsure at all n locations
ctataagcgcttgccaagtgccctcgtntctgggcgaccacgaccaacacccaacataagacttcggtaggattttacctgaccagaccccgataggctcatggagcactcgttcccgggtggcactccatgttccaataataagcaataatcttggtttaaccactcgtggttaacaaaccaatagatgtataccttaccactttaggaacattaatattataagcgggagcgacctgcgtaaagttaacttatagccatagcatagcttcgaaagtgaaggttatacccaggttgatcacgaaa

SEQ ID NO: 27125 - DNA, 390 bp, Zea mays
  unsure (1)..(390): unsure at all n locations
ggaccttaagcacctgagctgcagcttattaccgctgttggttatgtattttgccccatttccttaagaacgatgtgggttctactcttgatgttcttgaatccgctgtggcggcggaaaaaagtgctatgaattcttacagccaggcgagtgcagccgtctattgtgctaaagagactattgccaaatattgtgagggttgtattctcaaactattcttgtgccangcaatgattgagattgtttagccctgtcattgaaatgcgaagtgagtaagtgttaattgaagaaaagtttctgattatttgtgagtttcaccttgctagtgacattgctgctatttacccgatgcccgacatgattgagttgcacaaaaaatttaccctgagc

SEQ ID NO: 27126 - DNA, 388 bp, Zea mays
tctagaaaagcaataagatattctttatgaagaacatgataaattcattaatgttcataaagcccttgctctagaaactaagaagaatgaactattgacttctgaattatctgcttgtaatgaatctatctctagcctaaagaatttaaatgatgatttaaatgctaagttataagaagcaaatttttctagttcatccatagagcatgttgttatttgcaatagatgcaaagattttaacaatgatgcttgtaatgaacatgcttctacaattattaagttaaacaatgatgttgcaagtcttaatgctcaacttaagacttgcaaagataattatgagaaactcaaattggtagggatgcctacaccattggtagacactcctcaa

SEQ ID NO: 27127 - DNA, 436 bp, Zea mays
  unsure (1)..(436): unsure at all n locations
agctntatcaaatggacgtgaagagtgtctttctattggaccaatcaaagaggaggtctatgttgagcaacctcccggctttgaagacagtaagtaccctaaccatgtctataggctctctaaagcgctttatgggctcaagcaagccccaagagcatggtatgaatgccttagagatttccttattgctaattgcttcaaagtcagcaaggccgatcctacgttgttcactaaaactcttgacaatgatttgtttgtatgccaaatttatgtngatgatatcatatttgggtctactaacgaatctacatgtgaagaatttagtaggatcatgacacagaaattctagatgtctatgatgggggagttgaaagtatttctatgaattcaagtaagcaactccaagaggcaccttcattaccaaacgaagtcactc

SEQ ID NO: 27128 - DNA, 291 bp, Zea mays
  unsure (1)..(291): unsure at all n locations
atcctatacagcttcggatgtcctgtgcaactcaaatttaggtgactacttggctattgaaataaaaacgactcgcttttcccttgtccaaaaatccgtatcatgcatgtgcagatgataaactattccaagaaaatgatataaccaacaatgccataatattattgtagcacggagcanatcattacctctactaatgagaaaagctgcgagtggcacgagcgaatagcccgggcaagactatcgtgctccgaaggcaatatcctggacgaacaaactccacggtatgac

SEQ ID NO: 27129 - DNA, 416 bp, Zea mays
  unsure (1)..(416): unsure at all n locations
agctcgnctactgttgattatggatttatatatattactggcatcagagcaaggtatatactgcgacacatttattcctacgtcaggagggcgaatgtgtccctccatttcaatagcgttgcgtttgagacaatatactgtctgctcaagataagaaagaagaacaattttacttattgatagaaagcatggctgaacagggctgcgtctgctatgtgtcttgctaaaataagagaatgggcatacatcatcatgaaggtcactttctagctgtatttctcaagcttctcataaagccactttactcaaagacttgtacttccttatggcgatcttgtactctcttgagtaaggcctctgtaacttcaatcttgctagccatggtgaacacgaacaaataaacatgcttataaaca

SEQ ID NO: 27130 - DNA, 412 bp, Zea mays
  unsure (1)..(412): unsure at all n locations
acaggatgttggtatagctcttcctcaaagtcgaacagtagcccgggctaagagtccgaggcttaaagtgatgaatcgcaaaaaaattctattgctttctagagcataatgtatcccttgcttttcatcacagaacagttagaacacaacaactgtgtgatgagtgacagacaaggtgcacaactacatggaccaaagatacaagctttactgataaatgaactactaaaaggcttccacaatgtctacagggcaaatgtaccaacatcaagttcatgtcctacagttcctttgcccaaaagaggggggcaaaaatgaactctctaatatctttccagcacacaaatacaagaggagcagagcatnctgtttcagagcatatcaatgtctggaatttggtgttgatacatta

SEQ ID NO: 27131 - DNA, 379 bp, Zea mays
  unsure (1)..(379): unsure at all n locations
agcttctccccgtgtctgtgaagctttattttttcgtccaattgggctanaagtcccctgaccgtcgggaacacatgaatctntggtccatccgtgcgctctctgtggccagaccaaattaatccaccaatagtgcaattaacttaagggaatcgttggccggggtgtgaattcggtttcgaccgaagaaagacgttagtccttgccccaatcggccggcacagacagctcgccggagctcggccgtgctccgcgccgtcggggacttagccgtgcaaagaattaaaaaccagaggggctcggtgtaaagcgtcagcgacttagtgaatagtgctacggatctacttcgggttgttctgaaacgccaagtcctttctgc

SEQ ID NO: 27132 - DNA, 338 bp, Zea mays
cgatcgatgcgaagtctgcaacaacgcttgtgacattcaatatctacgtcggttctatacttaaaatgtgtgaagtcgttcatgtatctcgctctctttaatgcataatgaagctaacctcagaagatagcttgctcgcaagccaccctcctcggggctgagggggacccctccgcgcaaatttctggaaagttctacaaacacttcggcttccactttcataacgatctaaacacgaagacacttaacgcagtcacgaccatggactcagctcaaaacgatctactatacttcgaaagactgcctgatacattgtacacagtctacccaacaagaaa

SEQ ID NO: 27133 - DNA, 306 bp, Zea mays
  unsure (1)..(306): unsure at all n locations
tggagcgcatgtcacgcagggaaacaaagtggtgttcatcatccacacaagaacatcatgacgactgacaggccactggagcttctacacatggacctattcngcccgatagcttacataagcatcgacgggagtaagtaatgtctagctattgtggatgattattctcgcttcactcgggtggtctttttgaaggaaaaatctcatacccaagaaaccttaaagggattcttgagacgggctcaaaacgagtccgacttaagatcaagaaattagaagnacaacgggacggagttaagaactctt

SEQ ID NO: 27134 - DNA, 427 bp, Zea mays
agcttcggagttatagcgtatccgatgattaaaggtcgaaccgacttaaagatagaatgacagtttagtccataagggtctgagtcattgttgtaaacttttataaggggcataattgtaattccttacaggctgtgtcctgtgcctataaatagtgaacagtattcctttactgttcacgcattcctgtaattgcaaacgcatcactcgggaattattatttgtcaaggcaaaggtataaatgtacctaaacattatgttctaacattttagattaatgtaataagatatgtgaatgatgttatctatttctgatatatctatcatcaatgtttcatattttatatattactttgtattattttgtaacgttaatcatgaaggtgtaaccttcgtgatattctactcatggtcctcgttcgaagtt

SEQ ID NO: 27135 - DNA, 320 bp, Zea mays
tgtatgcttgcaatcgcatagagaacgatccggtcgaagaacccgatgaactcgcacgagaagcccctgagcagtagtctggtggtggaggcaagagtcccttgacctatctctatcctaatcacttcttaattcacccccccgcattacacatttatacctaaggattgactagcttctgttatccatgtccttgataacctatttgagttggattattattacctacctgtatgctatcgcgtaactctaatcaatgaacatgatgagattatctatgatacgctgctctcccttctcttattatgatgttgcactcg

SEQ ID NO: 27136 - DNA, 207 bp, Zea mays
gctgcaacaaatttttttcgagggaacaaaacgccgggcagaccacaacaggacaccacacactcccccaggacccacacaggaacgagacccgaaaaaaccaagggcgagcacacgtcagaggcccacaggggcgggaacaacgggagacccgggagacaaacaccggagagaggacagtaagcaacgaacaaagcggacccgcac

SEQ ID NO: 27137 - DNA, 311 bp, Zea mays
ctaggagatgaaaaagagatgttccaccgcagcccctcaagcattctccaacgatgcatatccatcgcccaaagacaagagctgttacaggaaatacactctggagcttgcggtcaccatgcagcacctcgagccctcgtaagtaacgctttccgacaaggtttctactggccgaccgcggtggccaatgccactaagattgtacgctcctgccgagggtgtcaattctatgcgagacagacgcacctgcccgcttaggccctacagacaatacctatcacctggtcgttgccgtatggatctgcactctt

SEQ ID NO: 27138 - DNA, 254 bp, Zea mays
  unsure (1)..(254): unsure at all n locations
gtagtgcatgtcaagcggggaagcaagttggagtccatcatccacacaagaacatcatgacgaccgacaggccgcttgagctactccacatggatctattcngcccgattgcttacataagcatcggcgggagtaagtattgtcttgttattgtggatgattattctcgcttcacttgggtattctctttacaggacatatctcanacccaagagaccttatagggattcttgagacgagcttcaaatgagttc

SEQ ID NO: 27139 - DNA, 359 bp, Zea mays
  unsure (1)..(359): unsure at all n locations
ttctcacaagctgaaagaagaaggtgtttttctgcgacgctcaaaaaggttgatgaaaattcatgatcggtagaattactataattgatatatttacattcaagtaaatgtttacaatgtacattccaatgttctacatagcgtcaatgctcttaaaactattgccaacttcttcactactggtcacaccttgtcataaggcttcgcatattctaattcatctccacttcggtgnggacggagatcctacaagtctgaggaaaaaatctgtatttctattcaacgagacaagttgaataaatacggtataaacactatataccattgcctcggctttactttggaatctgtattttaca

SEQ ID NO: 27140 - DNA, 329 bp, Zea mays
agcatatacaccattcgctccgtggttatcttgagagagttgagctaagcgtcttctccgtcagtgacgttgctatctacacccacagaagttctttagtgaccctaaaacttgttgctcaatcgatgataggctttcttttgagcaacaggggttagcacatgatgaaatacaattcaaatgcccacacgtgcgagaacggggttcatatgaatttaagtctgaaattacaacctcatgagcaatattaagcatgatgtggtcatcaactaattcattatgaaaataagatagcctattctattttcacttagagccagtgttttaaa

SEQ ID NO: 27141 - DNA, 420 bp, Zea mays
  unsure (1)..(420): unsure at all n locations
agcttctacatttattggttacttaatttgtgctctttaccattcttagcttagaacataggctagttagtaagactagaacttaggttgcaaaactcagatttgcggtagagataacaacacttaaacaaaatcttagttgcacattcttatttggntatctgcatatgttttgtttaagagatcaattatcaacctagtttagagtaagaaaaacgtcttaattcaccccttttaggtgtcacgttcctttcacattggttaagagggctcggaagtctaagtggttgtgtggctgggagagcactaaaagtctangagcgccttggagtctggtacanataatggtctatgatgaagttgtcactgagttaaaagcaaaacatatatattacctgatcattgacctcataacacata

SEQ ID NO: 27142 - DNA, 410 bp, Zea mays
  unsure (1)..(410): unsure at all n locations
tcgacgaccggatgtcagaagatgtgcccaatgctacacaatgcgacagtgatgacacatacaccagtgagatgcttgttgtgacggaacctnccaagtcattatgcccacctacagttgtccttgtccaacggacctcagacaaccctgtaggtgcccctgaatcacttgacaagttcggtatctgcttttcttatctttcccaagagcgtttcacccgtcacgcagacattacaagcatcggagttacgagaatgcggaagcaattatatgaacttacctttattttaaaagtaagacaaagttatatattacagaccaagatataacctatgagtgcagagtaatattattacacaccaagggagggcaaaactcatcccattaaagtttaaacaaaagttcttatg

SEQ ID NO: 27143 - DNA, 406 bp, Zea mays
  unsure (1)..(406): unsure at all n locations
caatgccacaaccagcccatgctagtcttagcaattaagcatgcatctagactggccttttctttttgcaaatcaactaagtaaagcttgccgtctaatacacccttaaaggctagtgaaccatcacttcttctaaagacagacacatctacattngtaaaaagacaattatatcccatattgcatagttgactaacagatagcaaattgtaaccaagagactcaactaaaaacacattggagatagagtgctcattaaaaattgcaattttacctaacccttttaccttgccttgattcccatcaccgaatataattgaatcttgggaatccttattcttgacgtacgaggtgaacatcttcttctcccccgtcatatggtttgtgcatccgctgtcgataatcc

SEQ ID NO: 27144 - DNA, 422 bp, Zea mays
  unsure (1)..(422): unsure at all n locations
tttaaatatgcgatgcaagtgacgacaccatttgacattttacataataattctgagatcaaagaatatttagtcattcctcaacatgccanagcgggtcatatcaagtggcttagtgaaaatatccagtaattgatcttctgacctcactccttctaaaatgatatctcctttagcaacatgatctctatagaagtgatgaccgatatcaatgtgcttggtgcgagagtgntgtacaagattattagcaattntaacagctttcatttgcttgacttgaaagccgaagaagtatgttagctcaccaatcattgacatctacgaactccgtcgacatcaactcaccaaattccttgcaatgatagtcatttgtcgagccaaagatatatcatcacatatacttgacaatgcaatatactgta

SEQ ID NO: 27145 - DNA, 363 bp, Zea mays
agcttgtgatttatccaatttaaaacaagctccatctcttaacatagattttctatggataaactcaacacaagagatggcattagttacacaagcactatgtttcttatttagcaaccctttatatgtgaaaggcaaacaagttgtcttaatagagaaacctcataatatggactagatttcccttgaaccctcatgcacaatatattttgaatgacatggataatatgaatggttgttcaatgaagtttaaagggctgacttaatccatattatggtgagtgtctaatatagaagaatcaaatccaaattatagagaatatgtcacataattttggattgttcaccatatgataatattca

SEQ ID NO: 27146 - DNA, 127 bp, Zea mays
tacccctggagcttcgcctcagtgctggaacctcttccatttaggtaatacttaatggaagagttcttgctctaattttttttgaggctatttaaagctgaggccaaacacaacaacttcaacttac

SEQ ID NO: 27147 - DNA, 330 bp, Zea mays
  unsure (1)..(330): unsure at all n locations
caagcttgcacatgtctagaattctatatgttctcgtctcaagctctntttcatatccttgtcaatgaagccttagcctattaattccttgggtttcctgcagatgtaaacaacttttgtttctcatgcttgcttggtcatgtttttttcactacagtatgattcaattgcagagttttgtcttgcgtccaactggttattaaatattcacctctctgtgtattctctgttttgtctactatgttngtgcaggcaatgggactgcactcgtgctctttctctccccagtgtaagaatcaattcatccatttgtgtctcagtgtacagtaa

SEQ ID NO: 27148 - DNA, 498 bp, Zea mays
  unsure (1)..(498): unsure at all n locations
ctcaaggctntactaagcatgcctacatccatgcgtgtcaccacaacacgacaactttcttttatcatcacgtgcaccatgccttgtgtcgcgtctatgctgtatcattacaccaataccagtggcacagcgcatggcccaataggacaaatcattgcgcgtagcacccactccaccatgtggggtggcacgaccacaaaccggcatgcttggccgacacacctacaacaactagtagcgcttagacgcctatcagacagcgcatggcacaagttgtaacccacacaagaatttgaagcattntcaaggcataagaattcggacgatcaattagccttgaaccgcagctatgagtatatatatatatattggattacagattacgacatacttatttgctctacatgttcttgaaaattgattatatgtattacttggcatataaatatagatatttattttatagtcaaataatttagctatttcagcatctcctct

SEQ ID NO: 27149 - DNA, 370 bp, Zea mays
agctttctaaaggagaacacattttgttactaacagatgttcattttgagaaagataggatttgtagcgcatgtcaagcaaggaagcaagttggtgttcatcatccacataagaacatcatgacgactgataggccactggagctcctacatatggatctattcggcccgattgcttacataagcatcggcgggagtaagtactgtctagttattgtggatgactattctcgcttcacttgggtattctctttgcatgaaaaatcttatacccaagagaccttaaagggattcttgagacgggctcaaaacaagttcgacttaatgatcaagaaaataagaagcgacaacggaacggagttctagaactc

SEQ ID NO: 27150 - DNA, 348 bp, Zea mays
agcttgccttcgcctctgtttatctttcgctagtccaacggggtcgtggaacgcgccaatgggaaaatcttcacagttgttaagaagatgctccttgatgaaataagggcaaatggacccatttgttaccttatgcagtcctggcactaaacacgactgagtgcagagcgactgggtgtactcctttccgcctcctatactgatccgaggccatgaccccgcaagaaataaagcacgggtccccgcgaacagtttcgtcagccatcccctacatggacgagccaacttcaaaagacctcattgacggagaccgagtcttcccctacggccctatacaataccagccca

SEQ ID NO: 27151 - DNA, 146 bp, Zea mays
cagacccggagctgtccatggcctctcgaccgcgcttctgacatggggagtagttggctatcttgggatgactttccgttcactggggtctttgcagatattgaaccaagacctagcgctctagaagctaaagatcgactcaggaa

SEQ ID NO: 27152 - DNA, 385 bp, Zea mays
atgcaagcttggaacacaaccactgtctttactaattcaccgcggccacgaagaattcactcctcggctttccttgcccggcaatgccaacgtgaggtggagcgcgataaacgcaaagtggagcgcgatagtccaaagttaaatgcggggatccacaacccggcttcaaatagtctaaaggaggggcgaagctcgcgggttgttgcgccgacctccgtggaattcacggtagtggtttctgtcgccgtcgcacgaagtggaggatgacctggcttccctggcccacctgccagaagtgcgaggcgcccatgtgactgtctgcccactgtacccatccgaccgtggcataaaacgtgtggaaaaaaggtgtgcgctagtactgatg

SEQ ID NO: 27153 - DNA, 440 bp, Zea mays
  unsure (1)..(440): unsure at all n locations
ggagcaagttcacattcactataatcttatcaactcaaacctttntacataatgggattgcacaagtgtgaccccaccattgccttctctcagtagcttaatgttaagaataacatcagcttctcccacatctgtcattccacaattattggacataaagtattttgtctctctaatcacatcaagactcgtccncaagattagaatgtcatcaacatacaggcataaaattactccctcacccccaccataccgatgatatacacatttgtctgcttcgttcacaacatagccgacagatgtcaaagttctatcaaacttttcatgccattgcttaagtgctcggtttatgtcatataaagatntgaataacttacacaccatgccttctttgaccgttgctacatacccagttggctctccatgatatattctcatct

SEQ ID NO: 27154 - DNA, 444 bp, Zea mays
gcagcttctggatgttctagatcggtttggaggcctcatcgcctcaatcgctatgatcttctccgagtttccttcaatgccccggtgcgaaaccaggaaccccaggcactgttttactgagacaccaaagacgcacttgtccaggttcagcttcgtgtgtgttgcccgcagctagtcgaacaccagggttaagtctttcactaggggtgaccctctcttagtcttgaacacgatgtcatcgacgtatacctctactctgtccctgatcaggtccccgaaagtcttactccaaaagtcttactcatcgcttgcacaaatgtcgggaagggcgtttttcataccgtaaagcattacgacatagtagtaaagcccatccacctatacaaaagcgatatgcttcctatcttctctagacatctggatttgatggataccagagtaagc

SEQ ID NO: 27155 - DNA, 443 bp, Zea mays
agcttgctagcatgaagtagtagttatataatttttattctgatcacagaagcactaaatttgccaagaaaatgaacaaatgctcagttacattgagggggtaactgtaagcctgaggcttggaagccttaaaatctgtacattgctgaaacgacatatcccaacttcaaatgacagtctctttcacatttcccctgataacacatggactgttgtagcgccttctaatgacgggaagatagatgagatcccgtcgacgtcacatcaaggaggatgtgcagtactgcgtacctaacaatcaaaatccagctgggaaatacaaacgtatgacgaaagtgatgcaaatcttagtccacaacgagcaaatcgggaaaacaattcagttactagacaagaaaggaagagtcaagccgttcttcttgtaagtgcttgactgccctgac

SEQ ID NO: 27156 - DNA, 411 bp, Zea mays
  unsure (1)..(411): unsure at all n locations
agaaacaactcctgcgatgtctatcgaagctagtacaagcccggtaaaagagccggaattagaaaggcagcaaaataaccaaaggtgctgagccctctatccgtagcagggttgtcaaagccatcgagtactgcaacggcaactcctatgaagagaagaatggctagcattntagaagctatnttagaatctatganagcgccagttcctacttctgccaaagcatctagtgaaaaagttggagatgcataagaagcaattactgcaagcatgactaatgttcttgccgaagccggaccttctgaagccgcaccaatatggttggtggaagagagtgttcctgaaaaatctaaatctcctgctcccgaagcacctncttatggtgactnggaatacattattcgacacact

SEQ ID NO: 27157 - DNA, 353 bp, Zea mays
  unsure (1)..(353): unsure at all n locations
gtacccgtaagcggcaaggccgaccgagccgaaggattcccacgcctctgggatacggatacctcactcgtcccttccgcgagaagcaactctcgctcacacaaacattcctgttaccgacagagagtccagatgctcgaaacaagaggaaaaaagacgcagcttctcaagcacggcgagggtgtgtttttctggcctcggcggccgcagaaggcacacgctacaagacgatctgatcctgcaggctcgggtcttcacgctgaaaggagccgtagcaccctctgcatcgacgacgtcttcagcaaagtccgacccagccttggacggcgacgcggtccanggacttcttccgg

SEQ ID NO: 27158 - DNA, 324 bp, Zea mays
  unsure (1)..(324): unsure at all n locations
agcacatcacatcaagaatgtgatgaccacgtcaagacccctggagctactgcatatggacctcttcggacccgtcgcctatctaagcataggaggaagtaagtatgggttagttatcgttgatgactcttcccgcttcacttgngtgttctttntgcaggaataatcccaaacccaaaggactctcaaacgcttcctcangagagctcataatgagtttgagctcatagtgaataatataagaagcgacaacgggtccgagttcaaaaccttcaagtggaggagtccttgaagaggaaggatcagcacgagttctcgctccta

SEQ ID NO: 27159 - DNA, 388 bp, Zea mays
  unsure (1)..(388): unsure at all n locations
ctgcagcatgcaactntaagtttctcatctgttttagtttacccctttaatccctgtgtagggttaattccattaaccagagttctatttgcaaaacattaaaacaatacaacttgtttgaaatttttgcctagtgaatgcactctatgtgtgtcaaacatatgcaatgccaatgcttatgatgtcatgctcaagttttagttatagtaacaccaggggtgttacactttctccatgacaaatctgaagttgcatctatattcaagaagtctgccaagaaagcacaaaatgaatttgattgcaagattaagaagattataagtgacaatgtgcaataatttggcaacaccaacattcatgagtactgtgatgaaattgggatcaagca

SEQ ID NO: 27160 - DNA, 349 bp, Zea mays
cggaataatctaccgtattccagacagtcgatctactataattgtttatgtaaccttggcacctgtagaacatataatttagagcacactagttagtccaattatttgggtggataattaaaccaccaaaatcaattagaaaaaagtgtagcctatcttctttcaatatgtgtgcttaaaaatactagggtttaattttaagacaattttagtctttgtgtattatatcatctctaataacaatgttttatttgacattatagataaataaattaggaacaaaattatctcttacctgcgtatatgaagagaacgtatatagttaatgcattactactgtatgatgcgc

SEQ ID NO: 27161 - DNA, 331 bp, Zea mays
gaatactaccccactgaaaaagaatgagggtcgaactctcgaatcttggggagttgaacctcttgaagtaccacataacaaggagggtacgggtccttctgctgctgttgctgcttgagctggctgcggaaggatgactggcacaaggatgattctgggagaaccttcttctaacgtctctgactatcttctgttcttttctcacttatcacatttcactgcctctttctttctctttgctttctccactggaggattctatcgatgagtattaccatcatacatgggaggaaaccgaagactatgaaccatgtgcaacagtcttcaaccc

SEQ ID NO: 27162 - DNA, 340 bp, Zea mays
  unsure (1)..(340): unsure at all n locations
gaggataaaacctagcacgcttaaccaatttctcagtattgaatccatcacagttcttggatggattgaatgatgccatacatctatggaactctgtgttcacctcatccaacctattattaagctcaacaagttgcgtatcattgacacctatgaacatatcagcatgaaaccgatggtgattcggagcatttctatagaacttcttgtctctctggataagcttatcctttgcatccatgtcaacaactttaattttgtgcgtctcacataaagaagagacatcattaaagaatntntgccatccagaatcttctctcagtacaacccattctacctt

SEQ ID NO: 27163 - DNA, 107 bp, Zea mays
gaacagccccccaggcgaaaagacgacaaccgacacgcagaacgcagacagaacccaacgaccctccccacaaaccacagaaacacaaggacagccgaacaccggca

SEQ ID NO: 27164 - DNA, 239 bp, Zea mays
cgaactcatcaatgtatttgtgagataaaataatctgctggtaacagtttacttggaggtgcaccaccagcactgttctgcccaaggttcccataaccgccaaaaacgccatctgagatcttactgttgttccttgaccctgcgtcatcggatgaatctgtaacctggatggtaagactgtcctaacctgtaagatgactcgagccattcaaacttaggctctcgtctctgactcttaa

SEQ ID NO: 27165 - DNA, 426 bp, Zea mays
atcatcaacatgggtctgcgtgctctgtactctttactatgatatcatcgacatatgtcagcacatctctgccaatttgggagtgaagaaccttggcggtcattttgttgaagcttcctccaacattcttgagcccctcgggcatccaaagttaacaataggtaccactaggagttatgaagcttatctttggctcatcctccttcttcattcagatttgatgattacccgagtagcagtcgagtaaactcatgagttctgaaaaagctgctgcatccacaagggaatctattcttggtatgtgggaattcattcttcgaacatgccttgttgagatctgtaaagtcaatacacatcctccattttccatcagcttccttaccatgacagtgttagctacccactctatgtatgtgtcggggacca

SEQ ID NO: 27166 - DNA, 461 bp, Zea mays
gggaagcgtcgatgagaatcctactatgcgtaggtaccgtcttctcttcttccatcaccttgaatgcgacaggatgcaccttgggtgtggaggagccgccttgctcctagttgacgatatgtttggagcctttgatcatcaactcatagctcacaaactttcctattacttccttgggagacattagcttgtatctaggatcaccacgaattaattgaacatgtgtgggattatgaaaaacaagtgatcttagaataaccttgaccatgtcatggtcatcccatctggtgctcccgaggttgcgcacttggttgaccaaagtcgtgatacgcgtgtacatcgctcgaggctcctctccttggttgatgatgaatcgaccgaacctctcctcgatcgactccacttggtgacttggcacctatcccttcgtggcggcttagacatccaaattcttggacttt

SEQ ID NO: 27167 - DNA, 382 bp, Zea mays
agctagctacatgtccttcttttcttttatatcaagaaccttactggaacactaccccacttacaatggatgatggtataactcctgaatcttgggtatttgaacttcttgaagtacctgataacaagggagttaccgggccttctgctgttgctgcttgagcacgctgcggacatatgactgacacatatttgatcttgggacaaccttcttctcatcttctcttcactattttcttttacttttcactgcctctttctttctctttgctcttcccactagaggattctataaagaggatctccatcacacagaggaagaaactcaaaatgttgaactatattcaacagtcttcaacccaagaattatcatacattgtgat

SEQ ID NO: 27168 - DNA, 401 bp, Zea mays
  unsure (1)..(401): unsure at all n locations
tcgaattctacataatgtatttaaattttaactcncaaaggaaagttagcttgttttaactctaagcacattaaaccagctatggtatgctgtgaagatgtagtatcacgcaatatcacatttccattcaactactgggaatggataccgtctctttgtaaatgggacctttctaataaaactggagtatggcccctgaagatataactaattgcagtacaattgaaattttagcgcctagttctatttaactattgatatggtgcacatgtgttacagtgaacaaacctgtcaactgcacttacatggggataactacacttctcttcagaaatcttatggcgtcagacatgaatgagggtaatctgaaacacgagaaaatgtatatagagaacgccttg

SEQ ID NO: 27169 - DNA, 452 bp, Zea mays
agcttcgcacctctgaactaactcttctgcattgttcttcgctgaaggccaatagaatcctgacctgaagaccttcccgactagcgttctggaggctgcgtgtattccacattgcccagcatggacctcctccataagttgcttcccagtggacgggagaatgcactctatgaggacgcctgatgcaccccttctgtataatgtctccccaatgagtgtatagtgagccgactgtctggcaatacgctctgtcgagttcttagtgtctggctcttcttcattctttatatacttaatgatcggtcttctccagacatcagagtctgactcgggttgatctatgatgctgcactcttctgtttgatccattgagatactcggcttgagaatttcttgccaaagactcctggtgggacctgagttcgactggatcctagcttggacagtacatc

SEQ ID NO: 27170 - DNA, 372 bp, Zea mays
attctatctttaagtcggtttatactggcgaagcttcatggaaaggaaccttcggccatctcatgcaaacagcttcagccgaaagccgcttctcccttgaagaccttcggcgacgaagcatagacccaacagcaccagtgtccaaacttcatttctcttgaaattattgagctcctcctgcatggccaacacccagtccggatctagcaagacctcttcttgagagcacctagagggggggtgaataggtgatcctggtaaacttaaaacttaacaccacaaacttgattaagagttagaacaatgaaatcaagtgagtagagaggagagctcttgtgaagcacaatagtcacaataagcacaagagacacg

SEQ ID NO: 27171 - DNA, 380 bp, Zea mays
  unsure (1)..(380): unsure at all n locations
agcttgtctgtcggaatcaaacgaatttttttctataacctgcttcgncagaaaaaacttcggaggaagaaagtgttaaatttccacatattcataattaaatggccagagtgcgttctaccgcctaggttgagcgtgaggggggcgaaactgaagcttcggagactagttccatctccgaagccatgcaacgatccgggctggtgatttctgaagagatccctagtgaagatgcagaacaagcagaacaagcaattgtcggagtagaagaagaagttattgaagaaactgatccctaatacgattattgtattgccatgccaagcaagcccacccacttggactttggaaagtctaccgcttcgaaagctgatctctcc

SEQ ID NO: 27172 - DNA, 372 bp, Zea mays
aaacgtgcatctagatcgacattctctttactaaaatcaactaaatagagcttgtcgtctaatacacctctataagctcatgacccatcacttcttctaaagacagatacatcaatatttgaaaataagcaattacaccccatatggcgtaattgacttacagaaagcaaattattaccaagcgattccactaagataacattagagattgaatgatcggtagtgatggctattttaccaaaccctttgacattaccacgattgcgatctcgaagaataatcgaaattgggaatccttgctcttgacgtaggaaggtgttacaccctagatccgtctattgacaataacttagtctatattattaatttcta

SEQ ID NO: 27173 - DNA, 340 bp, Zea mays
  unsure (1)..(340): unsure at all n locations
acaactttcaccattttgggcctgaggctgaactgaatcgctcaaccttcgaagctactttgtcttatctttgtagtcttctttgtaaagcccaacgtagatatgtaattgttttatatcgaacaatgaatataagaatatgtcaaaatgaatcattctgtgaagtctctattatttttctttaagcttctcccttntattaaccttcccatggaagattaatgaacgggacaagaggaagtctttcatttgtgtngccttatcttngatcacttttatgaatcaatagtatgtgacaaaataccgtatcgacttaattgatttatgcctaaactatgat

SEQ ID NO: 27174 - DNA, 383 bp, Zea mays
ttaagtcaccgcagctgcagcttgattaagtggagttttttcctttatctgccgagtgggaaatgtcgaaggatgctatggctaatacaagttagaatgctggaaagagcagtttggttcatttgaagtattcttatcggtacagaaatcaatttggcgatcctgacgatgattggcttgatgccatcgaagcaacaagtgatgaactgttaggagcgtataccaaagctaaagatgaagctatgaattctgcctttagtgcccgaggaaagaggagattaaacagggtttttgacgctattggatttatttaccctgattactgcttccctgctcagaagagggggttaaaaaggaaaagtgcattaaaagcttattccact

SEQ ID NO: 27175 - DNA, 358 bp, Zea mays
  unsure (1)..(358): unsure at all n locations
gctcacactgtgtgcacctttattgtcacaagagactctggtcaagaacacatctcttacagagtatggccgctcgtaagtgagtgggagatgcccgaaggggctgctgccgggtctattcaaggcggcctggtctatttaaaatataccttcagatatagaggcgagtttgatgagccaaacgatgagtggttgagcagtattgaggcaaccagtgatgaatagcttgnggcctatacaatggcagaagatgatgcaatgaccttggccttcgaaggtcgaggcaagataaggttgaatagagtttttgacatcattggtttcgtataccctgattatagctatccctcacgaaagt

SEQ ID NO: 27176 - DNA, 405 bp, Zea mays
  unsure (1)..(405): unsure at all n locations
tatcaccacaccatgctcatcttgcttgttgcggaagacccacttggttcctacaatcatttgattaggacgtggaactaaatgccatacctcattcctcgtgaagttgttgagttcctcttgcattgccaacacccaatccgaatctcttaatgcgtcttccaccctgtatggttcaatagaagacacanaagagtaatgttcacaaaaatgagcgacatgagattgagtggttacccccttatgaatgtcaccgagaaatggagtcacggggtgatcttgntgatcgcttggtggactcttgagtgtggcgggccttgaccctgttcatcattcttgtcttgatcattgcatctccctcttgacattgncctctcttgaagtggtcatcttcttgatcctcat

SEQ ID NO: 27177 - DNA, 377 bp, Zea mays
  unsure (1)..(377): unsure at all n locations
gcagcagcaacggccanaccagcatatcatcttcttttaccagcacagcaactgtagaccatgaccagtgactggcccttcgcgtgctggggactggatatgaccggacctttcaagaaggctcacggaggatacactcatggactggtagccaacgacaaatccactaaatggatagaattcaaacccattgcctctttgacctcagctaaagccgtggaattcatacaagacataatactcagattcgggataccaaacagcatcataactgacctgtgatccaacttcacaagttcagaattctttgacttctgcgagcaaaaaacattcagatcaagtatgcttccatagcacaatccagagccaacggacag

SEQ ID NO: 27178 - DNA, 216 bp, Zea mays
gtgataccatctgacaccccctgaaagtactcacacctctgaacgtggccaccgacgcttggagagaacgtagaccggctaccactgttgggggcatctcccgctggaaatttaacgctctccgcataactcaggaggagtttggacctcgattccaacctcgaatgtttacgatcagtcgtacaataagactacctgcaaggcactgatggggct

SEQ ID NO: 27179 - DNA, 449 bp, Zea mays
  unsure (1)..(449): unsure at all n locations
agctacaaaaggagccatcttgatattttctatatagctatnattatatgaaaattccgccaaaggcaaacattcatcccatttctgcgagaagactagaacacatgcccgcagcatatcttggagtattagattgaccctctcagtctgtccacttgtttgaagatgataagccgaactgtggagcagcttaatacccacggatataagaagttcttgccaaaatatggataccaatagaggtccacgacctggcactatggtctttggaacaccgcgcagactaagaatacgagcaatgttcaatagggcatagacagtaactgggtgatttgtctttactagcacaaaatgatcaactttcgaagcccgacaatcacacccaaaagaaacatcccctctggaggtctgggtaacccacaaagaaaccaactaatatctcccattcc

SEQ ID NO: 27180 - DNA, 276 bp, Zea mays
  unsure (1)..(276): unsure at all n locations
atgttcaatagtgcatataactttgacatcaactatatgtgtgcactatattaaaggaatttagtctatccttctgngtttcacgaatgatgattcatttgccatccacatataaagatcatcatttgtgaaacccgctcttgtgttctaatgctctctttctaagtgttcacaagttctccaagttcttgagatgaatcaaatctcatatagagtctggtgttcatcatgagttccatgattctttaggttgacgaccaaccagatgataagtca

SEQ ID NO: 27181 - DNA, 311 bp, Zea mays
  unsure (1)..(311): unsure at all n locations
gatgatgcctgatgcccccttctgtacatatctccccaatgagtgtatagtgagccgactgccttgcaatgcgctctgccgagttcttgatgtctggttcttcttcattctttatatacttaatgatcggctttctccagtcatcatagtctgactacgggtgatctatgatagtgcactcttctgtttgatccatagatatactcggctgccagatttcttgcacgaagacatctggtgggacctgagttcgaccggatccgagcttggacagtacatctgcttgcgngttccgatctctttctacatga

SEQ ID NO: 27182 - DNA, 222 bp, Zea mays
ctgaacccggaccaacacgagcgcacgacagattcattgacaccccgcgagaaccggagaaccgacaccatggcggcaacgcgccggtgccaccacgggaccaggcggcacacgacccggggcggacgacaaacggcaacgcgcatatccacgaccctgcagagccacgacgctgaacggcggaacgctctcatgggagcccacaagaaaagaaccccgggc

SEQ ID NO: 27183 - DNA, 419 bp, Zea mays
  unsure (1)..(419): unsure at all n locations
agctagtgaaagttcttcatccncacatgtgctaagcggcgatgccacagccagcccatgctagtcttagctattaagcatgcatctagaccggcctcttctttngcaaaatcaactaaataaagtttgccgtctaatacacccttaaaagctaatgaaccatcgcttcttctaaagacagacacatctatatttgtaaatagacaattatatcccatatgacataattgactcacagatagcagattgtatccaagactctctactaaaaatacattagagatagaatgctcattagaaatcgcaattttacctaaaccttttaccttgccttgattcccatcaccgaatacaattgaatcttgggaatctttattcttgacgtaagaggtgaacatcttcttctcccccgtcatatg

SEQ ID NO: 27184 - DNA, 456 bp, Zea mays
  unsure (1)..(456): unsure at all n locations
cccatgttagtcttaacaattaaacaagtgtcgagttcaactctatcaaaatctactaagtatagctgaccctctaacactnccttaaatgctactgaatcatcacttcttctaaagacagtaacacctatatccgtaaaaagacagttgtagcccattttgcataattgagaaacagaaagcaaatcgtaatctaaagaatctacatgaaaaacattggaaatagaatggtcaggtgatatagcaattntacccaatcctttgaccaaaccttgatttccatccncgaatgtgatagctctttggggatcatcggttttctcgtaggaggagaacattgagagcacctagaggggggggggtgaataggtgatcctgtgaaactaaaaactcngccacaaaacttgtaagtgtagccaataatcgcagtggtagaaggatctcaacaacacatac

SEQ ID NO: 27185 - DNA, 325 bp, Zea mays
agcttggccgcgcgggagaacagctctgttataaagctctcgctctctctctctctctctctcccatgcgaatgcttgtaaccccctactgcaagcgcacccgacctggcgcaaggcaacacgaaggccacgggtttcccctttgcctagttcttccccccttcgtgctctgtctcgcgccgacccatctgggctgggacacgaggcgacattttactcgtcggtccaaggacccccggggtctaaacgccgacagttggcgcgccaggtaagggcctgctgcgtgttgacgaacagcttcccgtcaagctccatatgggtagtc

SEQ ID NO: 27186 - DNA, 312 bp, Zea mays
  unsure (1)..(312): unsure at all n locations
cttcgccttctatttcagcgttgcatccccttaagaacgacttttgaacttcctttccttatatttcggcggaatttggctctgtattcccttacgaacgactgttgaacagaatacttacgctgcgctcccttaagaacgactacttgtagcttcgtcatgctctacatcccctttgggacgtcttatgagcttctccgctgttttctttgtgcactcgatggtgcgtgctcagagttacatattacatactttggnggatttggccctcatggcgctaaataaaaatgaaagattacagctatggcccat

SEQ ID NO: 27187 - DNA, 388 bp, Zea mays
ttcactgtaccgaagaattggtgtatggggacattgtgtgggcaaagcttggcaaacgccaaccaatgtggccaggagtggtggtcgacccaactcatcatgccgctgtcgatgcaatgcccccacaacctcgcggtgtcgctgtgctttgagtgatgctatttggctggcgcacagagttcagtggcgagaaggtacaattttccagtgactgttgtattcacactggctgactttaatttccacttgctttctccatgggaaatgatgcatttgatgatatgaattgcacaactacccgtgggtgaagcaagggttgatatttccattttcagactacatgaaccggtgagtagtattttaacatgcataactacctggacaactg

SEQ ID NO: 27188 - DNA, 327 bp, Zea mays
  unsure (1)..(327): unsure at all n locations
accttcgacttgtgaatagcccttggccacaatcgagctttgttctttgtaccacaccatgctcatcttgcttgttgcggaagacccatttggttcctacaacatntatgttaggacgtggaactaaatgtcatacctcattccttgtgaagttggtgagttcctcttgcattagcaacacccaatccgaatctcttagtgcatcctccaccctgaatggctcaatataagacacataagagtaatgttcacaaaaatgagcgactcgagatcgagttggtaccctcctatgaatatcgccgaagatggagttcacgacgtgatctc

SEQ ID NO: 27189 - DNA, 457 bp, Zea mays
  unsure (1)..(457): unsure at all n locations
agcttcgtcgtctgagagagaattacttctttttgtattaaacaatctcagttctccaatcctcgctataaacaggggatatattaagaattgctctttcaagaagctcgaccgaaagtgcttttattgtgttcaaaaatacttctgaaggtatgggcagcctctgggctgctgacttggccaatagatcagcgtattcattttctccacgaggaatatttctgacagagaaaccttctaaagaagcctcaatccttcggactgtatctagttacttttcaagcattaggtctcttgctctatagctctngtcaacatgaccagaaataacttgagagntcagtttaagagtggcccttctgattcccattgccttcaacttccgaagccccagagcagagcttctacctcacgatttatttggcactaacatcagcctgccgcatacagtttactt

SEQ ID NO: 27190 - DNA, 260 bp, Zea mays
acagctatactctagtagcacgcgaacaggccctccgttgtttcgctatggggagagcgactacttaaaaaggaacacttatgtatggcaacgcccttcgaaagtggcccggccccaagtgtacataagaaactaccgtgatgatcgtgaacgatgtgatcaaaatggtggatttggcatataaccactggagtaacgactacaataataacgttatttcctaaatcataccttactgtacttgctgtgtagcttgtact

SEQ ID NO: 27191 - DNA, 348 bp, Zea mays
agcttgaggtgaggcagtgcctcatctggataatctagcaccacctcagcggacttcggccgaccgacaacgcgcgaggaccgagtcacccggtgagtcaacgtccaatatcgcgcacccacatcaccagggacctccactaaagatccccgagcactttaatttgactctaccggcgagagcatgccggagcatgcatcgtcagagagctccaccacctgcgcacgtggccagcccatctacgaccaccaccgtcaacgatccggacctcgacgagatcgctatagacccccggacctcacccgacccttctgcggacctctaccgccaccggtaagccgcgccacc

SEQ ID NO: 27192 - DNA, 323 bp, Zea mays
  unsure (1)..(323): unsure at all n locations
aacctcacgttgatctatccattacctttctatgaatattgcatcatcctttgctcatattatgacacacgtcctcnttgcgttcaattgatctctcgtctcaagtgtggagtcaagttcactcatagagctagcactacatcaatctctttctcaccaaccggataatagccaccacttaaagccatgttcgttagatctcaaaaccatagggattgagggagtatggactggattggagaggatgttaactccgaagggatntaatcctcctcaatccctattgataagcatataacgaacagagcctaacggttctatct

SEQ ID NO: 27193 - DNA, 432 bp, Zea mays
  unsure (1)..(432): unsure at all n locations
agcttgcatgaagtattgtccatattgtttatataaaancaatgtcataagcaaataatattttgtaggattcgcataacaccaggactggatgtgaacatgcgttaacaataataacaactggtaaccaggtacatatttatttgtctaaaatgaaaatatatatttatgctgcatgtaaatgttgatgtatttgggttgggctctaaaggaggacaacatgagaatttcacatgaggttggtgatacaagttctccgtgtcacgtagcacatgaacaaatggaacatattgctgcatcctcagaagctaaaaaggtgcgaaaggagagaaaaagaagaataggagatgccctttgtgtggaatagcanatgggcataacagcagaacatgtctgtctgtggaagagaacatggcaatgctatcaaactgt

SEQ ID NO: 27194 - DNA, 307 bp, Zea mays
attacatgagcacagacacgcttgcactatcaagatttgaactggacagcactatcacctacgcatgctaatgtatggccgatgtgtaatatcgcaaggctttctctccttgtttgaccatgacgacttctgacattacattatgctctacaaacggacacatttgtcctgcgaatgatccaacgcctgaactgtaagtcacttgaagcttgagtcaatcctcctgtcaagaataattgacacacaaagaaatgatgacggaatgagccacattcatgacataatggatgccgtgtaagcctactgc

SEQ ID NO: 27195 - DNA, 345 bp, Zea mays
ctatggaacctacatcagaccactttctcgtgcaagtcaaccacccggtctcatctatcatttataccccaatttggtcctacccaagactcttttagagtgaatcatcctgtcagatgattcaacatcatagttttcttgtacaaattatccaatggaatcataccttttaaacgaatatttgttttacagcaagctacatattaacttgttgaaaaatatgtactgtacacccagtgacttaggtttactaatctcacatccagccattacatgggtaattgacaagtcacaacttgactcagtctaataggcacccattaatgctacttactgcagccaata

SEQ ID NO: 27196 - DNA, 449 bp, Zea mays
  unsure (1)..(449): unsure at all n locations
agcttaaaccatccatgggctaagacacattatacttactccaagatcagatctcactaggcactcttgcttcttgtccaaagatcaggtttcccttgttaaacttgttccttcttctaaatttttaatccacaggtgattatggatttctaattactccaattagggactttacaaggatttctgagaaaatggcttccaaacagccccaaatttataccacatactcaaatgactaaaataaggttactcaaaaaattctataatttttggctctgtatttttatttctaaaattcaaacagtccttccaaaagcaccttcaattcacttaatatnttataatttctctaanaatcctaaaaccaactttaccagagatctcatgaatttagacatccaacaaaattgtcttactattnttttataattttagcacnaattacaagt

SEQ ID NO: 27197 - DNA, 490 bp, Zea mays
  unsure (1)..(490): unsure at all n locations
gtccgcgattccagagtcagcccatgttagtcttaacaattaagcaagtatctagttcaacattgttatcataaaaatcaactaaatatagctgaccatctaacactcccttaaatgctattgaatcatcactacttctaaatacagcaacaccaacatcagtaaaaagacagttgtagcccattttacataattgagaaacagaaagcatattgtagtctaaagaatctacaagaaaaacattagaaatagaatggtcaggagatatatgcaatttacccaaccctttgaccaaaccttgatttccatccccgaatgtgatagctctttanggatcttgcattttctcatatgaggagaacatccttttggtcatgtgggtggtgcactcgctatcaattatccaacttgacccgccggaagcataaacctacnaaaacaagtntatgccttgttcttaggtacctaaacgggcttatgtccgtttaca

SEQ ID NO: 27198 - DNA, 411 bp, Zea mays
  unsure (1)..(411): unsure at all n locations
agcttctaaagggagaaacatatttatgatttatatatgnttcatttgagaaagacaggatttgtagcgcatgccaagcatggaagcaagttggcactcatcatccgcataagaacataatgacgaccgacaggccactggagctcctgcacatggatctattctgcccgattgcttatataagcatcggcgggagtaagtactgtctagttattgtggatgattattctcgcttcacttgggtgttctntttgcaagaaaaatctcaaacccaagagaccttaaatggattcttgagacgagcttcaaatgagttcttcttaaggatcaagaaaattagaagctgacaacgggacggagttcaagaactctcaacattgacgctttcttgaagaggagggaatcaacatg

SEQ ID NO: 27199 - DNA, 459 bp, Zea mays
  unsure (1)..(459): unsure at all n locations
ataaagtcctaattactactgcaggatgcatatattgcgagtttatgatccaaacaattaaccgtngtgctgatgtctagaaatatgcaagccataaattgatcctttgaagttactcttgtctggataagtttggnttatgctattggaacacagtatgtattgctttcattatatatattcattgaagtactcgcatgttgcaatgntgaattggtgtcaagaaaactttgtccgggttatatatgactgtctattatcttagcccgaattggcagcttggcttatcacatgctattgtctgagtctatgatcagagtacgccatgtatgtcatgtctctatgttgagaaagtatctgcggaatccatatcaataatctagctatagtcgatctccatgtagcaagacctgactctagagtgttgtctgctgcgtattctataattcttgaagctcg

SEQ ID NO: 27200 - DNA, 224 bp, Zea mays
agcttctcgaagagactgaagagataactctcttgttcttgtatgccgataggatgaatgttcgtgttcatacaaagatggcacaacacaggcgaagattgccaccacagtgcttgtctcgttgctagagtgctgggtcgcttctctaaccagcggctgggctttgtagctgtgtaattaagaaagagttcagtagcccccccctccccatttatggtcccctt

SEQ ID NO: 27201 - DNA, 373 bp, Zea mays
agcttgtggaggactagatcatcttatcttttttgtttctagatgagaagtggtcacccaagtgttgttgatgaagcaccataagactaatctaggaaggaatccatgtgggagttcgcaagagaaaggtttgcgtgtcggcatcgatgcttcttcaataagctagctgccaagcgaaacctctagaagactgaagatgatctttgagtaaccagaatcagtgtgtgcaatcagcaaccagatgctcctcaaaggccggattttgttgaagttccatctcctcgaagagttgcaaagtgaagatatgtagctgaagtaaagctatacccataacccttctaagccgaatctcgaggacgaaattcttttaagt

SEQ ID NO: 27202 - DNA, 317 bp, Zea mays
  unsure (1)..(317): unsure at all n locations
catgtgctagncggcgatgccagagccagcccacgttatacttagccaataagcaagtgtcaagttcatccctaacaaaagccaccaaggatagctgaccctctaacactcccttaaaagctattgaatcaccacttcttctaaagacagtgacacctatatcagtgaagaaacagttgtagcccattcgacataattgagatacagaaagcacattggaatctaaagaatcaacaagaaaaacactggaaagggaatggtcaggagatatatcaattttacccaaacctgggaccaaaccgtggattccaaccccg

SEQ ID NO: 27203 - DNA, 209 bp, Zea mays
atatattcaccatcaagctaaagggggaaccacaacttaacccaaatccaaaaaaccaaatgttcacaccaaaaagcatactagaacaactgaaaaaaaccctcatgggtaaaaagaacaccaccaaaccaccagccaagcaataagacgaacaccccacaacaacctctagaacaaccaatatgcgtgcaaataaaaaagcaactccc

SEQ ID NO: 27204 - DNA, 240 bp, Zea mays
  unsure (1)..(240): unsure at all n locations
aaatcntggctgncgaactgcttgccggtgtctactgttacttcgacagactccgaaacggcaacgatgttctgcccgaagaattctgggcaggctttgatgtgattgtggaaacagccctcgcttccatccatttggtgaaagattctaccgctaccaaggcgaacttaaggttcccctgagcggggggcaagggcccgacgatgtccaagccctcacgctggagaggccatgtatggg

SEQ ID NO: 27205 - DNA, 248 bp, Zea mays
agcatagaaccgaacaccaggcgtcatggggctaactcaccaagcaaggaagcaaagcccacccgtgaaggacaaaaaaagattcaaaagatgccctagccaagaggggctaaagaaagccgaacccaaatacaaggccccgaagcccaacaagggcagaaggcggcatgagtgcaacgcagccaacgaaaaccccagcacagcgcataacgagaggagaacccgcaagatcacagagggaaccactc

SEQ ID NO: 27206 - DNA, 376 bp, Zea mays
aacttttactggcctcaccagttggatatttcacagttttatctgcatctttagttgatgtcaccagcctaatatccaatactatactgctatattactccctctgatcttttatttatttgatgtttgttaatgtaaagttgtactttccagcgtcaaataatgttccaatctcctaatgcaagaaggtcgctgcccttttttcaggaggcacaaggagatgaacacgagtgagattgagaggatcaaggaaatgttgctgtctatgaaatgctgccttttttagagaaaactacatgagtgtcggtttatacgaatcaccaagcttggctttgtagttgagtgtccttaataaagaattttgcccctgtttcta

SEQ ID NO: 27207 - DNA, 267 bp, Zea mays
atggtgtggatctcactctacctatgttgcattcattgtctgtttgttgtttacacaagcaaaataactaaatgtactactcagagctgttagccgggattgattgatgggaacgccttgttggaaacataatatacttgtttctctctacaaccacacaactagctagtaagttagtaacaccaagttgcactgtactaatcttatagcttcctacaacaagcttacacacctcacttgatcttcactaccaagctatggtatata

SEQ ID NO: 27208 - DNA, 314 bp, Zea mays
  unsure (1)..(314): unsure at all n locations
cactatatagcatgcttctaacaaatataaaatgttcattttctatctcatggctcataattntagcactaagatgagctatgtgatcattttgctgtttaattaaagctaggtgatcatgaatagcattaacattaatgtctctacacttacaaatggaaacatggctaacagtagatgtagagggtttgccagcatttaattcatcaatcttagcatgtaaaatagcactctcatttctaagattggaaacaatattatggcaaacatttaaattcttagcattagcaaataatttatcattctcaatctta

SEQ ID NO: 27209 - DNA, 368 bp, Zea mays
cactaagcaggagaactagctaatatctatgactaacctacccggggctaggtcacgaatcaacctttgcttggaatatacttggcacaagtaagctcttgtcttgtaccaaccatgccatctgcttgtgccgaaaccacttgttctaaacatttgattagagtgaccaatgcctactcattctaggaagtgtaagctctctgcttgcacccccaatcgaacttaagtgcttcttatctgtgggtcatacggaacaaaaatatgtacaaactgcacacaatcatggtacccctataatgcccaagatggcacgaggaccttgatgctgagacttggtggcagctgtctatctctgctgtattgcttcc

SEQ ID NO: 27210 - DNA, 438 bp, Zea mays
agcttgacactaccaaaaagatatctgattggagccccattaagacattgtgtggaaccaactcagtttttaaaaaatcagtttttatcttttagataggagattttagataggagaggctagcttcttaattttttaagaaactaataatctaatttctataaactgagtcataaaatgatatgtttagaaccacctcaatttatataaatcagtttcttcaaaattgggtgcttccaaacagggcctaagtcttcggacagacaccgtgagcacgttgtcaccttgctggtttgtgtcgtccctccagacttctccccctcccactcaaccctagtgttgacttgcactgaaagcccgccgcaatggagcggtctctaccggtgaagtcggtcgccgaggcactggacgctgcttggtgccgcttttgttggacat

SEQ ID NO: 27211 - DNA, 330 bp, Zea mays
aatcattcgtttattggaagggaattggattctctgcaaaacaaagcttacatccgtactcatgcttcgccatcactccgagcaactctctattccttgggagaaatgagcatcatacataaggactctatccttgggggagagagtaaaagctcaaaagcataaggaccggacttcatctgtggtataatcttaactcgttactcatgaccaaaggggaagaacttacttcgagggctctaatgattccgcttttggcgattcatgcccaaaagggggagaaatgaccccatgcataatgtaccgcccaccaccaccaaattcaaaaac

SEQ ID NO: 27212 - DNA, 416 bp, Zea mays
agcttcttccgccaaattgaggtgctccgaagccacaccacgccctcgcacatcaccccaaccatctactgaaatccgaacggtgcccagcacgcagggcatcgccgacgacattctttctctccgctctgctttctttttctctccacgggcgtgcttggtctttcggtgccggcttaagatggaggaggcagggtggcggcacatatttttactcccagcgacgaccgaggaatccggacgggagtagcagtcacgacaaccattgcgaggatccagcgtgggttcgcgcgagttcgttcggggtgcacgcgagctagattgaagaatggtaatccgaccagtgggacccacgcggcggcgacccagagaatgcgcctggtgcacagaggatgcccggtgggacccatcagtca

SEQ ID NO: 27213 - DNA, 341 bp, Zea mays
catatccacgaaactcccaaaatactcttggcccatattctgcctataatttccctggtcagactaagtcagatgattcactcgtgactattctcaccaacagtaaactctactgtctacaccacatacacccagctaccctctctgcacacacacactcaacactttcagccaatgcaaacaccccacccacttagttaccctgctctgccggctacgcgcatagtgtcgcttctgctacaatccaccctcctagtaagcaccttcactccaccaccagtgatatcacaacaccacatgacacagattctgctcaagactctacactccatatatcacta

SEQ ID NO: 27214 - DNA, 436 bp, Zea mays
agcttctaaagtgagagcacatctgtgtgactaaccaatgttcatttcgagaaagacagggtttgttgcgcatgtcaagcacgaaagcaagttggtgttcatcatccacacaagaacattatgatgactgaaaggccgcttgagctactccacatggacctattcgactcgatcgcttacataagcatcggcgggagtaagtacagtctagttattgtgaatgattatgctcgcttcacttgggtattctttttgcaggataaatcacaaacccaagagactttgaaatgattcttgagacgggctcaaaatgagttcggcttgaggatcaagaaaataagaagcgacaacggaacgaagttcaagaattcacaaattgaaggccttcttgaggaggagggcattaagcctgagttctcttctcccttcacaccac

SEQ ID NO: 27215 - DNA, 433 bp, Zea mays
agcttcttcaccatgtgatcacggttatcttgagaaggttgggcaatgcatttccctttaagttgtgtcaagctcttctttagcctctcattttcttctttgagcttttgatatgaatcatcatttgttcctgcagattctagctcaaaagaagatttgcttgtcgacgaacaacaagcattagcacatggtaatatagtatcaatttgaatacatgtgcatgagtgaggttgttgggattttaaattttctatcacaacctcatgagcaatgtttaatatgatatgatcatctataagattttcatgagaacatagaagcatatcatatttattttgaaaagctagattttcaacttttagctattctatgtggtccttaagcaagggtattctatttactaatcgagcgatacaatggtaagcgttatctt

SEQ ID NO: 27216 - DNA, 436 bp, Zea mays
  unsure (1)..(436): unsure at all n locations
agcttatagccacaaaaactcggttagtgttagcactttttatgccaagnggcttgaaaggagtctcaacaaaacacaataccacaagagatcaatcacagagatgacacagtggtttatcccgtggttcggccaagaccaacgcttgcctactccacgttgtggcgtcccaacggacgaggattgcaatcaacccctctcatgcggtccaaagactcacttgaataccacggtgttttgcttgctttttctcaatcccgtttgcgaggaatctccacaatttggagcctctcgcccttacaattgaagttcacaaagaagcacagagtaagggagaatgagcaacgcacacaagacttcataagatcagagcaacaacacgcacacaagtcgcaacaagagctcgcaacacaacttcaagagtttgcaactcaac

SEQ ID NO: 27217 - DNA, 290 bp, Zea mays
tggataacttagctcatgtcgtaatggttgtcttcccattgctaccagactattaatgccaattatgtgctcttatcatgatatctagttatactctgttgcttcctcgtttatgccattttcaaaggagatgctgtcaaaaatttatataccaatgttaaatgtgtaatttaacaacatattggggtgatcggggatcccggggtgttacatggaggaacagaacaaacaacttgctttctgccggcttctttcttccttgtgagctgcgtccattctttcatcaagga

SEQ ID NO: 27218 - DNA, 430 bp, Zea mays
tgcagcttccgtattacaaaccgacttatagatagaacgaccttctagtccatacaggtctgagtcaatgttgtaaacttttatgaggggcataattgtaattcctcacaagctgtgttctgtgcctataaatagtgaacagtattgctttactgttcacgcatttctggtagttgcaatcgcatctttgaggaaccaatctttgccaaggcataggtattattgtattcaataattcactatatattaagtaaatataatataattcgtctatgatttatttacctttttatacccttcattttatgttatctcatacagtctattgaaaatttattacgaagacttgagcttcgtaattatgttcttattaaccttcgtccaaagcttattattctcaatagaataatgtttcatggacgaacgacgt

SEQ ID NO: 27219 - DNA, 92 bp, Zea mays
ttgaggggaaagatcaacaggaccaacacttcctttgtctgacagaacggggagagtgaagaccccatggaaagattgagcaaaaaatgaaa

SEQ ID NO: 27220 - DNA, 385 bp, Zea mays
tcgcagcgcgaagcgaagacaaacagacacaagcaaacaaacatatatttgcgtaagaacattacaccatacaagataaagtggtataaaagcgagcaacataaaataaagagcgcttctacggttacccgagaaaaagaaccatgatagacgaagctatggtccaggggttagtacgtttacgataaacaagtactaattagaacatctaattcaacataattatatcaattgatatgcatcaaatattagataatacgactacttaggtatgactaactcactatagtaaaagctgacagataacccacgaacttaatgaatatgagcgattctaagcgagacgaattaacgacgcacgacgagcaaacacgatgtgcgcaac

SEQ ID NO: 27221 - DNA, 423 bp, Zea mays
  unsure (1)..(423): unsure at all n locations
agctttgagaaatacagctttgtctgccctgccacgaaagaagggatcccttgtttgagtagcatggatattcttatgaagcatggatctttttcttcaagatgcatgaaaagaagggaaggtgtttttttgtcgaaggctcaaaaacggtatgtatgtaagtttcatgcatcataaagaaataaattataataatttacatattagatccaaagtcatacacatcaaatgtcacgacttcgttacaatagaaaagtacaatgttcattctaatgtatgttacgtccaccatttaaaaatgtctttgcaacagtgttagtcctctttcaggagtttttctgcaacttcatttagcaatttattgacgacttcgtcaacaatagattcagccatattaatgacctccagtgctntcttcgcttc

SEQ ID NO: 27222 - DNA, 420 bp, Zea mays
  unsure (1)..(420): unsure at all n locations
agctatggcgtttccattaatccactanataaccccattaggatcaccacgaataaagttctgctccgaggacaatgcgccaaccttagcaaaactatttttaaattgttagcacattccgtaacaaccttgtagcatttctctttagcccgacgaagctcctcaatatttttctgcacccttaatcgttccatcttagagatctcgcgttttatttgttctacattgaaatttttagttacttcatcaagcttcttctccaacccttgcacttcagatatgtgcaaatccacctaaatagatagtgcatattctaaatcagcaatacattttgcatctgtctcttgcttcttttcaaactccttggatttttgatctgcttcagacaggctagatagcctagcttcgctggattttaac

SEQ ID NO: 27223 - DNA, 434 bp, Zea mays
  unsure (1)..(434): unsure at all n locations
agctntacaaagcacttgagaaatataatgagaaaggaagaaggcaatccaagcgtcaagagcaacaaaagaacacaaaacaccctctctcaagtccctaatggaattgagttgatttggtggcttggagaggatttgatctattgaatgtgtcttggtagtgaagtcttttgctcttacaatgaatgtgatgttcagaaaacttggatgtcaatgaatgagatggttagggggtatttatagcccccaaccacttcctagtcattggcaaagctgctggcgatgggcgcaccggacagtccggtgcgccatcggacagccactgtgcactgtccggtgcgcgccacgtcagcgcaacagttagggttcggagcagttgaccgttggagtcgcttgtcgtcttgctgcaccagacagtccggtgccctctgact

SEQ ID NO: 27224 - DNA, 393 bp, Zea mays
cctttattctataatatgcttaaggataaggaaactagaaaatgtaacttaattaatgaaccatagagtacctctatttttgttaggttacttattcaatatagttcactagaaaaatatatcataccctggtttagtacaaattaagtaggatatcttttattttaataaaacaaggataacttagaaaaaccctacaaaaatgacccctttgttaaaacacccccacccttgggataactattgttttattagagagaacttaggaaaaatatgaaatccgctgtttgacattgttcaaataataatgtagtagaaagtgcctttttggcattaaacttaagaaaatcataactaaataaccaccccttagttttctgtgatttttatcac

SEQ ID NO: 27225 - DNA, 415 bp, Zea mays
  unsure (1)..(415): unsure at all n locations
agcttgttgtcataacagtgcttgttatcgctgaatctgcagatacatgcataaaaactgtaagtcatttacacgtttatacttaatgtatgtcatttatttctcctctttgctaacatgaattgttttgcagatcctgcggaattgcaaggttgctaggattcttcctcgcatagttgacacagcaaagaatgatcgaagtgcaatactccgtgcaaggtaaacatgtttgattgttttcgcatcgtccattggctattttcttgccaattttttaagtttacttcccactatcccaggtgctgtgagtatgcacttctggtactggagtattgggctgatgcaccacaaatacaacgttcagctgatttatatcangatatgataaaatgctgtgtagcaaatgcgatgagtg

SEQ ID NO: 27226 - DNA, 344 bp, Zea mays
atgtatgaaagtaagcttaatgcaggatacttctgtgtaccaatcaacatactacagtacggtaattcatattttttaaaataagtagaagtgtagaacgatacatacacacgataacataaggctattaaatcaactaatgaaatgtaacattttcatgagaacaaatattttaataatgtggagtggcattttcctgtaaccatggcaaggtttcatatatccacccaactatgcaatgttcaacaaaattgagttggtgacagatcgctgaggtgtttgttaagtcaggttgtaagattctagcagtcataatgcgaggaaatacctggctaaagcattct

SEQ ID NO: 27227 - DNA, 439 bp, Zea mays
  unsure (1)..(439): unsure at all n locations
agcttcngcagcagaaagtcctgcttagcctgaaaatgaagaattatccaagtggcagatgtgattcaccagacaccgccaccgacatcagtgtcaaaaattgtcattgccgagaccaccagagccgaaaccaccgcagccgaagctaccggagccgaaactactgaagctgaaaccgctggagccgaagccaccggagccgaagctgggacaaccgaagattctaacctggaaaccacacttgatgttattgataatatacttctgaaaatggctaaagaagaagctgttgtggctgctgtgaaaacggctactgaaaaaggaaaagagcaggttgaagacactttggtggaaggaagatttaactttcaagatttacttggacaagagttaacaggcgctgtaaaagaagagctaaagaaatatgccatatcctgtg

SEQ ID NO: 27228 - DNA, 342 bp, Zea mays
  unsure (1)..(342): unsure at all n locations
gatatgctgcgagcctgtgcgtgacaagaaagccaagatgggacaaaaggttaccttatgcagaaatctcctcaacaatagttaccaggccagcttgagatgtcccgttcatgcactctatgggcgagagttgtagtgactcgcggtacacttgggaccagcctggagagagacaggtgttaggccccgacatcatacttgaagccgataggagtatctaaatggttcgggagaacccgaagattgcacaatctatgcagcgaagtatgcggacagaaggagaagagaactgagtttngaagtgcgagactacgtctatctgaaggcgcacctatcagggga

SEQ ID NO: 27229 - DNA, 412 bp, Zea mays
  unsure (1)..(412): unsure at all n locations
acgcagcggcgcggtggaccaccggtgacgccattgattcctagcacacacgacacgttagggagcggagacaaatttgagtgcttcgccaggtgccctgggacgttttcgttgcgatgctaagaactgtgatcgatgggatggcggcgaatttctcgtcatcgcgcagcgacaccatgaatccactgtacgccgtggacctgcttttctccgtcctcaccatcggtaatgtcacccttgtcttatccgccatgactcgggcataggttagcactatttggctcgaggattangtcgtccgatcaccggacgggatcacgatggggctgcgctgccgcgaaccaagtgcagcgtcggccgaggggaaaatcgcgttgggaagaagctggctggccgtcgatatgtgatggat

SEQ ID NO: 27230 - DNA, 344 bp, Zea mays
gtcatatatacagatcacatccccttcttcttttgaccataacagctgttcaatttaataatcaaatctctatgatgacaaatgcataaagctactgactggtgttgcccatattcttgtaacactacccacaaacaataatcaccacaagatttatgacctcagatttgtcaaacatgcttctcaatgaatcttcctggcatatccgcatatctacaaatatggtttaatggtgcaagattgcaagtaaaagatcgcttagcgcatacacttaaattcagttgtttgaacaactcactcaagtcatagcctttataatttccataccaaaagttcttacatgg

SEQ ID NO: 27231 - DNA, 434 bp, Zea mays
  unsure (1)..(434): unsure at all n locations
agcttgagggtctcggngtaaatgatgttgatgcacctcggtgcgctgcttcgagaatcgccggatgtagtcctggagcgactcccccggctgttgccggcagcttcgaaggtcccaagaattcccggggcgcacgtatgtgccctggaaattgccagcgaaggcttggaccaaatcgtcccagttggaaatctgccccggaggcaggtgctccaaccaggcgcgagcagtgtctgagaagaacacggggaggttgcggatgatgaggttgtcttcntccgttccacccagttggcaggcaaggcggtaatccgcgagccacagatccggtcttatttcccccgagtacttcgtgatagtagtcgggggtcggaaccgggtcgggaatggcgtccgtcggatggcccgactgaaagcctgctgaccgggtggtt

SEQ ID NO: 27232 - DNA, 429 bp, Zea mays
ttttgagaaagacagggtttgtatcgcatgtcatgcatggaagcaagttggtgttcatcatccacacatgaacatcatgacgaccgacaggtcgcttgagctactccacatggacctattcggcccgatcgcttacataagcatcgacgggagtaagtattgtcttgtaattgtggaagattattctcgcttcacttgggtgttcttttttcaagaaaaatcacaaacccaagagaccataaagggattcttgagacgggctcaaaatgagttcggcttgaggatcaaaaagattagaagcgacaacgggacggagttcaagaactctcaaattgaacgcttccttgaggatgagggcatcaagcatgagttctcttctccctacacgccacaacaaaatggtgtagtggagaggaagaatagaactct

SEQ ID NO: 27233 - DNA, 429 bp, Zea mays
  unsure (1)..(429): unsure at all n locations
agcttactcctccctgtttatggccgttcatcatcaccaagattntgaagcccgggcatacaagctggccaacgatcggggcgaagtctatagcaacgctgggaacatccaacaactacgtcgcttctacccttaaaatgtttcaagtcgttcatgtatctcgctttctttacgtgtataaataaagtctaaccgtcaagggaggatcgaccttgcctcagcaaaaaccgaacctccctcgggggctagaaggggggaaccccctctgcgtcaaaattatcctcggaaaagttttccgccaaaacaacttccgtgcttttcgactatatcgataacggaatcctaaatacgacgagaggaaccttaaacggcaaggccgaccgagccgagggactcctacgcctccgggatactgatacctcactcatc

SEQ ID NO: 27234 - DNA, 286 bp, Zea mays
cttcgtcaccagccatttttcggccgccatttacccaaatctgggtcataaatctgtttccgatgcttcgggctaagcttgagatatcaaccaagtctgctgctgacaagctgaagtttggcctatttacatattttacgtgcgtacagccagccttcatgaaagcggtagttgtgccttgagaagctaccatggcgcagaagtcagcatgcccagcaataacttcgtcaagtgcatcaacctcaccttcaatatattccaaggtgctgggcaggttttcagctga

SEQ ID NO: 27235 - DNA, 421 bp, Zea mays
agcttaccgcatttgaagcatgagttctttcccttggtcttggacttgcttggctgccccttgcgaccatttagcgccgtcttgaacctcttgatgatgagagccatctcttcatcgttgagtccggccgcctcaatttgtgccaccttgctaggtagcgcctccttgcttcgtgttgccttgagagcgagaggttgcggctcgttgattggaccattcaaggcgtcgtccacatatctcgcctccttgatcatcattcgcccgctaacaaatttcccaagaacttcttcgggcgacatcttggtgtacctgtgattttcacgtatattgttcaccaagtgaggatcaagaacggtaaatgaccttatcattatgcggacgacgtcgtggtccgtccatcgcgtgctcacgtagcttctta

SEQ ID NO: 27236 - DNA, 275 bp, Zea mays
agtaaaatagtaaagtccaaaattccccaaactttttatgtgagcttttcacattatttaaaagccatgggtagagtttggtttgatttggaccttgtttgatcactaaacccaaaaccaccccccctgccctatgaactcctttaccgactccggaaaccctatgttcccggaactccgtgaaggaaagttgtactcaaaacataaataacaagtgtatgctatctttgcattctcatgagcattccatgacatccatccttatgtatgtatat

SEQ ID NO: 27237 - DNA, 412 bp, Zea mays
  unsure (1)..(412): unsure at all n locations
agctgtcttcatcaatatcgtcaaagatcaatgctcctggctggtagccacaagatatagcataatctctcaattcctctctctcagccttggatagctcttgtccaataatgttttggaaatcgaagtccttctccttcgaaatatctttagcaatcttcttcccttttccaggcactgtggccaaagttccttcggcagctacaacagcttcttctgcggccatattcaacaacattttatcaatatcagaaaatgtgctctccagatttgtatcttcggtagttgcagcttcaatgggagcagctttggtagctgtagcagcttcngcagcaggtgttatctttggcgctgaggccagcggtggtgtttcttcaatagcttcaattatgggaataatccttcacctctt

SEQ ID NO: 27238 - DNA, 428 bp, Zea mays
  unsure (1)..(428): unsure at all n locations
agcttatgaagattcttcattccaacatgggctagncggcggggccagagccaacccaagttagtcttagcaactaagcaagtgtcgagttcagctctatcaaaatctaccaagtatagctgaccctctaacactcccttaaatgctattgaatcatcacttcttctaaagacagtaacacctacatcagtaaatagacaggtgtagcccatttgacataattgggatacggaaagcaaattgtaatctaaagaatctacaagaaaaacattggaaatagtatggtcaggtgatatagcaattttacccagtcctttgaccaaaccttgatttccatccccgaatgtgatagctcgttggggatcttggtttttctcatatgaggagaacatctttttctcccctgtcatgtggtttgtgcacccgct

SEQ ID NO: 27239 - DNA, 403 bp, Zea mays
cccgcctggatgtacggtgcacaccttacatgcactgttacttgtccggtgtgccagtatatgcgcgcctgacttctgcgcgcgcatttaatgcgctgcatgtatccgttggcgcggagttagccgttgctccggagttgcaccggacagtccggtgcacatcggacagtccggtgaattatagtggacaagccggtggcgtttcccgaatctagcgagttcctgaggccgctcctccttggcgcaccggacagtccggtgaattatagcgcgagtgcctctggatattcccgaatgtggcgagtttgagctggagtcctctggtgcaccggacactgtccggtggcacaccggacagtccggtgcctccagaccatatggccttctggtgcattttgctcct

SEQ ID NO: 27240 - DNA, 360 bp, Zea mays
  unsure (1)..(360): unsure at all n locations
acgtgaaaagtgccttcctcaatggaccaatcaaggaagagttctattttgagccacctccccgctttgaagatagtaagtaccctaaccatgtgtataaactctctaacgcgctgtatgggcttaaacaagccccaagagcatggtatgaatgccttaaagattttcttatcactaatggcttcaaagttggaaaggccgatcctacactcttcactaaaactcttgaaaatgacttgtttgtatgccaaacttatgttgatgatattatatttgggtctactaacgagtctacatgtgaagaatatagtatgatcatgacacaaaaattctagatgtctatgatggnggagttgaagt

SEQ ID NO: 27241 - DNA, 276 bp, Zea mays
attgggatgtgtgcttatgcaaaaaggtcatgtgatcgcctatgcgtctcatcagttgcggaaacatgaattgaactaccccactcatgacttggaactggcagcagttgtgcatgcccttaacatttggagacattatattatgggaactaagtgtcaagtgtacacggatcataagagtgtgaagtatatattcactcagaaggatctcaaccttatgcaacgccgctggttggagctcattaaggattatgatttggagattcactatcaccc

SEQ ID NO: 27242 - DNA, 387 bp, Zea mays
agcttgtacacgtggttatttcttttggggtcctcaaaatcgggaggttgttcaacatacacttgttcactaatcttaccatatagaaaggcactctttacatccatttggtagagcttgatattatgagcacaagcataagcaagaaggatccggattgcttccaatcttgccatgggagcaaatgtctcaccgaaatccaatccctctatttgagtatacccttgcgccactaatcttgccttgtttcttactactaatccatcttcattgtgcttgttgtgaaacacccatttgggaccaataacattgtggttctttgttctctcaacaagctcccaaacttaatattgagtgaacttacttaattcctcatgtattgcattc

SEQ ID NO: 27243 - DNA, 394 bp, Zea mays
tttatatgaattcaggatttgcttgtcaaagatcaaaaccccgggcaggccgatctgaccttgggaatactttccctcaagctcatagtaccgcccggttgagtcgcttgatactgagatgtttctcagtcaagtccgccggtcatatctacataaacagccgaagaaagatacacggttagaaacagactagtcagtcatccagtgaagaaacaaaaacactaaccagcattcgacattttcaaatcagatatctgcttctgaagcaacaacggattccactgcgtcagaactccttctgggatagagacaccatgtgatctcaattgaccgaccatcccatctaccaatgcctgatataataacacatgagtacaaagaaagtgatttgcta

SEQ ID NO: 27244 - DNA, 420 bp, Zea mays
  unsure (1)..(420): unsure at all n locations
agctaggccagtatctctcggaattgctcgagctgtgtgtcctaaccccccgcagggactaagaccacagctagctcccgcgggatgtcaacgcgagacgcagacacaggggcgtcgtcatcttctagcatgccgaggtggttgtctccgccgtgatccccctgatcgatgtggaaacactcgcgacttgggccattacccccgtcgtcgaggctgtggtcatcgtcggagcagccggagatgcactaatcacatgcagacatgaagtctcgcatggtactgggatcacggagtccggagaaatcccaatcgaagtcagagtcgttgtcttcctcggaacccgtgggtccggtgtgtgagacggncgtcagtccgtcccaagatgaacacatattgtaccctggaaagcaaggtatgccc

SEQ ID NO: 27245 - DNA, 292 bp, Zea mays
aacttgctatcgtgacatgcaacgttttcagacaaatgttctaaaggaacatcagatgctgctggccataatacattcctatgtcattctcaaaaaaaactttgcaactgacttaaagcgttatcttaaacagctatctgcagtatgactataagttggacaagggatactcgtcaaaatctacattctgcactttcggtactaaggatccatgaatcttactgcacagattaacacgaatctttcccatgtgttgtttgcgtgactctcaacatttaatagcaacttgatt

SEQ ID NO: 27246 - DNA, 436 bp, Zea mays
agcttcagaaggagacagacgttgagcgttttatgttcttcgcgcctaggttgccatattccttagtgtcgcacaccttgtcccaggcgaccaggcagcacgaaccaccagcaatgcacgtccctgaccacaagaagtggcagtggcaatggtcgaccacggtgacggtcccttgagcgagttgcagcgcactcatcgcctagattagctggctgtcaaggatggagttcaccagcacgagcctgcccataaggttcaacaacatagtctgcccataaggctgaggaaggcctccagcttgcagctgaggatgtcgacacagagctagacaatagaggggccacgtgcatgagtaccaagacgctctttgagtatttgatacaaaggccggtggcggtgttgaagttgtccagggaacagcgtaaatgttggacgc

SEQ ID NO: 27247 - DNA, 453 bp, Zea mays
  unsure (1)..(453): unsure at all n locations
cgtttaacttcaactttcacacatcaagactattggtcacaccaacatggagagaccaaacatttntcactaagttgtgaaaatccggtctaactttccagcacagctcatatctaaagtccttacgcaccatggggagagtattaaattgaaggcaaagaggagcatgatccgagaaggatctatttaacccaataacactgatattgttgttagcaagatcccagtcaggactggccaaaaatctgtcaagtttttcaaaagtaggatcgttgcggttgttagaccacgtatatagtctatttttcaactcaaattccactagaccatgatgatctatgatactattaaacagaaaactccacttactgatggcacccggtttatttttttcttcagcttttctgaggatgttgaaatcacccncaataatcatatggacctgacttcttg

SEQ ID NO: 27248 - DNA, 234 bp, Zea mays
gacccctggaagtacttcatatggatctcttcggacccgtcccctatctaagcataggaggaagaagatggcttgcaaaaatgatgattattcccgcttcacttgggtattctttttggaagatatatcttaaacccaacggaccctcaacgctttcttaagagagctcaaacgagttgcactaaagtgaaaagataaaaaccacatgggtccgattcaaaaccttaagggagg

SEQ ID NO: 27249 - DNA, 405 bp, Zea mays
  unsure (1)..(405): unsure at all n locations
aagcacttatatataacatgagctaactagaccggcatttgtatttcaaagaaaaatntctaatagtcgtacgtactataacacctaacaatgaacaagttgcacaaattgagacaaaccacatacaccttcatgtttgaagcaacacatgaggatgtgaagcacatcagaggccaggacacgaagctctcctccgccctcgaatctgcatgcacattgaattggagcaaacagcaccgcaaccaccagtcaagcatcccacattagtgccagagtgaacttgcacgacaccaaaagccatcaatgaacctattttgggcaacaacaaacaaactatgccactggcaaatacttacagatcctgttatcagtcgaatcgactcagaaaagatggagtcacatttc

SEQ ID NO: 27250 - DNA, 427 bp, Zea mays
gcttaatagagataaatttttatgtctttcatgtcaaaatagtggtactaaatgataaacaataatattacaaaattttagaaactaggatggatcaatttggagttcatatgaatttctatgatttatacaaattctagcacttattttatattaaaaatctattttctatttattttcctggatttcctgatctcctggactgggccccaatttctgaagagaataggggccctggcgcaaatgtaaccaagacacaggctgacaacaaggtggactgcaggttgaatactcaatttcgcagggtctctttaacaattatgacacggcggagagtacatatgaactctgatcgtacgatcttggatgggcggcatagattaaatccagccctgatcgaagcggtacgccacacgggccctcggat

SEQ ID NO: 27251 - DNA, 431 bp, Zea mays
ctttcatccttcttcttcacaaattatgctggacatccccaaggcgaagtacttgggcggataaaacctttgtccaacaagtcttgctattgcttcttcaattctgccaactcagcgggtggcatccggtaaggcctcttggaaataggtgtcgttcccggttgcaactcgatggcgaattcaatatcccggtctggtggcattcctggcaattcatcagggaagacatctgcatactcacagaccactggaatcttcttaaagataactccgtcagcacaaaagcacacaactcagtagactcttgacggggcagaaacaaagtgaaactcccacagatcggggaattgacttccacgatgcggctggctacatcaagcactacttggtgtagggtcatccaattagtgcccagaataaaattcacattt

SEQ ID NO: 27252 - DNA, 431 bp, Zea mays
  unsure (1)..(431): unsure at all n locations
agcttgaaaaatatctagacacagttcgaatgattgaagcttccttcgaaggattttctgtcaaaaatatccctcgaggacaaaatgagcatgctgatttgctagctaagtcagcagcacaggggctgcccttaccttcggatgtgttcttcaaaacaataaaagcaccttcagtggaacttcttgaaagagcagtcctcaatatatcccctgtttatagtgaagactggagaactgagatcatctcgtaccttcagggtaacttcctttcaaatgacgaaacttataacaggaggatagaagcaagagctcgtccatatgtcatgatagagggggagttgtacaagcatggagtttgtgctccattactcaagtgtntatccagagccgaaggcatagaattgatgaaagaaatacatgcacgcctgtgt

SEQ ID NO: 27253 - DNA, 391 bp, Zea mays
tacaacaaaaggacgctggttccaatgcatgtgcctgctcttgatgtcactcgattcgttaacattcttgggtgtgcagaaggtgcgttcccgcaaacctaccttggtctccctctctctaatgagaaattgaaccttgcagcctttgctcccatcattgctagcgctgaccgttatttatctggatggtgggcgagtcttcttaatcaccatggcagacttactcttgttaatgcagtcttggacagcttgcctgtttatgcaatgggggctctcgccctccctccaggcgtgattgaggccatcgactctagacgtcgggctttcctatgggccggggaagaaacaatctctggtgcgaaatgtcttgtgaattgggaacgggcatgtc

SEQ ID NO: 27254 - DNA, 338 bp, Zea mays
actggttactgtgagggttctcttcctgctgctcaatctgacatccttggcttttggtcttcttgcgggtttatcttgcggtggcaatcttcttcaagttcttgtcgtagtccaatttgacggtgcggtaagcttcacgggtattggcctcttcgacttcagctagcgagaggttctcttgaagggacgcattttcttctgatagttccctgactttctgctccaggctatccacctggtgaagttatggaggtgcaccggatggcgatgtcatcatattggttatcaagggtatgaatgtatactgccatgtagacaatggtgggatcattctcaat

SEQ ID NO: 27255 - DNA, 426 bp, Zea mays
  unsure (1)..(426): unsure at all n locations
agctntgagcataaaatccctcaattattagcgtaaataccgagtcaatgtgagaggttgatagctttagtaggttgttattactatcctatttttacagatccgaaaacatggcagccgcatgcatgcggcttctattttttatacagatccaaaaaatatggcaaaaatcgtgggagctatcattgcatgcgcgcaaattacgaacaacataaatnaaggaattgtctttccaatgtgcatgcagtaaactgatatacgaactctatgtttaagcataaaatcgtacagtttttggcgtaaataatacatgtggtaggcataaaacacaataatcgaaaagaaaactgcgccgaatcggaggatgtcacgcccaattatcgctgcgcgcatctcgggcattccgtgacgccgctcgctcaaaca

SEQ ID NO: 27256 - DNA, 435 bp, Zea mays
  unsure (1)..(435): unsure at all n locations
ctaagcttctaagggagaacacgtgataggtttgactaatgtgcatttcgaataagataaaccatgtgcagcttgtcaagcatgtaaacaagtgggaggagcgcatcacagcaagaatgtgatgaccacttcaagacccctggagctgctgcatatggacctcttcggacccgtcgcctatctgagcataggagggagtaagatgggttaattattgttgatgacttttaccgcttcacttgagtattctttttgcaggataagtctgaaacccaagggaccctcaagcgcttcctcaggagagctcaaaatgagtttgagctcaaagtgaagaagataatgagcgacaacgggtccaagttcaagaaccttcaagtataggagttccttgaggatgaanggatcaagcacgagttctacgctcactacacacca

SEQ ID NO: 27257 - DNA, 400 bp, Zea mays
atctttacctaatggactttatgtgtgtcttcctcaatgggccaatcaagggagaggtctatgttgagcaacctcccggctttgaagatgggagtaccctaatcatgtctataggctctctaaggcgctttatgggctcaagcaagccccaagagcatggtatgaatgcctaagagatttccttattgctaatggcttcaaaagcggcaaggccgatcctactttattcactaaaactcttgacaatgatttgattgtatgccaaatttatgttgatgatatcatatttgggtctactaatgaatctacatgtgaagaatttactacgatcatgacacaaaaaatctatatgtcgataatggggagttgaagtattttctatgaattcaagtcaagcaac

SEQ ID NO: 27258 - DNA, 296 bp, Zea mays
agcacttggaccataaggaggaggtcatcacggcgttccatgaaaagctgaaatcctataatgcgatgctggagaaacagcggggcgagcatgccgcgactgaggcgaagctgcaaaagctgcatcgggagctcgacgacaatgctagcaacattgctcgcgccgaggagaacctcaaggcgaaggatgtttccatggagaaactagcgactgatctttcctggcatgagaaggacctcgccttcggggagggagatgtgaaaggcggaacatgttgctggccgagtttgagctcg

SEQ ID NO: 27259 - DNA, 431 bp, Zea mays
tagcttcttctaaacctatattagcattacgtcttatggagttaaatacccctatgtagctagttgatgattttctaggcaaaccaacttccaacagattgaaattttaaccaagtgttcatatagtggtaaatagggtctccacaaattttttattaatttttggtgctctggttttgtttctaaaattcattctacctttctaaaggcactcttaaattaactaaaattttctttctgctgtgaaaatcctaaagatatttttaacagtaactacacacttttatggactctacaaaattagtttcaattttcttgcatttttctatattttctagtggattttacaatctactagtaaaataaaaagagaaaccatgaataattctatgccgaaagacggagctcatcccatgagcacagggaaaact

SEQ ID NO: 27260 - DNA, 336 bp, Zea mays
catcatgacgactaacatgccacttgagctcctacacatggatctattcggctcgatagcttacataagcatcggagggagtaagtactgtctatttattgtggatgattatcctcgcttcacttgggtgtttttttgcaggaaaaatctcatacccaagaaaccttaaagggattcttgagacgggctcaaaatgagttcggcttaaggatcaagataattataagccgacaacggtacggatttcaagaactcacatatcgaaggcttacttgatgaggagggcatcaagcatgagttctcttctccctacaccccacaacaaaatggtgtagt

SEQ ID NO: 27261 - DNA, 427 bp, Zea mays
agcttgttggctctatctggggactttattttccttacaatgagactactacatgaaatagactttaaaaaaggtaatagtctcaaagtcttagattatagagtaacctccccctgaaagtgtgcatacaagttttgaatgcttgtaggagacatacactttgatttgatatcaagaggggcagattatccataatctgagctttggcacatataagttaaatgataccaattgaagcataccaaatgaagtgttataccacttgaagtatttcacaatatcaattgatgtatcattttcttggaaatgttatgtaagctatgtgtccggcttattattttagaccatgtaggtttgctcaagagtatgaattgaaagtgagcgatcctaccatatgatttacctagtatgcatgccaaaatgaata

SEQ ID NO: 27262 - DNA, 350 bp, Zea mays
  unsure (1)..(350): unsure at all n locations
tatgctctcagctctcaagctttcacagcaatccaacacacggtggagtatggtattacgcttcggcggcccaaaccactctaaatcctcgtgtgtccttgtgctcggtgatcgcttatgaggacaggcaaaacgctttagcccccctcctcatcttatgatttatggtgggtgcactccaccacccgggcggagaattccctctctgacatttggcgcgccaggtatggggctaggcattaagtttttgcttgtttcctcactcagcatgatggtgcaaatcgttgagcaccatgccgagacttcaacagatntcctggtggaggaagaagttgtttcttccacaccac

SEQ ID NO: 27263 - DNA, 411 bp, Zea mays
agctttgcaagatgatattatttataagttgaatgctcgctgtccgggttcgaggcagtgaatgtgcactaaatgtgaacaaaatgtgtttgtatatttttgagtctgaactgaatgtgtcgtctattgtggttctgtctgagaactcaatgtatttatttttctgcctagattaaatttgtctgttgggtttatgtctgaaaaccaaatgtttctgagaactacatctatctctcaagtgaatgagagaactgaatttgtgatctcaatgtgtatcaatgtgatctcaacgcgagaactacatctacatccatcgcgtgatatatatttatacaatattaggggacctgttcgtataggactacctcaactaatgtttcggctgaatattttttttatcccacacactac

SEQ ID NO: 27264 - DNA, 424 bp, Zea mays
tactaagcgtgctacttggctcgattgaacaaccgctcgtccctggcgccgatatgtcgtgccatcttccttgtcgtacaactcttgtgattcactattgcgcgttagtggtatgatgtcagattcatcatcatggtccgcctttgttctggcgacaagttcgtcatcgatgcctgcctcggcagacttcgcggagcggctacctgcgtgtctttgaccacgtcttcatgctaacatatcaccgaagatacgaccattcttgcagtagatgtgagcatagaaaggttagctctgtaggtgataagagaactgtagtgagatctgtgcctccgtcggcgacattgcatagtctatgttagcgacggaattgaacgtgtatccatactcgtgtaatattcctctctctgttaatttttgcattttg

SEQ ID NO: 27265 - DNA, 422 bp, Zea mays
  unsure (1)..(422): unsure at all n locations
agcttataagtttctagatgagaagtggtcacccaagtttcgttgatgaagcaccagaagactaatcaaggaaggaatccatgtgggagttcgcaagagaaaggtttgcgtgttggcatcgatgcttcatcaataagctaggtgccaagcgaaagctagaagcctgaagatgatctttgagtagccagaatcagcgtttgcaatcggcaaccatatgcttctcaaaggccagattttgtgtaagctccgtctcctcgaagagtctgcaaagtgaagatatgtagctgaagtaaagctatacccataacccttctaagctgaatctcgaggacgagattcattttaagtggggtagatntgtagcatcccaaaaattcaaatcttggaattttctcanactcgctctaaattcaaaatgaatt

SEQ ID NO: 27266 - DNA, 444 bp, Zea mays
ctcagcttctaagggagaacacattttaggactaacaaatgttcattttgagaaagacaggatttgtagcgcatgccatgcatgaaagcaagttggtgcccatcatccacacaagaacatcatgacgaccgacaggccgcttgagctactccacatggatctattcggcccgattgcttacataagcatcagcggaagtaagtattgtcttgtaatagtggatgattattctcgcttcacttgggtattcttcttacaggaaaaatctcaaacccaagagaccttaaaaggattcttgagacgggctcaaaatgagttcggcttaaggatcaagaaaattagaagcgacaacgggacggagttcaagaactctcaaatcgaaggcttccttgaggaagagggcatcaagcatgagttctcttctccctacacacctcaacaaaa

SEQ ID NO: 27267 - DNA, 437 bp, Zea mays
  unsure (1)..(437): unsure at all n locations
agctngngttggtaattaacgacgtggattatgtttccgttcaagtccactcttcacctgcccggatcggtgatctcatcgcagtagaaatcaatcaatcaaggagcaagttgcactcgcgtattggctgcgaggggggttgtcaccttcgtcaataacaaatttaaccagaagacgtagacagccaacgactagcagtagttgagcatatatatatatatacacacatactaccgtctcgctagtcactgacgatgacggcaatgcctagctaccgcatgatctacatgtaaccatttctaccctctgctacctcctcagctcgtcaggagaatgatttacatgcaaatgtaaaaccaacctcatagaatttacatgcaaatgaccagctntaatgtcaaaccaacctcatagaatttcaacgtcgttaggcactt

SEQ ID NO: 27268 - DNA, 415 bp, Zea mays
ttcttggtgatttcaacatgattaggtcccctgaatatcgtaacaaacatggtggtgaccctattcgaatgctcaatttcaatgcggcaatcagtcaactgggcttacaagaaattccccttaaagggcaagccttcacttggtctaatatgcatcgtcaccctttgcttgaaaaactggattggtgcttttgttcacctgactggtcgtccaaatttcctgccacctctgccttttccctggccaggagtgcctcggatcatgttccctatgtggtcaacattcaatctaacgttcccataccgcccattttcagatttgagaactattggctgtagcttgaggattttcattccattttccaagcctcttgggagcaaaatctcttccagcctgaccctgcataatggctcat

SEQ ID NO: 27269 - DNA, 431 bp, Zea mays
agcttcttcccttctctggcggatatcattatctgtctggatgtactcatccattttctgaagcagcttcttcagagtctgagggggtttcctggtgaagtattgagccgtaggtcctggccgaagccctttgatcatggaatcaacgacgatttcattgggcattgtgggtgcttgtgctctcaaatgcaagaaccttcggacatacgcctggaggtattcttcatgatcttgcgtgcactaaaacaaagcttgagcactaaccggcttcgtctgaaacccttgaaaactggtaatcagcatgtccttcaacttctgccatgatgagaatgttcctggccgaatagaggagtaccacggttgtgcaacattcttgactgccatgacgaatgatctcgccatgactgtagtatttcccccatatgaagata

SEQ ID NO: 27270 - DNA, 331 bp, Zea mays
gtaacatgataacatgcattgatctaccataactattgcattctattatattaaatacgttgcaatgcacagctatatacctactatcaaatgaataacacatcccattcgtcacatggtaatatatgaaatgaacaacactcttcaacatatttcgacgacagaaaccagggcgaaacctatatatgtgcacacacattgtgtgcgggcaagctggtttatattaagaacgtatgcgttattactcacacacatttattcacatacggaatacaccgtatctcgtgtattcctgaaccgtgttggacgaaacggagaggcatatgctcat

SEQ ID NO: 27271 - DNA, 427 bp, Zea mays
agcttctccaagcaaggattgaggtcctgcctcaccggaacaacgagatcaccgtcgccggacttcgcccgcccgccaccgcgtgtagaccgagctatcaagtgagccattcttcaattcctcgcgtgcatgccttccctgatacctagtgaagctcaccgatcggtttaattgaactctaacgccctaaataggccggagtcctcgcctgcgacgagctccctcgcctgcgcacgtggaccggccaactccgactatccccaaagacgatccgcacatcggtgtgaccgtcatgacctcccctacgcgcttgaccacctcaccggagcaatctcgccgctggtaagcccctccgccctttccttcgccacgggtactgtttaattgggagaaggacctcggattacgtgtagtaaaacccaggggg

SEQ ID NO: 27272 - DNA, 366 bp, Zea mays
tttgctatcctagtcagcagcacatgggctgcccttaccttcggatgtgttcttcgaaacaataaaagcaccttcggtgaaacttcttgaaagagcaatccctcaatatatctcctgtttatagcgaaaattggagaaccgaaatcatctcttaccttcatggtaaattccttttatatgacgaaacttataacaggatgatatatgcaagagctcgtccatatgtcatgatagaatgggagttgacaaacatggagtttgtgctccgctactcaagtgtttatttataaccgaacgcttagagtgatgaaagaatacatgctgcctgtgggatctacattggatctacgccgtacttgaaaagtt

SEQ ID NO: 27273 - DNA, 401 bp, Zea mays
  unsure (1)..(401): unsure at all n locations
agcttgcaccgccgagactcgaggtcggcactgccggttgcgcttgcgccgggaaggcagctacgtgccangctgacgcgtgcgcggccggctgattcgcacaatgcacgagccgtcagcttgcgccagcgcatgcaaatgcatgcgcgccgcgcgcggtcggcccgagcatattcactggatgcgggcgtcgattccgtggcgcactccgccagccttgccccctcctccgttcaacgcctcgcgccgcgggggccggccgcctccctcgtctcgcctgcagtctactccctaaaaagaagccaatgctaagccaccaagcagagcagagcagagctgcggaaccgcaccaaggtccatcgcccgccactccaccaccggtgcttgtctattgcggggac

SEQ ID NO: 27274 - DNA, 287 bp, Zea mays
cataaatctgactcatcatatatattaacagaattcaccactttattacacacgtcatgcagtgatacaatgacaaacctccgcagtcttatcctttaccaacaaaaataccatgtttcgacaccacatttaatagacttaaaataactttgtatccatctcgacatagcatataagcactaacgagattcttcttgatagaaggcacatcgtgcatgctcttgaatggcaccgtctttcccgaagtaaacttcataatgaccgttccaacaccaagaatatgagca

SEQ ID NO: 27275 - DNA, 418 bp, Zea mays
  unsure (1)..(418): unsure at all n locations
agcttgtgaagggtcttcatccctacatgtgctaagcggcgatgccacagccagcccatgctagtcttagctattaagcatgcatctagaccgacctcctcttttgcaaaatcaactaaataaagtttgccgtctaatacacccttaaaagctagtgaaccatcacttcttctaaagacagacacatctacatttgtaaatagacaattatatcccatattgcataattgactaacagatagcaagttatatccaagagactcaactaaaaacacattagagatagagtgctcatttgaaatagcaattntacctaatccttttaccttgccttgattcccatcaccgaatattattgaatcttgggaatccttggttttgacgtaggaggtgaacattttcttctcccccgtcatat

SEQ ID NO: 27276 - DNA, 354 bp, Zea mays
gctttggataatttgtaatcattggtccatctatttttgtcttcctcaactaatgcatatagcaaaattctaaagccatatgttatcttgttcaaaatctggacatcatatacccacatggtgaaggtggctgatggctgaagctgtcatttccgaaagtgacaaagcatttgactaaagtagaattagacatgcatatatgtcattgtggttatagttggaaagtaacaagcatcattttgcctttggccaaattctaattgccatttgttgcatacattttctccataggtaactgaactttctattttttgaaagaacaacaaaacataccggtatcagtttggggatgac

SEQ ID NO: 27277 - DNA, 408 bp, Zea mays
caatgctttctaagagggagagaaatttcgtatttaattctgttattatagcttcagcttccgccagtaagccttcggttgaccgaagctcgaagtctttcttctcaataatagctgattgctcttttatcttgctctccaaatttccaattataacttcgtgctttttatcttccaagtcctgctgcattatcaaagctttgctcagcagcatactctatacacaaacaaccttcgtcagaaaacatcttcgttactaaaaataatagaagtcagagaaaagttgtttaccttaaaattggaataaaacaaactaccgacgatgtgctgtcgtcggtagtggctgatatctgtttcgagcttctggaaaccgatactctttgatagagtaccgataacctttgcacc

SEQ ID NO: 27278 - DNA, 381 bp, Zea mays
gtacggtccactgctatggtgacacatgaaggggaagagactgggacttctgatatagcccccatctcataagtgatgatgcgttccaagttgattgttcatgaataaaacgaaacagtcccaactgaagatgttgttgatgccgaatgttaaccatccactgccgaagctggcagtgaaaacgagaatggtgacaacattttaagtccaagcatacccagccatattgggtttgggaaatccataattacagctgaagatctggttgtaatgaaaaaattacgatattttggagataatgatgataagctagttcggtttgctggggaaggtgtgattctagagccgaaagatgacgaagttgtagtctttagaagcttc

SEQ ID NO: 27279 - DNA, 418 bp, Zea mays
  unsure (1)..(418): unsure at all n locations
agctttggacagtcgcttcttgatctctatgactttcctcctttnttgagataatttctacgagtgtcctccatacataggctatgctacagaaacaggatatgtacgattttttgataatgactatgtttcatttaacttaagtggttaatgagtttttttccaagagcatagcggacggtctactcttcgaattgaaagtcattagtgggtgtgtgtctgatttccactttccactttgggtgtatgcttttgtgggtagaggctgaaagtgactttcaaggaccttcattatctcaaatgtctttgaatgaataaaactcactgtggcattatgcgagcaccattccacccacgtatctctggtggagcttcattaacgatgctgctgaattccacatctctcaacactcagcaa

SEQ ID NO: 27280 - DNA, 353 bp, Zea mays
gcacctcattcatccgcacatgaacataattgacgaccgacaggccactggagctcctacatatggatctattcggcccgatcgcttacataagcatcggtgggagtaagtactgtctagttattgtggatgattattctcgcttcacttgggtattctttttacaggaaatatctctaacccaagagaccttatatggattcttgagacgggctcaaaatgagttcggcttaaggatcaagaaaataagaagcgacaacggaacggagttcaagaattctcatattgaaggcttccttgaggaggaaggcatcaagcatgagttctcttctccctacacgccacaacaaaat

SEQ ID NO: 27281 - DNA, 413 bp, Zea mays
tgggctataatttattatgacaaccaggaataaccaatggaggccctggtttacatatattggattaagcgaacatagcaatcaataattttaaaataagatttattccatacgtgaaaattgggatgttacatctaaggcctgcgcgcggcgcacgtgacctttggggtcctctctacgggagcgtggaccattcacgataggcaccgtcatgatgcgcatgacctttggggtcttgtgggagcgtggaacgtccgcgatacgcagctagactgtctgtgacatatgcaaaaagctttgtttcttacgtgaacgcgcgcggaacatacgcgatggcgtataggggtccgagaaaaccataatttacctcccggaagggactctgtccggtataagagatcttggggttcttt

SEQ ID NO: 27282 - DNA, 420 bp, Zea mays
tactcaacttagctcaatacagaaatgaaccgacttatataggatatcgcctttaagtcctcgataagttgtcctaatgttcataatacacaagataggcatgaatgttatttacataagctgcgccctatgcctatatatagatgaacagtaccaccgtactgttccgctgacttgtaatcgctcgtgcctcacgcttgtacttactccttctgtcaagccgaatgtacaaatgtaaatttatagtcattactgtttatccataataatataataaagttgaactaataatgttatatgacttttcatattgtcttttatatgtcacatgcctcttctttcattaacgtatattgcgatgatgaaggtcgtacttcgtgaccttcgtctgaagatcattatatcctataggaaataatg

SEQ ID NO: 27283 - DNA, 364 bp, Zea mays
tcatttgccctcacagtaaacatgtctcgaaaatatattccactcatgttatcaagatgactccgtttaatactcgattttccgaagactgtgtgacttggtccccaccgtcgatcttcagagtcttcacccccactttctacatcataactgtcactttcaccggtatcttcagataagccttctaaaatttctctagaaatcttctctatatttggtctcgctatcaattcaagaaagcccagattcttctcctcagaaaggctcagtttcattttagcaacaacattcttttcctgagacatctttcgaaaatgctgaaaatgtgctcttagggccaaagctaaaaaatttaaaaagatgg

SEQ ID NO: 27284 - DNA, 267 bp, Zea mays
  unsure (1)..(267): unsure at all n locations
gcttatgggctcaagcaagccccaagagcatggtatgaatgtctgcgagatttccttatcactaatggcttcaaagtcggaaaagccgatcctacactctttactaaaactattgcaaaagatttgtttgtatgccaaatttatgttgatgatatcatatttgggtctactaacaaatctacttgtgaagagtttagtaggatcatgatacaaaaaatcgagatgtgtatgatggnggaagtgaagtatttcctacgatttcaagtc

SEQ ID NO: 27285 - DNA, 441 bp, Zea mays
tatcaggtggagggaattgtccctggtgcaccggacactgtccggtggtgcaccggatgtgggggactgatatcccccgggtccactatatagataagagacctcacgataggcctgtgggcccaataattcacaaggtcatcccttcgtgggcctggggaagaacgtctagtgaagtggattgacacaagaccgaatcgacgcatgcccagacggcccgatgaatttgagtaatgatcgcaacagtgaccggacctccccatgtatgggcctcgcgtatcggaacagagcggagataggtcgactggattatatgaagatagactcagtcagttcactattacttatgcacacgttgttatcatatccacatgtaacgccccacggtcgagtatatatggcctatagggcactccctcataaagatcgatctgactactt

SEQ ID NO: 27286 - DNA, 412 bp, Zea mays
agctttacctagttgattttgcttaagaagaggccggtctagatgcatgcttaatggctaagacttgcatgggctggctgtggcatcgccgcttaacacatgtggggatgaagaatctccacacgcttctaaagggagaacatgtgataggtctaaccaatgttcatttcgaaaaagatagaccttgtgcagcttgtcaagcatggaaacaagtgggaggctctcatcacaccaaaaatgtgatgacaacatcaagacccctggagctgctacatatggacctcttcggacccgtcgcctatctgagcatatgaggaagtaagtatgggttagttattgttgatgacttttcccgcttcacttgggtgttctttctacaggataagtctgatacccaacggacccttcagcg

SEQ ID NO: 27287 - DNA, 420 bp, Zea mays
  unsure (1)..(420): unsure at all n locations
ctcaatggaccaatcaacggaagaggtctatgttgagcaacctcccggctttgaagatagtgagtaccctaaccatgtttacaaactctctaatgcgctttatgggctcatgcatgccccaagagcatggtatgaatgcctaaagagatttccttatcactaatggtttcaaagtcggaaaagccaatcctactttattcactaaaactatcgcaaatgtgttgtttgtatgccaaatttatgttgatgatatcatatttgggtctactaacaaatctacatgtgaagagtttagtaagattatggtacaaaaattcgagatgtctatgatgggggagttgaagtatttcttatgatttcaagtgaagcaactncaagagggcaccttcattatccaaacgaagtacattcaagacatac

SEQ ID NO: 27288 - DNA, 424 bp, Zea mays
  unsure (1)..(424): unsure at all n locations
agcttgtacgatgaagntgtgtgcccgcgcttgcctgtgcctgcggaggcgttgtgtactttgtctggtatattttgttatgctgtgctggtgtggttatagtcggacttgacgcggacggtttgatgttgtcgattctgctgttgttgtactagttcggctgcgccttttaggcggcctctgcgtggatagtcttcgcggtagacttcgggttttttcgcacttgtgctattccggctgcacccttgggcggcttctgcgtggatagtcttcgcgatagacttcgtgttttttcgcacttgttgtgctagtccggctgcacccttaagcgacttctgcgcggatagtcttcgcgatagacttcgtgttttttcgcacttgttgtgctaatccggctgcacccttaggcgacttctgcgcggat

SEQ ID NO: 27289 - DNA, 365 bp, Zea mays
  unsure (1)..(365): unsure at all n locations
agatgctagtgtgaagttaagacacctcctcgcgcaccacgagcgatgctgtcactccacaagtatcacctttacacaaaatccagctgaccttgacaaccaccactacaagaagcggccacagatatagatggccaaaaagcacgatgcccgtgagcccggcacgaagcccgctttttgggcccggtccgaacccggcacggtagaataagcgggcgggcttggacaagaaactatgcacggcgggctagcccggcacggtccgtttacctctaagcccgttaagcccggtttttttacactaaaacgtgcttaccggcccgcttatcccgctntntggcccgttttttcgtgctaaacgggcc

SEQ ID NO: 27290 - DNA, 437 bp, Zea mays
agcttctaagggagaacacatgatatgtttgactaacgtgcaattcgaaaaagatagaccttgtgcagcttgtcaagcaggtaaacaagtaggaggagcacaccacagcaagaatgtgatgaccacttcaagacctctggagctgctgcatatggacctcttcggacccgtcgcctatctgagcataagaggaagtaagtatggtctagttattgttgatgacttttcccgcttcacttgggtgttctttttgcaggataagtctgaaacccaagggaccctcaagcgcttcctcaagagagctcaaaatgagtttgagctcaaactgaagaagataagaagcgacaacgggtccgagttcaagaaccttcaagtggaggagttccttgatgaggaagggatcaagcacgagttctccgctccctacacaccacaac

SEQ ID NO: 27291 - DNA, 430 bp, Zea mays
  unsure (1)..(430): unsure at all n locations
agctttcaagtgcgagttctggatcatttttttctgttcttgggtcacattataaaccgagagggattggttgtagatcctaagaaggtaacagctatcttggactggaaagcaccaaatgatgttcgaggaatcaagagtttcatcagaatggccggttattatcgatgtttcattgaaggtttctccaagattgccagaccaatgacagccttgttggcgaagaaggttgagttcaagtggaccccagcatgccagaaatcctatgagacattgaaggagaagttgacaacggcaccagtactgattctgtaagatgttcacaagccattctcagtatattgtgatgcttcgtacaccagactgngatgtgtgttaatgcaggaagggagagtattgccatacttatcccgacagttgaagattcatg

SEQ ID NO: 27292 - DNA, 365 bp, Zea mays
  unsure (1)..(365): unsure at all n locations
cagcttgtcaagcaggttaacaggtgggaagctctcattatgccaaaaatgtgatgacaacatcaagacccctggagttacttcatatggaccttttcggacccgtcgcctatctaagcatatgaggaaagaagtatggtcttgttatagttgatgaattttcccgcttcacttgggtattctttntgcaggataaatctgaaacccaatggaccctctagcgcttcctaataagagcccataacgagtttgagctcaaagtgaagaagataagaagcgacaatgggtctaagttcaagaaccttcaagtggaagagtatcttgaggaggaatgaatcaagcacgagttctccgctccctacaca

SEQ ID NO: 27293 - DNA, 354 bp, Zea mays
agcttggcacaaataattcaaataatattcctcttccagcttctcatgtggggactcaatacgaaattctgaatttcagaccttgagccaaggatcaagcgtgttcaccttgatccctaactcaaatcctaatggccccattaacacaaatgtgcctaactaacccctctgtcgcatgccataaaatggcattgggacgcgagccctagacacgacaaaaccctaaatttgcctccggtttgggcaaggagacaaaccggatttccgggctccatatctctgctaccagtaggccaaatcctatgacccccacacaagatccgtatcttgtatggaggagaagaaggtttgtgc

SEQ ID NO: 27294 - DNA, 297 bp, Zea mays
tgataatggcgtggatggggaagatgaatagtaaaatggtctcttgtgttgcttgcgattggaggaacggatgtagcttgtccttatattggcgagaggggagggatactgcagattggtgcgccattcatcgcaattgcatcatgacgcttgattatggaagaaacatctacagttatgccattcatggccattcaatgagagaggaatgactaatcacgagttgatggaatcgcgagcattgctagccaagccatcgctgtctctgctgggtactaactctccgtgccacaaatg

SEQ ID NO: 27295 - DNA, 216 bp, Zea mays
acaaaagaaaagggtataaacaaatgaataaaatgttgaacaacagaacactagtacacacagcctctatagtggcggttctagagacgttttcactggcgcttttcagtgccgccagtgctaggggccagtggaaatcttcatttccactggcggttattctagaaccgccagtggaaatactattttcactggcggttttctttagcaaccgcc

SEQ ID NO: 27296 - DNA, 357 bp, Zea mays
cgcatctatgcaaggagtgggactcggattgctcctcgtccgactccgacaatgaatgactcgccgtcaccggcttcaacaaatcaaccctcttccccaacgagcgtcacacatgccttatggcaagggagaagaatgtatgtactcgcaactctacctatgcttcttcaagtgatgacgaatctagtgatgaggatgaagtagattattcatgtttgttcaagggcttagatagatctaatatagacaaaattaatgaattaattgatgccttgaatgaaaagaatatcctgttatataagcaagaagattcgttgtatgaagaacatgataagattgtagaggctcacaaatctc

SEQ ID NO: 27297 - DNA, 445 bp, Zea mays
gaagggtagtggcatgcaacagatgtccccttctctatctgttacaccataatatcgcggcgatcttgagaatgtggagcatgacactttcccttcacaatatttaagctccttcttagccatccaacttgttccttgagctctgtatttgcttgtgtgatataaatatcactagttcctgaaaattctagctctatggaagaatggcgttcttgatagcaacatttgatagcacatggtaatatagattcaatttcaacacatgtgcacatgtgaagtcggtatgatttcaaattacttaacacaacctcatgagccatatctaacatgatttgtgaatccacaaatttattatgagagcatacgagcatatcatgttgttcttgttaagctgcatttacaatgttcagctttctaccgtgtcttgacataacatcttatttct

SEQ ID NO: 27298 - DNA, 369 bp, Zea mays
  unsure (1)..(369): unsure at all n locations
acattccgaactgccatgacgaaagatntggccatgacagctgcattgtctccatatgaagatatgttgcttcataactcatcaaaaactgcttcggatccgaatgtccatcatacatagggagctgaggtggcttgtatgatggaggccatgggatagcctgcagttctactgccaaaggagaagcatcatcaaaggtaaaggtatcatgattaaaatcatcataccatccatcctcattgaataggccttcttaatgaagctccctgtgttgaggccttcgatcttgttcgtcttgaacaagatggcggacttctttagtggctgcgacaatctgcctttgaagatcagccagtcgggccatcttct

SEQ ID NO: 27299 - DNA, 291 bp, Zea mays
ggcgctaaacacaactgattgcagggcgaacgggttcactcctttccggccttctatacagatcggaggcaatgaccccgcaagaaataaagcatgggtccccgcgtacaggtccgtcagccgtccccgacgtggacgagccaaacttcaaagatctcattgacggagaccgggtcttcgccctacaggccctattcaaataccaagcccagaccatagcatggcgcgaccacgcaatcatcccgagggagttcagcgagggggacctcgtactcgtccgaacagctcgga

SEQ ID NO: 27300 - DNA, 405 bp, Zea mays
ttaagtcacctgcagcatgcagcttgagagctcggttatatttttttatgaactgcccccgtccatcaagaccttggtgagcctgacatctccgacaacggggtcgacgacgagcgggtatttccccgggctcagcacatggtcggggtggtcggcccggtcgaaagtgatgggcttgtcggactagtctaggtagactggcgccgtcatcttcaccgagcagacctcccgacgctcttgcttgcggcgccgagtcgaggtattcgccgcatgccctccatagatcatgaagcagtcgcggacctcggggaacccccctgctgggtgatcttcattcttgtcgacggcgtgggccctagcaccctcggcgggcggactggcccatgggaaatgtcgctgcaacat

SEQ ID NO: 27301 - DNA, 432 bp, Zea mays
ttggtgtaagctcttccttcttttcttccagtgccttgaatgcaacgtgttgcacctcgggtgtggaggtgtcaccttgctccaagttgacaatgtgtttggagtctttgaccataagttcaaagctcacaaacttgccaatcacctccttgggagacattttcttatacctaggattctcagaattaattgcgcttgagtgggattacgaaaacaagagatcttataataaccttgaccatttcatggtcattccacttggtggtcccgaagttgcggacttggttcaccattgtcttgagtcggttgtacatggcctatgactcttctcctttgttaatgacaaaccgaccaagttctccctcgattgtttcccgcttggtgatcttggttacttcgtcctcttcgtgcaccgtctggaggacgttctat

SEQ ID NO: 27302 - DNA, 364 bp, Zea mays
cgacttttgcacttcaaaatttactttgtttccttagagacgactttcgagcttcgtaaatccatgaagaagatatatttcattctggtgcaggcataattattacaagaaattgaaattacttgtttctcacaaaaaataaagtggcatataagatgaaagtacatcaaaagtatgatattcttcaatttatatgcttcgattctggtacagtgctattaactgtacgagcttcggactcctcctagaagtcgcgctgctgttgggcgtgctagtgcccttctggcttgtggttccggtatgagtaggtggaatggtgggggaagtggagctggggccagaacttggaatgactgccaaacat

SEQ ID NO: 27303 - DNA, 410 bp, Zea mays
  unsure (1)..(410): unsure at all n locations
tacatatcaatcaaatatttagatgataattaaaagatctaaatattatgtaattataaaactaattatataaatcatggccaatttgggagactaatttactatggcaaatttatctataattacaacgtgtgtagtatcatgaattaattanggttaatagaattgtctcagaaattagtcttgacttattaattaggttacatttaattttcttaatcaacattcaaacatccgataaaatctaattaaaatttagaccanaagatccgaaagaatttcttattgggacaacagtggcgtgactcacttttttatccaccatagtgctcaatctatacttagcattcttttatgacacgcttaagttctatagttacatcgtcaaatggaaggagtccatcatatac

SEQ ID NO: 27304 - DNA, 429 bp, Zea mays
  unsure (1)..(429): unsure at all n locations
agcttattttagcctctcatttttttctttgagcttgtgatgtgtatcatcgnttgctcctgcagattctagctcaaaggaagatttgcttgtcgacggacaacaagcattagcacatggtaatatagtttcaatttgaatacatgtgcaagagtgaggttgttgggattttaagttttctatcacaacctcatgagcaatatttaatacgatatgatcatccataagattttcatgagagcataggagcatatcatatttttcttgaaaagctagattttcaacttttagcttttctacttggtccttaagcaaggtattcctatttactaattgagcgatacaatgtaaagcgttatcttgctcaattgaaacagtttcatacctttggaccaaatcaacatgagagcactttagctcctcatgttc

SEQ ID NO: 27305 - DNA, 420 bp, Zea mays
gacgcacatagaaatgatgatggaatgaagcacattcatgagaaaatagaagctggttaagccaactgctttataagagatgatcaaggtgttgtatgtgttaataaccgcatagttgtgcctaaaaatgatgaagtccaccgccaattttggatgaagcacatcttattcgctattctattcatcccggaagcactaatatgtatcatgatctaaaacaacattattggtggacaaagatgaagattgaaatcgcacgatatgtggcaagatgtgacacttgtagacgtgtcaaagccatacatatgaagactactggtccattacaatatctacctataccaacatggaaatgggaggatattagtatggaacttattgtgggattatccaggacagcaataggattcgactctattt

SEQ ID NO: 27306 - DNA, 408 bp, Zea mays
aatgggtattgtcttaacttgctgaaataaactaaaatggcatgctggataatgaactaaactacctgactcacaaaaatgacaaaatgccattgggagcccacttgataaggtcgaagtgatttgcttatttcttgaggaattcatctctgagggaatgagaggggtaatgcaatcatatataggaattgtttctgtaaaaagtggtaattctcacgtgatgaaatcctaattgccactttattcttatatagccactccatgacctttgacataattcctactcagtgctctagacatttgtaacatctgtctattccctggatagccagatgcatatcaacaaggtatttcaaatggaagaaaaaaggtctcttgtgggtctagaactcctgaaagcttcacttt

SEQ ID NO: 27307 - DNA, 419 bp, Zea mays
ttattttccccattacgggaggatcaagcttcgagtaagggaacaacagacagaagataaaagttcaaagaagggccatatatcaagtccaaacactaatacaatttggctctatacaagcggaatgctttttacatcacacgcggttcggttataaaaccgcctgtgatgtcccatgcggttcagtacgcctgtgatgtaatagtatcacaagcggtttttgtgtaagaccgcatatggtgctctatacttttcacatacggaccctaataaaataccgcatgtgattgtaaaaatatgaaaatacaatttaaatatgagaataattctaatgtttaacagaaatatgcatatacaatttaaatgagataatatttaatttgtacagaaatatgcaaatacaatctaaatgaattaat

SEQ ID NO: 27308 - DNA, 409 bp, Zea mays
agcttccttgcgcacaacttctgctctgttccatccttcgttctctttgtgtttcttcatacagcaattttgacttgtctgaagggttcgtgtccgaaggtacctgctcatgtattatactccagaaacattgtcaaatcacgtttttgaggacctttggaagccgaaggcccccaacagtagcccctcgcaatattaatttgttaggataataaattcagattgcgatatggacgaaggccctaagccgaaggtccaaaaaaacaccttcctcttgctagaatagcaacagtcaatgtcaagcggggccctcctattctcaatgcctcagatgtataaataagagcacaccgcaatgtcatttggtacgctttctttgccatctgctcttgcttactcatttttaact

SEQ ID NO: 27309 - DNA, 286 bp, Zea mays
ctctacgtcaccctgtggagctcctcgtgcactttatatgaactataccgtcgtggtttatccggaacatgagccgccgacgacccccgccgcttgtgctcgtggccaaggtagctccgaccacctccgacgctgacccgcacaccgacgtgaccgtcgtgacctccccgacgtcactgaccaccccgccggagctctactcccgccggtaagcctcgccgccgttatctatgccgcgggtaatgtctaatgcagccagtgagcacgggttagatatcggctatgt
